United States Patent Application Publication US 2008/0008996 A1 - sequence listing, part 9

SEQ ID NO: 55012 - DNA, 375 bp, Zea mays
aaacgatctaacaccgcgaaagggcactgtgggcatgcttcccccgagtctattaaaacgatctcggtgagctgttgcatagataccgaaggtcctcttcgtgaagcttcggtattacaaaccgacttaaagatagaatgacctcttagtccataaaggcctgagtcaatgttgtaagcttttataaggcgcatacttgtaattcctcacaggctgcgttctgtgcctataaatagtgaacaatattccgttactgttcgcagattctggtaataacaatcgcatttttcgaaatccaaccttttgccaagacagaggtatcatttgtattcaaatgactcaatatattaagtacatgtaatgtaatatgtctat

SEQ ID NO: 55013 - DNA, 309 bp, Zea mays
  unsure (1)..(309): unsure at all n locations
ctcaagcaagccccaagagcatggtatgaatgccttagagattttcttattgctaatggcttcaaagtcggaaaggccgatcctacactctttactaaaactcttgaaaatgacttgtttgtatggccaaattatgttgatgatattatatttggatctactaacgagtctacatgtgaagagtttagtaggattatgacacagaaattcgagatgtctatgatggnggagttgaagtatttcttaggattccaagtgaagcaactctaagatggcaccttcattagccaaacgaagtacactcaagac

SEQ ID NO: 55014 - DNA, 469 bp, Zea mays
tgaagccatggtatgtagcataggctaataatatgccaattgtctcattctctactaccggtgcatatgttgcaccaaaatccacaccttcgacttgtgaataccccttggccatgagtctagctttgttccttgtcaccacaccatgctcgccttgcttgttgcggaagatccatttgggttctacaacattctggttatgacgtggaactaaatgccataccttattcctactgaagctgctgagctcctcttgcatctgcatcacgcaatccaaccttggagtgcttctttaccctgtgtggctcatacaggaacaaaagagtatgctcacaagatggctacacatatcatggttacccttataatgtcccgggatgggccacgtgtgatctctgatagttgtggactctggtggggtgctggtctcacctcctgctgatattgcactctcctgacattgcgctct

SEQ ID NO: 55015 - DNA, 370 bp, Zea mays
  unsure (1)..(370): unsure at all n locations
gcacttttccttttgaatggtctcccaatgtgattttatcttgtccatcaacattctcatcaagtgaggtgaacatcccggggttgcctgtcatatgttgtgtgcatccactgtcaataacccaatggctcccaccgatcttgtagttcacctacatccagagacaaatcaagcttgagttttgagggccctatattgcataggaccagtgactctctcaatcaaggactttgcaacccagatttgtctaagtctactcttgtttggtggacctaggaatgttactttgacctttccatttgcaacctttcttagaacataatgagcattgaaagcaaatggtcttgagtgcttangcaaaggagttggt

SEQ ID NO: 55016 - DNA, 391 bp, Zea mays
  unsure (1)..(391): unsure at all n locations
tcgtgataatatttnacgaagctacattccgaagaccaatattgtatctccttgtgacttagcatgttttccctttctcaaagcattctctcgaagatctatattgtgtccccttcttgtgccatatgcagcatgatgtatgatgcctatgctatgcgaaatgatgtgatgatgttatgctatgtgaaatgcgatttattccgaagatacacgtacatccccgcaataaaacacataatctttntaaatcaacattgacttttcgctgtaagctctccttaagagcttcttcgccttttacttcagcggaatcagcgtttatgtttcgctggaagcctcccttaggagcttcttcgccttttactttccgcggtattcgcattgacttttc

SEQ ID NO: 55017 - DNA, 422 bp, Zea mays
  unsure (1)..(422): unsure at all n locations
cttctaaattcttttttaagaaaggatctttctacttactgcccagctattaaggcttaagggatctatgtattctaatagcatactgccaaatcatcttaaccaaaactgtaacagggaatgtagagattgcanagnttcagtaccttcaaagcagatactcgacgaggaaccaaggaacccccaatctggatcagcccatcagaagtgaatagcgtgactctgtcttcaggcacccattgaatgtctgctaggacacacagatcgggaacttttagacggtgtggaaactgtgcgcangaggggaaaagggaacactttccanaggcgaactaaaataaaatctcccaaattgtggtcccattacccagcatcattagctttccgcaaagcagaaagcaagcaatcgtgcatcaatcact

SEQ ID NO: 55018 - DNA, 464 bp, Zea mays
taaacagatcaaggccagatagattcacgccacggaacctgtctcttttctttgtatgcacctgatcacgtcctttcgtgtcaattcagcctccgaattgtcagcttccttccaacccaacctctcgtatatgtagtcgactaaaccctatagcagaaaccatcgcattatgaacaacagttgattgggatcaagatttgtaagaaaacgagacgcaattgagcgttagtttatatacgagcaactggtagtactctgcctttcgcagcagctgctggtagtcagactcggacagcacggcgatggcgccgtccctgagccaattgagcacgtggcggaagtggcttacgttcctgtccacgaagaccactctctctccctagacacaaaaacagaaaccactctacccatccactagacacatatgcagataccattcaagccattccgtgatgtcatagccc

SEQ ID NO: 55019 - DNA, 359 bp, Zea mays
gcttataacctcacagctggatgtttaatctatcacctgatcgatgcaaggggaggggaatggatcctttgggcatgccttattcaggtcggtgtaatcgacgcacatcctccatatcatgttttcttttagaccaacacaggattggctagccattagggttggtaatctacggataaaccccaacaggagcttgcatctcttcctgatgccttgctttttcttcgtcaaagaagcgttcatcgaatccacctcctcctgttagtcggctcctcctcttgttcgttggctcgtctcggggtccgtccttctggatgcataaccgaaagaactccctccttgcctagggtcaacacctt

SEQ ID NO: 55020 - DNA, 450 bp, Zea mays
  unsure (1)..(450): unsure at all n locations
cgcctgcaagcttcaaggattggagactacttatattatttatttatcgaaccataaacaaatcaatagggatgccattcttaatcaagtaaagggcaactntcacattttttcagttgccattgtaataatagtacactttcacaatctttttccaattgttatgcagaagagatttctttaccctgcccgcatggaaacatgggtgctgtgaacaattggacagagatggaggctacacaagtccaatttgaaatccattgattttgacccacataagagtcatgatgctaataataagaatgctcctgatggtgtattagctgatcagtggattgcacttatcaataattggatgacccctaaagcacacgtacattactatagtcatgataatcatttcggtatttattggatgaaccatctaatttactgttgctcctatatact

SEQ ID NO: 55021 - DNA, 398 bp, Zea mays
gacacaagaaactcagcttctgatcctcctgactcacgtcgctgttgatattctgtctcccttctcgctggcttcgagaataagtcagctgtactcggggcgagggtgggagtactggccactaagcctgaaagtgtctctccgaagcaaccaaagctgcgggatgattgcccacatactctgtatgttgggagagtggcacgaagcagcgggcaaaatctactgtggctgactttgccgagcttctggcatctgcgaacttgcttgtgcttccgaatcacaaattggcacattattgtaatatggccttcgtcctcaccacagaataagtaatatatcttcctggcgcgtcccctaatcttgcttcgaagcccctggcgcgtctgcctcttagagct

SEQ ID NO: 55022 - DNA, 339 bp, Zea mays
  unsure (1)..(339): unsure at all n locations
gctttattccagtgcacccaggaccactaagtatatcttcaggcgtatgtccaaagggtcctgcgtctgatggcacangcaccaacagtacccaatgaaattgtcattgaggccatgatcaaggggcttcggccgggaccttcagctcagtactttgcagaaagccttctcaaactttggaaaagctgctccagaagatggacgagtatattcgagctgacaatgattttcgccaaagaagggaggaagcattcatgttctctgaaatgaccaggggcttcggaggaagattccatccgaagcacgtcaggtcaatttacaattctattcaaagtgatg

SEQ ID NO: 55023 - DNA, 152 bp, Zea mays
  unsure (1)..(152): unsure at all n locations
ttagatactacacttaatactcgaacctgnacatgcacccaggctatggccatttcttattatggaacaacaaggccgaccgatgcatcacataaagatataagacctcataggagtcgaaccactcctccgaggcctcaggggctacaccc

SEQ ID NO: 55024 - DNA, 305 bp, Zea mays
acagaaataaacagtttttttttgtataaaaagggagtatcatcgcggctgtcccttgctaaggcttatcaaccgaagttaaataatgaagactcatgcagtctggtgatctacatggatctagcttgttggaaagttttgtcaaggtttatggcaaagagttcgagccgattagtcaaatgcaagtgtcaaatggcaaaataaaaacacttgtttaataataaacaacccatggcgtgaaagtgggttgattgtagtcttacacacacaggaataaattgggggggagggtatttcaaggatga

SEQ ID NO: 55025 - DNA, 429 bp, Zea mays
  unsure (1)..(429): unsure at all n locations
gctatgaagatcttcacttcaacatgtgctagacctgtatttcatagccctcccatgttagtcttagcaattaagcaagtgtctagttcatctctatccaaaatctaccaagtatagctgatccttttacactcccttagatgctattgaatcatcacttcttctaacaacagtgacacctacatcagtgaagagacagttgtcacccactttgcataactgatatacggaaagctaaattgaatctaataaacctaccagaacaacattggaaatagagtggccaggagatatagcaatgttaccaagatctcggaccaaaccttgatctccatgcgcgaatgtgatagctcgttggggatctctggttttctcgtaggatgagaacatcttcttctcccagtcatgtggtntgtgcttcgctgtcga

SEQ ID NO: 55026 - DNA, 442 bp, Zea mays
  unsure (1)..(442): unsure at all n locations
gcgagctngtaaacaatatcaggctataaagtcgtttgtgtctttacaagcatcatagatagcttggcgtggactttcaaaattttgaagttgtcctctcccttcacattttcagtgtatcgattcaattgaacatggaccttgctcgagaattttctttataattactagcagctctttgcaaaagaaagctttcaaatcaatggcagatcatttctttctcttcgtatttgagacctagaacataacaaatttacttagaagtgtttataatacatgctgaaattaatttagaaagatatacatagctcggaaataacaaacattttctcgaaacagagaaaacaacatactatttgtcgaaacacagaacaaatagcgtctatagacattagacaaggctttattcctacattcattggagtgtctctgctatagcaaa

SEQ ID NO: 55027 - DNA, 383 bp, Zea mays
accggataaaaatccggtactggatggtgctaatgctaaggccgccatactttacccccagctcatcgccggttggatgacctcgtcgctgataagccaccgccgttgcacaccacgtgtctcagcacgaaactctcttgcagtgactcattagttgcatgtctggcgatcaccggagccactgccacggtgaaagttactttttcctccgcaccgagctctccggccgctcacatccctcgaccaaattcttcaccgtcctttgatgtgcctataaattgagggctaggtcagttgcgccatgtaattgccgagctatagcacccgttcccaccctcgattatccaccagcacgcgtgaatttccagttctccccaaatcga

SEQ ID NO: 55028 - DNA, 442 bp, Zea mays
catgcatatcattggatcctgacctcatatctgttagtgcaatagagctacaattgtatggatgatgccatcatacatcaagacaatatgaatacttttcttataccatatggcgaaataacagacacaccgcttattgctgccaggctccttgaagacatcattgggctccttgaaaacatcattggtgttcacatagctgcccacttccacactgcaaaataaggggaaaatcaattagcagttccagctggaaatgaaccttctctttcctatttgctactacctaagttcaaccaaataacatgtaaggcattgagctctgcccatatggggtagactgcattcagtaataaaaaaaggcagcatacaacagaatcactgcacaaagttgattctaaaagtgatggaagaacactacagtgataattctcattgagta

SEQ ID NO: 55029 - DNA, 436 bp, Zea mays
  unsure (1)..(436): unsure at all n locations
gcttctaaagggagagcacattttaggattaatttatgttcattntgagaaagacaggattggtagcacatgccatgcagggaagcaagttggtacccatcatccacacaagaacatcatgacgaccgacaggccacttgagctactccacatggatctattcggcccgattgcttacataagcatcggcgggagtaagtattgtcttgtaatagtggatgattattctcgcttcacttgggtattctttttacaggaaaaatctcacacccaagagaccttaaaaggattcttgagacgggctcaaaatgagtttggcttaaggatcaagaaaataagaagcgacaacgggacggagttcaagaactctcaaatcgaaggcttccttgaggaggagggcatcaagcatgagttctccctctcctacacgccacaa

SEQ ID NO: 55030 - DNA, 398 bp, Zea mays
  unsure (1)..(398): unsure at all n locations
ggatatatatatatcttgtacatagcttattatgacatgttattgtatcgtcatcttccatcccatcgctagcattaatattattcaactcttctcctggacaaaaaacatgtacttatgcataatttatgttaccaatagtataacactaaaacatctgcaatattattaccctcgtcttgctcattatcactaacatctgttgactcattacatccaatatctagctccaatcggcttagaacgacatcgagctcattcaacacatccatcgccttatcggaccctgcttttacatacacgcctgacgaactactttcatagtttncgttaacaacattatctgcctgtatgatttaataactccatcgtccccccctgaagctcttatcaattct

SEQ ID NO: 55031 - DNA, 452 bp, Zea mays
acatagctcatttgaatacctttgatctatctctttatatgctatgactaatgtgttttcaagtctatttcaaaccaagtcataggtatattgaaagggaattggagtcttcggcgaagacaaaggcttccactccgtaactcatgcttcgccatcactccgagcaactctctatttcttggggagaaatgagcatcatagaaaagggattcatccttgggggagagagtaaaagctcaaaagcaaaaggaccggacttcatctttggtataatcttaactcgttacttatgaccaaaggggaagaaattacttcgagggctctaatgattccgttcttgacgattcatgccaaaaagggggagaaatgagcccaaagcaaaaggaccgcaccaccaccaccaaattcataaacttagtgcttgtcaaaagtctttatcatttgatatccta

SEQ ID NO: 55032 - DNA, 361 bp, Zea mays
gctgggagctcaaagttcttcttctcaatagcaactgattgctcctttattttgctttctaaattttcaattataacttcgtgtttcttgtcttcaaaatcttgttgcattttcaaggctttgctcaacagcatactctgcacgaaaacaaccttcgttagacatgttttcattattaaaaacaataaaagttaagggaaaagtagttcaccctgaaattggaataaaataaactaccaacgatatgttgtcgtccgtagcggctgatgtccgtttccagcttcggaaaaccgatactctttgatagagtaccaatgatcttagctccagtttggtctcggatacagttcacattttcatc

SEQ ID NO: 55033 - DNA, 377 bp, Zea mays
ctatgcttctgtgtgaagatattgcacaacagaaggcattgctgggttctcacctatttgaagagcaagagaaaaccttgataaagtttttattcaacaacaaagatgtgtttgcttggtcaaccaatgatctttgcggtgtcaacagagatgtcattgagcattcactcaatgtcaacccgtctttcatgccaagaaaacagaggcttctgaaaatgtccgatgacaaaactgaaggtgctcgaaacgaagtgaagagacttcttattgttggtgttatcagagaggtcaaatacccagagtggctatccaacaactgtatggtaaagaaggcatatggtaaatggagaatgtgcattgattttacagatcttaac

SEQ ID NO: 55034 - DNA, 373 bp, Zea mays
catcaagggaatcttacatctagactaagttacaagtcatcctgcattggaatgatatgtctaaactggtgttaattcggtttcaatgcttatccatacctcatgcgcatgaacatgtattcggatgacaagttcatgtccctaggaacacgaatgatctaacactatcaaccaacaatgatgtgtcaattttagatgtggagaacgatgatgaaggcctatatgaacatgcaaagtaccctatttcagagctggagtgtgatacaatgttgaaagctttggtaatatgcatgctatgttccttgtccctttatatgcatagatatataagataatagacttcgtgagtatgtattttcatagagaatgtatt

SEQ ID NO: 55035 - DNA, 362 bp, Zea mays
cgcagcttgtgcagcacggatacaagtgggaagctctcatcacaccatacatgtgatgacaacatatggatgcctggagctgcttcatttggacctcttcggacacgccgcctatctgatcaccggaggacgttagatgagctaatattggtgatgactgttcccgctgtaatcgggtgttcttctcgcacgataagtctgatgcccatgggaccctcaaacgcctgctaatgagagctcaaaatgagtttgaactcaatgcgaataagatatcgagcgacaacgggtccgagttcaagaaccttgaagtggatgacgtccttgaggaggaagggatcaacacgatgtgctcgctcctacac

SEQ ID NO: 55036 - DNA, 458 bp, Zea mays
  unsure (1)..(458): unsure at all n locations
agcttctcttggacaagtgctgcacttaccgctgagtgcgaagctgccacatataacaacagaagagcccctggcgttggtggagttagtgttgttaggtctatcaaatattgcttcaactcttcgaaggctctctgctagactggtccccattgaaaaacttcggctgacttcagcacttcgaagaatggtaactttctctctgctgatctagatataaatctgttgagagatgtcagtcttcctgtcaatctttgagcccccttctttgtacttggtggttccattcgaaggatagcttcgattttatttggattagcctcaatcccttttgttgaaactaagcagccaagaaatttccctttcttcactccgaagacacanttttctggattcaactntaaaccagcctgtctaaaattagcgaaggtctcctgcagatcagtaatgtgattttc

SEQ ID NO: 55037 - DNA, 454 bp, Zea mays
  unsure (1)..(454): unsure at all n locations
tagcaagtgcgagttctggatcagcgaagatctgttgttgtgtcttattataaaccgagatgtactagctatggatccaaagaaagtagtatcgattctggactgaaaagcaccgaaagatgtccgaggaaccaagagtttcattggaatggccggttactatcgacgtttcattgaaggtttctccaagattgccaggccaatgacagccttgatggcaaagaaggttgagttcaagtggatcccaacatgccaagagtcatttgagatgttgaagcagaagttgacaacaacaccgatattggttctgccagatgttcacaagccgttctcagtatattgtgatgcttcgtacaccggactgggatgtgtgttaatgcatganagaaaagtagtggcgtactcgccccgaaagttgaaagttcatgagaagaattaccccactcatgatctg

SEQ ID NO: 55038 - DNA, 415 bp, Zea mays
  unsure (1)..(415): unsure at all n locations
gagcttgattntagttgcacaaataacattgcctagtactaagccttgcttctaagtctccggaagctaaaagcaatgggaatcagaagggctatactcaaaactgattcccaggttgtttcgggtcatattgacaagagttgcaaggctaaagatccgaagcttgaaaaatatctggatatggttcgaagagttgaagcttccttcgaaagattttctgtcaaaaataaccctcgaggacaaaatgagcatgctgatttgttagctaagtcagcagcacaggggctgcccttaccttcggatgtgttcttcgaaacaataaaagcaccttcggtggaacttcttgaaagggcagtcctcagtatatctcctgtttatagcgaagaatggagaactgagatcatctcttatcttc

SEQ ID NO: 55039 - DNA, 461 bp, Zea mays
  unsure (1)..(461): unsure at all n locations
tagtgggttctttattcttaaatcaacttgatgttcatgctcaattntggttcacataagatgatggttcttgggttagcacttgagagaaaccctagttgacactggggtgtcacagccttcccccctcaaaggaatctcgtcccgagattcgggccagagtcctcccggggtgaagcgaagggtgagacttataggaagtgggtgattattgttattattanggcaaactgctcttcgaatgtcattctctttgcaacttcagaaggaagtcctttctaaattttgtttcatgcttacttcattctgatttaagatcatatttttgaaatttagatttgaagggcacgacgaggggttgggtgtgattacgtaccgacttccttatgtaggcaatcggcgaagttggatttcaagaattcctcaatctcccaagtagcttcttcctctgagtgattact

SEQ ID NO: 55040 - DNA, 276 bp, Zea mays
ggtgcatcacttcgctatctagcattttttttaatacacccctcagagttgtcatgtgtagcccgcctttacaaagtctttttttgatggacgggcacacatatggtaaaaagaaaaaagtctacaagatggggatctatttgcgcatggctcacaagcttacgatctaacacagaccgcacattcgtacaggatctttccactcgccaatctatggaagaacaaaaaaagtaaccattcctgatatattttacagatagttgtagaaattctctt

SEQ ID NO: 55041 - DNA, 410 bp, Zea mays
  unsure (1)..(410): unsure at all n locations
atagaaacaagagctcgaccatatgtctttttatatagggaataatacaagcggggggcctgttccccgttactcaagcgtttatctaaagccgaatgcatataattgatgaaagaaanacacacacgcctgtgtggatctcacaatggatctaagcctttgctcggaaaaatttgtctcaaagatattataggccaaaaacagcttctgatgcagcggatttaattcaaaagtgtgaaggtttcacaaatgtgcaagagatcaaatacaaccttcgtctttaactcaattaatacaacccacttggctgttgcaaagatggggccttgatttgctggtccattaccaccaccacatgggaacttaagatatgttgtagcggcagcggaatacttttctaagtggattga

SEQ ID NO: 55042 - DNA, 401 bp, Zea mays
agtcgtgcctaatgggatgcatttctctacgaagctacaaaagtcgttcccaagggaatgcagagcttacagcgaaaagtcaacgctaataccgccgaaatataaggcgaagcgcgaaaagtcaacgcgatacagccgaaatagaaggcgaagaagttcaaaagacgttcctaaggggatgcagaacttacagcgaaaagtcagcgctgatacaccgaaaaataagcggtgaagccgaaaaataaacggcaaagagacttcggtcattcccaaaggaatgaaagctatggttgtggcttcgtatgtgtgtggttggacattcatttgcatgacacattacatcatacatttgcattcataaacattcatttagacatacataggatcatcatcataacata

SEQ ID NO: 55043 - DNA, 431 bp, Zea mays
  unsure (1)..(431): unsure at all n locations
tctaaagggagaacacgtgatatgttcgactaacgtgctattctaaaaagatagaccttgtgcagcttgtcaagcaagtaaacaagtgggaggagcacatcacagcaagaatgtgatgaccacctcaagacccctagagctgctgcatatggatctcttcggacccgtcgcctatctgagcatangaggaagtaagtatggtctagttattgttgatgacttttcccgcttcacttgggtgttctttttgcaggataagtctgaaacccaagggaccctcaagcgcttccttatgagagctcaaaatgagtttgagctcaaagtgaagaagataaggagcgacaacgggtccgagttcaagaaccttcaagtggaggagttcctagaggangaanggatcaagcacgagttctccgctccctacacaccac

SEQ ID NO: 55044 - DNA, 373 bp, Zea mays
gaactttactggaacactaccccacttaaaatgaatgaggggagaactcttggatcttgggagattgaactccttgaagtacctcataactagggagttacaaggccttcttctgctattgctgcttgagcaggctgctgagaaaagactgacacaaggttgattctaggagaacattattcttatgtactattactatcttcttttatcttctcacttttcactgcctctctctttgtctctgctcttacgaccggaggagtctatcgatgagtattaccatcatactgaggaggaaaccaaagactatgaaccatgtacaacagtcttcaacccaagaatcaccaagcattgagatcttaagggcgatgga

SEQ ID NO: 55045 - DNA, 325 bp, Zea mays
gcaccagagaggcggaaaaagagaaggtctgacagaccaaatgcgagacaacactagagcctgagcagctcattaggacctctaggacaccacgcctatggacacacgaggaagtgagagaacacaaatcgggaagactgtaccgtgaaacgggggtcttccgcagcgaaaccaatgccaggggaccctaacgccggcaacgaaaccagatgagtcgacccaaggataaaaacgaggaaaaggacgacccaaaagtcaagggcgaccccgagagagaggttcaaaaactcaacccacgacccaaacatgcgggggaaagaaacag

SEQ ID NO: 55046 - DNA, 316 bp, Zea mays
gcctgccgtgcagggaaactagttggagcccatcatccacaccagaacattatgacgaccgtcaggccgactgagctccaccacatagatctatgcggccccatcgcctacactaacagcgagcgggagtaaatattgccctagaatagtagctgattatacacgctacacttggggattccttgcacaggaaaaaccttgtacccgagagaccctaccaggagtctggagacaggctcataaggagttcccccatacgatcaagagaacaagaagcgacaacagatcggagttcaagaactctcaaaacggaagc

SEQ ID NO: 55047 - DNA, 415 bp, Zea mays
  unsure (1)..(415): unsure at all n locations
aatgctctgtctacataaaacatacaactattctgtatatgaacacctacctgaactacctgtggaagacgaaaaagagatgccgcatatgaatgaagaaacaccgtgggaatatttttttccaataggcacataagcatcgncgcctccttctctagttgcttcatcatatctcttctaattgttagcacagagctatctgtagtctgtagaaatagctaactttagctgacgctttccacacatcatggctaatgtatgcacgaaacaatactagcatgagtctttccataattatgtggaagtcatggctcttcaaccccctcatcttcattgtcttcaaagccatagatcttcttaaaccagcagcataaccaccgaggaatttgagatgtttcatccacctcataacttc

SEQ ID NO: 55048 - DNA, 264 bp, Zea mays
aaaaacgcgccgaggctcgataacacgccaccggcattaacgcaccagcaccgggcaaccagaccgaaccactactatggcgaagcttagggcggaagcaagaggaacagagggagactagacagtcaagaattgcggccaggatacaaataaaatgatttgggaaagaggaagatcccaagaagaggagcgacactgctgcaacagtgcaagtgcatcgtacccccatgcgagacccgttgaaatgcgcggcacctcgagccg

SEQ ID NO: 55049 - DNA, 397 bp, Zea mays
agcttcggcgaccaaatgatgcatctcttctagttctacaaagatgaagatcctgagcatttgtttggtgaaggcaagtgtcctctgacctattatgtcccatttactttataattcatcaacccgcataccatgatcaacctaaggattgactagctttgtatttaccttgtccttgattaccttttgggttattatggatagcttcatgctattgctttactgtaatcaatgaacatgatgtgaacatttatgatacgatgttgtctctatgattatgatgatggactggtgatactttaaggggctcgagcggtttctctagtgcctctccgtaaggacctgttcgttggatgacccgcccgcgaaacagtgcaaccatgagggtagaatggga

SEQ ID NO: 55050 - DNA, 464 bp, Zea mays
tgtgaaggttcttcatccccacatgtgctaaatggctatgtcacaaccagcccatgctagtcttagcaattaagcatgcatctagaccgggctcctcttttgcaaaatcaactaagtaaagggtgccgtctaatacacccttaaaagctagtgaaccatcactgtttataaaaacagacacatctacatttgtgaatagacaattatatcccatattgcataattgactaacagataacaaattatatccaagaggctgaactaaaaacacattagatatagagtgctctgatgaaatagcaattttacctaaccctcttaccttgccttgattcccatcaccgaatactattgaatcttgggaaccttgtttttgacgtatgaggtgaacatactcttctcccccgcatatgggttgtgcatccgctgtcgggaatacaacttgatcccccggatgcataaac

SEQ ID NO: 55051 - DNA, 395 bp, Zea mays
agcttctggacgacctcctccacgtcgcgctcattggccacggccgccatcggtatgggaatcggagctagggtttcggctgggaggccgcggcggggggcgagcgcatcatggaagccgcgcggcgagaggcggaggggacgaggcccgaggggtttgtgggggcttttgggaacgtgtggagaaactaccgagaaaaggcatgacgaaactaccaaatataataacctactatatgagtgtccatgcgttgtaacgaaaatatataataacatgataacttatatataaaatatgtcttatattattataaaaaaatgtttcataatccctctgtttagccaagtccttttttatggaaagacaaaaccgacggtgaattacctcctgagaag

SEQ ID NO: 55052 - DNA, 334 bp, Zea mays
ggtacactgtttttacattgtattaagctttagccttttatgctacactgtgtaaaaaacaagctttatacagttaggctaatctatacacattgtaaagcttgtttttttgacaatacagttcaaattcttagaacagtgtggtcccaaagtttaatacaattctgacaatacagtgttgggtacactgttttgaggctaatctgtcaagcttaaataccatattcttagatagctttgtagagtacattattttagtccaaatttgtatttactaaggtatgtaacatgtgtacaatctgtcaagcttgtttagtccaaatttgtgtttact

SEQ ID NO: 55053 - DNA, 406 bp, Zea mays
  unsure (1)..(406): unsure at all n locations
acatcnagcaagagtgggcaggccgagcgctcgccggagaagcgcgtcaacgggcccgggacgtccagtgccgtatcgttgatgatgccaaggcaaggctgcccctggcctctagcggggtcggccagaatctggctgcagcggcaatactactccgagcaatgccggagccatccaccaccgagggacggcgtatccagggagaactcaagaatctcctgcaggatgccgcggtccgacgggccgagagctctgcctcccgaaagcaagggtgccccccggagcatcgtgcaacgacttcccggctcatgcgggaggcctcggttcacaccgggcgcacgcgggacgcgattcctgcagccctggatcgcctcggaacgagcaccaccgcgcgacgtcgggccgc

SEQ ID NO: 55054 - DNA, 488 bp, Zea mays
  unsure (1)..(488): unsure at all n locations
ctatcacggaccttagaaactcaagctggtcattntattgctaactgtcccgacaatgatagtgaccatgaacacgggagcaagaaggaaaagaagaagcattacaagaaggccaagggcgaggcacatatcggaaaggagtgggattcggattgctcctcctccgactccgacaatgaaggactcgccgccactgccttcaacaagtcatccctcttccccaacgagcgtcacacatgccttatggcaagggagaagaaggtatgtaatcaaaacaatgtcacttatgattcctccagtgatgatgagtctagtgatgatgaaatagattactctagtttgttcaagggattggatagaactaaagtagataaaattaatgaattgattgatgccttgaatgaaaaagatagactcttagaanaacaagaggacctctcgtatgaagagcatgancaaattgtagaggcacanaaatcttatgcttt

SEQ ID NO: 55055 - DNA, 440 bp, Zea mays
  unsure (1)..(440): unsure at all n locations
atctgacgcgaatccactgtttttcattgtgcacaagcttgcgcagaaattgacacgaatcttgtagccggcggcaggcctaacaccggacagcgccggcacaagctagtctaacagaacaggtgttcgatgacgcataatcttcaaacctagaaccggcacaaatcaagaaccttagaactggaacataaggaataaaaaaaaggaaaggtagggagggtgatgcgactaccggtgagaagatagccactgaatcgaatgggagagtgggagaccactatgtcgatgtcgttgttggatttggccagaggcggnggagccgcacggaacgttgggaggcgagggagccacgcggaacggatgttgcgcgagggagggccagatctgtgcagcggcagcagccaccgctcgtctatgcagtagccgcagccccgccgtcg

SEQ ID NO: 55056 - DNA, 390 bp, Zea mays
gatttacggagtggaagcctttgtctttttcgaatactccaattccctttcaatatacctatgactagggttgaaataaactcgaaaacacattggtcatagcatataaaagagatatgatccaaagtatgagctatgtgtgcaatctaacaaataaaggtgcgagaatcaagaatattgagctcatgcctaagtttggtaaaagtttgttcatcaagaggcttggtaaagatatcggctaattgatctttaatgttaatgtaagaaatctcgatatcccccttttgttggtgatccctatgaaaatgataccgaatggctatgtgtttattgcggctatgctcgacaggattgtcggccatcttgattgcactctcattatcacatatc

SEQ ID NO: 55057 - DNA, 379 bp, Zea mays
ctcgacggtgctcatggtgaaatataataaatcaagtatgtacccgatcaatgtctgcccacaatagatggaggttctctctagaacattcaactgtgagacaggattaatgcctttcacctaccttggtgtccctctgggcttgtcaaaacccagaatccgccattttttaccacttatccaaaggattgaaaggagactgtcttgctcatctgctctcctctctcaagctggaagattggagttggttaactcagttctctcagctctcccgactcttcttatgtgcacgcttaaaatacatgccgccacagtcaagaatatagacgcttacaggaagcactacctttggagaggatacgatgtgaactcagaaaaa

SEQ ID NO: 55058 - DNA, 447 bp, Zea mays
  unsure (1)..(447): unsure at all n locations
gctttgtgcttcggaggagaagagactaccccattaccggagaaagatgaaattggtattttcaagagctttttaaaggctggattaagattccccctacatgggatcattggagaggtgctgaagaggttcggtatctattttcatcagctgacccctaacgctatcgttaggcttattgtttatatctgggcgctccgaagccaagcagtggaaccatttgcggacagcttctgccgggttcacgagctacattatcaaacaaaggctagaaaagatggattgcacgataattttggttgctataactntgcctatcggaaaactaccaagttccctgtaattagctaccgaagcaagtgggcagcaggctggaaatcagagtggttctatgtcaaggttgatgacgacaaggaaaagcttgtacaaagcccgctggaattaatc

SEQ ID NO: 55059 - DNA, 431 bp, Zea mays
  unsure (1)..(431): unsure at all n locations
tgaagccgatatttgagatggatattctgatatcatttgtttatttgttcatgattataattaattaattatggaggtgcactctgatgcaacttttataatttaattaaaaggactgtgtttctaactaatgttacttgactatcttttttatagctgcttttttcccctttgaactcatgctctttgtagttggtagacgcatccactctgaagaaagaggtagctgaaggtgttgacatcatggttgtcagggagcttactggaggtaactgaattttgataaaacacggactgtcatggttttagtttcaataccaatacaatgtttgatcgtttattctaatgaaactctatgctgcaaagagtaattggtaatttcttgtgccangcatctactttggcaaacccacgggttttggaacaaatga

SEQ ID NO: 55060 - DNA, 435 bp, Zea mays
  unsure (1)..(435): unsure at all n locations
gctcttaaagggagaacacgtgataagtccttctttttttcaatnccaaaaagatagaccttgtgcatcttgtccagcatggaaacaggtgggaggctctcatcacaccttaaatgtgatgacgacatcaagacccttggagatgctgcatatggacctgtttggacccgtcgcctatctgagcataagaggaagtaagtatgggttagttattgttgatgacttttcccgcttcacttgggtattctttttgcaggaaaagtccgaaacccaagggactctcaaacgcttcctcaagagagctcaaaatgagtttgagctcatagtgaagaagataatgagcgactacggatccgagttcaagaaccttcaagtggaggagtttcttgaagaagaatggatcaagcacgagttctccgctccctacacaccaca

SEQ ID NO: 55061 - DNA, 416 bp, Zea mays
  unsure (1)..(416): unsure at all n locations
tctctatgctgttcagaaaccgatctactacatcagtgaggttcttcatctgtacttccagcctcgccacgccatctagagccaagtcttggttgacttcatcgtggaatggacgcctaccctgagcgctcctgtgggtctggatcccgaatcggaccccacacttgcggagcccattggtccggtcttcaccgatccccactggacgcttttcttctacggatccgcccgtcatcaagttggcggagcgggagtggtcctcaccgacccaagcggagactgaagcgtccccaatcctctgggactcaaatgtgatacaatcttcaccgagccccactggacgctntttttcgttgtaagaatagggtaccctcttaaatacctatgtatccctatgttgtaaagcccanaatttg

SEQ ID NO: 55062 - DNA, 141 bp, Zea mays
tcctatcgatttaatgcctctgccatcttatgaaaaaatcaccttgatgctactaggcgtgctgagtcgatgtttaaactgcatgaaactactagagaccacatagagcgtatgaatgctatatatgagtttgctagtgat

SEQ ID NO: 55063 - DNA, 459 bp, Zea mays
  unsure (1)..(459): unsure at all n locations
ctaaaggttaatcttcacatcacatgaagattaagatatgttctacgcanaagtatggaacaaactgcttcaattggtagttgatcaatagtagatccttccaagtggcattctttcaattggtaataatatattctatggaaaggaatgtcaatatgaaggttaaattccttttggcttaaatttgtaaattaatgcatattgtgaattcactgctccatgtgcattaacttataaggaatttgatttatgcctttacgcctcataaatgatgatttgtttgccattcatatataaatatcatcattcattaaatacttccttgtactactaatacatcttttcaaagtgttttatcgactagttttaaaaggaaaagagataacacagaacgaagtctccacaaatgatgaaaagaagaatactaatgtgacaccaccacagatagtaagatctgtc

SEQ ID NO: 55064 - DNA, 436 bp, Zea mays
  unsure (1)..(436): unsure at all n locations
agcttccnctgcacgccaaggatacggagatatcgggcgccaggacacaagaagattgtctcgacaacagacattagtggctccaagcgctatattctttatgtccctggacccgcatgtcggggcccagtgcctttgtgcatgccccccttcagctataaaaggggaggcatgcgacgttacacacacacacgcaatcttaagacacactgtgggggatagatatcccctatgtccactaaaggaataaaagacctcacgaaaggcccaagggcccaataactcgtaaagtcattctttcgtgggcctgtggtggaacaaccagcaagggagaacgacatgaggccgattggtgcaaacccgaacggcccacatcgtcgagcgaataatcgcaacagagacccgattttcccgcgcgggagcccccatgcagcgg

SEQ ID NO: 55065 - DNA, 466 bp, Zea mays
  unsure (1)..(466): unsure at all n locations
tcacacaaagttctttcttttttgatgcctgacatgcatgtgatttagctttgaatntgcatccccctccttgagccaagatattcttgatctcaaccgagccattgttcgtttcaaagatgataatagtaatgaatgttttttatcttcttcttcaaccaaaattctattggcgttaagggtatttcatcctatgcaatttccagtctgtgaagtatttctttagccaatgccaactgggaccttacatgtcccacctgcttatcattccaggcaactagcctttgggctgtcttctttaattttagataaaatgtttgaaaaagggcatgtgtcatataaataattagccaatattctcaagatcatcactcaagaattgatctctaaagctcaagagatttctaggcctcaattccaaactctgctctcaaattccaagatccctcaaattcatgttctaatg

SEQ ID NO: 55066 - DNA, 239 bp, Zea mays
gatcatcttcgttcgttaatcatagcaaggagatcattcatagcatcaacattaacatctctacatctagtgcaaatagtgacatgctcaacagtagatgtagagggtgcgcaagcattcaattcttcaatcttagcaattaaactactattttcagctctaagacaagaaattgaatcattgcagatgtgaagctccttaaacaagatgtcacacttgcctacttcaagagcataaac

SEQ ID NO: 55067 - DNA, 415 bp, Zea mays
  unsure (1)..(415): unsure at all n locations
ccccccccctcttcttctggtatcccacttttaataaaaaagaggnattgtgcttcttcaacgcacttaagngacgagcatcactgcccatagatatagatccttttctattcgttaatgccatgactaagagctttcaaacgatgtcaaaccatgtctcatgataatgaaagggaatatggagctcttcgagcgaaaaatataagcttnncactcacgtaacatcataacttcggcatcacatccagcaactctctcttctttggcggagaaatgagcctctaggaacatgacttcatccttgggggagagagtaagagctcaaacgcaaaaggaccgcgattcgtctttggtataatcataactcattcatttatgaccaaagacgaggaacttacttcaagggctctaatga

SEQ ID NO: 55068 - DNA, 425 bp, Zea mays
tcttgtgcccatctcccaccaccaccaccgctagcaccttctctggtccggagccagcagccagaaggacatctacacactcagtagcagcgagattttcgggaggaatccgaagctcacacagtcaatagcactatgcccaagtacaagcacatttactaaagaatgtcctaccctgtcgcatctatgttctttacgccattttattttcttgtatgaagaacaattcatgaaggattaaattccaatttgatgtaataatattgtagtcacatcatcgagtgggatgcatccccttaacaagaatccgatgttacaaaagtcattcctaatggagcacagagtaagttccgaagctacaaaagtcattcctataggagcgcagagtaagttccgaagctacataagtcggtcctaatggagcg

SEQ ID NO: 55069 - DNA, 443 bp, Zea mays
  unsure (1)..(443): unsure at all n locations
gtttgagtggccgtgtgtatgtctgcgccttctctggcgcgagaggagttgcagctattttggagaaagcagggtgcgaacacattaaaactttggctcaagccgaagctgctttctccattgatgatacgaaagatccctcggtcgaggcaagtttaataggcggaaaatttttcactgacatttgggagaatggcggtcgagggatggctcacgaaataataaagaaaagtgaaaaagatactcacgacactagagaagcgacaaaaatagctgaaaaggctgcggagcttgagagacgaataggtattacttaacgattttttacttttgatgtttacttttgcgacttcgaaataatttacgttntctaccgcagctgaactatctcctcccncatagcccttcgagccactggccgaagcagaggcaaaagaatcatc

SEQ ID NO: 55070 - DNA, 438 bp, Zea mays
  unsure (1)..(438): unsure at all n locations
cgaagccatggtaagtagcatagacaagtaatatgcaaattgattcaagcctagctacgggtgcataagtttcaccaaattccaaaccttcgacttgtgaatatcccttggccataagtcgggctttgttccttgtcaccacaccatgctcatcttgcttgttgcggaacgcccacttggttcctacaacattntggttaggacatggaactaaatgtcatacctcattcctcgtgaagttgttgagctcttcttgcattgccaacacccaatccgaatctcttaatgcatcttccaccccgtatggctcaatagaagacacaaaagagtaatgttcacaaaaatgagcgacttgagatcgagttgttaccccttatgaatatcaccgaggatggagttcacggggtgatctctctgaattgcttggtggactcttgg

SEQ ID NO: 55071 - DNA, 406 bp, Zea mays
  unsure (1)..(406): unsure at all n locations
gcccgagctagagcacatgatctctcccaccggaatagtgcaatcgcgctcgtcggagttcgtgaacccgctggagcacgtggaccgggtaaccctctgcaccatttctcaattccttgcgcacatgggctctacatcaccccgtggagctcctcgtgcactttaattaaaccccaccgtcgtggtttggccggagcaagagccgtcgccgacctccgtcgactgcgctcgtggccagggcagctctaaccacctcagacgccgacccgcacaccgacgtgaccgccgtgaccttcccgacgtcactgaccaccccaccggagctctactgccgctggtaagcctcgccagcgtgatctttaccatggttactgtntcagccagccagggatcacaggttagattt

SEQ ID NO: 55072 - DNA, 439 bp, Zea mays
  unsure (1)..(439): unsure at all n locations
taatggccctaaaaaantgtctaattttgtaagggtaatgctctcatggntcacgatagtgaggtctacattttatatcctgcgaactatcccgaccataaaattaggaaaattcatgctaggaaacctcattctgtttctcatcatgcatttatttacaaaaatgaggcttctagttctatgcataccactcattaaaatgcctatgaagaaaattcctactacatcaaatgagcataatttttgatttaagacttttgatgcttcttatgtgctagcaaacaaatcaggcaaagtagttgccaaatatgtaggggcaaacacaagagtccaaagacttgtgtttgggtacccaacgtgcttgtgtctaatgtcaaaggacccaagaccgtttgggtacctaagaacaaggtctaaatttggtttgtaggtttatgca

SEQ ID NO: 55073 - DNA, 458 bp, Zea mays
  unsure (1)..(458): unsure at all n locations
agcttgacacatagactcattgaatacctttgatcataactcctttatatgctatgactaatgagttntcaagtttatttcaaaccaagtcataagtatattgaaaaggaattggagtcttcggcgaagacaaaggcttccactccgtaactcatacttcgccaccactccgagcaactctctcttcttcgggggagaaatgagcatcaaggaaaaggacttcatccttgggggagagagtaaaagctcaaacacaaaaggacttcgtcttttggtataatcttaactcacttatttatgaccaaaggggaagattgcacaccgagggctctaatgattccgtttttggcgattcatgccaaaaagggggagaaatgagcccatagcataaagaccgcaccaccaccaccaaattcaaaacttagtgctttccacaaagtcttatcatttggtatcct

SEQ ID NO: 55074 - DNA, 416 bp, Zea mays
ctcggagtcaaactgcgttccattatctacagtgatggtctttggtactccgaaacaacaaacaatattctgccacaaaaacttttgaatggtggccgaagttattgtggctaaaggctttgcctcaatccatttagaaaaatattgcacagccactacaacatatcttaagtttccttgggccggtggtaacggacctaacaaatcaagaccccacctttgcaatggccaaatgggttgtatcagctgagttagagacaaacgtgtgttttgatctcttgcacatttctgacaaccttcgcactcttgaactaattccgctgcatccgaagctgccttcggccaataaaacccttgacgaaaaacttttccaaggaacggcctagatacaatgtgagatccacacaagcctgcat

SEQ ID NO: 55075 - DNA, 466 bp, Zea mays
  unsure (1)..(466): unsure at all n locations
gcttgagtgatgctcttatgtcattaacaatcttgattaacacatggtctncaaggttcttatgttctccttaagttggtaccacatgtgatcacagtccctagtaccaaggtgtgctctagccatggtaacacctgaggtgttacatatggtactcatgaccccttggcagatgggtaacatgacttgtgggtacagggtacaacctctgtagagtgtaaaacgggtatactagccgagctcacggtcaagagcagctcaggactcttgcatgattaaattatggaactaaattgaatttgtcatttgcattgcatgggattatttattaattntgttctattattcttattatggggtcggatttacttgcatttagtaactggctaataaaattgaccaacttattaaaagcaatgctcagctttaacccctatttgtgatcagccttacacatcacattatt

SEQ ID NO: 55076 - DNA, 451 bp, Zea mays
  unsure (1)..(451): unsure at all n locations
tctacatgacatatgttgtatctaatcctagattaatatcattgtttatggttttaaatacctatacttagctagtttttggttctctaggtaactcaactccaaacatgctcagattttttaccatgagttactttaaagataaattatttttcacaattgtttatgatttttggacctatgattttatttctaanactattttaagccgtctaagggtacttttaaatgactaaagttttacttgttactacaaaaatccaaagactatttttaataggaactacatgattttgtgaactctacaaaattgtttggtaatttttgaattctcctacgctttctaatgaatttgacaactactagtaaaaagaanaaagaataagaagaaaacatcaattcaagtgggccaaaaccctcggctcggccacgacacagtgaaactaccccg

SEQ ID NO: 55077 - DNA, 367 bp, Zea mays
  unsure (1)..(367): unsure at all n locations
atcaactataataanaggtttgccgttctaatacatcccttaaagagctagtgaaccatcactctcttctaaagacagacacatctacatttgtaaatagacagttatatcccatatgacataattgactaacagatagcaaattatatccaagactctctactaatnatacattagagatagaatgctcattagaaattgcaattttacctaacccttttaccttgccttgattcccttcaccgaatataattgaatcttgggaatccttattctcgacgtatgaggtgaacatcttcttctcccctgtcatatgggttgtgcatccgctgtcgataatccagcttgaacccacggatgcataaac

SEQ ID NO: 55078 - DNA, 469 bp, Zea mays
  unsure (1)..(469): unsure at all n locations
tcacatgtctcgtatgattcataatcaaacgaagttganttcttatcttaatgaagcttcttcatgtgattctcacttatatgacccaaacgacagtgccacatgtatgtaggacttaaatcattatgccgaggccttttagcactaatattacagataggtgcatcatcaagatttaaaatgaataacccattcataatggatgcaaaagccacaaacatgccattcttatagatcacacaaccattgttttcactcgcaaatgaataaccatccttcatcaaacatgaaggagacataatgtttcgactcatactacgaactagataacaattatttaactccaaaataaatcctgatgggaggtggagttgcatcgttccgacagtcaacgcagcaactcttgcattattgcctacccggaaatcaacttctgctcttttcacgcttctacttcttatcattccct

SEQ ID NO: 55079 - DNA, 457 bp, Zea mays
  unsure (1)..(457): unsure at all n locations
agcttgccaatacctgtcgaagcaacagcacatgccatcgcaacagctacaaaccataccagtaacttggcctttcgcatgctggggattggatatgatcggacctttcaagatagctcaaagaggatacacccatgtattggtggcaattgacaaattcactaaatggatagagttccagcccattgcctctttaacctctgctaaagccgtggaattcatacaaagcataatattcagattcgggataccaaatagtatcatcactgacttgggatccaacttcaccagttcagaattctttgacttctgcgagcaaaaaagcattcagatcaagtatgcatctgtagcccatccgagagccaacgggcatgtngagcgagccaacggaatgatattggacgcacttataaaaagggtctttgataaaaatgaaaaattcgcaagaaaatggata

SEQ ID NO: 55080 - DNA, 462 bp, Zea mays
  unsure (1)..(462): unsure at all n locations
tgtgaaggttcttcatccncacatgtgctatgcggcgatgccactgctagcccatgctagtcttatctattaagcatgcatctagaccggcctcttcttttgcaaaatcaactaaataaagtttgccgtctaatacacccttaaaagctagtgaaccatcatttcttctaaagacagacacatctacatttgtaaatagacagttataccccatgttgcataattgactaacagatagcaaattatatccaagagactctactaaaaacacattagatatggagtgctcattataaattgcaattttacctaacccttttaccttgccttgattcccatcaccgaatataattgaatcttgggaatccttattcttgacgtatgaggtgaacatcttcttctcccccgtcatatggtttgtgcatacgctatcaataatccagcttgaaccaccggatgcat

SEQ ID NO: 55081 - DNA, 454 bp, Zea mays
  unsure (1)..(454): unsure at all n locations
tgtcctgaagcaccacttggatgtgaaaaccctattatcttcgtaaaataaaatctgcgtacaaattggtacctccacaagagcgctatatcgcctatcaagctttgcagtcatgtgcacagcttcagcatggaactgggaattctcaccaacaaaaataagtgtcctgcactgtagctgctttaagttctctgtcaagtcttttctcctgtataaagcatcgcaaaatattattatctggtttcactcatccactgactcangcaccggatgaccgtatgagttgaacatataagctttatagataaaaaagacatactcattgatagtttggataaatcgccacacattaatgcactgccgttgatttagaaactttattgaataataggacggttaaagatcatatacaaatacaccataactgataagggatgagatgtcttatcgcata

SEQ ID NO: 55082 - DNA, 452 bp, Zea mays
  unsure (1)..(452): unsure at all n locations
gcttctaaagggagaacatgagtatgactttctatgtccgnnntaagaaagacataccttgtgcagcatgtcaggcacgaaagcacgtcgaacaaatcatccaagcaagaatgtgatgacgacatcaagaccactagaacttcttcatatggatctttctggacctattgcttaccttagcatcggggggagtaagtatggtcttgtaaatgctgatgatttttcccacttcacttgggtattctttttgcaggataaaatagaaactcaaggtacattaaagcgcttcctaaagagagcccaaaatgagtttgagctcaaggtaagaaaatcaggagcgacaatggatctgagttcaagaatcttcaagtggaagaatatcttgaggaggaaggcatcaagcatgagttcttcgctccctacacacctcaacaaaatggtgtaatagagag

SEQ ID NO: 55083 - DNA, 418 bp, Zea mays
  unsure (1)..(418): unsure at all n locations
gcttaaggatactattcaactaatgtnattatatagtgataagaggccaaggtatgagaacttcctcaccttcagttgttttagtattctatccttagtgggatgtaccatagtataggttaaattccttgcaatataaaatgttcaatagtgcatataactttgacatcaactatatgtgtgcactaatttaaaagaatttagtctatcctttntgggtttcaagaatgatgattcattttccatccacatataaggattatcatttgtgaaaccctcccttgtgtttctaaagctctcttttctaagtggttaaataaggtccttccaagtgctttcaagatggattcaaaatccacggatataagagtcttggttgtttcaatcattgagtttcaatgggtctcatatcaagtat

SEQ ID NO: 55084 - DNA, 395 bp, Zea mays
gctcttcctctgtttcgacagtccagtacgtcttaaacgccatgagaaccttctctgggttgaatggtacgtcctcgtggtccatcacgcggctttcccactgcattcgcttggttattgtctggactctcgtgattgtgtcaaagatgatagtagtgccctcatggcttagactcattttttgcaagttacccatatacatacctatattcaaactacactctacaaacaatacaatatacagtgcaaaatggcgcataaagtgttgttggtgatcatatgtgtgaactattgtacattgcacctatatgaccactaaaacatcgttgtgatcattttacattgtagattgactgtttatagagtgtaggttcaatatacgtatgtgtatgagt

SEQ ID NO: 55085 - DNA, 429 bp, Zea mays
  unsure (1)..(429): unsure at all n locations
caaatcaagagaccctttctcttcgagaggcccgaagccagaagaggaaggccactaatcttacactccaggaggaagagttggaccaagaaatcagaaacatggagataatccatcagcaagtacaaaggaagaaggagaagttggcccgactggctgatcttcaaaggcaaattgacgaagccactgaagaagtacgccatcttgctcaagacgaacaagatcgaaggccgcaacatagggagtttcatcaagaaggcttgttcaacgaggatggatggtatgatgattntaatcatgatacctttacctttgatgatgcttctcccttggcagcagaactgtaagctatcccatggcccccatcatacaagccacctcagctccccatgtatgatgggcattcagatccgaagcagtttttgatga

SEQ ID NO: 55086 - DNA, 447 bp, Zea mays
taatatgcttgattcaagtgcatccttttcatttgcatgactagctatagaggttttcatattgattacttccttttctttatcctctatagttatcttgactaaagatacttccttagtcaagacatctagcatttcatctttattgagtagcaatccttgaagctctaggtttctttccttttcaaggataagcaagtcttcttgagcatcaagagttgcttttcttttatctagcttctccatcaattttatgataacattatatccattcaagccaaattccttaatcattttatttttcatagcaatttgttcatcatcatcatcattttgaaaatcattactaaataaagttaccttatctccttttgccatgaggcaagttggagtgtagaagtcgtcttgtatgttggtgaagagttgcgagcttgatgtagattggat

SEQ ID NO: 55087 - DNA, 475 bp, Zea mays
  unsure (1)..(475): unsure at all n locations
gcgatcttatagtcacctgccgcatgcaagcttggggcgccctcaggcatcntgtcttttctaagtaccaagtctcccgcttggaagcctcagagccgaacccttcaggcgtggtagcgtcgcatggactgctaataccgcgccgagtgtagttaggccatgtcccgagcctcttccaactggtccaatgagtcttctcgattggtctggttgctttggtcgtcataagcctttgtccttggagaaccgtattctaagttcgtgggtaagatggcctcggccccatagactagaaagaacagcgagaaacctgtggctcggctcggcgtcgtcctcagactccaaaccaccgagggtagttcctttatccatcgcttgccaaacttattgaggtcattgtagatcctcggctttagtccctgcaaaatcataccagtggcgcgctccaccttgccatttgtcattgagtgagcta

SEQ ID NO: 55088 - DNA, 441 bp, Zea mays
ttggaaagtgagcttgctagatatgattggacaaagggtgttgtctttcaatcactctttgatcggttgatggtgttggtcaacaaaataagagtacttgggagtgaagattggagtgactcccagatcacaagattattcatgagagcttataaagaatacgataagagtcttgccaggatgataaaggatcgtgatgactatgaggatatgacgcctcatcaattatttgcaaaaattcaacaacacgagtccgaataagcccccatctagacaagagactctcatgccttgatcacaaatgaacaagacaacctctagaagaacacagaccacacagctcagaaagtggtcgagacctcaagtgatgaagataactcaagtgatgaagacatatgtatgttcatcaaaacattcaagaaatttgttacgaagaatgac

SEQ ID NO: 55089 - DNA, 461 bp, Zea mays
  unsure (1)..(461): unsure at all n locations
agctatgaagattcttatcccaacgtgtgctttctgcgatgccagagccagcccatgttagtcttagcaattaagcaagagtcgagttcagctcaattaaaatcaactaagtatagccaaccctctaacactcccttgaatgctactgaatcatcacttcttctaaagacagtaacacctatatccgtaaaaagacaattgtagcccattttgcacaattgagaaacagaaagcaagttgtaatctaaagaatctacaagataaacattgaaaatagaatggtcaggagatatagcaattttatcaagtcctttgaccaaacctcgatttccatccccgaatgtaatagctcgttgggggtcatgagttttcactttntctcataagaggagaacatccttttctcccctgtcatgtggtttgtgcacccgctatcgattatcaaacttgagcacccggat

SEQ ID NO: 55090 - DNA, 458 bp, Zea mays
tcaggggagaagaactgcagcgtctgtgcgacaagcggtttgcccatggagcccggcggcaagcggacgctgcatcgaaggttcctacacctgtgcaccgcatacagcattaagaggagaaccataatgagcacaaaggccgcgccgccggtgagcctcatgtggtacgcgcacatcttcgagatcgggcggtatggggagaactcacgtcacgcggctctgcatgtctcgttcatgcacttcaaagctgcaacacaggatccgaaatttaaaacatcacggggctcctcagctagcaagttcagttcagtgtaaagaatatggcccggccggactctgaccgtggtttgctctatggcaacgtaaagggtgtggagactagcggtagatagacctgtacaattggtagtggttcttattccgactccagcagttcattcaaagtgtatctataaata

SEQ ID NO: 55091 - DNA, 419 bp, Zea mays
  unsure (1)..(419): unsure at all n locations
agcttctactgcatatctacaataattcttatgtctcacaagcctacctgatagtcgcctagaggggggggtgaatangagtaatctgaaattttacaactttaaacacacactacaagtggggttagcgttagaactaaaatcaagtccgggagagaggggggaaacaaatcatatgagaatcaatcgaatgaacacaatgatttattttactgaggttcggttccaaagaacctagtacccgctgagaggtcacaaagaccaggtctatttcaaccctttccctctctcatacggtcacttagaccgagtgagccttctttcttaatctcacgggtcactaagaccgcgcaaggaccaccacacacttggtgtctcttgccttgctacaaagcacttgtgagtaagaatgagaaaag

SEQ ID NO: 55092 - DNA, 431 bp, Zea mays
  unsure (1)..(431): unsure at all n locations
tacatagatatttntacctaatgattgtagtgctagacccctacacattagtatgcacaagttgcaacagaaatgcaaacacactagtagatttgggatatgacaaccgatgactcttggattgttggcaaccattgcaaagtgacgtgtctatatatttagtgctatttgtcaccctagatatgaacgttcttagttttaaaaaaaaattaaccgactgaaataagttgttaaaattggttttcatgtttattatacctaaaatagatggttttcggcaaaatattttgcgatgtattgaaggcaaacaaggacatatatatggacaaccgatggcttattacatatagtacaagtggcttgatcatattgtgtgtttgccacggtccaagatttcgagaaggatacatatagagacagacacacacgta

SEQ ID NO: 55093 - DNA, 459 bp, Zea mays
  unsure (1)..(459): unsure at all n locations
nnagcttgaaaataagttggtttgctctctttatgattacaaagggtggctagaaaaatgtgaaacttttgcaaacttaaatagtgagctatcaactaaaattgagctattagaatctagtgctccatccactgctaccgatgatagccttattaaaaagaatgaanaacttaaggctaagttagctagctcccaagaagctattgaaaatttgctagagaaaatggaaattcttagcatacacaacaatgagctaactactaagctagaaaacattggtagcaccccagcaacatctttagttgaaatacctgaaataattaagaaagatgcttctacttcctgctttgatttaattgatgattctaacccctgcaaccaagtcgttggtgagaatattgttgtagagacatgtacggatgaggttgcatagganaatgaacaattaaagcaagaagt

SEQ ID NO: 55094 - DNA, 453 bp, Zea mays
  unsure (1)..(453): unsure at all n locations
aatcttcacctaaaagaaagattacgaatgctcattgctaatgtatggaaccaaatgcttcaattggtagttgatcaatagtaattccttccaagtggcattctttcaattgacaataatatattctatggaaaggaatgtcaatatgaaggctaaatttcttttggcttaaatttgtaaattagtgcatattgtgaattcactgctccatgtgcattaacttataaggaatttaatttatgcctttaagcctcataaatgatgatttgtttgccattcatatatagatatcatcattcattaaatacttccttgtactactaataaatcttttcaaagtgttttatcgactagttttaaaaggaaaataaataacaaagaaggaagtcttcacaaatgatgaacagaagaatactaagatgacaccaccacagatagtangatctgtcaaaa

SEQ ID NO: 55095 - DNA, 420 bp, Zea mays
gcatgcgccgctgtgtacgacaagctcccacgaagccgccgcttggacgcggttcaaagcaactgcaccgcgctgtccatcgttaagcaaggggggctcatggttgtcgccaacgtcgacaactctttggttgttctggacaccacatacgacgacgacgccatcacgccatccagctcatcgtgcacctaaagcttaacctgccacgtaagtcgctactgaccggacatgaattcttggcgttgggacgatggacgttgctgacgttatgtgagtgtcctcgaacatgatgtatgtagtggagtagcgcatctggcggtgcaacggcgcagggtactacctcactgatgagtccggtgtgcacttcgattgaagcctaaccaagagtcatcggtactcgtcatgtagcgcacgttctac

SEQ ID NO: 55096 - DNA, 415 bp, Zea mays
tcggcgatggctataaaatttggcatgaaaacagagacaatagttatgaatgctgtggttacttcacacctactcgtctgtttatatagtgctgcaggtaataatgcgaaccgccagaattttaacccaagcggacacccgcttgcgctcgctgcgcggtggaccgcagggacaaacttgaaacacctatagggggggggtgaatatgtgatcctgtataacttcagaacttaagccacaaaaacttgcttagtgttaacacacgtatggccaaatggctagagaggagtcaaaacacaataaccacaagaattcaatcacagagatgacaccgtggttatcccgtggttgggccaagaacaaaacttgcctactgcacgttgtggcgtcccaacagacgagaagtgcactcaac

SEQ ID NO: 55097 - DNA, 424 bp, Zea mays
caactatagaacataccggtgacttggcccttcgcatgctgggggctatatatgatcggaccccttcagaaagctcaaagatgatacactcatgtactggtatctatcgacatattcactaaatggatagagttcaaacccattgcttctttgacctcagctaaagccgtggaattcatacaagacataatattcacgttcggaataccgaacagtatcataaccgacctgggatccaacttcacaagttcagagttctttgatgtctgcgagcaaaaaagcattcatgtcaagtatgcttctgtagcacaccccatagccaacgagcagggtgaacgagcttacgggatgatattggaggcactcatgatacacgctttcgatataaatgaaaagttcgcatgatagtggataaaggaattgc

SEQ ID NO: 55098 - DNA, 288 bp, Zea mays
aaaccatacgcacaatactgtccaaactacggcatccgtactccgtccgtcttcctgagcccctgtcgcccactgagcaatgaacgctgcccacgctcgggactgtatcgaagatctatgcacataatcaacgcgaaatacattgagttccgcaccccatttttcaacccttccagaaccgcgctattcccataatatccccaatgggtggaagacaggcaaatatatcgtatgctcgaaaatagtgcgaagcttcctgaggccatcaaacagatacaacatctctcc

SEQ ID NO: 55099 - DNA, 455 bp, Zea mays
gcttcagcacctttttccttattaagggttatgtgttttaacagggccgaagatgtaatattcaacaaatgtacctaaagtcaataaaggcacattcccccaaaagatgaatacaccaaagcagtatctttggatgcaaaatattaaaacccgcaaaaggactgatttccaagtcttcagcacaaaggtaagtatcaagtcaccttgtaaaggtgaaaaacctctgaagtcattcctaagggaatgcagagctagaaaatcttcacctagtaaaggcgaaaaagctccacagtcattcctaaaggaatgcaaagctagaaaatcatcatctaataaaggtgaaaaagcttcaaagtcgttcctaaaggaatgcagagataataaatcatcacctagtaaaggtgaataagctctgaagtcattcctataggaatgtagagctagaaaatcatcac

SEQ ID NO: 55100 - DNA, 459 bp, Zea mays
catgaagaatcttcatcccaacatgggctgagcggcggtgctctttcaacccacgtagtcttaacaattaagcaagtgtcgagttcaactctatcaaaatctaccaagtatagctgaccctgtaacactcccctatatgctactgaatcatcacttcttctaaagacagcgacacctacatcaggaaaaagacaggtgtagcccatttgacataattgagatacagaaagcagattataatctagggaatctacaagaaaaacattggaaattgaatcggcaggatatatatcaattttaaccaatcctttgaccaaaccttagtttccatccgcgaatgtgatagctcgttggcgatcctgggttttctcaaaagaagagaacactttcttctcccctgtcatgtggtgtgtgcacccgctgtcgacgatccaacttgagccaccggatgcataaact

SEQ ID NO: 55101 - DNA, 443 bp, Zea mays
  unsure (1)..(443): unsure at all n locations
gcagcttcggcatcaaagcttaatatgcacttctgaattttacaatnntcttcggaggtgtgcctgaagactttattgtctccaaaacatccagcacattaaccatcctttttcttttgggggtcactgctagacccttttggctctttgctgcttcaatttttgctgaaagacttaaaatttctgatgtctttgtttctttagccctcagttcttttatattttctgtcggcagcacttcagccaacccttcaatattcggcaggggaattggttctttaccttcggtggccgaagaggtctcaccgacaaactcaagcactatggccggntcaatatagcgtggccggtgagtaagaacctctatctttttcctcttcggcgctggctcactgggagcggctgaagcaacttcctttgatgaacaatnatttttctttctg

SEQ ID NO: 55102 - DNA, 391 bp, Zea mays
  unsure (1)..(391): unsure at all n locations
tgctatgnaaaagcttcggcagaaagaagaagtagctttttttttatgttctgctatatgaagaaaagctttggcaaaaagaggaagcggccgtctaagctttgttgtgtacgaaaagaatggaaagtgttttttcgccttcggctcaaaatactgatttcgttcacatcaaagcgactcaatcgaagggtaagaatatattacaaggtatgtccaaagttccttgaataacagttcaattgtatttacaaaacttgttacaaaagtatcctgagtttttcctatagtacatttctactgatcttattaagcttaacttcgcgacagtctggcgaataactcagcatcatttcacttcgcatcctacataatcatggatcgtgagtaaaat

SEQ ID NO: 55103 - DNA, 457 bp, Zea mays
atataaaactcagctctaccaactatatctccatcgagacgttgttatatttgcttacagactagagatcatcctatatcgagaagctaccaacttctcctttaacatgctagcatgtaactgtctgtcagccaacacttctgtcacagaactaagaggaaccctaaaaagcataggagcaacagcaaacacatggtcatagccatacaacgccttgaatggagaacaccacaaaactgtgtgctatgaagtattgtaccaaaattcagcaagggccaaccatttcttccaagtattaagtgcctcatgaatagaacaacgaagatacatttccaaacactgattcactcactctgattgcccatcaattggagggtgatatgcactagtgagagccaattcgatccccaaagcctcgaacatagatttcataacaatctattgaacactcgctcta

SEQ ID NO: 55104 - DNA, 391 bp, Zea mays
  unsure (1)..(391): unsure at all n locations
gacttaatggggggtccagagaccttactggaagataatggccagaagccctgcgacttaatgcatctgccaccacgttggcctttcctggtgataatggatttctaattcataatctttaatcagcttaagccatctcctctgcctcatgtttagttctgactgggtgaaaatatacttcaaacttttatgatctgtatatatatgacagacattccccagcagataatgacgccatattttaagggcatgaaccacaacagctaattctaagtcatgaattggataatgttcctcatgctggcacaactgtcttgaagcatatgctataactcggccctcttgcattaagacacatncgagaccactggctgatgcgtcatagtacaca

SEQ ID NO: 55105 - DNA, 425 bp, Zea mays
agtttgtggtggcttcctggcaaaatactgcgtcgtctgtcctggtcggagccctttgatcatagcctcgatgacaatctcatttagcatcgttggtgcttggggcctgagtcacaaaaacctttggacatatgcttacaagtattcctcatggtcttgcgtgcactataacaaggcttcggcagctactggcttcgtcttataaccctgaaagctggttactaacatgtccttcagcttttgccatgacgtgatcgttctcatgcaaagggaagaataccatgaatgagccatgctcctgactgccatgacgaaggatttcgccatgacagccgtgtttgcaccatatgatgatatggttgtgtaacaccctaaatccatcaattaaaagtaatcatatttagtttattaatttccaatagaaa

SEQ ID NO: 55106 - DNA, 362 bp, Zea mays
  unsure (1)..(362): unsure at all n locations
atatgttcaaaggttcctgcgtctgaaggcacatgcaccaacagtgcccaatgaaattgtcattgaggccatgattaaagggctttggtcgggaccttcaacccaatactttgccaggaagcctcctcaaactttggagaagctgctccagaagatggacgagtatattcgagctgacaatgacttccgccaaagaagggaggaagcatacaggttctctgaaatgaccaggggcttcggaggaagattccacccaaggcacgtcatgtcaattcacaactctactcagagtgatgatagagggagtcaacagcaaaggccacagtactcctcgcaagcttcngggcagcagcaaagctctt

SEQ ID NO: 55107 - DNA, 429 bp, Zea mays
  unsure (1)..(429): unsure at all n locations
actcgcttgagcgtcatggcgctactcgggggactccttttcttctccccctcgcctttaatgcgaccgggtgtgctccngatgtggatggatcatctagctcattgattctcttcgagcccctgatcatgtactcaaagctcacaaaattcccgactaccttctccggagtcattaatgcatatctaggattaccaccaatttattgaactcgagtagggttatggaaaataagtgatctaaaaataaccttaaccatcttcatggtcatcccaccttttgctctcgaggttgcacacttggttcaccaacgttttgagccggatgtacatgtcttgtggctctctccctttgtgaagccggaagcgaccgagctccccctccaacgcctcctgcctggtgatactggttagctcatcatcctcgtgc

SEQ ID NO: 55108 - DNA, 415 bp, Zea mays
acaacctacaaaccaaccttgtccttcctgctagcctcttcttgaatctcgggggcgagattttgtttaaggggttatgttttgcacaccctgaattttaaggtataaaaatttatttgctctatactcaaaattcaagtgtcaccctctctttattctcctcttttctctttttcctaaaacttggggagttaattttggtctatatatgtgttaagcctattataataaaaccccaaagaaactctgattgttgcattcatgacgctgtatagtgtttctaaaggtaaagcatatttgaacatgttaatatacctcgtagaagtttatctgtaaattctcatatttctatgaggtttgctgtttccaaaaaatatcacacctatgttttgagaccctaaaatattttagaact

SEQ ID NO: 55109 - DNA, 266 bp, Zea mays
  unsure (1)..(266): unsure at all n locations
cgcaactaatatgagtctagcaacattcaccttgtgatatatgtggatggaccacttgtatctatgacgtccaacgccccgcatatacgtcttaatgacgacgttataccagtgaatatgacccctcgtgctgctactgatatttgcaggccatgggaacctccccgtgcacgggaggcgctgccgactctttggtcgatacatgatanacagcggcaaatatgcgcaaggagaggtaggcttgtcgacggcatgcttggccctaa

SEQ ID NO: 55110 - DNA, 493 bp, Zea mays
  unsure (1)..(493): unsure at all n locations
atcctntnagtcacctgctgcatgcaagcttggccactgagccagggattgtcggtattcactacgaggccaggccaacgtcgcacaagcggaggcggaagaagaggccctgctcctggcacatgcaagcatcgagccatctccagcggcaccggccgcagcggcactcctccaccttgatgagtcgaaagcacgcgcttttctcggcgacggctccaacaaggacatgatcgaaggatggtgcctcgacaccggcgccactcatcacatgaccggccgacgggagttcttcaccgagcttgactctagcgtccgaggctccgtcaagtttggggacgcctccggcgtagagatcaagggcgccggctcagtcgtcttcaccgccgcgtctggtgagcacaggctgctcaccggagtctactacatccccgcgttgaggaactctatcatcagcttgggacagctggatgagaacggttcgcgcgtggaggtc

SEQ ID NO: 55111 - DNA, 385 bp, Zea mays
cctcctggctctgaagatagtgaataccctaaccatgtctataaactctctaaggcgctttatgggctcatgccagcccatgagcatggtatgaatgcctaagagatcttcctatttctaatgacttcacagtcggaaaagccgatcctactctctttactaaaacactcgcaaatgatttgtctgtatgccaaatttatgctgacgatgtcatatgtgggtatactaacgaatctacatgggaagagtttagtaggatcatgactcataaattcgagatgtctatgatgagggagttgaaggaattcttaagatttcaagcgaagccactccaagaagacaccttcattagccaaaccaagtacatgtaagacatactcacaaa

SEQ ID NO: 55112 - DNA, 400 bp, Zea mays
agactactatacataagaaacttgaaaaccagtattagtctcaaagacttagattatgtagtaacctccccctgaaagtgtgcatacaagttttgaatacttgtaggagtcatgcgctttgattttgagatcaagaggggcaaattatccataatccgagctttggcgcatatcatacaagatgacaccacatggaaaatagatacacttgtagaatataaacttttgaagcacagcatttatgtcatctacttaggaatgttggataagctatgtgccatgcttagttaccattttaaaccatgtaggtttgctcaagaatatgaattgaaaatgagcattcctaccatatgattgatctagtatgcatgcaactctaatgaaaaggtaatacaacatg

SEQ ID NO: 55113 - DNA, 432 bp, Zea mays
cacttcattttactcaggatcctttttatgttttgatcatctgctcactctctcccctttaatcccatggttatggtgtaatggcttaagaaagcattacggttttataatcttgtttgtgggtgaacattgtatgaaagatataattcctttcttgctatggttaattcttatcttaaccatgcctctaaactttgagtcccttcactctccattttatcataaagattgagtatgacccaatgtgcttctttggccagggctttcggtaacaccactggtgttacacccctccccccttaacggaatctcgtcccgagattgggtagggatcatctattggggtaccaagaaggtgtgtgtcggtgtgttgtaaattcctttaatcaagattctctacttaactactcttcgaatgtcattctctttgca

SEQ ID NO: 55114 - DNA, 202 bp, Zea mays
ttgacacgcaactttttgggcgggacgccacaaagcgacgtcgattaaaagtacggattgttgtccttggacgcgatgagcgattcctaagagatgatggcggcgggtttggctgcttacctcggtttacatgatggcggggacgccctagggacgtgcatattgagaccttgtttcagtgtgcgaatcactggagatcgct

SEQ ID NO: 55115 - DNA, 210 bp, Zea mays
gcgtggtcacaggcggtcgccggcgcgcggtggttctcgcacgggcgtgctctgagcgtgcccccgagtgtcagcccacgtcgaacacgtgggagctcgcttcttgcatggttcaacggcggatttgagcaccttagcgtgcgtatcttggcaaaaccactatgtacgggctctttcctgctccatatcctacacttttgctgtgagttc

SEQ ID NO: 55116 - DNA, 438 bp, Zea mays
  unsure (1)..(438): unsure at all n locations
agtggaaattactctgagtgggatgtctgtggtctcgtnatanctaatgaagcttttagaaagaatgaaaatgaatctcacgacgctcaagaaaaagccaatcgagccgaaaaagctgctgctcgagcaaggcttataagtacccttactgagggttaacttcggaatccgatttcagctttcggattaataaacattttttatgatgtagctgaacttttacccccaccggagccatacaaccccgaagctgacccggccttgaaggaagcactacatatgattaaaattgctaatgaagctgttgacgaagctgtcaacactctgctaaatgaagctgatgaaaaagtgttgaaagaagataaaaactttgcgtatttgagagttaatggttgacatggctctcgtctttgaagaaccaacacaagtttttgatgt

SEQ ID NO: 55117 - DNA, 325 bp, Zea mays
ctagccaaaaaacttggacttgggaacagcgtgggggctccattcccaatatcttgacctgtaggattaccgcattctttactgatatcgtccccaaaatgatttcttccaccaaacgcacactgtgaactgcatatactgatgtccttaacgctaatacatccgaaatgctgactggcttcttattctgaatattcagaatatcatgaaacaccacaactgtcattctgctgacaccattataaataggaatggcagacattgtgacccaaaacatccagtttcaataatctacggtataacgcgcttcgattctcgccgatac

SEQ ID NO: 55118 - DNA, 399 bp, Zea mays
  unsure (1)..(399): unsure at all n locations
ttgcgtcaagcttcataccttggctgtgtacggccctttcttttatattcatccttatgattgcctcgggggttagttggtgcaaataaacttcgaagatttttagcacctccacgacgaaactgctcatggggaatcgcaatccagctttcaaaaagcttcggtataccacaacttcattctcttcacggtgtggacaagtactttccccttcgtccgccctcacaatggacagatcccggaaataccttcccctcatattggcaagatggctttctttgatagctgatttgccgaanaccgcatgacttggtcgccaagggcgatcttctgagtcttctccaccactgtccacatcatagctgtcactatcaccagtatcctcagacaaaccttcca

SEQ ID NO: 55119 - DNA, 426 bp, Zea mays
  unsure (1)..(426): unsure at all n locations
tactcggggttattatcagccaccgtgggatcaaagctaatccagaaaagatcgaggctatcatgagaatggaagcaccacgatcacagacgaaagttcaaagacttaccggatgtatggcagctctaagcagatttatatccaggctgggagaaaaaggcttaccattttataagttactcaagaaggtggacaaatttctgtggacttcagaagcacaggaagccctagatgcattgaaaaaaattcttgacgacaccaccagtgctgaaaccaccgcgtcgagccacgccgactcaaccagctgaagatctgctgctatatatctcttgcacgactcacgtggtgagcaccgcgttggtagtcgagcgagcagaagaaggacatgcatacccagtacaacatcctgtntatttcatcagtgaa

SEQ ID NO: 55120 - DNA, 459 bp, Zea mays
gacttgctctcaaatgctatgagttaagaacaatgtttctcttaaaatgataaacgttaaagtccttcatcctacgaagcattatatccctttgagagataatgattttcggacgaagattgcgaatgacgtaccttcgtcaaagcaacatataaacaacgaaagaaacatatgggatgttaaagacaataccaacagttatttactatcatcaaatcatttttattttattattaaggaaaaatataaataatgacaagttacaaaaataccttcggcttgaaagaagttaaaagtacaagcgtgacgcaaaagcaaacttccagtcagtgtgaacagtacgggagtactgttcatctatttatatgcacgggacacagaccatgtaaaattacatccatgccctttacatttgctaataactccatagtaattcatcgaggtctagataaccttttc

SEQ ID NO: 55121 - DNA, 466 bp, Zea mays
  unsure (1)..(466): unsure at all n locations
agctggtgaagattcttcattacaacatgggcttgtctgcgatgccaaagccaacccatgttagtcttagtaattaagcaaggatcgagtttagctctattaaaatcaacttaggatagatgaccctctaatactcccttaaaagctattgaatcatcacttcttctaaagacagtgacacctatatccgtaaaaagacagttttaacccattttgcataattgaaatacagaaagcaaattgtaatctaaatagtctacaagaaaaacattggaaatggaatggtcaagtgatatagcaattttaccaagtcctttgaccaaaccttgatttccatcctcgaatgtgatagctctttggggatcttcgtttttctcgtagaaagagaacatncttttctcccctgacatgtggttggtgcatccgctatcaatgatccaacttgagcccncggatgcataaacct

SEQ ID NO: 55122 - DNA, 370 bp, Zea mays
  unsure (1)..(370): unsure at all n locations
tgcatttgtgtccctaaggaaatagtgacggaccctgtaggacttttcttgggttgggtacctaaaacccaagcctaaatttgccttgcagggttatgcatccgggggctcaagctggattatcgacagcggatgcacaaaccatatgacgggggagaagaagatgttcacctcctacgtcaagaataaggattcccaagattcaatcatattcggggatgggaaccaaggcaaggtgaaaggtttangcaagattgcaatatccaatgagcactctatctctaatgtggttttagttgagtctcttggatataatttactatctgtcagacaattatgtaatatgggatataattggctatntataaat

SEQ ID NO: 55123 - DNA, 410 bp, Zea mays
  unsure (1)..(410): unsure at all n locations
cttaaacgactgcagcatgcacttgaancggcaccaagcaaactttcattacattgggcctagaagcggtaatataaagcaaactaccaattattgaacgatatagtttctgatcaaccatagtacctccttcatctaagtctataagaccatttgttgccattggagtcttgataggcttaacattttctaaaccaaacttcttgagcatgtccttcaaagattttgattgacttataaaaattccatctttcaattgtttgatttgaaggccaagaaagaagctcaattctcctatcatagacatttcaaattcttttgacatcatttttccgaactcctcacaaaataattcattagtagatccacaaataatatcatcaacgtagatttgacaaacaaataaatct

SEQ ID NO: 55124 - DNA, 463 bp, Zea mays
tgagaaatgacaaactgcagcaagtgttaagctccataatattttgttcctaaagacgaagaaatcaacatgagctcggaaataggtaaagattcaactaatcatgttgtttgcactgaccatttctctatgtcatcaaagaacataaagagaaaagggaaaaggaggtgctttaagtgcaacaagtcaggacacctcattgcgtcgtgtccatacaccaacaagggtgaagggataaggagatgctttggatgcaatgacaagaaccacacgatcacttcttgtcctctattgacgaatcaagcatgtgcagtctccaagatgactctcaccaaggaaaatgacaaacagcaagcgtcatgtcaagttcagcgacgcttctgctacaagtgtggtgagcacggtcatctatctaacgtatgtaataaacgtgatgctcctaatcaagtaaatttgtctcaat

SEQ ID NO: 55125 - DNA, 461 bp, Zea mays
  unsure (1)..(461): unsure at all n locations
agcatgcacttccccttatggtccattttttttgtctgatagcaanaagggtcttagagtgcgaccttctgctgaataggtccgtactttggttgcttcgctcggggagatacctgatgatgaacggcagatttattttgaagggcccctgaaccctattgatgcagacataaatgacatgcttgatctgctagctgaggattcatctgatgctgctcctgatggtacgttggcagtggcgccccttccagaggttgatacaaccttggaggtcccgaaacctgtcagtactcgcccgaggcgccctagtcgaactagtcatcctgagccttctgctgatgagcagaagaagaagagaagacgcctccggcgagtatccagctttgacgaggatgtcagtaccttagctcctgctgctggagaaatgactgcaactggccttgctgatatagatcccaatg

SEQ ID NO: 55126 - DNA, 406 bp, Zea mays
  unsure (1)..(406): unsure at all n locations
tacattgaatcaagccgcctcctaacctctcatatcctcctgaactcttacttactcgtatgatcgaaatatcacaaattcctgacatttctaactcaatagaagattggctcttttgatagcaacatttgtcagcacatgataatatatcttctacctgagtacatgtgcacacgtgacgatgggatgatcttatattagttaacacaacctcatgagccacttctaacatgatatgcgaatccacaaactaattatgagagcacacaagcatatcatgtttttcttgccaagccagattttcaatatctagcctttctatccgggtctcgaacataacactnctatcttctaatcgagccatatatgatgaatgactaacaactttatttcgctcaatgaaacc

SEQ ID NO: 55127 - DNA, 374 bp, Zea mays
cgcttaaccgcgagaggaaattatcttgtttactcaacgggaccatgtggagcccctcctcgacgaaacacccatcacatcttccggcgaggaagaggaccccaaggttctcgacctggccatgaagatcgccgagagaatgcgcctcaaaatgaaagaggaacatgctcagaacaaggccgaagaagaagaaccacaaagaaaggccgaagaagataaaggtaatggaacattcgattacaatgacgaactagaggatcctttggtggccaatgtattgatcaacgtaagtctcaacacccaaggatcatctaccaaaagcaaaggcaacgaatgtagcaaagtccaatccgaatactccagaaaatatattc

SEQ ID NO: 55128 - DNA, 280 bp, Zea mays
  unsure (1)..(280): unsure at all n locations
gagccagctctgcgaaatttacaccttcaaccgaatatctgcccagcacattagaatatattgaaggccaagttgatgcccttgacgaagatattggtgggcacgccgacttatgcgccctggaagcttctcggggcacaaatactgcttttctgaaggctggctgnncncatggaaatattgagaacagaccaaacttcagattggcagcatcagatctgagagatatcccaagcctagcccgaagtatcggaaatagattcacgacccagatctgggt

SEQ ID NO: 55129 - DNA, 370 bp, Zea mays
  unsure (1)..(370): unsure at all n locations
ctacttattngtatttgcgaaagaagaagccggtctattttcctgtttaatagctaaaacttgcatgggctggctgtggcatatccgcttggcacatgtggggatgaagaaccttcacatacttgtaaagggagaacacgtgataggattgactacatgtaaattcgaataagatagaccttgtgcagattgtcaggcaagtaaacatagtgggaggagcacatcacagcatgaatgtgatgaccacatcaagacccctgtagctgctgcatatggacctcttctgaccacgtcgctatcttagtatatgacgaagcaagcatggtctaattattgttgatgacttttcccgcttcacttgggtgttctt

SEQ ID NO: 55130 - DNA, 292 bp, Zea mays
  unsure (1)..(292): unsure at all n locations
gcaaagcncccatgggtcacgataacgaaggttatatactgcaccctgccggctatcccgaatacaagatcaggagaacccatgcgaagaagacacatcctcaccaagcttgtattataagaaagaggcgtctagctctaggcgttctacacatgctaaaatgcctaataaataaacgcctattgcatcaaaagaccataacattgcattcaagacattagaagctgcttatgtgctgactaacaaatcaaacaaagttatcgccaaatatgtcgggggcaaacacacaggg

SEQ ID NO: 55131 - DNA, 377 bp, Zea mays
ctatatatactcaagcttcactatccttagacactcatccgtgcctcgctcgtttacttttatctataacttgagcctctctgccagtgctgcatctccagaggtggcataaacaataccttcttcactgaccatgttttcgttgcatatcaccacggcgagggataacatggctgccatagaattccttccttcagatagctgttcattctcatcacaatgactataagaggttctgcactactgctgccaaagccagtgtctgcatcttcttggggcaggtttactacaacaatctctaacggtggtcgatcttactagatagtattgtatggagaacctgccagaaacataatgctcaacaactcaagtgacac

SEQ ID NO: 55132 - DNA, 436 bp, Zea mays
  unsure (1)..(436): unsure at all n locations
agctnccttgcacatagcgttaagattgattctttcttcgntccgancatgcttcccatattatatatgcttctgacccaagtccaaaggtacttgtttacatgtcacacttggaaaatattgttaaaacacgtttttgaagaccttcggaggacgaaagccccccaacaatgcatatcttatgaaagtataaattggtttaattccaagcaacctttgcacttaccttatgcaaactagttcaattgtgcacttatatatttgctttggtttgtgttggcatcaatcaccaaaaaaggggagatcgatagggaaatagggtcaaaccttttcctaaatgaatttggtggttgaattgcccaacacaaataattggactaactagtttgctctatattacatgttctccaagtgccaaatggttgacacaaaccaa

SEQ ID NO: 55133 - DNA, 455 bp, Zea mays
  unsure (1)..(455): unsure at all n locations
taatgggcagaaanatttacactgacatgtgtgcatatggttgtcgataaataactcatgaaattatgatgaagagtgaaaaagacatctacgacgcccgataacaagctaagcatgctgataaagctgctgagcgcgagaggcgcatacgtattgtttcgtggcatctagcttcgtcatttgttttcgtgacttcaaaatgattaattatttctactgtagctgaactgtctcctccaccggaaccgttcgatcccctgaccaacccagaatcgaagaaagcaatagagatcatcaatatggccaaatctattgttgacgaagttgttaacaagttgttagataaaattacggagaaggtcctaaaagaggactagtacttattgtaaaaacattcttagatgatcaatgtagccttggtgtatcaagactgtaatattcgatgtgcaattttt

SEQ ID NO: 55134 - DNA, 416 bp, Zea mays
  unsure (1)..(416): unsure at all n locations
agctngtgaaggttcttcatccccacatgtgctaaacggcgaagccacagccagcccatgctagtcttaacaattaagcaagcatctagaccggcctcctcttttgcaaaatcaactaaataaagtgtgtcgtctagtacacccttaaaagctaatgaaccatcacttcttctaaagacagacacatctacatttgtgaataaacagttatatcccatattacaaagttgactcacagacaacaagttatatccaagcgactcaactaagaacacattgganatagagtgctcggatgaaatatcaatttttcctaaccctttcaccttgccttggttcccatcaccgaatatgattgaatcttggggatccttgttcttgacgtaagaagagaacatcctcttttccnccgtcat

SEQ ID NO: 55135 - DNA, 448 bp, Zea mays
tctgcccaatcgagcagaattaatactctttttcatcttttacacgcatgtgattctatgatgcacatggaatgaaagatatataatgatgaagttgagagattatcagttgaatggttagaagccactggactgtttgtgtttgatgcatgcatgaacaagcctgctcaaatgaggggaacttatatggagtgcacgtcatttcccggtgaacccttcatagttgtctgatgaatatgaagaattatgagcaatataagatggtggctgcacttccaagcttgctcaagataaactacgcattacttctttgttcaagggcatcaaacatattcattagactacatacatgattatatcactgctgcgacatcaaatccttttttggattattttcttgtgcatctctctgcgtttgttacacgataaacatgtctaatgagctcta

SEQ ID NO: 55136 - DNA, 456 bp, Zea mays
  unsure (1)..(456): unsure at all n locations
agcttgtgaagattcttcatcccaacatgtgctattcggcggagccagagccagcccatgttagtcttagcaattaaacaagtgtcgagttcagctctatcaaaatctactaagtatagctgaccctctaacactcccttaaatgctattgaatcatcacttcttctaaagacagtgacaccaatatcagtaaaaagacagttgtagcccattttgcataattgagaaacggaaagcaaattgtaatctaaagaatctacaagaaaaacattagaaatggaatggtcaggtgatatagcaattntaccaagacctttgaccaaaccttgatttccatccccgaatgtgatagctcgttggggatcttgngttttctcataggaagagaacattntcttctcccctgtcatgtgggtagtgcacccgctatcgagtatccaacttgagcccccggat

SEQ ID NO: 55137 - DNA, 357 bp, Zea mays
aatccatgtgggagttcgcaagagaaagggttgcgtgttggcatcaatgcttcctcaataagctagctgccaagcaaaagctagaagcccgaagataatctttgagtagccagaatcagcgtttgcaatcaacaaccagatgctcctcaaggccagattctgttgaagttccatctcctcgaagagatgcaaagtgaagatatgtagctgaagtaaagctatacccataacccttctaagccaaatctcgaggacgagattcattctaagtggggtagatttgtagcatcccaaaaattcaaatcttgggaatttctcacactcgctctatattcaaaatgaaagtcacacttcatt

SEQ ID NO: 55138 - DNA, 430 bp, Zea mays
tctaattgatgaaactcctgaatattctttttacgctagaagcaatggttagtcgtgttttttaagaccttgggaagaggaaagctccaaacaaagcatttccatttccattacttaccaggagctttaaatctcaagatgaaattcttttatgggggagaggatgtaacacccctggtgttacaagaactaaaactctggcatggcatcatatgcactgacattacattgcttgtgatacacctaaaatgcattcactaggctacaaattcaaaacaaaacatgtgatgtgatccttgttaagtgtatgatttggtaaggatgttccttaatctaggcggggggtaaaatttctccaaggattagtagtatgtggccttatgttttatgcacaaaggagtaatcttgccaagttgggtatacatgcttt

SEQ ID NO: 55139 - DNA, 454 bp, Zea mays
aagctcttaaggctggacttcggttcccttgagcagattgtcttgtaattctgaagatatctgaaatctgccttcatcaaattactcccgaagcaatcataaggatgggcatcttcgtatgagctgtgaagagtcaaggtttggagccaaatgccaaaagtgtctgcaacatacatgatctattgtatgagacaaaaccctgcggtaaagagcagtatcacaagaattttggctgctacaacttcggtgcccgatctgggtcaaggtgtcccatgccaacctttcgaaagagatggcccggcgactggatgacggaatggttctatgtgaagaatgatttgaaaacatgggaagatattaaagatatcattatgcgccctatctggcaacgctttcgccttcatagactgaacgtggaaatggatgaagcagccgaagaatgccagagaacatt

SEQ ID NO: 55140 - DNA, 357 bp, Zea mays
atgctgagttgctggctaagtcagcagcacatgggctgcccctaccttcggatgtgttcttctaaacaataaaagcaccttcagtggaacttcttgaaagaacagtcctcaatatatctcctgtctatagcgaagactggagaactgagatcatctcttatcttcagggtaactctctttcagatgaccaaacttataacatgaggattgaggctagagctcgtccatatgtcatgatagaaggggagttgacaagcatggagttgtgccccattactcaagttgttatctagagccgaaggcttagaattgatgaaagaaatacatgcaggcctgtgtggatctcacattggatct

SEQ ID NO: 55141 - DNA, 410 bp, Zea mays
tcttcttcttcacataccacatgtgtcaatatcggacgtctattcatctggaaaaattactcctttcagtacctcacagaataacgacgtctcagacacactcatcgcatatgatgtcggcggaaatataacttgtcacccaccggaatatgatgaaactcagctcgaatgcctaaggactgaagatccaaacgatatttcaagttatccttggactttccttgaatgactatgagggagttgacaatgatatcacacacactcttctcgatatgcacgacatctaacatatgtcgtaacactaaatccttccaatatggaagcctaaaaaaatagacctccttttccatatgataatacgctccacttccttctttttcgactttctgttatgttggcaacctttccca

SEQ ID NO: 55142 - DNA, 451 bp, Zea mays
  unsure (1)..(451): unsure at all n locations
acctgcaagcatgcaagcttctcctggacaagcgccgcactcactgtatattgtaanctgccacatacagcagcagatgagcccctagcgctagtggagttagcgtcgttagatctatcagatactgcttcagctcttcgaaggctttttgctgagctgatccctattggaagacttcggccgacttcggcacttcaaagaatgggaaatttctttctgctgatctagatataaatcgattcaaagatgccaatcttcctgtcagccgctgtgtgacacccggtttgcaaagaagagaagttggagggtattctttttgtttcttctctctttcggtgggtgcgttttgggaatttggaattttaggaaaaacattcaccagtaggcagtataatttatttgattatgcgctcgcatcggggtcgggagccgtcgcgtgggcgtgttgggc

SEQ ID NO: 55143 - DNA, 425 bp, Zea mays
  unsure (1)..(425): unsure at all n locations
acagcgttgtggcattaagcttcaagtgtcacacgatcacctatttctttctctatgtgctctcangtgggcttccgatcaccgacctcggtaaccgcggtcgccccctccttatgggcgaaactatgaaggtcggggacgacctcgagcagcggcacctcagccatcacagcatcagcgacgacaggtggatccacgggcaaaacagaaacggtctcggcagaagctggggccgacgccggcaacgcgttatgtgggctcatggacgcggacacgctagcagcctcccccggcacggtggccgccctaacggatgggtcggtctatatggcttgccccatggtaattctcgccgcctgtgcccaccgcttgacggcgtcttgtgcataggccatccaacccggcgtggtgcggtgcggcactgg

SEQ ID NO: 55144 - DNA, 482 bp, Zea mays
  unsure (1)..(482): unsure at all n locations
cttaagtcacctgcggcatgcaagcttatccaacatcgattgagatgagtttttcatatccaacggagacctctggaggtgcaagtacggtttaggatcctaaagcgcatcatctatgagaagagaggaagatatagtctgaaattgacatgggaagagacattaaaagaagactcgtaatgataggaaataccccaagatttagccttcaataggagtgcatggaaaacaactatccatgtgtctaaaccttcacttgtgggttctattgggtttttaactctagcataccccaacttgcttgggataaaagtcttagttgttgttgctgctgcatcatgtcatcaatgtctcaaaaaggtgttaactattgaatctaaattgatatgcatntttcctgcttgtgacctaatgcatcgatttcagtccaaagagtagttgagcaaggcagactttatatcaatacctcaaggtctaaagat

SEQ ID NO: 55145 - DNA, 450 bp, Zea mays
  unsure (1)..(450): unsure at all n locations
taccgcattcgaagcatgagcgctctcccttggctctggtcttgtcttggtgtcccttgcgacctttaagcaccgtcttgaatctttcgatgatgagagccatctcttcatcattaagtccgaccgcctcaatttgtgccaccttgctgagtagcgcctccttgcttcgtgttgccttgaaagcaangggttgcggctcgttgatcggaccattcaatgcgtcgtccacgtaccttgcctccttgatcatcattcgcccgctaacgaatttcccaagaacttcttcgggcgacatcttggtgtacctgcgattttcacgtatattgttcaccacatgaggatcaagaacggtaaatgaccttaacattaggcggacgacgtcgtggtccgtccatcgcatgctcccgtagctccttattttgttgataatggtcttgagcacgttgtatg

SEQ ID NO: 55146 - DNA, 424 bp, Zea mays
agctgaagccatggtaagtagcataagcttatttattctaatagactcaagcctagctacaggtgcataagttttaccgaaatccacaccttcgacttgtgaatatcccttggccacaagtcgggctttgttccttgtcaccacaccatgctctgcttgtttgttgcgaaaaacccacgtggttcctacaacattttgattaggacatggaaccaaatgccataccttgttcctagtgaagatgttgagctcctcttgcatcgccaccacccaatccgaatcttgaagtgcttcctctaccctgtgtggctcaatagaggaaacaaaagagtaatgctcacaaaaatgtgcaacacgagatctagtggttacccccttatgaatgtcgccaaagatggtgtcgatgaagtgatctcgctggata

SEQ ID NO: 55147 - DNA, 445 bp, Zea mays
  unsure (1)..(445): unsure at all n locations
tggagagcacttcanagaagaatgatggcatgagttgttctctctctccgcagatgttaaccaagcagcccatttagaatgagtgtcgtggatagaacactacacatacattcttagacactgattaattcttttagcctgcccatctgattgtgggttattgaaagggaaatgtgcccttacgccatttataagtattttggtgattaagtgcccaacacaaaaggtcctactgtaaattgtgcaaaatgatggatgaagtgccaatcatcaataaggtatgattctagacttactacattattttttgtgtactaacatatttgtctaagggctcgaatcagagaaaatacaaaaggaaaaagactcggctagagcagacaagactctgcgcagtcttggtgcaccggactgtccggtggtgcaccagactgtgtccggtgcg

SEQ ID NO: 55148 - DNA, 232 bp, Zea mays
aaaaaaaggggagggaagaaagagaagaaaaaaaaaaaagaaagcaaggagaaaaaggagaagaggaaaaaagagaagagaaaaagaaaagagagaaaaagaagaagaagagagaaacagaggaaggagagaccaaaaaagaaggaaggagaagaaaggagaaagggcaggggggaaaaggggaagaagggcagggaagaagagagaagaaagagaaaagaagagaagggga

SEQ ID NO: 55149 - DNA, 406 bp, Zea mays
  unsure (1)..(406): unsure at all n locations
gataagtcattcttcacataaaaccattctgtcatccaatccccgggccatctctttcgaaaggttggtacgggacaacttgccccggaccgagaaacgaagctgtagcagccaaagttgttatggtactgttccttgccccaaggctttgtttcatataataattcatgaacattacagaagcttcttgcgtcaggcttcagaccttggctcctcgcggcccacacgaagaatattagccttataattgcctcgggagtaagttgatgaagatagacttcgaagattttcaacacctncacgacgaagctgctcaaggggaatcgcagtccagctttcaaaaagcttcggtacaccacaacttcattttcttagggtgtggacaangtttttcacttcgtccgcc

SEQ ID NO: 55150 - DNA, 461 bp, Zea mays
ttactatctgatgaatatccaagaagaaaaccctcttctctatttcttctcaaatttagaaagccgacttccttttcttaaaatataacatttgcaaccgaataccctaaaatatgagatatttggctttctaccaatgagcaattcatatggagttttcttcaaaagtttgtgacaatatagtctatttgatgaatgacaagcggtatttattgcctcggcccaataagaatccgatatattatattccgctaacatatacctagccatatcaatgagagttctattctttctttcaacaataccgttttgttccggggtatatttggaagagaactcatgtttaatacccttgtcatcacaatattcatcaattctcgcattgttgaattccgacccattatcacttctaacctctttgatgtcgaaatcaaatttatcttgagccaatatagcaaatg

SEQ ID NO: 55151 - DNA, 439 bp, Zea mays
  unsure (1)..(439): unsure at all n locations
gcatacatatgatcatctctttattctctgaagtacttncctcaaatgctcctcatgctcttgctcattctgggaatatatgagaatgtcatcaatgaactctactacgaacttgtcgaggtaatccatgaacaccttgctcatcaagtacatgaagtaaactggcgcattcgtcaaaccgaatgacatgaccgtgaactcatatagtccatactaggtgatgaatgatgtcttcaatatatccgaaggtcagactctgagctgatggtagcttgacctcatatctatcctcgaaaacacactgtctcctctcaactgatcgaataaatcctcaattctgggcagggggaacttgttcttgatagtaacttcattcaaagatctgtaatcaatgcacatcatctttgtgccattctccttctcccaaacaacactgagg

SEQ ID NO: 55152 - DNA, 405 bp, Zea mays
attataaaacgctattatgtgtgtctgataaatctactattgcaaattttccttcgcacgaagttgaattgggggaaaacacacataattcatcggctacaggttgtcacgactagtcacaacacccttatgggatgccgatggatacataccctgagcaaccacaacctcctatgcacatcggtaataaattagccgatctgcacatgtgcggaccgtccatacgtgagcgcggaccgtccgggccatcaacggtcggtcccatttttaatgagttacagagatatgcgtctgacccaccacatgttacacaagccctaaaccacccatacagaccgtgcacatatgatcaccgacgatccgcatatccgactggacggtccatgtatccgactggacggtcta

SEQ ID NO: 55153 - DNA, 457 bp, Zea mays
agcttgcaagccacatcagaagagagtgctttcttatcccgagccggcattgaagaggagctcaccagctgcagtaagggccattgaatgctcgctgagggagcaaagcaagcactgccctggtacaaccgggatttatggactttttcatcaaccaaccaaccagccctcacaaagctgcggcgatggtggcgccccctcctccctcatttacaagaatgacaggcatctctctctccctctctgcgagtctgacatttctttattggtttccgtacctgtggcttcgccaattggttgggccaacgggttaatattgtattttttatgatttttattattacctggcttgctctgtttgtctgatggcactgccagtgccatcccatgagaagagagagcatgaatgccagtagtactagtatgtagcacgaaacgtgtggtgctgttttcattc

SEQ ID NO: 55154 - DNA, 439 bp, Zea mays
tagcaagtgcgagttctggatcagtgaaggtctgttctttgttcttattataaaccgagacggactagctatggatccaaataatgtagcagcgattttggactggaaagcaccaaaggatgctcgaggaatcaagaacctcattggaatggacggctactatcggcggttcattgaaagcttcttcaagattgcccagccaatgacaaccttggtagcaaagaacgttgagttcaagtggaccccagcatgccaagaatcatttgagacgttgaagcagagatcgacaacagcaccggtggtgggtttgccagatgttcacaagccattctcagatattggatgcttcgacaccggactgggatgtgtgctaatgcatgaagggaaagaagcggatactcgtcccaccattgaaggtacgagaaaataccccaccatg

SEQ ID NO: 55155 - DNA, 395 bp, Zea mays
  unsure (1)..(395): unsure at all n locations
ttaagctcataatccttctttatctttatttgatgatagcctgaataacaatccaatagactcatgagctctgaagtggttgttgcatccacaaaggagtctattcttagcaaggggaactcatccttcgagcatgccttattgagatctgtgaaatcaatacacattctccactttcattggccttctttatcatcacagtattagctagccattctggatatgccacctctctgattactccggcacttaagagtcttttgactttgtttcttgcaccttcggctgtgtcatcggacatcnttcgaagcttctatttcctaagtctaatagctgggtctatattgagtgaagtgtcaatgacatcttcatgcacagatatgctgggtggagta

SEQ ID NO: 55156 - DNA, 418 bp, Zea mays
tgtagtcgtggacctggtcctaatgagaggactgaaccgattataggtctcacaagctctcttccagctgggaaggacctctctaggtgacagaaatatgccagcctcggtgcgatcggcctcgccacagctaacggagtgcctcttcccaatccctgtaatatatagcatcttccgtagttttttcccgtaaaaatagaaatgggggttcggtcttcttccctgtaactacgaagtgcatatatatgcgccagcccggtgaggtccgctctcaataaactcggtctgctggcctacactcgtgtgtatccagttataaggaaggggttcgacccacatatttgtttttctgttggttatattcttgagattacaaccattattattatctaacccgaacatgcactctccctccctg

SEQ ID NO: 55157 - DNA, 457 bp, Zea mays
  unsure (1)..(457): unsure at all n locations
gctgagttatattattacagaccatatcttatgtgagtgcagagtagtaatattatacaaaccaagggaggcacaaactcctcccgataagttataagcaaaagattctaagtggaggaccgagtcctcccgcacttcagtcttgtttttcttctttgggaaccaccttggcacagaagcagcaaaagtctgccacttcctcacctataaacaacgaagggataaaccctgagtatggaattactcagcaagtcttacccgactaaagaaaagactctcaagggtatgctggttatatgggagtcaaggtaaggcctttcaataatcaatgactctgttttgcagaaatgcttactaaagtggatccttaaaaatccatgtttattggtcaagttaagtaaaattacctgcactagagttctttctaccctagntcaatcactggtcctgcactagc

SEQ ID NO: 55158 - DNA, 455 bp, Zea mays
  unsure (1)..(455): unsure at all n locations
gtactcctcactangaagggaccttcatgatcgcctatattttgaagcccgggacatacaagccggccaacgatcaaagcgatgtctacagcaacacttggaacatctaacaactatgtcgcttttacccttataaagttccaagtcgttcatgtatctcgctctctttacatgcataaaaaaaggataaccatcaaggaaggatcagccttgcctcggcaaaacccgaccctccctcgggggctagaatgggggaaccccctctgcatcaaaattttcctcggaaaagtcttttaccataacgtctttcgtgcttttcgactgcgtcgataacagaatcctatagacgagcgagagaaaccttgaacggctaggccgactgagccgatggactcccacgcctccgggatacggatacctcactcatcaccttccgtgataagaaactcacgctc

SEQ ID NO: 55159 - DNA, 455 bp, Zea mays
  unsure (1)..(455): unsure at all n locations
agcttntctacagcctgtaaccatatgtactactggtgtaaaaacttcaatataaatctaaaaatcattggcagaaaagctaagcaaaaaaattgagcacttccttgagacagaatgcaatggaaatataggtgtcatgatattaagttgtgttagcaaccaatattcatgcatgttgtagcttgtagaaaatatgtatttcagacagttttaatggtactaagttgccaattggtgctaccctgaacaatattacgccccaaaattattcagccattactattgtttccttgcactagtatattgtactattgatgcagataccccttggagtggttgtggcaatcccgccattcaactataatgtcaacttagcagtttctaagattggcccaacactaattgtagacaatgctcttgtgttcaagcctccaactcaaatatacgagtctttt

SEQ ID NO: 55160 - DNA, 444 bp, Zea mays
tggaatacaacagacaatgtcgcagcctctgaagtacctttctctaatgctactcatgctcttgctcattctgggaatatataagaatatcatcaatgaacaccaccacgatcttgtcgaggtagtccataaacacattgttcatcaagtacatgaagtaagccggcgcatttgtcaaaccgaatgacatgaacgtgaactcatacagtccatacttagtgatgaatgcagtcttcggtatatctgagggtcaaattctgaactgatggtagcctgacctcacatatatcttcgagaacacactggctcctctcaactgatcgaataaatcctgaattctgattacggggtactggatcatgatagtaacctcacttaaggctctggaatcgatgcacatactgttcatgccatcacttgtctgcacaaacagcactggtgctg

SEQ ID NO: 55161 - DNA, 409 bp, Zea mays
acctaatcatacatctcgtggatcagataaaaatatcagggccactatatttacatcatatgtttcagttggaagcgataccttgggaatattaaaaggttatgtgcgaaatcgcgctcacccagagggttcaatcatggagggatacactacaaaagaagtgattgagagctgtatagattacatcagtgatggaacaatgataggtgtgcctgtacctaaacatgagggtaaactatgtgggagagggagaatgggcaagataagttttcgcgtcgaggattacaagctagtacattgtgctcatggtagtgtactacaacatctcacgatagccgagccttacatagaggaacacctggatgagcttcgtaaagaaaatcagaaccgcacagaggactggatcatg

SEQ ID NO: 55162 - DNA, 459 bp, Zea mays
cgttcgaaccgaagcacgatgggcctatgtcgagccatcctgattcccatcactcgctgggatgaggcggcgcgaggggcgatactgcgttggtccaggtgaagcttcaccctatgtgataagtagtgctagcctgtgtgcgcgtgcgcgtgtgtgcatgcacgcgtgtcagtaaattgagaactagtttcattgaagaaatccaatatcagaaaatagtcacattttcgtaacaaacctgatcaatgacacttccattggtatcacgaatgagaggccgatagtctccaacgaagaactgttatgaagaacacaaatagtcagcatcccaaatgcataaaaagatgggtactcaactaaatgataggttattattactattattggtagattcacaagtggcccttaaacttgtcccacattatcatacaaattaacaaactctgcaaatgcatatca

SEQ ID NO: 55163 - DNA, 344 bp, Zea mays
  unsure (1)..(344): unsure at all n locations
ggaggagcacatcacagctagaatgtgatgaccacttcaagaaccctggagctggtgcatatggacctcttctgacccgtcgcctatctaagcatagggggaaattagtatggtctagttattgatgatgacttttcccgcttcacttgggtgttctttatgcaggataagtctgaaacccaaaggaccctcagcgcttcctcaggagggctcaaaatgagtntgagttcatagcgaaaaagataagaagcgacgacgggtgcgagatcaagaaccttcaagtggacgagtttcttggagaagaaaggatcaagcacgagttcttcgcttcctacacaccacat

SEQ ID NO: 55164 - DNA, 406 bp, Zea mays
tctacaaggagaacacatcctgtgacgaacagacgcgcattctgttaaagacaggacttgtaccccacgccagggatgcgaacaagctggagttcatcatccacatacgaacatcatgacgaccgacaggccactcgagctcctacactcggacctattctggccgatagctcacataagcatcggcgggaggcagcactggctacctactgtggatgatcatactcgctacacttgggggcgcttttcgcgggaaaaatctcatacccaagagaccttaaagggattcttcagacgggctcaaaacgaggtaggctgaatgatcaagaccacaagaatccgacacggaacggagttcaagaactcacaaattgaacgtttccttgacgaggaaggcatcaaacat

SEQ ID NO: 55165 - DNA, 412 bp, Zea mays
  unsure (1)..(412): unsure at all n locations
ctgccatactagtataactacaacttttttcttctctacaactatagaacataccggtgacttggcccttcgcatgctgggggctaatatatgattggaccttctaagaaagcccaaagaggatacactcatgtactggtagctatcgactaattcactaaatggatagagttcaaacccattgcttctttgacctcagctaaagccgcggaattcatacaagacataatattcaggttcggaataccgaacagtatcataaccgacctgngatccaacttcacaagtttagagttctttgatgtttgggagcaaaaaagcattcatgtcaagtatgcttcggtagcacacccgatagcccacgagcaaggtgaaccgactaacgggatgatattggaagctctcaagaaaa

SEQ ID NO: 55166 - DNA, 424 bp, Zea mays
gccgacgatgtaatattcaacatatgtacctaaagacaataaatgcacattcccccaaaagatgaatacaccaaagcagtatcttttgatgcaaaaaattaacacccgcaaaaggactgatttccaaagtcttagcacaaaggtaagtatcaagtcaccttgtataggtgaaaaacctctgaagtcattcctaagggaatgcagagctagaaaatcttcacctatttaaggtgaaaaagcttcaaagtcattcctaagggaatgcaaagctagaaaatcatcatctaataaaggtgaagaagcttcaaagtcgctcctaatggaatgcagagataaaatatcatcacctagtaaaggtgaaaaagctctgaagtcattcctaaaggaatgtagagctagaaaatcttcacctagtaaacttctc

SEQ ID NO: 55167 - DNA, 464 bp, Zea mays
tatgaagatacttcatctcaacatgggcgagtcggcggtgacatttccaacccatgttagtcttagcaattaagcaagtgtcgaggtcagctctatcaaaatctaccaagtatagctgaccctctaacactcccttaaatgctactgaatcatcacttcttctaaagacagtgacacctacatcagtaaaaagacagttgtagcccatttgacataattgagatacagaaagcaaattataatctagggaatctacaagaaaaacattggaaattgaatggtcaagagatatagcaattgtaaccaatactttgaccaaaccttatgtgtcatccccgaatgtgatagctcgctggggatcctggtttttctcataagaggagaacattttcttctcccctgtcatgtgagttgtgcacccgctggcgatgatccaacttgaagccccggatgcataaacctac

SEQ ID NO: 55168 - DNA, 332 bp, Zea mays
cgcatctatgcaaggagtgggattcaaattgctcctcttccgactccgaccatgaaggactctccgcctccgccttcaacaagttatccctcttccccaacgaacgtcacacatgccttatggcaaaggaaaagaaggtatgtactcgatactctacttatgcttcttcaagtgaagacgaatctagtgatgaagatgaaatatattattcctgtttatgtaagggcctagatagaaccaaggtagataaaattaatgaattgatcgatgccttgagtgatatgaattagcttgtaaaaaacaagaggatttgttgttgagaacatgaccat

SEQ ID NO: 55169 - DNA, 130 bp, Zea mays
cacgcgcggacacgttacgagccaaaaccacgattgtttcgcgcgcggacacacaggagtcgcgatctgtagttctggacccggaccccgacatgagaatcgcggaagccgctctgcggaacatccgcgg

SEQ ID NO: 55170 - DNA, 368 bp, Zea mays
  unsure (1)..(368): unsure at all n locations
tattgcanagggcaacaggatactgcttgtatctcctatcattcaatgcacatcatacagaaaccacgggccacggcttgtgtaatttgagaagaaagtgaggttcatatctaaatgtctgcacacgtgcacttgaatgtctcaaaacaagttggcttgaacgactagaagtaaaatatcgtttcacattttgaaatggatccagatacttttctaccggcttcagtttattttggtacgcttaacattcaaaactgaaaaacatagcacttacttctttgtcgcgttccaacttctcgatgttgcaagtgctccgggtggaggtgtcagacggttgttggggcctggagtctgatggactgtatgcc

SEQ ID NO: 55171 - DNA, 443 bp, Zea mays
tgcaagcttggacagtgttcatcgatgggtcctgtttatccttcagagcaagagcggctgctgtcctaatcgtgccttcaaaagttcaacactgtatgcagcaaggcttgaattcagttatacaaataatattgttgaatacgaagctcttcttttagggcttcggaagttaaaagcaatgggaataagaagggcaatccttaaaactgattctcaagtcatttctggtcatatcgacaaaaatggcctctaggaaacttcggcattattttcaagcatatcacataattgttccttcgtcacagcctctgaaggacataatgaggaacagagaagctactggaaggattggaaaatgggttgcaaggcttaatgaattcagtattgactatgtacatagatcctcaattcagtcccaggcattagaagacttcatttgctga

SEQ ID NO: 55172 - DNA, 439 bp, Zea mays
tctacagggagagcacattttaagactgacgaatgttcattttgttaaagacaggattagtagtgcatgttaagcacggaagcatgttggtgtccatcatccacacaagaacatcatgacgactgacaggccgcttcagctactccacatggacctattcggtccgatcgtttatataagcatcggcaggagtaagtactgtctaattattgtggatgactattctcgcttcacttgggtattctttttgcaggaaaaatctcaaacccaagagaccttaaagagattcttaagacgggctcaaaatgagttcggattgagaatcataaagattagaagcgacaatagaatggagttcaagaattcacaaattgaaggatttcttgaagaggagggcatcaagcatgagttttattcctcctacacacctaccaaaatg

SEQ ID NO: 55173 - DNA, 426 bp, Zea mays
  unsure (1)..(426): unsure at all n locations
aaaccganaaccttaatcttgtacaatccatgaaaccaatgtagcctcctagtcatcaagcttactaagtatgaccagagcaattgcccaagtatacaatcatcacaagagaacaagcatcctttgggtgctagcgcacccagtagctgcctttcactttcactaaaagaggggtgcccaatttgatcaatcaattcataccacaccacatgtctaagtgcaaatccaacaccgcacagcgaaggtacactgtcgcaaacaaaggcccagtcaaccttttacttgagaccaggccaagtagatcaaaatccagcacccagcacttcagtagctgccctctttcgcgtcnatccagaatcaaatcaaactgaaaaatgtgccgcctttgcctcgaacgtgccaagtatagagagagctagctagttc

SEQ ID NO: 55174 - DNA, 432 bp, Zea mays
cactataaataactcaagcttctcgtacctgttgccaaagaagagatgagaacggtgcttctctttctgacactatcttcctcggcacaccatgaatgcagactatccctgacaagtataacccagctaaagttgctcccgcgcatgctgtcctcacaagtatgaaatggaccaccttcgttaaccggtgcaccaccacccacattgaaacatatccggcccgggtacgaagtatgccaactatgaaatacatcccgaactcatcccacttccactgatgaatccgcaatggctgcaacaatccggcaagcctctgatgctctgctttggtcctttgacagctatcacagatggcgacatattctgcgattcctctcttcatgccatatcaccaaaaactaacttttaaatactgatacatcatcctcctcc

SEQ ID NO: 55175 - DNA, 463 bp, Zea mays
  unsure (1)..(463): unsure at all n locations
agctntacttgttagtcatggcttgactttttcacgaattcatggacaaaggtatgatggggctagcaacatgagaggtgatatttaaggattgaaaacattgatcatgcaagagtcaccttctgcttattatatccattgttttgaacatcaactccaactagttattgttgttgttgccaaaggaaataatgattgtgtgtggttttctgatcaagtaactctcttattgaatatcgttggagtttcttgaaaacgtcacggtatgcttcgagatgctagacttgagaatctcatgaaatcacttgaatgtggtgaactcgaaactgggagaggattgaatcaaaagatggggttgcctangcctggtgagactcgatggggctcttattacacaactatatgcaacataattactatgtatcctataatccgagatgttctcatgattcttggagaggat

SEQ ID NO: 55176 - DNA, 412 bp, Zea mays
tctgctgtgggtactacctctcgccctcgctctcctgttgtaccatactaccctcctcctccagatgtgaatgagtggtaccaccaagcgtatggagtacctttcttttcagccgatgacgtcgaagaagatacctattttgatgatccggagcagcttgacccacccccatatcgcggtgatccgggtccatcgttctcttaacctccgccccatgacccgtctggcagagctcctcctccgacccaatctggagaggaacattttgcctacgacctggcgcaacatctctttgctcctcatcaacctcctccccactggtgatccttggcttgacgcgtgcctctctctctttttgggtcttggtgccaaaaaaggggagaacgggtactattcacgtactttatttttg

SEQ ID NO: 55177 - DNA, 440 bp, Zea mays
aagtcacctgcggcatgcaagcacagcataggaaacatgtgttgttatatgtctccatcccaatctccacaggccataacacagcttatatttacagtggcactcagtttccagctcctactgtacatgatcctcatttgccgtaccataaacaatgcgtcgcacagtatggaagcatcaaaatgaaaccggcatgaatggttatgcctccagctattcaaataagactccaccccgtgagcgcttttcgacgattcatgattcacagaacaattccggagctatacagaagctcactgctcgatcttcatggagcctgtagaacaccgaatgagcatttgtgtgataatggacggattactagggacatttgtatttttcacgggaaagaatatagaagatcatattcataccagagttgttggcgccgctatcggctg

SEQ ID NO: 55178 - DNA, 417 bp, Zea mays
  unsure (1)..(417): unsure at all n locations
taacacagaggaaacagcttcttctttttgcacaaggattccctgagaagcctagaacttcagagacaacatatactggtgcttgccttttgacttggccatattactgtccctatacanacgctgcactgactgcagaatgagaagctgctacatacaagagtaatggagccactgccataagcggagttagagttgttaaatatataaaatactactttaattcttcataagccttctgctgaaccggaccccactgaaaaacttgggctaactttaaaatttcaaagaatggcaggttcctctctgctgatcttgatatgaatctattcaatgaggccagccttcctgccaatcgttgagcacacctttgtgaatttggcggctccatccgaacgataacttcgattttatttg

SEQ ID NO: 55179 - DNA, 438 bp, Zea mays
agcttctaaagggagaacacgtgatatgtttaactaatgttaccttcgaaaaagatagaccttgtgcagcttgtcaagcaggcaaacaggtgggaagctctcatcacaccaaaaacgtgatggccacatcaagacctttggagatgcttcacatggacctcttcggacccgtcgcctatctaagtataggaggaagtaagtatggtcttgttatagttgatgacttttcccgcttcacttgggtattctttttgcaggataaaactgaaacccaagggaccatcaagcgcttcctaaggagagctcaaaacgagtttgagctcaaggtgaaaaagataaggagcgacaatgggtccgagttcaagaaccttcaagtggaggagtaccttgaggaggaagggatcaagcacgagttctccgctccctacacaccacagc

SEQ ID NO: 55180 - DNA, 452 bp, Zea mays
tgccaatacttgtcaaagcaacaacacatgccagctcagttgttacagaccataccagtaacttggcctttcgcatgttggggactggatatgattggacctttcaagaaagctcaaggtggatatacccatgtattggtggcgattgacaaattcactaaatggatagagttcaagcccattgcctctttaacatctgctaaggccgtggaattcatacaagacataatattcagattcgagataccaaacaatatcattactgacttatgatccaacttcaccagttcagaattctttgacttctgcgaggaaaagagcattcagatcaagtacgcatctgtagcacatccaagaaccaacgggcaggttgagcgagctaacagaatgatattggaggcactcatgataaaggtcttcgataagaatgaataatttgcaggaaagtggat

SEQ ID NO: 55181 - DNA, 467 bp, Zea mays
  unsure (1)..(467): unsure at all n locations
gcttcggtctcttgccttacagcttntgtcacatgacccgagataacttgtgaatcggtcttgaagatngcccttcgtattcccattgcctttagcttccgaagctccaagagaagagcttcgtactcgacaatattatttgtacagctgaagtccaattttattgcataacatgttataactttggaaggtgcaaccaggacagcagctgcccctacaccaaaggtcccccacgacccatcgcaaaataccgtccaagcttcggcatcttttattggttgttcatcctgggcccctggcgtccaatcagcaatgaattctgctaacgcctgagattgtattgaagatctattaacataatcaatggtgaattcattgagttctacgggcccatttccgacccttcatgttgcttctttgttcctcattatgtcccttaaagggtgtgatgaatgcactattatatg

SEQ ID NO: 55182 - DNA, 470 bp, Zea mays
  unsure (1)..(470): unsure at all n locations
gctttgatacacggattaaacatcgccatatcactgngcgtcataagattgatggtatatggagactctctggtagtcattagccaaataaacaaagaatgggattgttcaagtgattcaatgggaaaatactgcgctgccgtccgaaagctggaagataagttcgagggtctggaatttcatcatgtggaaagggatcgtaacacagcagctgatacactatccaagctcggatccggtcgaactcatgtcccacccggagttttcgtgcaagaaattacacgaccgagtatctcaatagaccaaacagaagagtgcaacatcgtataacaacccgagtcagactctgatgactggaggaggccgatcattaagtacataaagaacgaagaataaccagacgacaagaactcggcagagcgcatttgcagacagtcggctcactacacactcattgtggagatattata

SEQ ID NO: 55183 - DNA, 472 bp, Zea mays
  unsure (1)..(472): unsure at all n locations
tgcagcttctaaaggagagcacatcttatgacttacttatgttcattntgagaaagacaggatttgttgcgcatgccaagcaagaaagcaagttgggtcccatcatccacacaagaacatcatgacaagtgacaggccactggagctcctacacatggatttattcggcccgatcgcttacataagcatcggcgggagtaagtactgtctagttattgtggatgattattctcgcttcacttgggtgttctttttgcaggaaaaatcccatacccaagagaccttaaagggattcttgagacgagctcaaaatgagttcgacttaaggatcaagaaaattagaagcgacaacgggacggagttcaagaactctcaaattgaaggctttcttgaggaagagggcatcaagcatgagttctcttctccctacaccccacaacaaaatggtgtagtggagaggaaaaatagaact

SEQ ID NO: 55184 - DNA, 430 bp, Zea mays
tggtcattctattgctatctgtcccgacaatgatagtgatcatgacctacggaataagacggagaagaagaagaattatcagaaggcaaagggcgatgctcatcttggcaaggagtgggattcggactgctcctcgtctgactccgacaatgatggactcgccgccactgcattcaacaagtcatccctcttccccaacgagcgtcacacttgcctcatggcatgagagaagaaggtaatcactcgtaatgatgtcacttatgactcttctagtgacgatgagtctagtgatgatgaaatagattactctagtttgttcaacggattggatagaaataaaattgataaaatcaatgaattgattgatgccttgaatgaaaaggatatgcctttataaaaacaagaggatttgttgtatgatgaacatgat

SEQ ID NO: 55185 - DNA, 442 bp, Zea mays
  unsure (1)..(442): unsure at all n locations
agcttttaagggagaacacgtgatangtctaactttgttactttcgaaaaagatagaccttgtgcagcttgtcaagcagggaaacaggtgtgaagctctcatcatgccaaaaatgtgatgacaacatcaagacccctggagttacttcatatggacctcttcggacccgttgcctatctaagtataagaggaagtaagtatggtcttgttatagttgatgatttttcccgcttcacttgggtattctttttgcaggataaatctgaaacccaagggaccctcaagcgcttcctaaagagagctcaaaatgagtttgagcttaaggtgaagaatataaggagcgacaatgggtccgagttcaagaaccttcaagtagaggaatatcttgaggaggaaggaatcaagcacgagttctccgcttcctacacaccagagcaaaatg

SEQ ID NO: 55186 - DNA, 443 bp, Zea mays
  unsure (1)..(443): unsure at all n locations
tanagccatggtaagtagcatatgcaagtaatatgcgaattgactcaagcctagctacgggtgcataggtttcaccgaaatccaaaccttcgacttgtgaatatcctttatcaacaagtcgagctgtgtttcttgtcaccacaccatgctcatcttgtttgttacggaatacccatttggtacctacaacattttgattatgacgtggaactaaatgacatacctcattcctcgtgaagttgttgagctcctcttgcatagccaacacccaatccgagtctcttattgcatcctccaccctatatggctcaatagaggacacaaaagaataaagttcacaaaaatgaaagaggagctcaacaacttgaggagttcatatgatatcttcttttttgtgaactttgggcttcttatcggtgaggagttcatatgatatcttcttg

SEQ ID NO: 55187 - DNA, 435 bp, Zea mays
agctttctcgactaaatcggagacagggccttatgttctggtgaaagtacccgtaagcggcaaggccgaccgagccgagggattcccacgcctctgggatacggatacctcactcgtcccttccgcgaaaagcaactctcgctcacacaaacatccctattaccgacagagtccagatgctcgaaacaagaggaaaaaaggacgcagcttcgcaagcgcggcgagggcgtgttcttctggcctcggcggccgcagaaaacacacgctacaagacgatctgatcctgcaggctcgggtcttcacgccgaaaggagccgtagcaccctcggcatcgacgacgtctacaacaaagcccgacccagcctcgggcggcgccgaggtccatgggctcctccgggaatccggcccgagcaggcggctcaaccggttacccct

SEQ ID NO: 55188 - DNA, 461 bp, Zea mays
  unsure (1)..(461): unsure at all n locations
tgtgattntaccaatcganagagcacaatctctacttatgaatttccatgaaatatcttanaagagattgtattagtaacacaagcaatagtttcctatttagcaacctctagtatatgaatgacaagaaggttactaaaacaaggaaacctcatgatatgaactaaattacccttacaagcatcatgcataacatcaattgtaaataaatgaaagtagcatgattatttaattaagtttacatggcaagtttaattcatagcatggtgagtgattaatgtagaagactcaaaaccaatttaaacaagaatgaatacatcacatagtattggttcgatcttctttgaatgttgaatggcacactccatttgggaaacacattctcatgttgtgagactacataaacacttagatagaaacattaatctcacaactctagtcatatagagaattcctcattt

SEQ ID NO: 55189 - DNA, 426 bp, Zea mays
ttatgcccctgtctttatgtttgcataagagtcttagatggtacacacattccagctcatgtatgtcatgagtcgaagcttgaacacataaatagaaaagggtggcctagctacaatgtattatgtatagtggaaatggatatgcggttcacttttgtaagtgctgggttgcctggttattgccatgacatggcagtgctcatgagttgtatgggagaagcgaactatctacacccaccagcaggtatggtggcatgcatgttatgttggcattacacattgtattcatgcattacgatctagtaaatctttttctgaagttatttgtttgtgtatagggaggtattatctattggatgtcggttactcaattcgtgaaagtacttgccccatatcgaaatatagacatcacttataaatgtaatc

SEQ ID NO: 55190 - DNA, 441 bp, Zea mays
  unsure (1)..(441): unsure at all n locations
ntgnctttcgtgcatggacgacgtgcggattattctttgacacggacatgctctcttcaccaaggtgacaacgtcttaatgccggggaacgatgttgagccgggccgaaaccgcgttacatggatttgggtggagctcatattcttccacaatgtgttcaagggaatttggcatgactttgacatatggatcttctggctttgagtgtggaaaagcagaaaacacccatgatctttgagaagaagtctgaaattcagaaactcacaaatctgaaattctctaagggttcactgatcaacggctattttggggatataattgagttattttggctaaaccctctaacctttcttgtgcgtaataaatatacctaacttatataattggtgcaaccaaaatttaaacctgcattctctttcatatttcctgaatttgggacgg

SEQ ID NO: 55191 - DNA, 310 bp, Zea mays
tcatttcatagctaaaagtccaatctctcgaggaagtgacagggacgaccacaagaaagggaagaagaaggagaagaagagatactacaagaagaagggcggcgatgcccacatatgtggagaacgggactctgacgagagctccactgactccctctccgacgaggacgccgctaacatcgccatcaacaaaggcctcctcttccccaatgtcggccacacgtgtctcatggctaaggacggctagaaaaagaatgtacacactagagccacccccaaatatacaacatctagtgatgacggtagctct

SEQ ID NO: 55192 - DNA, 338 bp, Zea mays
gtataatgatacttagacgaatgtgatgaacaaaatgtacgaaggtcatatattcgtgactagaattatgaaataatgaatgataaaagatataaaatatgaaacatgaaagaataatatatcataacacataaaattggtgatatatttcatcatacaaacttaaatattaaaacataacatttaagtacatttatacattcgtgttgatagaaagcaataatccaagtgtagcgtgcaagcgattacaagattgcatgaacagtacagatgtactgttcatctatttatagacacaagacggagcctgtgagaaattacattcatgccctttaaaa

SEQ ID NO: 55193 - DNA, 453 bp, Zea mays
  unsure (1)..(453): unsure at all n locations
gcttcttctgcaaaaactataagttgattttttcttaagcctctccttgactcctatttatgcagcatacccttgagagtcttttccttagtcgggtaagacttgctgagtattccatactcagggtttatccctttgttgttnttaagtgaggaagcgacaaacttttgttgcttctgctccaaggtggtaccaaacgaggaaaaagaagactgaagtgcgggaggactcggtcctccacttaggatcttttgtttattaaacttatcgggaggagtttgtgcctcccctggcttgtataatattactactctgcactcacttttagtctggtctgtaataacataactcaaacttgcttttgaaataaatgtaagtttatgtaattcacttccgcatttctttatctccgatgttctgtaatgtctgcaagacgggtgagacgttcctggt

SEQ ID NO: 55194 - DNA, 409 bp, Zea mays
  unsure (1)..(409): unsure at all n locations
ntatttgaagtgcaggacatttttgagacaggatctctgattccgctgcaacctactcgaagagtcttcttactccacggcgtactaagtcttcgagtagagtaagaatttaagttttaaagtaataagttttattcgcctattcaccccccctctatgcgacatccagatcctgttcccgggtcaaagggaactttcagtgacgctgttacctaaagtagataaccctactgatatgaggaattttataccgatttgtctcctgaatgtctgctataagatcattactaaagttctgactaatagacttgcttgctgcattactaaagtgactagtagttaccagtatggatgtattaaaggtaggtacattatggatggtgtggntctctgaatgaaattcttcatg

SEQ ID NO: 55195 - DNA, 407 bp, Zea mays
  unsure (1)..(407): unsure at all n locations
tcaacggcagtcgncagcgcgccaacggctatatttcatcgctatcaacataagacttctcgacgacaagacggttaaatgggccgaccaactacctgaagtagtctgggccctaaacatgaccgaatgccgggcaactggattcacaccttttcatccgttatatggatcggagaccatgacgctgcaggaaataaagcatgggtcgtcccgaacaaacacatcatcaatccccaacgtcgacgaaccaacgtctaaagacctcatcaacggagaccgcgtctctgccctgtaggccctcaacaaataccaagctcaaaccaaggcctggcgcgacaacgaggttgttccaagagagatctacacaggagacctcgtactcctccgtaccacccggacagagtcac

SEQ ID NO: 55196 - DNA, 417 bp, Zea mays
tgagcaagtctcacgggctcaccatgaagctatctgatgtcttggttcgaacggaggaggacgggagaggggctggtcaccgcggttgctctcgggcggcactggcgggtcgcggggaggtcgccggatctatatggctggctcgggcaagtccggcgaggtacggaggaggtaatggggaatgcagccaatcactgtggcggtctttataaccgtggcgcgggcgtggtcacaggcggccgcgggcgcgcgggggtttgcgcacgggcgtgctctgagcgcgcccccggatgccaactcgcgtcgaacatgtggaagcttgcttctgccatggttcaacggtcgattagagcgccataccgtgccgatctcggcatagtcactgtgtacggtcagctctttgtccaaatcctatct

SEQ ID NO: 55197 - DNA, 425 bp, Zea mays
  unsure (1)..(425): unsure at all n locations
cctaagcngngatatntcggggatggaggttgtaacagttaacaaccatttgtgcacaaacgcacaatcctaaagcctatataggatcagtgtgtcatgacatctgtctgaataatgcaaagtttgttaccagaggctgattaactcctggtcaaactgaagtgtgttntcattgacagttcaagccaaacatggacaatgaaaaagatccgatgtcaagaattatggacttaatgaaagtaaataaatatttttcccatatggattattcaagaagttaattgatcgttctgtgacttcgttacatgcattatgcacagaacatgtacgaagagggcgacgaggatattaagcgcacaatatcctaaacttggtctgatgccaggtctgggaagacgactgattcgatgaacggattacgttga

SEQ ID NO: 55198 - DNA, 425 bp, Zea mays
tgtgattgtgcaaccaaacatctttctcttgtataaattatggtgatagaatatgactttgtaacaaaacaaccatatgcacattagaatgctacttattagtaccataaataaggattccaaaacactaggagggaaaatgtacagtgtgccatatatgattaagaaatatggacaaatgtaccatcacaaagacatcttctttagtaataagtccatgggaatattggtactgcaagaatcacttacaatgtgtctgttgtttcctcgtcgacactatcttggcaaaaaactgtacctaatgttttttcttcttttattcagacatttagcctaatatttggaaacatgatatggcttctttcaagggtctaacgtgtgatgttgtcatggttacacataaatattagttcatacaaatcttc

SEQ ID NO: 55199 - DNA, 442 bp, Zea mays
agctgccaaataccatatatatcaatcatgttgaaagggaaatagggttaacctttttctacaattaattttggtggttgaatgttcaacacaaacatatggactaactagtttgctctaaaactcatgtattacaggtgcataaggttcaacacaaaccaataacagattcaagttagggactaaattgaacaggagcaaacaactgagtgtgttgtggtctggcgcatcggactgtctggtgcaccaggaccgtacaagattgaaccagccactctcatgaaaacgaaagcgcgctcctctataattcaccagactgtccggtgtgccaccggactatccgaagagccagcgggcaacagctatctacacacaacggttgactctgcaaagtgctacagtgagctacattgcaacggtagaagtcagagcagcgaagtca

SEQ ID NO: 55200 - DNA, 466 bp, Zea mays
  unsure (1)..(466): unsure at all n locations
taggaacttaaaactcagcttctgtcgaatgctttgaacttgcacagttcttcatatgcctcgacaatgtcgttgttgttgacccttgtgcataactataaagctttttacaatattttcactttgcctttagtaatggattctccttatcgaccgggtttggcacattgagcttatcaaaaacctcccaaaccgtagatttgcctttgctgccctctcaaccttaactagtttattcacccctttacgtcttttcttgactctattcacatctccaccaccatcagattcatcaactctaacaacatccacatctttcccacctagcactgtcatctcatcctcagacatttcatctttcttgtcaaaggagttgctctctgaatcggtcccatctctttcgctcctcccttgcacagntgaatggatggttaaggatttcatcacttatcaatctgcaaataat

SEQ ID NO: 55201 - DNA, 439 bp, Zea mays
  unsure (1)..(439): unsure at all n locations
agcttttaacttttaaaacttatttggtctatatctgacaaaagctgagaaagaagaggtgaaagaatatgctatatcttgcgggtatcggccgggagcgcttctctttggtggtattgacgacgaaaggttgggatacatgcgggatcagaccagcgcgaaggttatcggtactctatcaaagagtatcggttttccgaagctcgaaacagatatcagccgctaccgatgacagctcattgtcggtagtttattttattccaacttcaagggaaacaacttttctctgacttttactggttttaataacaaagatttttttctaacgaaggttgtttgtgtgcagagtatgctgctaagcaaagctttgaaaatgcagcagaacttggaggataaaaacaagaggttataattgataatttagagagcanaataaaag

SEQ ID NO: 55202 - DNA, 384 bp, Zea mays
  unsure (1)..(384): unsure at all n locations
tcgatgcacatactctttgtgcatccttcttcttcacaaacaatactggggcttgccaatgtgaggaactcggcctgatatatcctttctctaacaactcatcaatctgcttcttgtgttccaccaactctggtccggacactcgatatgctctcttggaaatatgggcggtgcctggaataaactctatggcaaattcaaccttcctttcangtggcatacctggtaactcctcgggaaacacatctgggaaatctgatactacatcgatagcctctgatggtttaatctcctcaatacgagcagtgacttggtgacaattccctttccttggtcctgacaagaccaattgcactaacacttcttctgctgatagggacacta

SEQ ID NO: 55203 - DNA, 395 bp, Zea mays
  unsure (1)..(395): unsure at all n locations
agcttatcacaatagtcgagcgtggataattctgttactgatcgntgacactacaaaaatataatggtaatcgcgagcaaggctaaaattaaaaacagtgggtcaattatgattgagtagacagtagtagagcatgttagtgagcgcacgatgtcagtgcgcacctataggggtgcaggaagattcccttgaccttgtacgtccggaacaagagcgggcgccgcccgtnctcgccgccgtcctcgacagcctccgccgccttcttgtcgtcgacgggcgtccagtacttgtccatcgggctgactgccgctgcaagcctccgcctctgttttctcgtgccgtgctgcttgccgttgccgttcgccaccgacgtcagcacaatcgtcgtcgtcgcg

SEQ ID NO: 55204 - DNA, 495 bp, Zea mays
tctttcgcacacttaaatctcagcttgtgtagaattgggagacgatctgatcacttgtttgtgtctacaattgaatgctacagctcttgttagtacttgcaacgtggaaaactctgtatgactggaatgtggggtggtctcccctactctattaccacctctccccctccttctcccttactccattctctctctccccttctcccccttccattccatgttcctccccttcttcttctttctctccattctcttctccacacaccccccctcccttcctcttcatctctcacttcctcttcccccctctcttctttcccttcactattcttctcttacttccctctctcactacactcgtctttcctcctcacttatatttcttcttctctccttcccttctccccgtccctatctcttcccctcatcccaacccttccatctcttacttcatccctcctctccatctcatctttcctctctctctctcactcc

SEQ ID NO: 55205 - DNA, 343 bp, Zea mays
gcaaccttatgaacattcttcatcccaacatggttctttctgcggtgccagagccaacccatgttaatcctaccaatcaagcaagtgctgagctcagctctattaaatccactaagcatagctgaccctctaacacacccttaaatgctattgaatcatcacttcttctaaagacagtgacacctatatcagtaaaaagacagtcgtagcccatttgacataattgggaaacagaaagcaagtcgcaatctaatgaatcaacaagaaaaacattggaaacggaatggccaggagatatagcaattttaccaagacctttgaccaaccctgaattcatccccga

SEQ ID NO: 55206 - DNA, 420 bp, Zea mays
tttgaacgtactaagcacatgtcgggaaaaatggtaacctgttaacctagtacctgagtgaagccgggcgtggactttatccctcatgcgacctgagactgggctccattctagatatggtgggtacaagtgcggccactgcacgacggcagtcggggtcagtggagcattgtatgccaaggcggtgaagcctggacgcgaacggagaatcgatgggcacggttgacatgtgtggggacggagtgccctgacatgtcgagtgtttaggtttaccttgcaaggttaaaactcgattcgaatcgtctgcttctcgcagctaatgagactgcttgatccattgtactgcattgagtaagacgtggaaatgagatactagcacaagatgctgattgatataatgtttgataccatgtatgaata

SEQ ID NO: 55207 - DNA, 406 bp, Zea mays
agcttgaaatgtgttttcctccatcattttttgatatgcaagtacacctaatcatacatctcgtggatcagataaaaatattagggccactacatttacatatatggttcagttggagcgatacttgggagtattaaaaggttatgtgcgaaatcgcgctcacccagagggttcaatcatggagggatacactacagaagaagtgattgagagctgtatagattacatcagtgacggaacaatgataggtgtgcctgtacctaaacatgaaggtaaactatgtgggagagggagaatgggcaaaaaaacttttcgcgttgaggattacaagctagtacattgtgctcatggtagtgtactataacatctcacgatagctgagccttacatagaggaacacctggat

SEQ ID NO: 55208 - DNA, 418 bp, Zea mays
tgtgaaggttcttcatcctcacatgtgctaaatggcgatgccacagccagcccatgctagtcttagcaattaagcatgcatctagacgcctcctcttttgcaagtaactaaataaagtttgtcgtctagtacacccttaaaagctaatgaaccatcacttcttctaaagacagacacatctacatttctgaataaacagttatatcccatattacagagttgactcacagacaacaagttatatccaagcgactcaactaagaagacattagaaatagagtgctcggatgaaatagcaatttttcctaaccctttcaccttgccttggttcccatcaccgaatattattgaatcttggtgtcggcgtttcgagacaggggggtccctaagccgacgagtgagtgtgctgcgtgcccca

SEQ ID NO: 55209 - DNA, 367 bp, Zea mays
  unsure (1)..(367): unsure at all n locations
tctaaagggagaacacgtgataggtctaaccaatgttactttcgaaaaagatagaccttgtgcagcttgtcaagcaggtaaacaagtgggaagctcgcatcagggcagaatgtgatgataacatcaagacccctggagttacttcatatggacctcttcggacccgtcgcctatctaagtataggaggaagtaagtatggtcttgttatagttgatgatttttcccgcttcacttgggtattctttttgcaggataaatctgaaaccctgagagcacctaaagggggggtgaatangtgatcctgagactcttgtaacttaggccacgaaacttggttgaacgttagcacaattattgccaagtggc

SEQ ID NO: 55210 - DNA, 275 bp, Zea mays
  unsure (1)..(275): unsure at all n locations
agcttgaggctgacttgccgaagcaacatatactgcgggatggttgcccacatattcagggatgtagggcgaatgatacgaactgtatgcatgcctgttcggctgggcttgttgtgctgctgcttcagctatttccttttgcttctgaatagtaacatggcacatcctggtagtatggcctttgttctcaccgcagaataagcaaaagattcttctcggttgatcgccaaatcttnctccgaagcccctggcgcctctgcctcttggggctggtg

SEQ ID NO: 55211 - DNA, 423 bp, Zea mays
taaaagaattaccaacattaactcaaaatcaaagaaaactcaatttaattccatctttgagtttaggtatcatgtgagggtctataccgattttaaccgtgagcatgatgatatatcagttttacaccctatataggtgtcacttttaccataagttatgtattccttgtagcataggtttgcaaagcccttaaacactactgaggtgaatgactagtgattcacctaatgtttttagaaagatgcatttactataaaataatcagctaaggtttcaagtcaccgtggagtacgatcctcactaatgtgtgcattaccttaaccaagcataccatccaagagaacctttccttttctagatgagattattaagcactaagttcatcaagttaatagccaaaatcagagtcatatgacacttat

SEQ ID NO: 55212 - DNA, 260 bp, Zea mays
ccccggaactcaaaccacccagctacaacttgctgacaaaccgttttcttattgaccacaaaaagaacaaattccattataccactcatgaggaagggacaccttcgacattctttccaacaaagccatgtttaaccaaccattttaaatcagaaactttgtcctttcacatccataaacccaacagatctttgataaggacatgcgacctctaatggcccgcttccgaaaaacctaaagaccgacacacaaaacatgac

SEQ ID NO: 55213 - DNA, 294 bp, Zea mays
  unsure (1)..(294): unsure at all n locations
agcctgagctgaggcattgcctcaccggagaggcggtattacccttcccggacttcggtcttccgccggcgcgcgtggaccgagctaactaatgagtatttttccattccttgcacccacgtcttccctagcatcctgtgaagctctctgacccgttcaattgatctatcacgccgtgagtaagccggatttctcgccgccgacgagcatctccgcctgcgcacgtggaccggncgactccgaccatccccgacggcgacccgcacatcgccgtgatcctcgagacctccctat

SEQ ID NO: 55214 - DNA, 406 bp, Zea mays
  unsure (1)..(406): unsure at all n locations
aacttgttaattcctgacattgttgttgttaattttgtagcttccgcagcagctttggcttccgcacttgcagcagttatcatttttcccctgaggctgaaggtggngttcgctcaatggcttgcatcatggtgactattcttcatttcttttgcccttcaactttctcctttgaagtcgacggttgttctttcttctgtaaaaatttcgttagttccagccccaaaggacttancagcttgatgggcagggagtcagtcattacctttaaaatttctgctacttcagcagtagaaggtgttgaaggaacttcatctgtttcacccaccttcacctcagcataggaagttgtatcgagcctctcgtttttagaaggtgtcgccttgggctcaggagctatttccgc

SEQ ID NO: 55215 - DNA, 432 bp, Zea mays
acactattaagactctagctggtgcactcttcacatatggcgagaatgtgtttttattgtggatggaccacttgcagatttccacttgaccgttaacattgctagatgcatgtccaggtatgaattttatgttgcgaggggaacaaattccatcatggtgtggtgaacataccaaaccagagcatggacacaaatgttcagcagatgtacaaatgtttgattagagagatatagtttgcgtgacattatgttgcttgtttcttaaagagtcaacatttttactaatagtatgttatctcgataggccacacataagaacaccttatcttctagtggtatcacatggctaatgcaactaggttgttgttaggtcattgcaatataagtcaaatggatccgtgtagaagatacttcctccgtcccaatttataa

SEQ ID NO: 55216 - DNA, 399 bp, Zea mays
aacttatctgtttggagggattctccctttttttcctgacactggccggtgcgccagaccaaggcagccttcgattttctttgctcctttgattgaactctttcttttatatttgtattggattgttgtgaacctttggcacttcgggaacatatattctagaacaaactagttaatcccataattcgtgttgggcaattcaaccaccaaaatcatttagaaaaaggtttgaccctatttccctttcagttgcgcgcgaacttggtgcactagacattgtccggtgcgccacttggcagcacactctcatgtcttgctccaaattaatttgagtctcccactgaatttctttcttggtttggttgaaccttatgcacctgagaggaatgacatttagac

SEQ ID NO: 55217 - DNA, 416 bp, Zea mays
  unsure (1)..(416): unsure at all n locations
ttaacccctgcgagacctttccccgtttctttctaaccatggtaaatgcaatatcgcatgtcatattctatgcatgtttaatctacatgttctcttgtatggtgtactgttggtttcctaatttcaatggatggatgtatgtatgtttgtactcgcatagagaacgatttggttgaagagcccgaagaactcgcaggagaagcccctgagcagcagtcggttggtggaggcaagtgtcccttgacctatctctgtcctattcattctttaattcacctcccgcattacacatttatacctaaggatttactagctnttgttatccatgtccttgtttacctatttgggttggattattattgtttagctntatgctattgctcaactctaatcaatgaacatgatgagatttatca

SEQ ID NO: 55218 - DNA, 367 bp, Zea mays
atgcaaacttgcattgcatatttacactttttgttttacatccagggcttgtctaacctagatgagataaccgccaacaaagcgagtgaaaagttaactcggatcaaacttgacaagtcttaagtttaagcttttagcacttatattcttacttattatgcaattgttggctcttgaaatatgcatgaagtactgcacttagggggagtattcaaaactcaaaacactcaagaaaacccctagtgcaaggcccaaaatacaaatctcaccatttgcctattttctttaaaaattatctagcctttggcaaaatattttgaaaattatgagaaaatatatgagggtgccaatacctgtcccaacaagt

SEQ ID NO: 55219 - DNA, 330 bp, Zea mays
ccagaaacccacactctttgacagagttcttattaccttctctccagttcgggctcgaaggcatcctaagctttcgtcgtcaatatcgccgaagacaacgctcctggttgatagccacatgatatagcctaatctctcagctcctctttttcagccttagataacttttgacctattatgctttgaaaattgaagtcatgttccttcgaagtatcttcggcgatctttttcccttttccaggcattgtggctagggtctcttcagcaactgcagcagcttcttccgcggccatattcaaaagcattttatcaatatcaaaaaatgtgctc

SEQ ID NO: 55220 - DNA, 413 bp, Zea mays
tcgtctggtgaagccaaccctttctttttcatgttgccttttttcaattagccggggaaagtctggaagctacgctcttcttgatgacgccgcccaaagaagatcccacgaccaacatttttaatggtgacatggcttaaaggagatgcacgttttgcgccggactttaattatatagaatataatagaactagtaaattactcgccttgcgcgagtcttcggagcatgtgtttacatatttaaaaaaaaaattgctacaaataggagaaaaatatattgacacagatagaagtgataggtaccaaaggattaagtgtagagaagtctgaacctattggatttgacaaggatacagagaacacttataaaagaaaaagcatacgtactggaaaaacagactatctgcatgtag

SEQ ID NO: 55221 - DNA, 394 bp, Zea mays
gcagcatgcaagcttgttaactcttatcctagaagacttttcttcttatttgtttggctcaatcattacctctacaatttatgtcatgtcaataaaatttgttgaacggtctctacctgaatgccttagtaaaaaacgtctttcttactcttcgccgcttgaatgacataatctatctttcctttgatgtccaaagctctgatgtcagcttctgattctttggtaaccatttcatcatgtccttcttgacaaaacctccggcttgccttttcataatgctcacaaccctgttcttttttactccccagctccttcgccaagtctctcataatcaggatactccaaactaaaggcatcatcacttcatcaacctctgttctctctgcaccaaagt

SEQ ID NO: 55222 - DNA, 288 bp, Zea mays
agcttggaaatagtgccgaagcttcctggaggccatcaagacaacatacagtatcttctccaactctgtataatttttctttgaaaactaaggacttccgaacaaaatatattggggcctggcttctgacttgacccataagcttcttttggacaaacgctgcacttaccggtgagtgcgaagctgccacatataataataaaagagcccctggcatttgggggatcagtgttgtaaatctataaatactgttcagtcttcaaagccctctgtggattgaccccattg

SEQ ID NO: 55223 - DNA, 392 bp, Zea mays
tgagtcaatcattttgcaaagaataattgatgctcaaattgattatcttggtatgaagcacattcgatagaagataaagggctggagtagccaagtgtttcaaggaagagatcaaggtgtgatatggcttaaaaaccgcatagtagtgccaaagaacgaaaaactccgtcaacaaattcttgatgaagcacatcttagtcgctattctattcatgccggaagcactaagatgtatcaagacttaaagcaacattattggtggacaaagatgaaaatcgaaattgcacgctatgtggctaagtgtgacacttgcagacgtgtcaaggccatacacatgaaaactgctggtccattacaacctttgccaatcccaacatggaaatgggaagaca

SEQ ID NO: 55224 - DNA, 404 bp, Zea mays
agcttgcttgagatggttgggtggaatgttgaaaaatgtgtgtatccaaatgagacaacgggaagtgatatactgtctctgccatattatgtagactggatcacagctggggactattggggatacatgagataaaatattcaagacccccatagtatacgggtattttaaagtccgatagtgctgcatatgtcaaaggaacatgaatgaaactgtattttgacacaatgttcctagacctaaataaaagtgtttggtggtttttgagcattggaagaacttgaaatactgacaaactcaaactcgacatttctacattggataatgaaataaatgtaatgtgtagtccgtattctgttggggttgccaccagtgtcatatagtatctttcttttctcattgac

SEQ ID NO: 55225 - DNA, 405 bp, Zea mays
tcagaaaacgaagccttcgcgttccaaaacttagttggagaacatctaacaaaagctgaaatagaagagcttaaagagtatgcccaatcctgtggatacaaacctaggcactcctcttcggaggcgttgatgacgagaaattagagtgtattcgggaccaaacaggggccaaagttatcagtactctgtccaagagtattggattcccgaagctagaaacagacatcagccgctaccgacgacaacatgtcgttggtagtttattttactccaacttcaaggtgaatgacttgtcccttaacgtttattgcttctaataaaaacatgtctgacgaacgttgtgtttgtgtagagtatgttattgagcaaagcctttgcaatgcagcaagatcttgaagataaaag

SEQ ID NO: 55226 - DNA, 370 bp, Zea mays
cagctttcagcaataaaaaaaggaagtacgcctctacaatttttaagcacgccgcaagactgtttgattagccgagagtgtttgcagagttcagcatcaactatataaagccgatcccgcagaaaaaaaagaatccagttaaagccttattcagttatttccattatacatggattagataagatttaaaaaatttttaaaaaaactttaacttgtttggaatttaaaatcatccaataccactcgatccaaatgtattaagagctaactgaataagccctaacacatggcgaaaaggacccgcacctgttcaacaacgaccagacagctcattttttttcccatggtgaagcatgtatggtagaatttt

SEQ ID NO: 55227 - DNA, 194 bp, Zea mays
tattagagtgactggttatgaaaggacatgcggtaagtctcgatttcagccatgtaagttgaactcattaaatgattatgtgccgtattacttaagtggctagttgtaacgtagatcttgattatgtctcttaaagacctagctaacaaggatcatgccataccttgactggcttcttgcatattataacttat

SEQ ID NO: 55228 - DNA, 340 bp, Zea mays
  unsure (1)..(340): unsure at all n locations
agcttctccaccatgtcgctgctagccaagttgttgcagctacctccatcaatgatcaaacgacatgaacgctccttaatgacacactttgtttgaaacacgtatgtcgctgattctgctctgccttctccatttgtgcactaagcacacgctgtacaatgaggctctcataatgctctgcatcatctgcaccaatctgttcttcgggtggntccttagtgcctacatcatcagccgcaagcaaagcaagtgtagcttcatccaaatcactagcagaggaatacccaccatcgtcttttaccaccaaaacacgcttgataagacaataacgcttgacgtg

SEQ ID NO: 55229 - DNA, 426 bp, Zea mays
  unsure (1)..(426): unsure at all n locations
cctatgaatctaagctcccttttatgccttcctgtatagagcttagggaatatttttattatttttgtaaagaattgtaatcaagagttgaactcaatactgtgtatatttgtccataccttataatataattttacctttccatccatgtacgtattgctttgttgtggatgaaattcgtgtatcttttgagccgaaggagaaaaacaccttcccttcttttcgtacacatcgaagcatttccttgcataaaatgcctgtatttatgtttgaagcgaagcttcttcgtgttcaacgaagcactttgtcgccgaagccggactatttttgttcgtgctttatgtcatgatgatgatgatcctatgaatgtctaatgaatgtctgtatgaatgcaatanatgatgtaatgtaacatgcaaatgtatg

SEQ ID NO: 55230 - DNA, 401 bp, Zea mays
cttgcattggagaataaaccttttgtcttataccagaacaggacaggtatacttaaaatatctgaatctaccaaataacttaaatacctcattcggcttggtacagaacttttttccatttctcccaccaagaatctccttcagcatttctcccaaatttctccgcacctaatgttttgtaatttagcgcattgaaaaatcagtcatgagtttgtgacagatgcaagaaataagcatacattgaaaggacaaaaaaaataaaggtcttcaacaaagctaatgagcgaaatttgcatgctcatgcacaagaatcatgctgattaaacactttgataatatgactatgctatcaaagagaggccccattataaaagaataatttgcatacctaattccttata

SEQ ID NO: 55231 - DNA, 286 bp, Zea mays
cttgcatgggctggctgtggcatcgccgcttatcacatgtgggatgaaaaaccttcacaagcttctaaaaggagaacacgtgataggtctaaccaatgttcatttctaaaaaaatagaccttgtgcagcttgtcaagcatggaaacaagtgggaggctctcatcacaccaaaaatgtgatgacaacatcaatacccctggagctgctacatatggaccttcttcgacccgtcgcctatctgagtataggaggaagtaagtatggtctagttatcggtgatgacttt

SEQ ID NO: 55232 - DNA, 393 bp, Zea mays
  unsure (1)..(393): unsure at all n locations
aacttantgctcctaaaaaaatgtctaactttgtttatggcaaggctcccatggtttaagataacgagggttacattttataccctgctggtatcccgaacacaaaantaggagaattcattctaagaagtctcactctggctctcatcatgcttttatgtataagagtgaggcatctagctctaggcaatcaacccatgttaaattgcctaaaaaaatttcctattgcatcaaatgaacataacatctcatttaagacgtttgatgcatcatatgttgtaactaacaaatcaagcaaaatacgtgccaaatatgttaagggcaaacacaaggggtcaaagacttgtgtttgggacccaaggtgcatgttctaatgtcaaagacccaaacagt

SEQ ID NO: 55233 - DNA, 393 bp, Zea mays
  unsure (1)..(393): unsure at all n locations
aacgtncgcgcccggaacgaagattgtgtttcatctttctcgtcgcgacgccacacctgcggtagagtccccaccaaagcgcggcgatctacgatcctgagccccaaaccctagtgtaagacatgctacactcagaggagggcatggcgaagatagataatggattctcaccaatgatggtgtcgcgcagtgcccggtccacgatgttgtgtggtcctcggcgaacttcacactccgacgagcaattcgacccgctccgaagtgtgatccccaccggtacggcgacgagcacacaccagggagccttacgaaggcccaggtctcgtccacgtgctccgaagcgttctgtgtgcgagtggtcaccatggaggctctctcttcccacgggtcacg

SEQ ID NO: 55234 - DNA, 326 bp, Zea mays
  unsure (1)..(326): unsure at all n locations
agcttgcaccccggtacattggtccttttttatccttgaaagatgtggactagtggcataccgactcctactacccgaaacattgtccgcatgcataatgtgttccacgtatcccaattgaagaagtgtcttcgggttctagatcgaaccgttggagtgacggatgttgccttanaaccagacttgacatattcagaacatcctattcgtgtgctggatcaaaaggacacggttacccgaagcaaaactctcaaattctataaggtacaatggaaccaacacacgaaagatgaagctacttgggaaactcaagactatttagaaaa

SEQ ID NO: 55235 - DNA, 414 bp, Zea mays
tcaactcttcgaaccatatccagatatttttcaagctttggatccttagccttgcaactcttgtcaatatgacccgaaacaacctgggaatcagttttaagttggcccttctgattcccattgcttttaacttccgaagacctagaatcaatgcttcgtactcggcaatgttatttgtgcaattaaaatcaagttttgccgcataacaagttttgacttttgaaggtgaaaccaacacagcagccgctcctgctccgaaggttccccaagatccatcacaaaacactgtccaggcttcattgtctttattcgtttcctcatcctgagcccctggcgtccaatcagcaataaagtctgccagcgcctgtgactgaatcgaagatctatgaacatattcaatacaaaattcattga

SEQ ID NO: 55236 - DNA, 350 bp, Zea mays
attaatgaagctgccgaaaaatgccagagggccttccgcacagtctgttctttcattggaacagagacttaatacaagagcatattgccttcagggtatggccgctcgcggagaaatgggaaatgccacaagaaaccgtaaaagaggccgacgaaggtggacttatcaggttgaagtacacttttaaatttggagataaattccttgagccagatgatgactggctaaaaagcattgaaaatttaagtgatgaactgcttggggcttattcgaaggccgaagacactgcaatgtcagcaaccttcggaggccgaataaagaagaggctgaatcgagtatttgatgcaatc

SEQ ID NO: 55237 - DNA, 415 bp, Zea mays
tgctaggtgtaggctcgcgaaaacgacgaaacacccatttttctttatagtgggttttaagctttcgacatgcaatcgagacgtagggaaggatcgaggtaatcaacaactcggtatatattatgtaactgtttataaaatcacatgtgatagctaaagatttaatctatgtaagtataattcatttaatgattttgtattatattttttaagtggatagagataacatagatattgattatgtctcttaaaagatcttagctaaaaagtcatataaactatcagtatgacttttcatctatttatattataacttatggatatttttaacttacattccaaatttaagacttattaattatgttttaactaaaccttcaaatttaaaatttactgcgtaatttaacatcaaatt

SEQ ID NO: 55238 - DNA, 398 bp, Zea mays
agcttcgtccggctgcacccttatgcaactgttgcgcggatagcctttgcggaagacttcgatttttcgcacttgttgtgctagcccgctgccccttaggcgacttctgcacggatagtcttcgcggaagactacgattttttgcacttgttgtgctagtccggctgcacccttaggcgacttctgcgcggatagtcttcgcggaagactacgatttttcgcacttgttgtgctagtcggctgcacccttaggcgacttctgcgcggatagtcttcacgaaagacttcgatttttcgcacttggtgtgctagtccggctgcacccttaggcgacttctgcgcggatagtcttcgcgaaggacttcgatttttccacttgtttggtagtccggtgcccc

SEQ ID NO: 55239 - DNA, 424 bp, Zea mays
  unsure (1)..(424): unsure at all n locations
cccacctntaccaaatggacgtgaaaagtgccttcctctatgtgttctatcaaggaggaggtctatgttgagcaacctcccggctttgaagatagtgagtatcctaaccacgtatataaagtctctaaggcgctttatgggctcaagcaagccccaagagcatggtatgaatgcctaaaagattttcttatcactaatggcttcaaagtcggaaaggccgatcctactttatttactaaaactctttcaaatgatttgtttgtatgccaaatttatgttgatgatattatatttgggtctactaacgaatctacatgtgaggaatttggtaggatcatgacacagaaattcgagatgtctatgatgggggagttgaagtacttcttaggatttcaagtgaagcaactccaagaaggtaccttca

SEQ ID NO: 55240 - DNA, 239 bp, Zea mays
gggcgagggtacctcgggctgggccgaggtctcgtcgggtttgggcgcgtcgtccagtttcacggatggttgatatatgtccctggagaaaagtccgggggaactatcgttcgccccgagctattttaccagctaatccgcggctcgttgtaccgtcgagcaacatggttgagttccagcccggggaacttatactgcaagcgccgaacttcgttgcaataaggcctcattttttgatc

SEQ ID NO: 55241 - DNA, 419 bp, Zea mays
agcttacccatgatgaggcatgcgaacagtttaaaggtcctcagtcatcaagcctacatcggtacggtccttaattgactcaacggagacactcaccgagcttccttctcgtgcaaggcactcgcccggtcttaactctatcatcctgagaccaaaggtgggtccctgtcagaggtacatacgttccgatgttggacccatcacgaccatgatggagccaccatcgagaattatttccgacatcatcccattgcatatgaagcgtcatcgttggcttacaacacaaccgtggtgctttctaaagcttgactcagcattagaaaaccttctgataaaacacgccatcaaggaatggtttacagttcccaggaaggagatgcagcgattggggtagcacaccactcctatcacttaatgca

SEQ ID NO: 55242 - DNA, 408 bp, Zea mays
ttatttggttgatttcactaaagagaatgtcgatctatatgcatgtttacttgctaagactaacatgggctggctatggcatcgcccgctagccatgttgagatgaagaaatttcataaacttctgaagggagaacatgtgttagtactaaccgatgtctattttgagaaagacagaccttgtgcagcatgttatgcaagaaagcaggtgggaacaagtcatccgagcaaaaatataatgatgacgtcaagaccatcggagctactgcatatggacctctttggacccattgcctatcttatcaaaggggaagtaagtatggtctacttattgttgatgacttttactacttcacttgggtattccttttgcatgataaatctgaaacccaaggaacctttcgagtgc

SEQ ID NO: 55243 - DNA, 396 bp, Zea mays
  unsure (1)..(396): unsure at all n locations
agctttgaacttatgatcaaagactccaaacatattgtcaacttggagcaaggcgccacctctacacccaaggtgcaacccgtcgcattcaaggcaacagagaaaagaaagaggagtctacatcaagtaggcttccaaactcaacaatgaggagatggcactcatcatcaagagcttccatcaaatcctcaagtaaaggagggggaaggattacaaaccccgctccaagagggtgtgctacaagtgtggtaagcccgatcattntattgccaaatgtccaatgtctagtgatagtgacaggggcaacgacaagagggggaagaagaaggagaagaagagatactagaagaagaatggcggcgatgcccacgtgtgtcgggaatgggactccgatga

SEQ ID NO: 55244 - DNA, 385 bp, Zea mays
  unsure (1)..(385): unsure at all n locations
aggcgaggggaaacagaatttttgttnttaaaattgattttttngttatttntggggatgtagacaatgaatcaagtagaacccaaagcttgaaaaatatttagacacggtnccaaggattgaggcttcgtttgaagggttttctgccaaaaatattcctcgnggagaaaatgaatatgctgatttattagacaagtcaggagcacatgggctggccttaccttctgaagtatttctcaaacaataaaagcaccttcggttgagcttattgaaagaagcagcctcaacatatctcctgtctatagggaagactggagaactgagatcatctctttccttgagcgtaactttgttgtagatgacgaaacttataacaggaggattg

SEQ ID NO: 55245 - DNA, 342 bp, Zea mays
agcttttatgtcaacatcaaggccactggaactactttatatggatttatttggacctacaaattatgtcagtgccggtggcaacctctactgtctaggatggtgatgacttctcaagatacacttgggtgttctttctccatgaccaatctgaagttgcctctatattcaagaagtttgcccagaaagcccaaaatgaatttgattgccagaattagaagattagaagtgacaatggcaaagaatttgaccacaccaattcatgagtactgtgatgaaattgggatcaagcctgaagtgtctgcacatatacacctaacaaaatggagttgtgaaaggaaa

SEQ ID NO: 55246 - DNA, 422 bp, Zea mays
  unsure (1)..(422): unsure at all n locations
gcttatccttagggtcattntatgacttttaccctaaagtatttatgttttcttaacttgagttaagttttacccctttgaccactatttagggttaagtccattacccaggttctatttgcaaaacacttaaaacaatacaacttgtttgaaatttttgcctagtgaatgcactctaggtgtgtcaaacatatgcaatgccaatgctcatgatgccatgctcaagttttagttatagtaacaccaggggtgttacactcgggggagacgagaccggaactgtggctcgcgaactaccgtctggcctgccaactgggtggaacggacgatgacaacctcatcatccgcaacctccccctgtttctctccgacaccgcccgcgcctggttggagcacctgcctccggngcagatctccaactg

SEQ ID NO: 55247 - DNA, 308 bp, Zea mays
agcttacccatgatgaggcatgtgaccattttaaaggtcctcagtcatcaagcctacatcggtccggcccttaattgactcagacggaaacactacaccagacttccttctcgggcaagtcactcgcccggtcttagctttatcattcaaaaaccaaagtttggtacctgtcaaaggtacatccttttcgatgttgaacccatcacgaccatgatggatccaccatcaagttttatttgtgaaatcatcccattccatttgaagcatcatctttggtttaacacaaaacctgtgtgttctctagcgcg

SEQ ID NO: 55248 - DNA, 410 bp, Zea mays
  unsure (1)..(410): unsure at all n locations
tgactcaggtatccacacattaatccttaattcctttttcccgtctcatggacaaggcatcctccctggatccaagtccatagactaacatatatcccgtttcaaatgaatacaatcaattcctgacctcgcgcgagtgctagaaaaatcactcgacttctaccgagatcctgattagcaagcagctactcgacctagcatactagtattcatctcaaaaaggaatcctaagttcatgcaactagaggtttcaagcaactcctacacttaagtgcacattacaatactacaagcattaagtgtagtaaagtagcatataataatacggttatgcataaaaccggggcttgccttcaattgctggggctgcggngagatcctcaatagcagcctctgaagcctgctcctgg

SEQ ID NO: 55249 - DNA, 170 bp, Zea mays
aacttcattcaaaaaataagaaattcaatcattagatggccagaatgcgttcacgcttgggttacccgccaccgagaagaaacccaaggtgcttaaactggcccaatctttgaagtgatgaaatgctcaaggcttgtagcatcggaggatgcacctgcccctgaaacaaa

SEQ ID NO: 55250 - DNA, 438 bp, Zea mays
acctataaaactcagcttctccaccatgtcgctgctacctaagttgttgtagctactttcatcaatgatcaaacgacatgaacgctccttaatgacacactttgtttgaaacaacgtatgttgtgattctgctctgccttctccatttgtgcactaagcacacgctgtacaatgaggctctcataacgctctgcatcatctgcaccaatctattcttcgggtggttccttagtgcctgcatcatcagccacaagcaaagcaagtgtagcttcatccaaatcactagcagaggaatacccaccatcatcttttaccaccaaagcacgctgattaggacaatcacgctgcacgtgtccatagcccttgcatcgataacactgaacatatcttgttctacccgtggaggctactgaagaggcactacctgctgatttctgg

SEQ ID NO: 55251 - DNA, 347 bp, Zea mays
agctttgagctctcgaaaggtgaatttatgcatgacactggtactctatttatagacgagaggtacaacttcgtatgaaatacaagcacgcccacgaagttacacatatgatttacaagtattacatgggaaatatcggcattcctccttcctttttgctgaacaagacttctgggtcatcctcttttctactttggttatttggtatttttcaatcgcgagaacaaatgaagcccatccacgacttgtttacaacacatgcataatttatagatagggataaaatatatacccaaaacttatttaatttggctcattattaattagtggtagatgatgatctttga

SEQ ID NO: 55252 - DNA, 385 bp, Zea mays
tctaaagggagaacacgtgataggtctaactaatgtgcatttcgaaaaagatagaccttgtgcagcttgtcaagcacgtaaacaagtgggaagtactcatcacatcagaatgtgatgactacatcaagacccctggagctgctgcatatggacctcttcggacccgtcgcctacctaagcatcgggggaagtaagtatggtttagtaattgttgatgattttcccgcttcacttgggtattctttttgcaggataaatctgaaacccaagggaccctcaagcgcttcctaaagagagctcaaaatgagtttgagctcaaggtgaagaagataaggagcgacaacgggtccgaattcaagaacattcaagtggaggagtaccttga

SEQ ID NO: 55253 - DNA, 387 bp, Zea mays
  unsure (1)..(387): unsure at all n locations
agctttcatccttcttcacaaactgtgctggacagccccaaggcgaagtgcttgggcgaataaatcccttatccagcaactcttgcgactgcttttcaactctgccaactcaacgggtggcattcggtagggcctcttggaaattggggccgttcccggttgcaactcgatggcgaactcaatatcccggtccggtgtcattcctggcaattcatcaagaaagacatctgcatactcacagaccactgggatcttcttcaggggtaactccgtcatagagaaagcacatgactgagaagaaccctgactaggcagaatcaaagtgaaattctngcagaagggagaattaacttccacggtacgactggctacgtcgagcacaacttg

SEQ ID NO: 55254 - DNA, 404 bp, Zea mays
  unsure (1)..(404): unsure at all n locations
tcacacggtcagaaatccaacgacagtgatgactttgtaggtgcaccggacatgtccggtgtgcaccggactgtccggtgcgccatcgagcagacagcctccaacggccacatttggtgtgtnttanacncngnccnnnngattgangcttcctttnaaaggttttctgttaaaaaaattcctcttggagaaaatgaatatgctgatttattactcaagtcagcaggacaggggctgcccttaccttcagaagtactttgaaaacaataaaagcacctaccgctgagcttgttgaaagagcaggacttaacatatttcctgttatactgaagacttgacaactgagatcattttctccttgagcgaactttntttcagagaaaaagcttatacaggaggataga

SEQ ID NO: 55255 - DNA, 308 bp, Zea mays
  unsure (1)..(308): unsure at all n locations
tgaggctgcaagcttaaagaactattcacttagtttataagttgatagaggccaggatgaaaacttactctctttactgttagatttatcatagaggatgtctatagatgggaaattccttgcatataaatgttaatagtgcatatactttgacatcatctatatgtgggcctaatnaaaggaatttagcttctttttgggctcaataatgagattcattgcatccacatataggacatatttggaaacccttttggttttaagctcgtttctaaggttaacaggccttcagtgtttaagaggataaa

SEQ ID NO: 55256 - DNA, 420 bp, Zea mays
tacgaagtccactatacccttggtattatcattttctcttgatttgacacttagaaaggccaaacaatgcgaaacgtaaatttggccagacttgaacagaattaactactcacttcaaaaatccataattggagtctcagtcatcccattcaggcgctcctagactttttagaaagccagtaacattgtctatatttcatttataaatctatcaggttaattcaatgcatatcaagatcaaaagacataagaaaggctttgctgtccaaatttggacagattcaaagattccaattaaaacagatgtagcttaacttataggtcaccaaaaagggtgatccaaaatttgttggaaagcttaaggaaagtactaccacttctttataatttataagaactgattcgaagtttaacttgggg

SEQ ID NO: 55257 - DNA, 414 bp, Zea mays
  unsure (1)..(414): unsure at all n locations
agcttgacacaactaaaagagaagtgcactttccaaccttctcaagataatcgngattacatggtgaaaaagcttgagacggaaacaaccgtggcatgcacacaaatcccttgaaaaaaaagtcaaggacttgaggattgtcaagaggaaggaacaaaagaagaacatcaatacctctgccaaaagcctcaaccatgcctccatgcaagggaacatccaaggaaatgatcaagccacacttcacactaagaaaagtaagaagtgtagtgaatgcttttaaaatgggcacttgattaggtcatgtccctatattaaagaaaatgtcttgattattaacaaggatgaataaacattgtttagatgctctaagaagggacatttagttaagtcatgtccccatgtaaaataaaatgg

SEQ ID NO: 55258 - DNA, 413 bp, Zea mays
tagttggaaatttagtctcaaataatccatgatatctatgataataagattatgtcaatttcgaaaatagattgaaaaaaagtgcattagacacattgtctgctttacatgtagccccggcaccacatgtcaattttacacctgtaagtttatacagtgcttctgaaaacaatacaatttcccgatacagggtttgcagatcggaagaaaaatatgcagtaccattcattagttaggcatctgatattaagggggtgtttggttaaagagactaaagattagtctctagtttttagtctcatttagtctcttttttgccaaacactatgactaaaatatgtactaaaatgatttaatctttagtccttcacatatatgctaaaagagactaaaccatattaattctacattta

SEQ ID NO: 55259 - DNA, 376 bp, Zea mays
cgtggaggttcttcatccccacatgggctaatttacgatttcatatccagcccatgctaggcttaccaattaagcatgcatgtagaccggcctctctttgaaaatcaactaaatagagtttgtcgtgtaatacacccttaaaagctaatgaaccatcacttattctaaagacagacacatctacactagtgaatagacaattatataccatattacataattgacttacagataacaaattatatccaagcgactcaactaacaatacattagaaatagagtgctcatttgagattgccatcttgcctaagcctttaaccctgccttgattcccgccaccgaatatgattgaatcttggggatcctttgtcttgac

SEQ ID NO: 55260 - DNA, 410 bp, Zea mays
agcttaacaggtcatttgtacttaacagttttctaaagcttaacaaatcaggtcatcaattcaactagatcaggagcttaacaacagttcactaaagcttaaccagatcggtgcactaaagcttaacacagctcatcaggtgaccatacatcaactagatcaaaagcttaagagcagctcactaaaccttaacagttcatagtgcatacaaatcagttcatcaggtcaaccagatgaggagcttaacagatattactaaagcttaacacagttcatcaggtgaccatacaacaaccagatcaaaagcttaacagcagttcactaaagcttaacagttcatagagcatacaaatcaattcatcagttcaaccagatcaggagcttaacagatatcactaaagcttaacaca

SEQ ID NO: 55261 - DNA, 373 bp, Zea mays
ttatatgggaggaagtgcacgactcctttatatttggatcatactgaccagagatacctctttggacctgaacttattcatcaagaggccgaacaacaagtcctataattcacgagaatttgagggtagctcaaaccacgcaaaggagctattctgataatagaaggagaccactggaatttgaggaaggtgatcatgtgtacctcaaggtatcaccacttcgtggaatgaggagattcaaggctatgggcaaattgtcccctcgctttattggaccattcggagtttttaggcaagttggaaagatggcctattaacttcagctacctgataatctaactgatgtgcataatgtattccatgtgtctcaact

SEQ ID NO: 55262 - DNA, 264 bp, Zea mays
atgcccgaggggctcaaaaatgctggaggcagcttcagcaaaatgacagccaggtttcttactcttaaataggcaggaatgtgctaacttatgttgatgacctcataagtaaaagcctgaaacaataaaatcacattgccgatttgcaagagacgttcgccaattttagacaaactggtctcaaattaaatccacaaagtttgtttttggaagaaagaagggcacagtccttggctgtctggtatcaacaaagggtatcaaagc

SEQ ID NO: 55263 - DNA, 112 bp, Zea mays
tcccttgaccttccccaaccatggtcggcaccccctctaaaggccgggagcatggcatggcctccaacggtcgtcgttctctggtgcgccctcaccgatcttccaacccgtc

SEQ ID NO: 55264 - DNA, 343 bp, Zea mays
agccgccacgatggatatgtctcaacaagacctccctccagggtatcaagaagactttgcctgatagtcgattcaccgaagactacgagacttggacgccagggccgatcttcggagtcttcacccccactttccacatcataactatcgctgtcatcggtatcttcagataagccttctagaatttctttggaaatcctttctgtgccggtcaatgcaattgactcgatgaatacagcagcctttcccataagaagctcctcctcttcggtcagctacgcttcatcaactgattcctgtgcttgagacattctatcttcggaactgacgaaaatatttccct

SEQ ID NO: 55265 - DNA, 395 bp, Zea mays
agcttgtcaggtgaatgtggatcactcatgattgctgttttttttatttccaaacaatcgtttgatcattctgaaggcaccgtgatgattagtcacatcactgtctcaattgtcatcatgcttagcccatcctcacagttgggcttagcagctacagtcgggatatcgataataaatgaccaaattctcgaaagctctgctgatgatgggcaccctgagtaacagtttatggcctgccttttatgcccagaagcccctgatgctgcatcatgcccattccaatcacagttttggcaaagtgatgtgttgttctcaagacatcggactgatgcaggctgtaaaccacaacgatcacaaagaagggttcttctatgacgccgagacagtgcattagc

SEQ ID NO: 55266 - DNA, 407 bp, Zea mays
  unsure (1)..(407): unsure at all n locations
cgaatcacttntatacccctgagataccataaaccctaattggttttctctttaaccctaaaccaaaccctaggggcttatatgcaaaattagtccacttttgggtaagtgcaaaaaccaagccaaataggtttcttaagtcccttggttcacaaaaatgtgtacttgaaagcaaaacccaagggtttggacctaaatgcaaaatggacctcatttgagtttactctaagtctgagaaatcagtgtaggggctcaactttggggctttgtaactcgcaaagtatagggtttttaccctacgtcaccacatcaaaggtgaagacccattataggagaacaactttgctaaagggtgcaagcatagttgttatgaagaatttggagaataacccaatccaaaactggct

SEQ ID NO: 55267 - DNA, 332 bp, Zea mays
agcttataaaaatctggtatgaatctgcgatttttttttctagtcccagaaaactccggacttggtgaacaggggttcggggttccactccaaatattttgaccttgctaggatctaccgcaatttctttggccgataacacctgccccaaaaattgaattttcttcaaccagaacgcgcacttgctgaacttggcatacaggtgatgttcccttaagccgcgtaatacaatccgtagatgctgagcatgctcctcttctttttagaatatatcaagatatcgtcgataagaccaccacgaacttgtcccactcgggcatgaacaccgagtt

SEQ ID NO: 55268 - DNA, 418 bp, Zea mays
cgcctgaacgattcaaaaaagctcctatcataccagaataaattatcgttctttaaattgcccaatcatccattccgtgaaacaaactgcgagagagccacactgttaagatgtgaacggggttcaaaagtgatgcagtcagttcatgtacatattgctaacaacggcgacgacttctgtacataaccccaaagagaagggcctatgggacactgagaccgacaccttctgtacacaactagcacacacgccacgtctgacatcaactgttagggtatgtaagatgctgagcttacaagatgaccgccgatggaggcttgtttatgatttcataccacttcttgcctaaagatgaatgtaaggtggctcaatgtctaggagcatttacattacctgagtgctcgatgcctaatgatga

SEQ ID NO: 55269 - DNA, 255 bp, Zea mays
catgccagcttattttccgggtcccgcccgggcctatatttttcttttcttgttctcagggcgaacccctgattttcggcccagacgcaaggccgagcagccatgccgccgtcgccttgcgcctcctggccgttttccctccgttccgccatgcccttcaccgcagacatacatattaccttcggtgcctttccacacgcttggacttagtttatgtacggggccatgcccgaacctcggctttccgcctctgcg

SEQ ID NO: 55270 - DNA, 369 bp, Zea mays
tagtgcaagcgtgtggaatggaaagacaaccaagcttttgtgtttttttgcttgagtgaagggcaatgtggaacggagggaaaacggaggaggcgcgcggcaccgcggcaaggctgttccgccttgcgtctgggctgaaaacgaagtgttcgccatggcgcacgggccgaataccgaggctcgggcacgaacttcaaaataaactaagttcaagcatgtggaaagacaccgaacataccgtgtatgtctttggtgaagggcacagtggaacggagggaaaacgacaccgaagcacccggcgacgggcggcatggctggtcggccttgcgtttgggctgaaaacgaggcgttcgccatgtcgcgcgggcc

SEQ ID NO: 55271 - DNA, 396 bp, Zea mays
  unsure (1)..(396): unsure at all n locations
agcttataaaaattatataaacatccctggttggattggttttaagncatgattccggaacaaacgaacacaccctaaagccttgtcgtttggtcgatgcacccggaatcattccagttaatcaaaatttatataaattagagaaacaatccgattagaaatcattccgacccaccaatccgtaacaaccgaacggtgcctaagtggatttttgacttgttatagatttaaaccgagtcaatatcattcaatctacatggatttatgtcaaaatgaacaagcccgaatggggttgttttccatggagaaaagttttcggttgtgacagcggatgtggcatcgaatgtcaaaaggagtttttagatactaataaaaatctaattacataactcgaat

SEQ ID NO: 55272 - DNA, 399 bp, Zea mays
tcacgagagagggaacaggtcctaggcctcctgaggagtctagtgttgcggagtggagttcgatgttggagtgagtccgtctccgtcgtctgtgccgcctgtccccttcctccttttcagaaggccctgggcatccccttttatagatacaaagggatggtctagctgtacatatgggggtgttgctatgtgctaacgtggccgacggagaagtgcttgtgccctgtagaagcgtagctggcggtgcagccctgggtcctgctgacgtttctttgccttcatagagagcttgaggactatcgacgtcatggacgcatgcgaggaaccattgtgacggaacctctcaagtcattaagcccacctacagttgtcctttgtccacggacctcagacaaccct

SEQ ID NO: 55273 - DNA, 310 bp, Zea mays
  unsure (1)..(310): unsure at all n locations
atgcttttcatattgtgtacagcttcattccgagccgaaggcccctgtgaatatattatacttggaaaacatgttagttgggtttttgaagaccttcggaagaccaaagccccaatagtagcccctcgcactattaatttgttatagcaataaattcagactgcgacgtaaatgaaggccttaagccaaaggtccgaanaaacaccttcccttcgctagaatagcgaaagtcaatgacagatggggcctgccaagttgcacagcgctaggcgtatgtaagaaacgggtgacgcctaagaggggggggggg

SEQ ID NO: 55274 - DNA, 416 bp, Zea mays
tgaggctatgtatagattaccgcccacttaatgcggtgactatcaagaacaagtatcctttgccttgtattgatgttcttttcgatcaattggtcagagcttaagattttccaagatagaccttcgctccggctatcatcagatcaagatacgagcaagtgatattccgaagactgccttctcaaccagatatgggatgtacgagtatttggtgatgtcatttgggctgactaatgcgccagcatacttcatgtatctgatgaattctgtcttcatgcctgaactggacaagttcgtggtggttttcatcgatgatatcttagtgtactcaaagaacgaagaagagcatgccggtcatttgcatgtagtgcttcaacgactgcgagagcaccgcctttatgccaaactatcaaaat

SEQ ID NO: 55275 - DNA, 322 bp, Zea mays
ataccatgtttgggctacatttcggactgccatgaacaaggcttcccatgctacaggattgcccccatacgaagaattagttgcttcgtagctcatcaaaaactgctttggatctgaatgcccatcatacatggggagctgaagtggcttgtatgatgggggccatggggtagcctgcagttctgctgccaagggagaagcatcatcaaaagtaaaggcattatgattaaaatcatcataccatccatcctcgttgaataagccttcttgacgaagctccctatgttggggccttcgatcttgttcatcttgaacaagatga

SEQ ID NO: 55276 - DNA, 372 bp, Zea mays
  unsure (1)..(372): unsure at all n locations
ggcatcccgcagctgtaatcatcttgcgaaccaacttattcaacatcagcttgngtagttccgcaacacgtgtgtcctctaatgaaaccaacccaaaacgcctcattgcttcggaaatcaaaacaagctccagaggcttggagctcatctccatcacgctcaaacctaacattggatcgcactctggccatttgattatgaatttcttgaagtcgattaataacctttattttgaagcccttcttctgacgaagcagaatccaaagtggagcttcgtttgagtacaaaactcaagcttcagctatggttaaatttttggcagcaaaacagtgcaatagcaatgaatgttgaggtgacttcacacctacccgt

SEQ ID NO: 55277 - DNA, 404 bp, Zea mays
agcttcaccttaagactagctgcactcagttaatctatctggataaactggccagttaagtttgcagattagtagttgaaaggagtaccatgtgaccttgaccttggtatttattctctggttcaggcatttggtcgtacccctttgactaacataagccctaagaaaaccttggagggtgctttagctggcctagctggctgtgtgctgaccactgtgctgctgtcaactgccttacgctggccaagatcactgttgaggtgtgaattctggaatttctactattattgtgttagcaatggaacagtaccttcctctagggaagtgctatctcgcacattaaagagaaaaaaccaatacgacaaactatattatgtgcatattagactttggacttgattatc

SEQ ID NO: 55278 - DNA, 408 bp, Zea mays
tgtgaagattcttcatcccaacatgtgctagtcggcgattccagagccagcccatgttagtcttagcaattaagcaagtgtcgagttcagctctatcaaaattaccaagtatagctgaccctctaacacccccttaaatgctattggatcatcacttcttctaaagacagtgacacctacatcagtaaaaagacagttgtagcccattttgcataattgagacacagaaagcaaattgtaatctaatgaatctacaagaaaaagattggaaatagaatggtcaggagatatagctattttaccaagacctttgaccaaaccttgatttccatccccgaatgtgatcgctcgctggggatcttggattatctcgtatgaggagaacatctttctctcccatgtcatatg

SEQ ID NO: 55279 - DNA, 413 bp, Zea mays
  unsure (1)..(413): unsure at all n locations
tggaggcgtcnatnggaagtctacttggggtattttcttctcttcttctctttcagtgctttgaatgcaacgggttgcacctcgggtgtggaggtggcgcccgctccaagttgacaatatgtttggagtctttcatcataagttcaaagctcataaacttgccaattacttcctcaagggacatttgtttgtatctaggatctccacgaattaattgaacttgagtaggattaccaaaaacaagagatcttagaataaccttgaccatttcatggtcatcccatttggtgctccggaggttgtgcactcggttgaccattgttttgagccgcgtgtacatcgcttgtggctcctctcctttgttgaggacgaatcgaacgagttctccctccatcggtttgcgcttggtgatc

SEQ ID NO: 55280 - DNA, 380 bp, Zea mays
  unsure (1)..(380): unsure at all n locations
cttcgtaaaaacatccatgctttgtaagaacatccaagcttcggaaaaacatccatgctttgtaaacaaaagatcccttcttttgcaacagagtgatggaactgtatttctcagcttactttgggccttagcacattttcattttcataaagcgttctccgaagatcgactttgtattcaattcgagtcattggtgcgatatgatgtatgatgtgatgctatgcgggatgatgtgatgatatgatgcgaagaatgatgctaatgccgatgatacacacctaatacacacccacacgttcacactgaaacacacaatctctgcgtccccttaagaacgatcggaatctctttgccggttattnttcggattcaccgcttat

SEQ ID NO: 55281 - DNA, 324 bp, Zea mays
tatcaaaatactaaaggctgcgcagaacttatacagcccacagaattcatctctgcgaattttccaaaaaagatccttcacattagcgcgtgaaaatacctttgtttcatgtgtatacctctctaaggctggttggtactagtataaatacccctatgtctatgatgttaggcaactttggataatctaaaaacagaacccttttgttcatctatgtgctaacaaatattgagagtgatctctacccctttgcttttgtgaattccttcacgggattgcagatgcggcaacttcatccgctgccaagtggtgctcctactccct

SEQ ID NO: 55282 - DNA, 369 bp, Zea mays
  unsure (1)..(369): unsure at all n locations
cagctttgacaaactgagcatttgattttgctaaccttaccccgactcctaaaggccaccatatccttgagagtctttccttttagtcgagtagacttgcgtaaatacactccgtactcagggtttttcaacccatgttggtgtagtagatgacacctgctgagttttgtgtttctgtgtcaagattgttctgaagcacgaggatgaaaattaaataaaacttatggaaggtgcctacctttcggtgatgtaataagcagaagcacttgaacccgtatattgtaataatgactctctctatattatacctgngaatgtaattaagatattgcactcttttcacttttactccaatggtatgtaatgtct

SEQ ID NO: 55283 - DNA, 218 bp, Zea mays
gttaatgggacccccttggctgactaattaagaaaagctaggggaaagactaccttacccgaaaggggcaagggccataggggagttgcatgccaagaggttctcgggttgatttatctgcgatggccgtcaaacgggggattcttgcaagtgctcttcccataaactgtaccgggttttcggaagctagtggaactttgaaaagcctcgtagtgtgc

SEQ ID NO: 55284 - DNA, 375 bp, Zea mays
agcttaaccagaagtatctgaaatagattcatgacccagatctgggtaagtggcgggcggaaaatggcaggcgacgaagctcgaaccattttaagccggtaagaaacttatgttttgttacttttaccttctcctttgaaatttgtacctttcttactctgctatttggtatatacaggatgacgaagctgaagattgacaatgctgaagtttggcaaaactgaagacgaagccttagctgaagcttaaagttgcttataatatgctttcctgcaaaaattcttgaagaaactcttgtaatatagatatggaatatcttatggtaaattggacataccttggaatatatcctggctcccttatcccgattcaatc

SEQ ID NO: 55285 - DNA, 405 bp, Zea mays
  unsure (1)..(405): unsure at all n locations
tagtaatgctgattggtctaccctgctcgaacgcatagaaaagaaattgggtagctggaagggcaagcatctatcttatggaggacgtctggtccttattaattcggtcctttcgagccttcctttgtatatgttgtctttttttgaaatacctagggaggttttaaaaaaggtggattatctaaggtctagattcttttggcagtctgatcaacaaaagaaaaaattcagattagctaagtggagtattctttgccagcccaaggatattggtggtttggggattaagaatattgacattcagaataaatgcttgctaagcaaatggctggttaagctgctaaatgaggagggtatgtggcaacagattntaagaaggaaatacttaggtaacaagaccgtggg

SEQ ID NO: 55286 - DNA, 272 bp, Zea mays
agctttaaggttttgcttggttccttgctcatcatgtattggtggcggataaggttgaagcacccgccacccgaaactctcgatgtgatttcgaggtggaggaggaactgttcttccacaccactggttcccaaccgccctgtgccgggcgctgctactgggcatgccgcacggcagcatacggctgcacagacattccggactccgtcgagggcgacttcgggagcattgtcagcagctagggagttgctgcaacaccctccaagctccac

SEQ ID NO: 55287 - DNA, 398 bp, Zea mays
gacctataaaactcagcttcgatgtccatcagatatattcttgaaatttcgacgtggtcattggcgttgcgccccacctctccctttttcttcccctgggctcgacgagacgtgacgccgtacagactgcgacgatgcgaatcgcgcgcaaagaaacttgcttagcctcggaggtaaaagtccaggagaggagccgggaatagttcgccgatcgatggtttctggccgatatggatcatggatgggaggagagtctctgcgaatactcgtacgtattattgcgtggtgccaagcggtgacactcggcagccggtggtcggtcgtctactgaaggctcctcaccgtcgcgctggtgacactgaccggggtaactacagtacaaaaaccgaagtcgtact

SEQ ID NO: 55288 - DNA, 384 bp, Zea mays
agctttatcaaatggatgtgaaaagtacctttctcaatggaccaatcaaggaagaggtctatgttgaacacacctcccggctttgaagatagtgagaccctactatgtttataaactctctaaggcgctttatgggctcaagcaagccccaagagcatggtatgaatgcctaagagattttttattgctaatggcttcaaagtcggaaaagccgatcctactctctttactaaaactattgcaaatgatttgtttgtaggcaaatttatgttgatgatatcatatttgggtctagtaacaaatctacttgtaagagttagtaggatcatggttcaaaaattcgagatgtctatgatgggggagttgaagtatttcttatgattt

SEQ ID NO: 55289 - DNA, 373 bp, Zea mays
  unsure (1)..(373): unsure at all n locations
tcacgagagagcgaacgggccctangcctcctatgggggtctagtgttgcggagtggagctcgatgtttgggtgagtccgtctccgttggtcttgctgcccgtgttcccccttttctccttcgaaggccctgggcatccccttttatagacacaaggggatggtccagctgtacatacgggggtgtaacaatgtgctaacgcgtccggcggagaggtgcttgagccctgtatgaagcgtagctggcggtgcggccccgggtcctgctgatgtttctttgccttcgtagagagcttgtggactattgacgtcatggacgcatgcggngaaccatcattacctgttgccggagtaatctagatgtgactccggtc

SEQ ID NO: 55290 - DNA, 414 bp, Zea mays
agcttctaaagggagaacacattttaggattaacaaatgttcattttgacaaaaagacaggatttgtagcgcatgccaagcagggaagcaagttggaactatcatccacacaagaacatcatgacgaccgacaatccactggagctcctacacatggatctattcggcccgattgcttacataagcatcggcgggagtaagtactgtctagttattgtggatgattattctcgcttcacttgggtgttctttttgcaggaaaaatctcatacccaagaaactttaaagggattcttgagacgggctcaaaacgagttcggcttaaggatcaagaaaattagaagcgacaacgggacggagttcaagaactctcaaattgaaggcttccttgaggaggagggcatcaagcatgag

SEQ ID NO: 55291 - DNA, 417 bp, Zea mays
tcaacaagccagttagatccactccgtcacgtttcagtcttcatggtcaaagttccctctaggccccctccgttgcaagcaaccaacctccagccaatgcctgtggcttgcggagaccccagtcactacaagaataattgtcctcagttgaagacatttgtgcctacctactccaactcggtgaatggccccaagagtgccccagcacccgcctccaaggcaccctcctccaacagccagctaagcaagacccagtatcatggcagggcacgagtaaaccacgtcgacgctcaagaggctcagcaagccctaggagtagtgctcgatgagttcctaggtgaatgtactcccgtctctgtactttgtgatttaggaccatctcattcattcataaccactgggtttgtggaacagcat

SEQ ID NO: 55292 - DNA, 420 bp, Zea mays
agcttgagacgggaacaaccggggcatgcactacatttcttgaagaaaatgtcaaggacttgaggattgccacagaagaggaagcaaaagaagaaaataaccctcttccaaaagcctcaaccatgcctccataaaaggtaacattcaaggtaataatcaagttacacttcatacaaatgaaaataagaagtgtagtgaatgctttgaaaaggggcacttgattagatcatgtccctacattaaaagtgtcttgattattaacaaggatgatagactttgttttaaatgctccaagaagggacacttacttagatcttgtccccatttaaaacaaagaggcatagggttagaaaagaaagttttactaaccatgtagcaagcaacaaacaaggaaagaagaaagcttcaaaacttgaaaaa

SEQ ID NO: 55293 - DNA, 402 bp, Zea mays
  unsure (1)..(402): unsure at all n locations
ntggccccacctgcaggctcgcatcctcccctaaggtggtcccggtggccactttcggtaccctgaaactagggtaccccttattactgtatgtgacgcagaccacacggctatctttagtcgtgtggtaaaggagctgtacatgggaccagaccatgactcgccccagcctcaggcgactactctaggccagcaacagcgcctaaccccaccacgtgggcggcttcggggctgccacgtggccagagaaagtgatagactccaaggcttcaacagtgagtccggacccccatgggaaagtgtcggacccctggatatacagtccggacctccaagttggtccaggacccctacgtgtacggaccggacccctagaatgcgatctggatcccccccgtatgg

SEQ ID NO: 55294 - DNA, 401 bp, Zea mays
agcttgtacaatgttgaggaacccacaacgttttgggcacatataaaaatacagttggtaaatgaattataggattggttcacattcaaataggattgcaatctctacttatctcgatgaagaaggcagtctagaagatcacgagggaaaggtataaacaccaaacaaactttactcgcaaattctgttggaacatgtttaaataactcttatttaaacaaggcatatgtatgttcataacaacgtataggtacctaacttactactatgaagaaggtaaggggtaggctgaccctctctggttctgcctttcatatctccgacaaatggactcgacacttttggcaaaaccatccacgccttgcctcctctggctcttccccgtctcttgcttcaatcgc

SEQ ID NO: 55295 - DNA, 446 bp, Zea mays
  unsure (1)..(446): unsure at all n locations
cactctagtgacactataaaactcagcttcttcttcattctgatgaaaaccaagccctttgatcacttcatcaaaacgaatgttccaactccgagatgcttgcttcaacccataaatggatttcggaagattgctatctttccagcattgatcggatcgacaaaaccctcgggttgtatcatatacacgtcctcatctaggtttccattaaggaaagatgttttgacatccatctgccaaatctcataatcgaaatatgcggcaatagctagaatgatccgaatagatttaagcatcgctactggcgagaatgtctcgtcatagtcaactccttgaacttgtcgaanaccctttgcaacaagtcgagccttatagatgtgaacatttccatccatgtctttcttcttcttatagatccgtttgcattctataggtctaacaccatc

SEQ ID NO: 55296 - DNA, 293 bp, Zea mays
  unsure (1)..(293): unsure at all n locations
agatgattttctttaatacttgaattgcccgaaaccgcatggcttggcccgccaaggcgatcttcggagtcttcaccaacactatctgcatcataactgtcgctatcaccagtgtcttcagataaaccttccaaaatttctttagtgatcttttctgtattggtcttcgacatagatcgaagaanacccagatgcatctcttcagaaagactcaacttcatttcggcagcaaccttcttctcctcagacatctcttcggaattcttgcctttcgcttccgaagcttaaaacta

SEQ ID NO: 55297 - DNA, 417 bp, Zea mays
tagatgacaaagagcactaacttaaggtcttttcttgcggattggtgcttcacttaaatgaaattttaacttgaagcctcaccgaatgatatgagcaagaaactgcaagagaacttaaagtaacggaaagcaaacaaattacaatcaaaagcacaatgaacacgggtgatttgatttaccgaggttcggccctcgaaggcctagtccccgttgacgagtccacttaaggacgggtctttttcaaccctttccctctctcccgatcacacaaggatcggcgagctcttcttcttctcaaggatcactctcgatcccacaaggaccaccacaatctttggtgtctcttgctagcttttacaagccttcaacactttggaggaagttcgaatgggagtcaaaaacttcacgcgcaaatga

SEQ ID NO: 55298 - DNA, 412 bp, Zea mays
  unsure (1)..(412): unsure at all n locations
agcttgagacaggaacaaccgtggcatgcactacatcccttgaagaaaatgtcaaggatttgaggattgcaatgaggaaggaacaaaatatgaaattcatctaccttcttcaaaagcctcaaccacgcctccacaaaaagtaacatccaaggtaatgatcaagtcacacttcacattaagaggtgtagtgaatgctttgaaaaggggcacttgattaggtcgtgtccctacattaaaaatggcttgattattaacaaggatgatagactttgttttaaatgctccaagaagggacacttgcttagatcttgtccccatttaaaacaaagaggcatagggttagaaaaaaaaatttttactaaccatgtagcangcaacaaacaaggaaggaagaaagtttcaaaacttggaa

SEQ ID NO: 55299 - DNA, 330 bp, Zea mays
agatagtgagtaccccaacctgtctataggctctctaaggcgctttatgggctcaagcaagccccaagaacatggtatgaatgccttaaagatttccttattgcaaatggcttcaaagtcggaaaggccgatcctacactctttactaaaactcttgaaaatgacttgtttgtatgccaaatttatgttgatgatattatatttgggtctactaacaagtctacatgtgaagagcttagtaggattatgacacacaaattcgagatgtctatgatgggggagttgaagtattttctatgattcccagtcaagcaacttcaagagggcacc

SEQ ID NO: 55300 - DNA, 406 bp, Zea mays
agcttatcaaagaaaaattatattgaatttgttaaggggttgtatgtagtcttaatggcctccaagaagcttcagcattattttcaagcttccatataattgttccttcatcacagcctctgaaggatatcatgaagaatagaaaaactactgaaaggattggaaagtgggctgcggaactcaacgaattcagcattgattatgtgcatagatcctcaattcagtcccaggcgttagcagactttatcgctgactggacgccaggggctcaggaaaaagaagcaaataaagatgccgaagcttggacagtgttttgcgacggttcctagggaaccttcggggcaggtgcggctgctgtcttaattgcaccttccaaagtcagaacatgctatgcagtaaagcttga

SEQ ID NO: 55301 - DNA, 413 bp, Zea mays
tggtccgaggtatatatgaccgtctgctatctttgctcggttggcagctgggcttagcacatgtaactgtcggaatctgtgatcagagtacaccaagtttccatgtctttttgttgaggaagtatttgcggaatccacaccatcaaatcgagctagagccgattcctgtgtagcaagagcagactctagagtgtcgtctgctgcgtatcttagaatcctatgagcttgaggagctgatacggcagaagtactcgaacttttctttatgtgtgagatttgttgattcgttaacctttcttttgttgttccgatagaagcgtcagaattcgaggtcgaattctttttaataggggtagagtgtgataccccgtttgcaaagaagagaagttggggggtgttctttatggtttttt

SEQ ID NO: 55302 - DNA, 113 bp, Zea mays
gatccattgaaagagtgatgctgccaaacaagaaaaaaccttataacttgggacccaatttgaaatggggcctttgaaaatagaataaaaaagccttgagtgcccacataatt

SEQ ID NO: 55303 - DNA, 350 bp, Zea mays
ccaatggagggccccgtgcaaggacatttgcgctattccatctaaagatgtgtaaagactattcctaacaaatgtacaaaataatggcataatccaagcttccattgcataggcatacattctaaaggaagtctcaaacttcacaacaacttattatggtgacaaactgccgaacgtgcataatccaccccctcggtacaatgatggcgacaatgaatcgaaccttaacatatttcgacgccaacttagaagcgcaagtggctcgaccacgaagaccctgacacatgaagagtggcgacatatcatgctatacgtattgaccaaccttgaagaggcgacaccatacatgg

SEQ ID NO: 55304 - DNA, 411 bp, Zea mays
  unsure (1)..(411): unsure at all n locations
agcttcaagccttcgaactggatccaaatatttctcaagcttcgaatctcttgctttataactcttgtcaacatgaccagaaataacttgggaatagttttgagaaccacccttcttatcctcattgccttcaacttccgaagccccaaaagcaaagcttcgtattcagcaatattatttgtgcagctaaaatcaagtttcactgcataacatgttctaactttggaaggtgcaactaaaacagcagctgcacctgccccgaaggttccctaagaaccgtcgcagaacactgtccaagcttcggagtctttacttgcttctttctnctgagcacctgggcgtcagtcagcgatgaagtctgctagagcttgagactgattcgaggatctatggacataatcaatgctgaat

SEQ ID NO: 55305 - DNA, 398 bp, Zea mays
tcatttcttttcctcttgtttcgagtatctggactgatttgtcggtaacagaatcgcttgtccgagcgagagttacttttcacggaaggtgatgaggaggatccgtatcccggaggcgtaagagtccctcggctcggtcggccttgtcgcttacgtgtactcttactcgtccgtaagattctgccatcgatatagtcgagaaggcccaaaaaatcgtttcggcagaagagttttcgagcgtgaagacttgttcggtccgcggaatcacttatccgagcgtgagttacttatcgcagaaggtgatgagtgaagtatccgtatcccggaggcgtatgagtccctcggctcggtcagccttgagtgcttacgtgtactccatcgtttttaggatcccactt

SEQ ID NO: 55306 - DNA, 409 bp, Zea mays
tgctatcttaacaacagggttaataacctcttgttttttgcaagataacagatcattttcaacaagaagattgtcatgatccaatttaatttgagttatagtcttccttgatcttaactaggtctattttgcaacctccctatttgcttcatttaatttgtcatatttctccttaacatcttttagggagtgtgggaactcatttatggctgatgacatagttttattttcttcttttatttcatcactagcctttatgactatgtcatacttggcatttaaagattcattttcatttttcaacctatcacatttagcttttgactttctaatgatgtgagtatattctttaagtaagtcagctaactcatcatatgaaggtgaagcaaattcttcatcactatcacta

SEQ ID NO: 55307 - DNA, 400 bp, Zea mays
  unsure (1)..(400): unsure at all n locations
tcctctcgtcgtcgattagcgacgcttacgcgagcttcttttgttagtggtggttggaccgggggtcccagtaagaaaccatggcttatctttgacttgggttaataaaatgactcccagttagattcatggaaaaaatattacggggaataaatgtcacaccatgcaaaaggaatttaggttgaaaacattattcaaacaaaataaatggtatgcaaggctcttctttaaatactactcactccatccaaaaatatgattcaagaatctcggtgatacttatcaactactacacattgtgtaagggtagcaggtaggcttcnagatagatgtagtagatatttttactgtaatagatgtggacataaatacacatgtggtgtagtggtagctacaatca

SEQ ID NO: 55308 - DNA, 400 bp, Zea mays
tcagcgaccaagtgatctagctctttgggttccacgaagttgaagactctgagcatctgtttggtgaaggcaagtgtcctctgacccattatgtccatttactttataatacactgtcccgcatactatgaacaacctaaggatttactagctttctatttaccttgtccttgatttaccttttgggttactatggttagctacatgctagcgctttactttaatcaatgaacatgatgagatacaatgatgatactatgattttattctggatatgatgatatacttgtggcatttaggggactcgggctgtttcccgagtacctctccgtaaggacctgttcgttgagagaccacccgggataacagtgcaaccatgagggtgaaatgggatgccctt

SEQ ID NO: 55309 - DNA, 416 bp, Zea mays
agctttcaaggctttcaaatgaagccggtcacatctcatgtcctgtttcaatgcacgcaagaccatgaggagtatcttcaggcgtacgttctaagttcttgcgtctcaaagcacatgcgcctacagtgcccaatgaaattgtcattgaagccatgatcaaggggcttcgtctaagacctactgcccagtatttcgccaggaagcatccacagactctggagaagctgcttcaaaagatggatgagtacatcaaggctgacaatgacttccgccaaagaagggaggaagattacaggttctctgagatgaccatgggcttcagaggaagaatccacccgagacatgttaggtcaattcacaactccactcagaatgatgacagaggaagtcatctacagaggtcgcagtattcttca

SEQ ID NO: 55310 - DNA, 352 bp, Zea mays
tcacaaagaggaaccttcggccattccatacgaacagctttcgccgaagactgcttctccctggaagaccttcggcgacgaagcataggcccaacagtagccctttcgggggctagatcgtttttcgtaacgagcttgatccgtgaaaaaagtctcttaagcttctgagcgccgaaagtctaagaaacacctttcctgagctcgttgtcgagaaacgatttaatctcccagcgcgtagcggccccaccttgcagagatactgttcggtctgtgcggtccaccacgcaacgagtgcgagcgggtgtccgcctggtgtaaaaaatgtggcgcttcggcttcttacctgcggcac

SEQ ID NO: 55311 - DNA, 386 bp, Zea mays
aagtactacctaacctttattatcaccaaaaagcgaatctatgtttaaccaagtcaaacatttcagttttcaacattgtctgaagggcagaacacaacaatcggtttggaaaattcataactcttaaactatcagtcctatgcttatgaaattttaacaccagcaagataaaaaaagcatctataactttcttataacgaccatgaacagattgtaacgttaacttaagcaaacaattcagtttctgaaatctgtacagaaagtggacagattcagtcactgaatttgtaaaaagcatagctcctaaacgatcagacttatgtctgtcaaattttaacaccagcaagataataaagtatctaccacttttctatagcacatatcta

SEQ ID NO: 55312 - DNA, 420 bp, Zea mays
tctccatcatctctttctttatttctttatcacaaatatgtctataaaagtagcttagctccgctaatgctttccacacatcatttttttacaaaaccatggaacatacaggaaggactctttctattattatgtggtagtcatgactcttcaacccggaaaacttgctcgtcttcaaattcgcagaccttctaaagctcgcggcgtaaccatctaggtactttaagttttcaaccatttcatcaattgtttcttccttttaggttaagactgaaaggagcacgtggcttcttctcgtcctctcctagctccaaagttggtcgactacaaattaaggccaagtcctttctagccttaaggttggcttttggtttgctagtgatattaaagcaagtgttgataatgctttcacccatattt

SEQ ID NO: 55313 - DNA, 391 bp, Zea mays
agcttcggcgactgtgtgatcaggttcttcttatgttctatctaaagttgaaagacccatgaccattcttgttttgtgaaaggaaagtgtcctatgacccattatgtctcttacttataattcattggcccgcattacttaattgaaacctaaagattgactaactttgtatttaccttgtccttgattaccttttgggttattatggttagcttcatgctattgctctactttaatcaacgaacatgatgagaatatttatgatacgatgatgttatcttgattatgatgatgaacttgtgatactttaggggactcaggctatttcctgagtacctctctataaggacctgttcgttgagagaccacccgggataacaatacaaccatg

SEQ ID NO: 55314 - DNA, 419 bp, Zea mays
tgacaatgaggaaatggcgctcgtcatcaagagcttccgttctattctcaaacaaaggagggggaaagactacaagtcccgctccaagaggtttgctacaaatgggaagcccggtcattttattgctaaatgtcccatatctagtgacagtgaccgaggcgacgacaagaaggggagaagaaaggagaagaaaaggtactacaagaagaagggcggcgatgcccatgtttgtcgggaatgggattccgatgaaagctcaagcaactcctccgacgacgaggacgccgccaacatcgccgtcaccaaaggacttctcttgcccaacgtcggccacaagtgcctcatggtaaaggacggcaaaaagaacaagttaaatctaactcctccactaaatatgaatcttctagtgatgataatgc

SEQ ID NO: 55315 - DNA, 408 bp, Zea mays
agctttggctttacctaatgctccctatatcttttggtttaagactggtcatagcggtatacttggagaacacgttatctttccttggcccacagattaaacctgtgcctttgtacccaatgactgaggcgtcctctgaggtatattaattaaccatgtgtgcgatgttctcactcgacgttcgagaatcaggaatactgacctcactcctgagtttgcgaaaggtcctattctataccggcttggtcaagatattagctaatcggttgtgggtattaacataagcaaatttgatatccgccttttgttggcgatctctcagatagtgatgccgaatatctatgtgcttagtgcggctgtgctcaacgggattatacgccatgcggatcgtactctcattatcacata

SEQ ID NO: 55316 - DNA, 415 bp, Zea mays
ttaagggctgctagcttaccatagatgaatcgcgagggatgctttattatattccctcatgtgagtctgattacaatcaactggccgacattccacactgtaatagtactaaactatgccaacttattaccgattgcacttgaatgagaatcattaccattcatatggacgattcgggtagaggaccaaaccacaccttataagcatcagaagcgcattctattcgctaataagccactgaactgtcacatctctctagacatgcgtgtcgacattgacatccactacttggcacaattaaatacatctgatctgatgttgattaaacatggccaaacttgatgcgagcaatcatcaatgactgtgagcatataacgagcaccaccattagaaggtttacaaggacccccacaaa

SEQ ID NO: 55317 - DNA, 297 bp, Zea mays
agcttgtgtaagcttcacggcctcacaaggaagctattcgaaggcttggatcgaacggaggaggacaggaaaggggctggccacggtggttgctctcggcggctctggcgggtcgcggggaagtccccggagctaaaggcgggcttcggggagttaggcgtggtacggaggaggcaacggggaaggcaaccgagcactgggacgggctttatagcccgggcatgggcgtggtcacgggcggccgccgacgcgcgggggttcgcgcacgggcgtgctctgagcgcgcgcccgggtgtc

SEQ ID NO: 55318 - DNA, 452 bp, Zea mays
gagctgtgcactctagcgaccttgaatctcagctctgccaaatagggcgcataattatacctttaatatctttccgtgttctcaggtcattcttcacataaaaccattctgtcatccagtcgccggaccatctcttccaaggttggcacgggacagcttgacccggaccgagagacgaagctgtagcagcagaaattattgtgatactgttccttaccccagggttttgtctcatataacaactcgtgtatgttgcagaaacttttcgcatcaggttccagaccttggcttctcacagcccacacgaagatattcatccttatgattgcttcggggataagttggtgaagatagatttcaaatgttttcagtacttctacgacaaagctgctcaggggaaatcgtagtccagctttcaaaaagcttcggaacactacaacttcattttcctc

SEQ ID NO: 55319 - DNA, 244 bp, Zea mays
ctacttggagcctactccaagtctgaagataatgcactatctggggccttcgggagccaaaaaaagaaaagactaaataaggtttttgatgctattggatttgtgtaccctgactatcgctacccgccatgggggcagaaaagaaagggtgcaacttctggaaaggctgctgctttggcttgttcaagcgagcctgcaccgaagaggaaaaagttgaaggtccttacccaccgaccgcgctaca

SEQ ID NO: 55320 - DNA, 413 bp, Zea mays
  unsure (1)..(413): unsure at all n locations
tgtggaggttcttcatccccacatgtgctaagtggtgatgccacaaccagcccatgctcatcttagcaattaagcatgcatctaaaccgacctcttcttttgaaaatcaactaaataaagtttgccgtctagtacacccttaaaagcaagtgaaccatcacatcttctaaagacaaacacatctacatttgtaaatagacaattatatcccatattacataattgactaacagatagtaaattatatccaagagactcaactaanaacacattagagatagagtgttcatttgatattgcaatcttgcctaagcctttcaccttgcattggttcccatcaccgaatatgattgaatcttgggaatccttattcttgacgtaagaagagaacattctcttttcccccgtcatgt

SEQ ID NO: 55321 - DNA, 408 bp, Zea mays
agcttgagttattttattacagaccaaagctaaaagtgagtgcagagtagtaatattatacaaaccaagggaggcataaactcctcccgatagctataaacaaaagatcctatgtggaggaccgagtcctcccgcacttcagtcttgtttttcttcatttggtaccaccttggagcaaaagcaacaaaaatttgtcgcttcctcacctaaaaacaacaaagggataaaccctgagtatggaattactcagcaagtcttacccgactaaggaaaagactctcaagggtatgctggataaataggagtcaaggagaggctttagcaaaaatcaacttatacttttgcagaagtagcttactaaagtgagtccttactttcacatctttaacgccatattaagtattaata

SEQ ID NO: 55322 - DNA, 416 bp, Zea mays
tctaaagggagaacacattttgggactaaccattgttcattttgagaaagacaggatttgtagcgcatgtcaagccgggaagcaagttggcactcatcatcacacaagaacattatgacaagtgacaggccactggaactcctccacatggatctattcggcccgattgcttacataagcatcggcggaagtaagtactgtctagttattgtggatgattattctcgcttcacttgggtgttctttttgcaggacaaatctcatacccaagaaaccttaaagggattcttaagacgggctcaaaatgagttcggcttaaggatcaagaaaattagaagcgacaatgggacggagttcaagaactctcaaattgaaggcttccttgaggaggagggtatcaagcatgaattctcttc

SEQ ID NO: 55323 - DNA, 404 bp, Zea mays
  unsure (1)..(404): unsure at all n locations
agcttccatgagaatatgtaatacccaatttgtagatataatataaaaggagaaaaagttattttcctttatctatatgggtgtgttgtatctacttactatcacaagtgaacacctcatttaaaaaacaaaggattaataaaagccattaaattattcatcatactggagtttaattgtttgtgcatttaataataaaaaaattaaggttacattaatgatgtgaattaaggactaaaacctaaatcaaatcttagaatttggaaataaaaatataaagaaaagtatatataaataaatatatttttttatcctagtattcttatttgcgcatataatatgtgtgaaacctacacactaaanttgaactcaaatatcagaatttgaaattgaggaggaagttc

SEQ ID NO: 55324 - DNA, 411 bp, Zea mays
ttggaatatcacgacttcattctcctcgggagtcgaattatttttctctccttcgtcagccctcacaatagacaagtcccgaaaatatctacccctcatatgacaagatggctttgtttaatacttgatttaccaaaaaccgcatggcttggtcgccaaggtcgatcttcggaatcttcaccaccactatccacatcataactgtcactgtcaccagtatcttcagataaaccctccaaaatctccctagtgatcttctctgtattggtctttgctattgattgaagaaaactgagatgcatctcctcagaaaggctcagcttcgattcagcaacagcttgcttatcttcagacatcttcgcaaatgctgagaaagtgctctcgaaactgaagcttaaaaatttaaaaagc

SEQ ID NO: 55325 - DNA, 419 bp, Zea mays
actaataatactaagccctcgggaatagtcatataatgttcccaaaaatgaactttgttttcttttatacccctggataccaaaaaccccatttgaaaccctcgaaaaccctaaaataaaccctacgggcttatgtgcaaaattgatgcacattaggactaaagtgcaaaaaccaagttaataaagtatcttaagtcacttgattcactaaggtgtgaatttggaagccaaaccctaagatttggattcatttgcaaaaaggcccctagttgtgatttcatgctaagtctgaatttcaaagtgatgagctcaactttggagccttgtaactttcaaactctagggtttttgccctagggcaccacatcaaaattgtagaccaaactaaggagaacacctttgcttaagaatgtgagctc

SEQ ID NO: 55326 - DNA, 293 bp, Zea mays
  unsure (1)..(293): unsure at all n locations
ctttacaaaacacttagagagttttttgttagatgaataaagctcgaattatgaaaccaagccacaagagcaacaaatgaaaaatgaatcctctctctcaagtcactaatcactaatgatcacttgtctcaattggggaacttggagagaatagaaaccttgaatatgtcttggaatgaattgctagaacttgtattgaatgtggatgagtggagtgcttgggtgtattgaatggagggtggtggggttgtatttatagnctccaaccacttcctagccgttgctccaatcct

SEQ ID NO: 55327 - DNA, 416 bp, Zea mays
tgtgatattatttacctttatgttcatataaatccatgattagtatgaggatgtagagtattatccacactacagtccaaacatctttagattgcaagtggctggttttcggtcgtgctcaaattaaacgcactgttcgcccacgctaccgctctctaaggctgtctacaccatatagtgcaaaatgtagggcttaatttacactcatgattacgttatttatgaagtgaaatttgaaatagaagatgccatagatcggagatgagataaggatagacgatggagacagcctaatatctttttaccggtactccacgtgctcctttgtctgtccatgacgacatgcacaaaaacaccacgcgttagctataggtaattgcactggcaacattaaacgtgatggtgtgactacatga

SEQ ID NO: 55328 - DNA, 121 bp, Zea mays
tccatttacctcctgggatctaatattgtgaccatgccacaactaatatttttcaaaaagaagagaagaaagcccagaagaaatctggcgcagctgacactgatgagccctcataatctga

SEQ ID NO: 55329 - DNA, 404 bp, Zea mays
tcttcattccaacatgagcaagtcggcgatgctaaagccagcccatgttaatcttagcaattaggtaagggtctaggtcaacattgtatcatcaaaatcaactgaggatagctgaccgtctaacactcccttaaaatctattgaattatcacttcttctaaagacggtaacacccatatcagtaaataaacaattgtagctcattttgcataatttagaaacaaaaagcaagttataatctatagaatctacaagaaaaacattataaatggaatggtcaggagatatagcaattttacccaatcctttgaccaaaccttgatttccatccctgaatgtgattgctctttatggatcatcatttttctcatatgaggagaacattcttttcttccctggtatgg

SEQ ID NO: 55330 - DNA, 217 bp, Zea mays
aagaatcttttgcttggttttgggtgagaacaaaagccataccaccaggatgggccatgttaccatccaaaaaccaaaagaaatagccgaggccgcagcacagcaagctcagccgaagcaagtcatgcatactgcttcgtatcattcaccttagatcccagaatatgtgggcaatcaccctgcagtttctgttgcttcggcgagtcaacctcaagct

SEQ ID NO: 55331 - DNA, 414 bp, Zea mays
  unsure (1)..(414): unsure at all n locations
tctactcagtattttncacctgctgagtactgggcttctcagctacttgcttgtctactcacaacaagaaaaacaaacatggtataggagaaattacatcacaacaaacattatcacaaactacagaataatgatctatgcgttgctacgagatcataggttcgagaaccactaaaatcggagatacggttaaagagttatgattttctaaaggtttaagtgttagacataaaacaaattaagtgcataattttaaccatatgtttcataataaaataaggttactagatgataaacaatattaatatgagtttaatgcaactggaatgcatccaaaaggagttaaaatgaattaattatgaatttaacaagattatggaattatttctatacatgaaaccattttctataata

SEQ ID NO: 55332 - DNA, 402 bp, Zea mays
agcttcgggaaaccaacactcttcgacagagtactgataaccttcgctccagttcgatcttagatgccatcctaggctttcttcgttaatgccgccgaaagaacgctcctggccggtagccacaggatatagcataatctcgcagctcctctttctcagccttagataactcttgatcaattatgttttgaaaattgaagtatttttcctccgaaatatctttggcaatctccctcccttttctaggcactgtggcaagggtttctttagcagatgcagcagcttcttctgcggccatatccaagagtattctatcaatatcagataatgtgctctccagtcgtggtttcggctgttgtagctttggcagttgtagctttggtgggagcatcttcggtagct

SEQ ID NO: 55333 - DNA, 412 bp, Zea mays
tgtgggtcaaccaaaaccttgcttgcgtgcgagcggagaacctttacgaatttaataatgaagagtaagatgtcccttttgtttcccaattaatattaggcgattatgtaatgcgttgaatgttggtaaagtttattatccatatgtagtggcgtgaacgagtgtgcgaatcgtggaaataactaagtaatgttgattggacgtgatgtgtaaattcaaagattgtacgtttgtgtgtacgtgtattattgaacatgtatgtcgatgtattataatactgatttcgttagaagtgtttgaaatattttgaatgcatctcgagtatggttgcattctaaatatggaaagaaacatgtagtgcgatgaaaaggctagattgattttataagttgtatgacaaacgttctattaa

SEQ ID NO: 55334 - DNA, 406 bp, Zea mays
cagcttggaaattgaaactaagtggtcactactagcattaatggccaaatctttacacctagtacaaatttcaacatgttctacacaagaattggattattgctacttctaatttaacatttaaatcattggtgacacctttcaaaagaaaaatggtttcatgaacagtagatagttcaaaagaaagcatttcatttcttttaacttctaaagcataggatttttgtgcctcaacaaaattatcatgctcttcatacaacaaatcctcttgcttttctaaaagtatattcttttcattcaaggcatcaattaactcattaattttggctatcttagatctatctaagcccttgaacaaacatgaataatctacttcatcctcatcactagattcttcctcacttga

SEQ ID NO: 55335 - DNA, 412 bp, Zea mays
tgacattgtctcccttttggaagccaatgccatccttaataccatggtgtctcccactatagagcatgcttctagcaaatttaaatttctcattttctaagcatgctcattaattttggcacttagttgagctatgtgatcattttgttgtttaattaaagctaggtgatcatgaatagcatcaacattaatatctctacatctagtgcaaatagtgacatgctcaacggaagatgtaaagggtttgcaagtatttaattcaacaatcttagcatgtaaaatatcattttcatttctaagattggaaatggaaacattgcaaacatctaattctctagccttagcaattaatttttcattctcattcttaaggctagcaagagaagcattcaatttgtcaatcttagcaatt

SEQ ID NO: 55336 - DNA, 351 bp, Zea mays
  unsure (1)..(351): unsure at all n locations
cttggagggtcttttgaaaaaacttccgaaaaagaagatgcaccttggtggtataaatactctattaattctattaagccttgggccagaatcaccatcccaagggccaggatatcacagacctgtagggacctgctgcttcgcttcgcgttcgacaacatctgcgaccgacaatggatcctaaaggccggggtgacatcaacggctcccctagacgcgagcgatggctctcgtttatgatatttntgatacatatttattccaacgtcaatagggttttacggcatatatttcaagtcatggctccgcttccatctattggcctgttatgatatttctattatcatttta

SEQ ID NO: 55337 - DNA, 417 bp, Zea mays
ttgcccccgccagactaataccagaaaggccaacacccattgggtgtgtatagatggtgagagtagcgtgtaccctccgaggcaagaggctggacggtggtgtatctggctctcggttggcgtgaacccggtctggtcttaagaaccctggtggcgagttgacatatgcaagggttaagtgctacatatgtcgtgtgattggagatcctcagctgagtattaatcaatttggatcgccgttacttctcatacatgaagacttggtcactaacttacacgtagcattccagtgaacaagaaggattgataaaaggatggctagtataggccaagagcttgaactacggtagaaagaactctattgacagactatgacttaacttgctcatgaaactggattttaaggatccactatta

SEQ ID NO: 55338 - DNA, 374 bp, Zea mays
cccggatctctaagcactgcggctgcagcttgacgaaaagcaggcgggttgtgcatcttcggctagatatcgagcaagaatgggcaagccgagcactctgcagaggacgcgtcatcgggcccgaccttcagcgccgtattgttgacgatgcttaggcggggcttcccccgacctttaacggggtcggccagaatttaactgcagcggcaatgctacttcgaacgatgccggagccctccaccaccgaggcgcggcgtatccaaggcgaacttcaggatctcctggaagatgccgcagtccgacgagccgagagctcttgcttccgaaggcaagggtgcccctcggagcattacgcaacgctcttccgacgcata

SEQ ID NO: 55339 - DNA, 414 bp, Zea mays
tccactgcatatctacaagaactcttatgtctctcaagcctaccttttttcttcaattggaccgcgattgatattcaacaggtatctttgagactacatttggacctttacatgtcttctccgaaatttgattagactatatttcatatcctatacttaccatgttgctatacatgcataagttgttaactcatattctgttacctatgcataagggaagtcgatctaatcaatcatgtcttgcacctctatttttcacatgttttttcctaagtagaagatctctgttagggggagtatatcttcgtctctaaaggggggagaaaattctttccaaatggagaacactcatttacggggagtaataatgttgagtgctttgattggtattaattgataaatcttttatgtggg

SEQ ID NO: 55340 - DNA, 397 bp, Zea mays
agcttgctcactgcattctgaaccgaaggatcactttgctctagcttcgggataagagggagcttcggcaaagataaaaattttcaacttcatcaaaaccaagaaattcaacatcaaatggccagggtatgctcaacagctagggttactcacgacagaaaggaagccgaagctgctgaaactgctccgatctccgaagttatgaggcggtcgggattggttgtgactgaaggcgctgctgacgaagaatcacccgctgctgaaaccgagcacgcagatattgaagaggatgatgctaatgatggagagaatgattataacaccattatgccatcgaagcccaaccatctggaatttgggaaatcaactgtgtctaatgctgatatgactatgatga

SEQ ID NO: 55341 - DNA, 412 bp, Zea mays
tgtggacccgtagcctatcaagtggaattgccacctcacatgtcgtcagtccacaaagtattccatgtatctcagctgcagaaatgcgtcgcctacccactgaagactgccggaaccagacattgagatagaaccaaacttgtccaaccaagagtaccccgtcaaggtattagatccgaaggaaagataaactcgggcaaggtcggtcagaatgtataaggttcagtggagtcaccattcagcagaagaagctacatgggagactgaggatttcctacgctctcgcttccccgactttctgtccaaaggagtcggtatgtaaccccaaaaccccacccccacctgccctttgaattcaattataagaagaacttagataacaaggatagtctaagttgtggatttaacttaa

SEQ ID NO: 55342 - DNA, 402 bp, Zea mays
cttgcgctttttattaattggtacattgtatttcgccatgcacccccaaatgcgcaagtatgaaagtgatggttttcttccaacccactttcataagggggtttttcttctttggccataagaattctattcaaaacatgacatgaaatcaggacttgcttcccccaccatgccttaaataaaccacaagtgtctaacatggcattcaccaagtcagtcaacgtacgatttttcctttcagcaatccccgttgactcgggtgaataaggaagagtcctctcatgaataatgccatgttctgcacagaaatcatcaaagactttgggaaagaactcggcaccacgatctgatctaagatgtttgatctttctctctagttggttttcaacttcagccttatag

SEQ ID NO: 55343 - DNA, 408 bp, Zea mays
tctcagcttatatgtcctttccgaatgaaattcggtttatcctgtaaatattatgagaaagtattatgatccacaaccacttggaaagcagattgttaactaccccacatttggtcagtaataaccagtaagcaagaagtttccataaaagtacaacacatgatgtctagattctacatccaaaggataacacactttacagcagaaaatgcttaaatatgtcaccttatgcaaaagaagatgcaaatggcatctaataacgggactcctaacatccgaatgcaggcggaacatatcgaaaggaatgcatcgctgatgcactaaaggaggccagtgctacttgaaaacaaaatctaacacattgtgaacatacctttcccaaacccactccagcacaaatcttataac

SEQ ID NO: 55344 - DNA, 405 bp, Zea mays
aacttatataaatctaatttcaataaggttttttcaacatttattcacgggaacggagataaggagctgtaagtattctcagactcattatttaattccacgtgaatgggagtggattaagatggactttgacttctatagatttaaatcgactcaataccatccagtatagaactaatttacactataaatcatcttaatctatgtggattgaggggaataagagccttaatctatgtggatcgagtgaacgtatagaattaatttacaccataaattatcttaatctatgtggattgagatgaataagagccttaatctatgtggatcgagtgaacaagagagtatccaaacaagctttaattatgtattaactaattaacatcactataaatatgggatatg

SEQ ID NO: 55345 - DNA, 430 bp, Zea mays
acctatgaatctgagcttggttgataaaagaagctactgcaactattcttgatttttatgctgactccatgccacttccatggcatttgatacaaattttagaggacaccttattagcgtagaccgcaggtaggcatctactcatccctccatcttgattgttttatatccaatatgagtaacttgctctcacacaaatgcttcacttagctgtttgggcaatctgaaatcactactagaaaaccccccttgtagctatgcttttttggacaataggcacgctttaattcgtctctatatgaatgtacgcacgctttccaaaaacgtgttagaagcgtcttcgtatggaccgtatcagactttgtagaaacgattattgtaagcgtatatattagatgaatagacgtttcatagacacgttagatgcatg

SEQ ID NO: 55346 - DNA, 113 bp, Zea mays
agctttgagtggaattgggagagtgatttgatctctttggtgtgtctagaattgaatgctagagctcttgtaagtagttagaaggtggaaacttggatcattcgaatgtgggg

SEQ ID NO: 55347 - DNA, 412 bp, Zea mays
  unsure (1)..(412): unsure at all n locations
tctaaagggagaacacgtgataggtttgactaacgtgctattcgaaaaagatagaccttgtgcagcttgtcaagcaggtaaacaagcgggaggagcgcatcacagcaagaatgtgatgaccacttcaagacccctggagctgctgcatatggacctcttcggacccgtcgcctatctgagcataggagggagtaagtatggtctagttattgttgatgacttttcccgcttcacttgggtgttctttttgcaggataagtctgaaacccaagggaccctcaagcgcttcctcaggagagctcaaaatgagtttgagctcaaggtgaagaagataaggagcgacaacgggtccgagttcaagaaccttcaagtggaggagttccttgaggangaanggatcangcacgagttc

SEQ ID NO: 55348 - DNA, 402 bp, Zea mays
agcttatcaaaagaaatttctaaaatcaataatattgagctcatgcctaagtctggtaaaagattgttcatcaagtggtttggtaaagatatcggctaattgatctttagtattaatgtaagaaatctcgatatcccccttttgttggtgatccctaagaaaatgataccgaatggctatgtgcttagtgcggctatgctcgacgggattgtcggcaattttaattgcactctcattatcacatagcaaagggactttggtcaatttgtaaccgtagtcccgcagggtttgcctcatccacagtaattgcgcgcaacactggcctgcggcaatgtattcggcttcggcggtagaaagagcgaccgaattttgttctttgaacccaaacaccagggatttccc

SEQ ID NO: 55349 - DNA, 416 bp, Zea mays
  unsure (1)..(416): unsure at all n locations
ttgcgagagaaggaacgggtcctangtctcctgatgagtctattgttgcggagtggagctcgatgcttgagtgagtctgtctccgctgtccttgctgcccgccccccagaaggccctaggcatccccttttatagacacaaggggatggtccagctgtacatatgggggtgtagctatgtgctaacgtggcctgcggagaagtgcttgagccctgtagaagcgtagctggcggtgcggtcctgggtcctactgacgtttctttgccttcgtagagagcttgaggactattgacgtcatggacgcgtgcaaggaaccatcattacctgttgccggagtaatctatatgtgactccggtcttgttccttcgtagcctgaagcggccaactagaggtagggtaatgatgtatgccctgt

SEQ ID NO: 55350 - DNA, 412 bp, Zea mays
tcttcttcatatcttcaacttcagacttgtgagcttctgcttgagcactaagcttggattcgctagatttcagcctgtccactaatgacaacaattgttatccttctcgagagcttcattccttactgaaatgacctatgtccaaagattcccaagagctatctggcagctcttgactttcgcttccttttgggcctttgaagccttacttagaattaagccctaataataaaaacatatgagaacataatgatagcatgaaaagctacaaatatagtttattttacaattaagcgtatataccttcaagctattataagcaaggctatctgcaagattatccttcgatattgcagataggccgagttcaagcctcgggtaccccatattcttcatcatttcccggcacaca

SEQ ID NO: 55351 - DNA, 301 bp, Zea mays
tattatactatggggcacgttatcgaccaccattacacaacaacaaaacaagcaatgtgattaatattgacatttcaaaattaataagttccaaattaataataccatttttacgtatcatttatggagcgctcaatgagaagaaaacaaagaaaaatgaaaaagaaatggaaaatgtgaatctgttaacactgtagccttacgggacggaatttatgggacgctgctggagacggagaatatatagaggacagaatcttttagagtgttctgtaaaggacagagaatattcctttatggg

SEQ ID NO: 55352 - DNA, 330 bp, Zea mays
gcttggctaacctgaaccgagataacctgcaacaaatcgagtgagatagcttagctcgggtccacttgacaaggcttaggtctaagcttttatcacttaaatgcttactttctatgcaattgacggttcttgaaatatgcacgaggcactacacttaaggggagtattcacaactcatatacctcattagaaccgctagtgcaagccaaaatgcagatttcaccatttgcctattatctctaagaactatctagcctatggcagaatatttggaaaagtatatgacggtgccaatacctgtcccaacgagagttattttgtgtgactata

SEQ ID NO: 55353 - DNA, 408 bp, Zea mays
  unsure (1)..(408): unsure at all n locations
agcttatgaagattcttcatcccaacatgggctagtcggcgatgctagagccaacccatattagtcttagcaattaagcaaggtcgagttcagctctatgaaatcaactaagtatagctgaccctctaacactcccttaaatgctattgaatcatcacttcttctaaagacagtaacacctacatcagtaaatagacagttgtagcccatattgcataattgagaaacagaaagcaaattgtaatctaaagaatctacaagaaaaacattggaaatagaatggtcaggtgatatagcaattttaccaagtcctttgaccaaaccttgatttccatcaccgaatgtgatagctctttggggatcttggtttttctcatacaanggagaacatcttttctcccctgtcat

SEQ ID NO: 55354 - DNA, 418 bp, Zea mays
cttaaactaacttaaaattcattaaactgaggaattgacttatttattttgaactgagaaatttgctattggaagtgcataattgaagggattgttgcatcttagctgatatggttgcatgttgcatcttggtcttgtgactgcataagatttacatcttcattggtttttcagttactaacaaggcttggattggaatgcactgaccctgaagcgatattggtcacggatcgcattcttacaaatgagtgtgagtgccattcatattcatttcttggaagatatccagtgtcattgataccatttgtcatttttcacgtattgataaaataaatggttttgctttgaaccatcaacttaagaactgtacaaatcccgacccccctttgtgtagtgcgcagattgctctatccagcgg

SEQ ID NO: 55355 - DNA, 354 bp, Zea mays
ggacactcttcgtggtggagagctcataggaatgtgactttcaacctatccatgtattataatttaattactatccccaattataatcatggatgtttgctttggaagttgaaattaccccttaagattaagatctttctttggtattgaaagtcgcctagaggggggtggataggcgaaacctgaaaattataattctaaatacaaactagatcccttgattagtggttagaacaagattcacaattatcggagtataaaactaagtcctttgctttgcatgagtattgttttcaaagagtgcggaatttaattaatgtcaatactattaaaaaggttagtggagaataatgc

SEQ ID NO: 55356 - DNA, 421 bp, Zea mays
  unsure (1)..(421): unsure at all n locations
ttaatgcacaacttctccccctttgacatcaaacaccattaacctttctcaagcaagaacataggatgatgtcaagggacagcagggtgttaaggaggaaaaacaccttcaaaactcccccttattcattaaacatatgcaccagagatcactactacagattatgctatatgagacggntaattttcagttattaagacgcttatgaagtgtccaattatgatggagtcacaaaagatgtcccacatttaagatggttgtaaaccgtcttaaaagatattacataagacattttttaatttataaccgactcataaaggttgatgattaagtcattgtattcgataaaccgtcttgaattagagttttgtttaagacacttttctaaagaatcgtcgagaatacaaacattataagttac

SEQ ID NO: 55357 - DNA, 304 bp, Zea mays
agctttgaatggaattgtgctttgggaattgaaacgatgttatctgtccatgccttgttaggtctgaaatcaatttgatcgggatagattggatcctgctggttgaagcaaatggctctcagctggacatcaccccgctctttgcttcaatgcttctgttgattaaacttgcactttagtagccacatttggacttccttccatctcaaccgatctcctccttttgtggtacattcattgcgtatattttgtggatatgacttcttcagaaaatatttgaaaattcttggtgacacacccaatg

SEQ ID NO: 55358 - DNA, 421 bp, Zea mays
  unsure (1)..(421): unsure at all n locations
tcggctacccttttccggccttcgacacctttattcagttgttcgtagtcagggtattcaanaacccaaggggcgtccaagcacttgattcagtcttcgcttcggacggtaccgaaggcagcggtcatcaactgatcttcttttttggagtaattaccgagtatttcattgcacattatttcaattgtgtccagccattcttggcaaggtgttttaaagtaattcttaaacttgtaatagtaaggtaaccgcacaagctccccttccttcttctccccctctagctttggcatttcccattcttttaaagtaggaaaaaccctgaagccaagaactcttgaaccaggtctcttgtgccgatatgctctgaaataattttaaactcagccagtgcagcccaagtgggaccttctagtgacat

SEQ ID NO: 55359 - DNA, 393 bp, Zea mays
agcttgtggcatggtttaatgataaacacacccatgcttttggattgcagaatgagggagaaagatgggctccaaaacctaaacctttctagagaagaaaggaaagggcaaacacacacactgttgattgttttgacttacagtcagggacatatgaggtattccttcaagctggtactactttcgacggtgagtcacaagagtcgaggaagcatgtggttgtccttaatgacttgtcatgtacttgtggcgcacccaggcagtaccattttccatgttctcatctaatcgcaactgcttgagctcgcaactttgacttagagaggaggatacctcaagaagttactattgataaactagtggtgacttggagtacattaattactctttatc

SEQ ID NO: 55360 - DNA, 420 bp, Zea mays
tgtgaagattcttcatcccaacatgggctagccggcaatgccagagccaacccatattagtcttagcaatgaagcaagtgtcgagttcagctcttttgaaatcaacaagtatagctgaccctctaacactcccttaaatgctactaaatcatcacttcgtctaaagacagtgacacctatatccgtaaagagacaactgtagcccatattgcataattgagaaactgaaagcaaattgtaatttaaagagtctacaagaaaaatatttgaaatggaatggtcaggtgatatagcaattttaccaagtcctttgaccaaaccttgatttccatccccaaatgtgatggctctttgggaatcttggtttttctcatacgaagagaacatcctttactccccagtcatatggtttatgcatac

SEQ ID NO: 55361 - DNA, 383 bp, Zea mays
  unsure (1)..(383): unsure at all n locations
agctttcctgcttcacagcttcggcgctgtataaaccctcgcatcttttgagcttctccctctctgatacgagtccgaagatacctgttcacacattatactctaaaaacactgttaaatcatgtttttgaggaccttctgaagccgaaggccccccacagtagcccctcgcaatattaatttgttaaaataataaatttatattgcgacatggaccaaggctttaagccgaaggtgcgaaaaaacaccttccctttgctataatagcaacattcactgacaggcggngtctttccatttttaccgcaccgagcgtataaataagagcataccgcgagctcattttggccctctcttgcacttgctctcgctcgctcgatttt

SEQ ID NO: 55362 - DNA, 409 bp, Zea mays
tgactatatctgttgggtgccttcttcatccgaaggtcctaaaaacgctaattctataactatttctatcttgttctatatgattgtaggactaatgtcgaaggtaggcttcagacaaaactaccaatgtatatgtacccgaagaaataagcttcggatagttaacatgtgggcatgcttgatgaagctgaatactacctctttttctaaatatttgacgtccaatagttcatttttgaactagaaaacatcatatataaaaaacggagggagtaaaaccataagaagccttcgaagcttagttaataagagaagaaaaaggaaaggacaactttgcccttagcttgataatagtttaaatgtataggcttaaggacacaattgtaaatatgctgaagctatatcatgt

SEQ ID NO: 55363 - DNA, 351 bp, Zea mays
  unsure (1)..(351): unsure at all n locations
gcttgggaaaatccccccgtcttggccaaccagaaccacaccctcaaatagaatttccttaatatttaacccagggccttccataacaaccttatgtgagcgctggttttcttggggggcactcccttgtccaattaaatcaccataatcttgctaatcatcgggttaaaccacataaaagtaacctaccctttggaacattaatatcataaacatgaatgaattgcgtaagttaaagttgtaccatagcatagctactaaagtaagtacaatacccaggtttgatcaaagaataaggtggaaaggtangtgtatttaaagggtaccatcaaatatcacatatcaaaagta

SEQ ID NO: 55364 - DNA, 415 bp, Zea mays
tcgaatttaactctaatattttagcctcagttttatccatcaagccttcggtcgattggagctcgaagtctttcttttcaatgatggcagattgctcttttattttgctttccaagctttcaattatagcttcgtgctttttgtcctccaagtcttgttgcatcttcagagctttgctcagtagcatgctctgaacagaagcaacttatgttaagtaatattttcattgttaacggcaataaaaaccagagaaaaaggttgtttaccttgaagttagaataaaacaagctgccgacgatatgttgtcgtcggtagcggctgatgtctgtctctagcttcggaaaaccgatactcttcgatagagtaccgattaccttagctccagtctggtctcgaatacagcctagtttttcat

SEQ ID NO: 55365 - DNA, 409 bp, Zea mays
ggacacttaaaactaacttttgggaatccgggctatcaactgacttttagctcagaactggctacaacatcttcagaagatccctcagccgcagcttacaccttaaacgcggacaacccgtcacttatgtacataggcaacagtgggctttgtggacctcctcttcaaaataattgctcaggaaatggtagtttcacacctggttattatcacagaagcaataggcaaaaaatcgagtttgcatcattctatttcagtcttgtattggggttcgaggcggggctgtggatggcgtttgtgctctgttgttcatgaacacatggagggttgcttattttgggctcctcgacgagctgtataacaagatctacgtgtttgtagctggaaaatgggcaaatatgacaatgag

SEQ ID NO: 55366 - DNA, 412 bp, Zea mays
  unsure (1)..(412): unsure at all n locations
agcttggatattcttcatcaaaacactctggatatggttgggataaatgaaaattcttcttcacgaagcatgaaaagaagggaaggtgtttttcgtcaaagactcaaaaacggtatgtatgtaaatttcatgcatcataaagaattgaaccataaaaaacaagtatacaagatattacacatattacatttcagatgtttttacaatagcacctagtcttccctaagtactacttccgcagcttcgttcagaagttgattgacaacttgatccatgatagcttcagccatctttttaatttcatcgtcatctttcggctgagggcctggaggcgctntagtaggatctgagggaggacaggatacggctacattgctattacanaatgcgaacgaagtttaaaatcaaaaat

SEQ ID NO: 55367 - DNA, 417 bp, Zea mays
tgtgcaaagtccacttgaactgaccttcggagaaacccgcccccagtgccacatgttaccagagggtccgactcaaaaagcaatgtatgaattcaaaataatgcagagaatatcagtacaagggacctggtccaggaattcttggctttcaaggttttccctagtgtaaaagagtgggaaatgccgaagctggagggggagaagaaaaaaggtgaacttgtacgtttgccttactacttcaaatttaagaaatactttaaaactccttgccaagagtggctggatacgattgaagtgatgtgcaacgagatacttggcaattattccaaaaaggaagatcaattgatgaccgcagccttctgcacccgtccgaaacgaaggctaaatcgagtattggacgccttgggtttcgaatac

SEQ ID NO: 55368 - DNA, 353 bp, Zea mays
  unsure (1)..(353): unsure at all n locations
agcttctaaagggagaacacattttgtgactaacaaacgttcattttgagaaagacatgatttgtagcgcatgtcaagcagggaagcaagtggtgttcatcatccacacaagaacattatgccaaccgacaggccactcgagctcctacacatggatctattcggcccgattgcttacataagcatcggcgggagtaagtactgtctaattattgtggatgactattctctccatcaaccgattatatctacaccgaatcctcaagaagacatcatatgaactcctaaccggtaaaaagcccaatgtttcatattntagagtatttggtagcaaatgctttattcttgtaaaa

SEQ ID NO: 55369 - DNA, 348 bp, Zea mays
cctatgtatatatatctcgcattaattacaagatccaactcttactatctataggtctagagttatctcggtcttgcagtcgggattgccataagactggtgttcacgctgaagtgatcggtacgggtgctgagtccctacaggagcgggggaaccaccatccaagtgacgacgttacgtgcgctcagcccgcaactgggcgatctcatgcacgagccctactaagctcgtgtaatgcatgggcgagctccgtgcatagaacagcagctaggctgactgagctgattaacctatgattgacctctccgacaggtgagagcattacgcctcctgtgctgacagatggac

SEQ ID NO: 55370 - DNA, 293 bp, Zea mays
ctcacctactacgggcataagttcaccacaatcaaccttcgactagtgaataccccttggccacgagtcgagctttgttccttgtcaccacaccatgctcgtcttgcttgttgcggaagacccacttggttcctacaacattttgattaggacgtggaactaaatgccatacctccgtcctagtgaagttgttgagctcctcttgcatcgccatcacacaatccgaatcttgtagtgcttcctctaccctgtgtggctcaatagaggaaacaaaagagtaatgctcacaaaaa

SEQ ID NO: 55371 - DNA, 408 bp, Zea mays
tatgaagattcttcatcccaacatgggctattctgcggtgccataaccaacccatgttagtcttagcaattaaccaagcgtcgagctcagctctataaaatctaccaagtatagctgaccctctaaaactcccttaaatgctattgaatcatcacttcttctaaagacggtgacacctacatcagtaaaaagacagttgtggcccatttgacataattgcgaaacggaaagcaaattgtaatctaatgaatctacaagagaaacattggaaatagaatagtcaagagatatagcaatgttacccaatcctttgaccaaaccttgatttccatccccgaatgtgatagctcgatggggatcttggtatttctcataggaggagaacatctttttcttccctgcatgtgg

SEQ ID NO: 55372 - DNA, 387 bp, Zea mays
ctagcttctcctgatcaaaatgttttgattgaatgataagcttcgaatttaactctaatattttagcctcagtttcaagccagcaaagcctaccggtcgatatggaagctccgaagtctttctttttcaatgaatggcacgattgctcttttattttgctttccaagttttcaattatagcttcgtgctttttgtcctccaagtcttggtgcatcttcagagctttgctcaatagcatgctctgaacagaaacaacttatgttaagtaatattttcattgttaacggcaataaaaaccagagaaaaaggttgtttaccttgaagttagaataaaacaagctgccgacgatatgttgtcgtcagtagcggctgatgtatgtctctaac

SEQ ID NO: 55373 - DNA, 366 bp, Zea mays
agcttcacgggtattggtctcttcgccttcagctattgagaggctctcttgcagggatgctttttcctctgacagctccctgactttttgctttaagctttccacccgggaggttaagccacgcccctggccactccagctcctaccatggaacctatccgcccgcattgcctacatacccccccggggagaacaacgctccactactgggatacacatctctccccaccctctattctccccccatccccaaacacctatacgacccccccccgacaaaccccagctccaacttaactcattggcccccgccttatcctttaaaaagagaaaacaaaattgctccccggccacaagcccccactc

SEQ ID NO: 55374 - DNA, 407 bp, Zea mays
tctaaagggagaacacattttgggactaacgaatgttcattttgagaaagacagggtttgtagcgcatgtcaagcaggaaagcaagttggcacccatcatccacacaaaaatatcataacaactgacaggccgctcgagctactccacatagatttattcggtccgatagcttacataagcatcggcgggagtaagtattgtcttgtaattgtggatgattattcttgcttcacttgggtgttctttttgcaggataaatcacaaacccaagagaccttaaatggattcttgagataggctcaaaatgagttcggattgaggatcaagaaaataagaagcgataatgggacggagttcaagaattcacaaatagaaggctttcttgaggaggggggcaacaagcatg

SEQ ID NO: 55375 - DNA, 440 bp, Zea mays
agctcgtgaacactacaagtacagaagagagttatcttcttctgctgatcagccgaaacctatgcttctatgtgaagacatagcagagcagaaggtattgctgggatctcagctatctgaagagcaggagaaaaccttgataaggtttttattcaacaacaaagatgtatttgcttggtcaactaatgatctctgtggtgtaaatagagacgtcattgaacattcactcaatgtggacccatctttcaggccaaaaaaaacaaaggcttcggaaaatgtccgatgacaaagctaaaggtgctcggaacgaagtgaagaggcttcttattgttggcgttatcagagaggttaaatacccagagtggttagctaacactgttatggtgaagaaggcacatggtaaatggagaatgtgcatcgattttacagatcttaacaag

SEQ ID NO: 55376 - DNA, 454 bp, Zea mays
  unsure (1)..(454): unsure at all n locations
tgatggctggatgtgctaaaggcactggaaacactgattcgtatgtctgttgaagaaacacttttcacttgcatatctgacacatcagtcctttctgaatatgtatattctcccgaagaacgatccttggtagagtttaccgagctcagcttattctcataggaatccgaagtgaaagtagagctaccacttaggctactttctcttgcaccctgcaacaaattgatatgaagattattacaattattgcattccaagatgtaagtactatgatttatctattgcacatgattataatacatggaccaaatgaaattagaaaagtaacatgatgagatatctgcaatgtgctacaagccacaagattgcctaaaagtgttaacctgccattntaagttgcctgttaaactctagcaataacagataaaaccaccttcaacaaataaagatggat

SEQ ID NO: 55377 - DNA, 389 bp, Zea mays
  unsure (1)..(389): unsure at all n locations
tgcaagctttcttgctttgttatcatagaattattatttgtattttatttatctcctccgcattatttgaaagctatactctttactagcaagaacttagttnttatactccgataattgttcatcttgttctaaccactaatcaaaggatctagttgggggataaaagttttaattttcaggtttcgcctatccaccccccctctaggcgacttatacggatcccatcaaaactccgaagataagcgtgcttgggcgagagtantactatgatgggtgacctcctgggaaatcctcgcgttgcattccttttcttttgggtttattatttgtttgctcttctaacaccaaaccatagtaaaaatgggtgaccgaactctcgtcaaatt

SEQ ID NO: 55378 - DNA, 442 bp, Zea mays
  unsure (1)..(442): unsure at all n locations
ttacttagttgattntgcaaaagaagaggccggtctagatgcatgcttttatattttagacttgcatgggctggctgtggcatcgccgcttggcacatgtggggatgaagaaccttcacaaacttctaaagggagaacacgtgataggattgactaatgtaaaattcgaaaaagatagaccttgtgcagcttgtcaggcaggtaaacaagtgggaggagcacatcacagcaagaatgtgatgaccacttcaagacccctggagctgctgcatatggacctcttcggacccatcgcctatctgagtataggaggaagtaagtatggtctagtaattgttgatgacttttcccgcttcacttgggtgttctttttgcaggataagtctgaaacccaagggaccctcaagcgctttctcatgagagctcanaatgagtttgagct

SEQ ID NO: 55379 - DNA, 460 bp, Zea mays
  unsure (1)..(460): unsure at all n locations
ttaagnnacctgaggcatgcagcttaccctatagtctggactatagtagtttttgttgtgtgccttatgcagcttgaccatttccagcatttgcgtaatgaggactctagggagaagcctcgtagtgagcacctggccattcacctcggaagtgaatacgggtctagctaacccgggctataagggaatcgcgactcatgggtaaagatgcaccacctctgcagagtgtaaaactgatatancanccgtgctcacggttatgagcagctggactcctcacatgataattgaacttgaagatggaaataaatcaagatccgatgatctgccaatggtttgcttaagtggtttcacttaagtgtttntgatatactcttatacctttgtttaatgggaatacttgggattcacacttattagtaagacaggtgttgttaataaaatgttgaccaactaaaat

SEQ ID NO: 55380 - DNA, 459 bp, Zea mays
  unsure (1)..(459): unsure at all n locations
ttttgaaggttgggcttcgattcccgctatagcagttcgnggtttttgttttgaagatattctagattnttcttcaccagattactcccgaagccattataaggatgggattcttcgtgtgggctgtgagaagtctgggcttggagccaaatgctaaaagtttctgtagcatgcacgaacttttgtatgagacgaagccctgnggtaaagagcagtatcacaacaactttggctgctatggcttcgttgcccgctctggtcaagctgccctgtgccgaccttccggaagcgatggcccggggattggatgaaggaatggttctatgtgagaaatgatttataggcacgagaggatattaagcagattatcatgtgccctatctggcaacgcttcggcctccggaaaccaaaggtggaaattgataaaggagtcgaacaatgccaaaaggccttcgacat

SEQ ID NO: 55381 - DNA, 434 bp, Zea mays
gtggcatgcacttgcttgtatgtggctgctttcatcgggttcaggggaaaacggcgatgcaaccacatgcgttctactgttctaggttttgggggcgggaatggtagaacatggaatgatagaattgagaatgagaatggcatgacatggaatgacagattaccccttaccttcttcatagtagtagagatgttgaatagcacacaagataatttaattgggtttatttgctttagttgtgttggcatcaatcacaaaaagggggagattgaaagggaaatatgctatatgccatttctaacttggtttgggtgattaatggccaacataacgacgagtacttgctagtttactatgtgttacttgcaggttcataagtgccaaaacaaggaatccaactcaatttattacttaaacagaggcacaataggtga

SEQ ID NO: 55382 - DNA, 470 bp, Zea mays
  unsure (1)..(470): unsure at all n locations
tctaagggagaacacgtgataggtctaaccaatgttcatttcttattatatagaccttgtgcagcttgtcaagcaggtaaacaagtgggaggagcacatcacaacaagaatgtgatgaacacgtcaagacctctggagctgctgcatatggacctcttcggacccgtcgcctatctgagcataggaggaagtaagtatggtctagttattgttgatgacttttcccgcttcacttgggtgttctttntgcacgataagtctgaaacccaagggaccctcaagcgcttcctaaggagagctcaaaatgagtttgagctcaaggtgaagaagataaggagcgacaacgggtccgaattcaagaatcttcaagtggaggagttccttgaggaggaggggatcaagcacgagttcttcgctgcctacacacctcagcaaaatggtgtggtagagaggaagaacaggacgctcat

SEQ ID NO: 55383 - DNA, 393 bp, Zea mays
ggttgaactcttgaatcttggggatatgaactccttgaagtacctcgtggcgcgggtgttacggggccttcttctactgttgatgcttgagcaggcagcacagagatgactggcacggggttgattctgggagaaccttcttcttagcttctcttcactatcttcttttcactggccctttctttctctttgctcttcccactggaggattctattgatgagtattaccatcatacattggaggaaaccaaagactcagttggttcattatttcttaggtacacattgttataatatccacatgtatcgccccacagtcgaatatataaggcctagggggcaccccttcagatcagatactcactacctagtctccacccaactctctacgtc

SEQ ID NO: 55384 - DNA, 345 bp, Zea mays
gaacttcgcggcgtcaaaagatactagttaccgtcgagctggaagccaccccgatcggggacgggacccctaccctttgctcatcgtcgtagataaagacgctcgccgccggcgtgccatctctatgcccgccgcgtgtccgagcctttccacggcaccgacgaaattccgtactgccgtaccatcataaccgatgagcccgccatggctatggacacgtaaccgagcgcgccaggctgtttacccgtatccggccgccaacacatcgaggtcaaattgagagccaccgcccgcggagtctataaattcagcgcaccgtccgcttcgatatgtattcgagcatct

SEQ ID NO: 55385 - DNA, 345 bp, Zea mays
  unsure (1)..(345): unsure at all n locations
atagnaaactagttgatgatcatatcatgctcgatattgctcatgaggcagtaattactagcttaaactcatatgaacctcattcttgcactagtaatcaattggtcaaaatattatgatgtgctgacctccaccgccccaagaaaggccaatctttgtttgagaaacaagttgcaggatcaaaanaaaaattgcgtgggaacaagaagcaaagacagctaaggagaagatacattgctcaactctctcaagatatccacgggcgcgtggtgaagaagcttgagaaaggaaaaactgcatcaagtgttaagctcaagaagaagattgttcccaaagctatatatg

SEQ ID NO: 55386 - DNA, 374 bp, Zea mays
ttttcgtcttcggctcaaaatactgatttcgtccacatcaaagcgactcaagcaaagggtaagaatatattacaaggtatgtacaaagttccttgaagatagtctagttgtatttacaagaatatcctgagtttttctacagtacacttctactgatcttcattaagtttcagctttgacgacataatttaggcatcatcttcaccttcgtcatcctacataaattaagagattatgagtaaaaatcaagaccaaaggaaaaggtaactccgaagtatcatttcttactggttcaagatgacttcgtgcttcgtctccagctttctcccgcccgccttttgtccatatcattgttatgaatctattggagatgc

SEQ ID NO: 55387 - DNA, 441 bp, Zea mays
agcttatgaagatttccatcccacaggggttattctgcgatgctagagccagcccacgttagtcttagcaattaagcaagtgtcgagttcagctctatcaaaattcactaagtatagttgaccctctaacactcccttaaatgctattgaatcatcacttcttctaaagacagtgacacctacatcagtgaataaacagttgtagcccattttgcataattgagaaacggaaagcaaattgtaatgtaatgaatctacaagaaaaacatttgaaatagaatggttaggagatatagcaattttacccaatcatttgaccaaaccttgatttccatccccgaatgtgatagctcgttggggatcatggtttttctcgtaggaggagaacatcttctcccctatcatgtggtttgtgcacccgctgtcgattacccagcttgg

SEQ ID NO: 55388 - DNA, 453 bp, Zea mays
cgcattccatgatctacgaatgatggtgccgttcttattctttattctgtaggaaccgggtcttgacgaagatactaccagagaaggcccttcccacttcagctgtaatttgcctactgtatctggtgtggctactcttcaaagcactcaaatgtcctggttcaatgttctttagcctaacctttctatcccgccgatttattgattcagctcggtatttgctgatgttttccacagcttgaagcctgatcccctttatagcatctttttctcatagagcaatcaactgtaacctcgtcttctgccgaaactactattcttattgatcctgctttggcttcttccggagttattgcttcgtcaccaaacaatattctgaatgaggtaaaacctgttaatcatgatattggtgtgtagtggcttcaaccactttgattaattagactggccact

SEQ ID NO: 55389 - DNA, 444 bp, Zea mays
  unsure (1)..(444): unsure at all n locations
agcttcacatgtctcgtatgattcanattcaattgatttttatagcccatcagaatgaagcttcttcatgcgattctcacttatatgacccaaacgacagtgccacatgtaggtaggacttaaatcattaggccgaggccttttagcactaatattacagataggtgcatcatcaagatttaaaatgaataacccattcataatggatgcaaaagccacaaacatgccattcttagagatcacacaaccattgttttcactcgcaaatgaataaccatccttcatcaaacatgaaggagacataatgtttcgactcatactaggaactagataacaattatttaactccaaaataaatcctgatgggaggtggagttgcatcgtcccgacggtcaacgcagcaactcttgcattattgcctacccgaaaatcaacttctcctct

SEQ ID NO: 55390 - DNA, 460 bp, Zea mays
  unsure (1)..(460): unsure at all n locations
ctcaagcttgccatacttgtcaaaacaacaacatctgccagcacagcaatctgtttatcataccagtaacttggcctttcgcatgctggggactggatatgattggacctttcaagaaagctcaaggaggatacactcatgtattggtagcaatcgacaaattcactaaatggatagagttcaagcccattgcttctttaacctcagctaaggccgtggaattcatacaagacataatattcagattcgggataccaaacagcatcataactgacctaggatccaacttcacaagttcagagttcttcgacttctgcgagcaaaaaagcattcagatcaagtatgcatctgtagcacatccaagagccaacgggcaggttgagcgagccaacaggatgatactggaggcactcanganaaaggtcttcgataagaatgaanaattcacaggaaagtggat

SEQ ID NO: 55391 - DNA, 430 bp, Zea mays
  unsure (1)..(430): unsure at all n locations
agcttcggcgtggcagcaaaaaatgaattcttcttttagatgaaaaggctattcacacctcgatagattactatagaattattatcaaatgtaaagggcataaatgtaactttgcataggctgtgccctgtgcctataaataggtgaacagtacccccgtactgttcacgcggatttggcattcgcttttgcgtcgcgcttttactctcatctccttcaagttgaaggtacatttgtaatttaacgncatttctgtttatacatataataacatataattgtctatgttatcctttatatcccttataattcatccttcgtcactgtatagtgaatatatgaaggtaaacccttcataaccttcgtccgaaaaccgttatatcctaaggggaataatgcttcgaaggacgaagggcttaaccgattaaca

SEQ ID NO: 55392 - DNA, 441 bp, Zea mays
  unsure (1)..(441): unsure at all n locations
tgagttattntattacagaccagaactaanaagggtgttatatgttttatattatacaaaccaagggaggcacaaactcctcccgataagctataagcaaaagatcctatgtggaggaccgagtcctcccgcacttcagtcttgtttttcttcttttggaaccaccttggcacagaagcagcaaaagtctgctacttcctcacctaaaaacaacgaagggataaaccctgagtatggaattactcagcaagtcttacccgactaaagaaaagactctcaagggtatgctggttgtatgggagtcaaggtaaggcttttcaataatcaaagacgctgttttgcagaaatgcttactaaagtggatccttaaaaatccacatttatttgtcaagttaagtaaaattacctgcactagagatctttctaccctagttcaatcac

SEQ ID NO: 55393 - DNA, 406 bp, Zea mays
agctttaaaaatctgtagaatattgttatttatcttataaatatgagaccatttttgttagatccctaatttcctgcagtgtttaataaaaatagtaccatgatttttaagtcacatagggaattttggggtatttaaaataacctaaagcattgattctggatttttagaaaataaatggctacaccttcattagaagccttgggtagagtttggtttgattaggagcttgtttgatacttagaacccaaaactttctgccctttgaactcctttactaactccggaaaccctaagttatcggagttgcgtgaaggaaagttgtattcaatacttagataataaatctttattatgcttgccctctcatgagcattacatggcattcattcttatatataccata

SEQ ID NO: 55394 - DNA, 370 bp, Zea mays
  unsure (1)..(370): unsure at all n locations
atttgtagcgcttgccangcanggaagcaagttggagtccatcatccacacaagaacattatgacgaccgacaggccactggagctcctacacatggatctattcggcccgattgcttacataagcatcggcgggagtaagtactgcctagttattgcggatgattattctcgcttcacttgagtattctttgtacaggaaaaatctcatacccaagagaccttataaggattcttgagacgggctcaaaatgagttcgccttaaggatcaagaaaataagaagcgacaacgggacggagttcaagaactctcanatcgaaagcttccttgacgagganggcatcaagcatgagttctcttctccctaca

SEQ ID NO: 55395 - DNA, 377 bp, Zea mays
  unsure (1)..(377): unsure at all n locations
gcggaggaggaggccctgctcctggcacatgcaagcatcgagccatctccagcggcaccggccgcagcggcactcctccaccttgatgagtcgaaagcacacgctttcctcggcgacggctccaacaaggacatgatcgaaggatggtgcctcgacaccggcgccactcatcacatgaccggccgacgggagttcttcaccgagcttgactctagcatccgaggctccgtcaagttttgggacgcctccggcgtagagatcaagggtgccggctcagtcgtcttcaccgccgcgtctggtgagcacaggctgctcaccggagtctactacatcccttgcgtgaggaactctatcatcagctngggacagctggatga

SEQ ID NO: 55396 - DNA, 390 bp, Zea mays
tgcaactatctcgccaataatgtgctgtatattgtgttttttattatgacaactatatgttggtacacaattctatcatggccctcaaaaaaagatggacaacattttcctcaagttaaatatctcaaaagcttcttgattcaaattctggcctttttactggacgtacttgtacatttgggtttcagcttgaatggtgcaatatgatctcaaatcttatagcattctcctccactaaagtgctccttaacggttccccaggccatttaatcacacactgtaaggggctgcgtcacggcgactatcggtgttttgggtccgactgcgcacccagagttgcccctcaatgtgctttttggagcatgacggagtgaccgactgtagcttgat

SEQ ID NO: 55397 - DNA, 445 bp, Zea mays
  unsure (1)..(445): unsure at all n locations
tgtattgcatctaggacttgtttaactttatttgagataaccgccaacaaagcgagtgaaaaagcttaactcgggtcaaacctgacaagtcttagtttttaagcttttagcacttaaattcttactttttatgcaattattggttcttgaaatatgcatgaggtactgcacttagggggagtattcaaaactcanatctctcatgaaaacccctagtgcaaaccaaaatgcaaatntcaccatttgcctattttctctaaaaattatctagcctatggcgaaatattttgaaaagtatatgagggtgccaatacctgtcccaacaggtgttattntgtgtgattataagttgggatctggtttggttgggagttagatagaannattcaaattnttccaaactcttctctgtctgggctcaccggacagtctcgtgtgcaccgga

SEQ ID NO: 55398 - DNA, 385 bp, Zea mays
caccggaatccataccttcgacttgtgaatatcccttggccacaagtcgggctttgttccttgtcaccacaccatgctcatctttgttgttgcggaagacccacttggttcctacaacagtttggttaggacgtggaactaaatgccatacctcattcctagagaaattgttgaactcctcttgcatcgccaccacccaatccgaatcttgaagtacttcctctaccctgtgtggctcaatagaggaaacaaatgagtaatgctcacaaaaatgtgcaacacgagatctagtggttacccacttatgaatgtcgccgaggatggtgtcaaccgagtgatcatcgctgattgcttgctggactcttgggtgtggcggtcttggaac

SEQ ID NO: 55399 - DNA, 446 bp, Zea mays
  unsure (1)..(446): unsure at all n locations
agctttgaaagaatagatctatgtctagngaaatcttttgtttacatgccttatttaagataaaccacatggtacgaaagcaagggttttaaatttcatggcgattcttaagataagataaataagcaaatcctcatacatgaagaacaaattacattcctcaaaatcagtgcacatatgagcaataaaaacatggttgtatgaccacattcatagggaacaaccacatcaaactttaccaaaccattgcaaaataaaaaaccgtctctagacggtttcggttttccctgaaaatttgctaaaaatgaccggttcagcttttcaaaatcaaataacagctgttttgtccaatttttgttgtttcacatcgatttacaatgtttggactcgtttgtattctcaaattccaataaaaacgggtttcgaagatttctcggcgagaaatt

SEQ ID NO: 55400 - DNA, 456 bp, Zea mays
gcttaacgagtggggacgggagagtggaggcgagcccgtgttgctttgtttacagtcgagatctttcccagccccactggtgaaagcttcgcgccacccatctcgcccagaacgttgacgcgagggcaggctaaggtaggagtccagcagaggagttgttcgcgcgcatggggagggatgagagatgcgcggactcggcgacgaagactccaacccgcccgtggatccgacagctagggggacttcttccccaacccacgtcgagagcggtggcggcgttgaagaccagcgcggcggcatccccttctccctcttctctctcttcgctctcgctcggcctctctcttccttctctgctccttgatttctctggttgctttacactggtagccctagtttcatcgccgtggtggtccaatgagctgaggaacttatggagccgcacatatatatagc

SEQ ID NO: 55401 - DNA, 445 bp, Zea mays
actgagcatcaagcttctaagggagagcacattctaggattatctttttttttttctgagaaagacaggatttgtagcgcatgtcatgcatggaagcaagttggagtccatcatgcgcacaagaacatcatgacgaccgacaggccgcttgagctactccacatggatctattcggcccgattgcttacataagcatcggcgggagtaagtactgtctagttattgtggatgattattctcgcttcacttgggtattctttttacaggaaaaatccaaacccaagagaccttaataggattcttgagacgggctcaaaatgagttcggcttaagaatcaagaaaataagaagcgacaacgggacggagttcaagaactctcacattgaaagctttcttgaggaagagggcatcaagcatgagttctcctctccctacacccctca

SEQ ID NO: 55402 - DNA, 327 bp, Zea mays
agcctctcatttgcgcactggagcttcggataagaatcatcatcaggacccgcaaatcctaactcaaaggaagatatgcttgttgacaaacaacaagcattagcacatgggaatatagtattaatgggaatacatgtgcacgagcgaggtcgttgggatattaagggctctatcacaacctcatgagcaacgtgcaatatgatatgactatccataagacccttaggagaacataaaagcatatcatatttatcttgaaaagcctagatttcaactgttagcttttctacttgcgcctcgagcaaggtagtcctatttactaattga

SEQ ID NO: 55403 - DNA, 373 bp, Zea mays
tagcttgtgggggtccttgtgggaactttgttttttgtgattgagaagagaaagctcactcgatccgtggatcgtttgagagagggaagggttgaaagagacccggcctttgtggcctcctcaacggggagtaggtttgcaagaaccgaacctcggtaaaacaaatctccgtgtctcacttgcttattcgcttaggatattgtttgcgccctctattgcggactcgtttcttattactaacgctaaccccggcttgtagttgtgtttatatttgtaaatttcaggttcgccctattcaccccccccctctaggcgactttcaactacattccgcgattctcgaagcagcgcaccgagcttgccaacattaccg

SEQ ID NO: 55404 - DNA, 250 bp, Zea mays
  unsure (1)..(250): unsure at all n locations
ccaaaaccgctgtgtaactcacctaccaggtttatcttttggnacgcctcgatggatgctttcagacaattacatacatagaggctggtgaaacagaccagttgtctttggttacaccacccacccttgatttaagactgcacattgattttatgatttaacaaacccggtatgctttgcgtaacagtatgtactacgtgtaagggatgtataattaactaatgtgacttttataatgctgtaaatactc

SEQ ID NO: 55405 - DNA, 441 bp, Zea mays
agcttctaaatctttttcattgggagaataactattgtttaagttatttattgcaaatcttataagccttgatcaagatgaataatgcttctccctatttgttttaaaagtaagtacatctatccaattcattcaatttcttgatgcatatatttagggggagcttatttctatatcttgattttattgagactaattcttcatctcagtattctcatatagtctcaagtatgagagtaagtttatcatgtagtatgcttctacatttcaatccaccttagtaaagtaatgtcaccttttttcaaggattgtaactttcaaatgttaaaggagcatatgtaatggattctcctattttaagcttatctaatgcatatgttgttcttttgatcacatctgtcatttgtttgatcattgaataacttcaattaacacttatgt

SEQ ID NO: 55406 - DNA, 404 bp, Zea mays
  unsure (1)..(404): unsure at all n locations
ttatattggagagttattttttttatnntttgccgaagacataaaactggggtgccattacaaatgttctttcaagtgaaactgtgtttttcngttttacatgcagtaaagggtgtagacttatataatgaatcttctgctccacttctttgggacatgttttaacatttcttaacatttctcactctgtaacgctttcataccacttttcttatgttttagatgcgctttttttgagaccaagccctaagggcaacaatggggatgaccagcgtcttggtttatcaagaggaagttaatccctctcaactgaaactcccatcaaatttggggcataatgtgtcgattcacgtataactattatatgtcatttggcgttagcanacctgatctactaatttctc

SEQ ID NO: 55407 - DNA, 433 bp, Zea mays
  unsure (1)..(433): unsure at all n locations
agcttccaaatctcttcaagngccataattgtgtcttgtgatcattagngattagagatttgagagagtgtgattntgtgtctattcttgttgctcttgttgcttggcttttaatcgagctttcttcatctctttctaaattctctagtgacttgtaaagctagcaagagacacctaagtgcgtggtggtccttacggggtcttagtgttccttgagattaaaaataagcactcaaccggtctaagtgatcgattaagagagggaaagggttgaaaaagacccggcctttgtggcctcctcaatggggagtatgttcattggaacgaaacctcggtaaacaaatcgttgtgttcatttgagttgatcattaccttacgatctgattcttcctctctcctctctataagttctcttgctcacaatattttgagt

SEQ ID NO: 55408 - DNA, 471 bp, Zea mays
  unsure (1)..(471): unsure at all n locations
tagtgaggttattaagtcaattgttaaccctgcaacatcgtcgtcgatttctttacgaaacaaaagacaaagggtgagactttgcgaaggcagatataagacttgtttagcgctaccgccgtcacctaggcgggaggcacaaacgccaccttgacaagaagtagatcagtcgccagtcccagttgaagtacagacagtagcagtagatgtagcagcagacatgttaggagtaatagcagcagaaacggtagcagaataggttccaccagtgcatacaacagaagaacaacctgtgcatacaacaagagctataggtgaaacattacaaccaccagttgaagtataggctataataggagatcaatcgatgacaggagtagatgttgggtctttngaacaagcgacacatgaggccgtagattcaactcatacattacagcctacatcagaagaagctacaccatctcatta

SEQ ID NO: 55409 - DNA, 441 bp, Zea mays
  unsure (1)..(441): unsure at all n locations
agcttctaaagggagagcacattntaggactatctcttgttcattctgagaaagacagggtttgtagcgcatgccaagcaggaaagcaagttggtgcccatcatccacacaagaacatcatgacgaccgacaggccgcttgagctactccacatggatctattcggcccgattgcttacataagcatcggcgggagtaagtattgtcttgtaatagtggatgattactctcgcttcacttgggtattctttttgcaagaaaaatctcaaacccaagaaaccttaaagggattcttgagaagggctcaaaatgagttcggcttaaggatcaagaaaattagaagcgacaacgggacggagttcaagaactctcaaattgaaggcttccttgaggaggaggggatcaagcatgagttctcttctccctacacgccacaacaaa

SEQ ID NO: 55410 - DNA, 464 bp, Zea mays
  unsure (1)..(464): unsure at all n locations
tataaaactcagcttgtagaaccgccataccacaggtactgcttcaatgttgtttattgtcccgactgctctggtccccaagcgaagtcttttgcgccgcggagtgttttgacgaacgggagacttcgctcagcggatttggagatgaatctgttgagggcggccaatcagcccgtcaggcgctggacgtctctggctgactgcggcggtgtcatgttgatgatggcctgaattttggttgggttggcctctatgccgcggtgtgataccacgtagcccaatattttcccctggcgaacgccgaagacacactnttctgggttcaggcgaagtcgtgcgtcccgcatgttcgcgaatgtctcggcgaggtcagcaagatggtcctccttgctcctgttggcgacgatgatgtcgtccacatatgtgaatatatatctgccgactcgcccctcgagcactgtttt

SEQ ID NO: 55411 - DNA, 426 bp, Zea mays
tcaagcttgagtcggtcatttctgcaacacaattattgtctcttctaagaaatgatgaggggaatgaagcacattcatgagaaggtagaagctggaaaagtcgactgcttctcaagaggtgatcaaggtgttgtatggttcaacaaccgcatagttgtgcctaaaaatgatgagctccgccagcaaattttggatgaagcacatcttagtcgttattctattcatcccagaagcactaaggtgtatcatgatctgaaacaacattattggtggacaaagatgaagattgaaatcgcacgctatgtggcaagatgtgacacttgtagacgcgtcaaggccatacacatgaaggctgctgggccattgcaatcattaccgattgcaacatggaaatgggaggatattagtatggattttattgtggga

SEQ ID NO: 55412 - DNA, 401 bp, Zea mays
  unsure (1)..(401): unsure at all n locations
ttgttccagtgcacacaggagcacgaagaatacctccatgcttatgttcgaaggntcttgcgcttaagggcacaagcgccaactgtgcccaatgaaatcgtcattaaggccatgatcaaagggcttcggccaggacctgcggcccaatacttcgctaggaagccccctcagaccctggagaagttgctccaaaaaatggatgaatatatccaagctgacaatgactttcgccaaagaagggaggaagcctatatgttctctgagatgaccaggggcttcggaggaagaatccacccaaggcatgtcaggtcaattcactccactcagaatgatgacaaaggaagtcagctgcagaagtcacaatacacttcacaatcctcggggagcaacaaagctctttc

SEQ ID NO: 55413 - DNA, 428 bp, Zea mays
agctttgtctcgggcgaaccaataccatatttgtcatcatgcaatgggagtggggagatggcgagagtaacgtgtaccctccgtggcaagaggctggacagaggtgtgtctgtgctctcggttggcgtgaacccagtctggtcttgagaaacccggtggcgagttgacatatgcaagggttaagtgctacatatgtcgtgtgattggagatcctcagctgagtattaatcaattcggatcgccgttacttctcggacatgaagacttggtcactgacttacacggagcaatccagtgaactgcaagggtgataaaagacggctagtgtaggccaagtgcttgaactatggtagaaagaactctagatgcagttaatgacttaacctgataataaaactagatttttaaggatccactgttagtaagca

SEQ ID NO: 55414 - DNA, 317 bp, Zea mays
atattaatcggatacctattatatctttcctaacataatgcttagtaaaagatctactatacgtaagatgatacaccataccgcccttatgcaatctactagagaccacataagggcagtatgacgcttagcataggacattcttataaaaagggtgtcaatgcaccaaagagatgagaagcacacattgcttagcgaatatccgccttgtatttattgatatgtaaaatgtatatcactacacagaaaatttgaacttcctacagcttcataactatctacagttctcgcaagagtgatatgaagtaaattacttc

SEQ ID NO: 55415 - DNA, 437 bp, Zea mays
agcttgcttttgaaataaatgtaagattatgttattcgcttccgcatttctttatctccgatgttctgtaatgtctgcaagacgggtgagacgttcctggtaaggtaaggaaagataccgaacttgtcaagtgacttaggggcacctacagggttgtctgaagtccgttggacaaggacaactgtaggtgggcctaattacttgggaggttctgtcacagctggtatcggagcgtagcccttcttggcagatattatgaggcatcttctaaaggatttttaaaagtcttacctaaaaattcttttcttttcttacctaagtattctgaagaagtctattttaaagaccagataggaagagtgcaacgtatagaaggttgaatcgactaagggtgattctgtaattatacatgcatcatgctaagaatcttactaata

SEQ ID NO: 55416 - DNA, 421 bp, Zea mays
  unsure (1)..(421): unsure at all n locations
tctcctcaattggcgccactcctactctctctctatatcatcattccggactcgatctctccttgtgtggccacatatccagcgcaacatacgcatctctgccacacttagttgttggacatgtcgtcttttagtgggccaacattctgctccatacaacatagccggccggattgctgtcctgtagaatttgccttttagtttgcgtggcacccggtggtcgcataagacacccgcagcttgtcgccactacaaccatccggctntaattctatgactgacatcctcatcgatgtctccctccttttgaagcattgatcctaagtaacgaaaagtgtctttcttgggtaccacttgcccatcaagactaacatcgccattctcatcccccatggcactganatcacacttcatatactct

SEQ ID NO: 55417 - DNA, 447 bp, Zea mays
  unsure (1)..(447): unsure at all n locations
atgcagcttgcatgctntgttgagaagccanctttattctgtaatcttgtgcncccgagggtgnttattgctttcaggagctgaacccttcagtctctgtctccaccatctgaatttcttgaacagaaattgagccaatatactcatgatgaacatcaattgtatcagtgcaaaagtgaccatccagaagcaaggtgaatataggtcttgccattcttgcatatgatgcaatatagtagaacctgtaataacagtttgcaaatttcatgtcaaaaaacttacgcaggaatacattcttgaagcatcatttttctcttgtggatataataacataggagctagtagctgcaattatgttaccggtactcaagaaaagtagaaacaaacacgttcttgtgaggactggacttcaactatttcttgcaagcattatttanaattgtagat

SEQ ID NO: 55418 - DNA, 428 bp, Zea mays
  unsure (1)..(428): unsure at all n locations
gacgggctcgttttctctacgccagcgccatggaccggcagcgtcggctgcgagtgcgatgcggatgccatggtggttgcgtgcatcaatgagaggatgatgatgatagggaaagcgctgtctgaacgggactaactcatactcacatacatcaagccgctcgacgaaatgctcgatttggggtggacgccttgccgcggtggacccttgtaacaatttgatgacagtcttcttttgcatgcggagaatggtgtggcattattgggcgatgttcgcaacagttgggttgggatttcgatcttacaagctctttttgttaaggaacacaatgcagtgtgtgatgcaataaaggtaagagaagcatcactattattatcatctanttgtttagnttatatgaagaaattgatgttcttgatttctttcca

SEQ ID NO: 55419 - DNA, 434 bp, Zea mays
  unsure (1)..(434): unsure at all n locations
agcttctaaagggagaacacgtgataggtctattttatgtttctttcgaaaaagatagaccttgtgcagcttgtcaagcaggtaaacaggtgggaagctctcatcataccaaaaatgtgatgactacatcaagacccttggagttacttcatatggacctcttcggacccgtcgcctacctaagcttaggaggaagtaagtatggtcttgttatagntgatgatttttcctgcttcacttgggtattctttntgtaggataagtctgaaacccaagggaccctcaagcgcttcctaaggagagctcaaaatgagtttgagctcaaggtgaagaagataaggagcgacaacgggtccgagttcaagtactttcaagtggaggagtaccttgaggaggaagggatcaagcacgagttctcttgctcctacacacca

SEQ ID NO: 55420 - DNA, 414 bp, Zea mays
  unsure (1)..(414): unsure at all n locations
actaagcttatgaagattcttcattcccacatgggctagtccgcggtgccatagtctatccatgttaggcttagcagttaagcaagtgtcgagttcagctctatcaaaatctactaagtatagctgaccctctaacactcccttaaatgctattgaatcatcacttcttctaaagacagtgacacctacatcagtgaatagacagatgtagcccatttgacataattgtgaaacagaaagcaaattgtaatctaatgaattaacaagaaaaacattggaaatagtatggtcgggtgatatagcaattttacccaatcctttgaccaaaccttgatttccatccccgaatgtgatagctcgctggggatcttggtttttctcatatgaagagaacatctntttctcccctgtcat

SEQ ID NO: 55421 - DNA, 413 bp, Zea mays
  unsure (1)..(413): unsure at all n locations
ctgaagctgcagctgatgacaggtcccactgatgcatttttttttttatttttgaagaagcattgaagaccagcaaacttgagggtgtggctgctctttccgtatcatactctgcatggttttgtgaaccctgagtacttgaatggaattgactcactatgaaagcatttgtggcctatggtcagactgatagtacttgaaatgtcaacatttaatganaacctgcgctaatttgttagacgaaacattcaacgtgtgttcttgaagactgatgactctttcactctattaattattgcactattactgctggtggtgctgaagacacttattgctataacagggttaacgtgccgatgatgtattcacatcttatttcaatgcatgcccccaccacgggagcacaacaatta

SEQ ID NO: 55422 - DNA, 443 bp, Zea mays
  unsure (1)..(443): unsure at all n locations
tatttcattcccaaactgaatagcaacatatttagattaagcttattgtttatggtggatgcacagcagagcttgaagatggatattgcagtgtgttagatgaagaacgcacattgcttgctcacgcacctcatgttgggaatcattnttatttactgaaagtgcatctaactgctcctgtttgtttggctgcaaagacttcagataaagcttggttgtggcatggtcgctatggtcacctaaacttcagagcacttcgtgagcttggactgaaaggaatggtcgaaggattgccgctgctggatcgagtggaataaatttgtgatggctgtgtacttggtaaataacatcgacaaccattcccacaagtgacaagttatcgagctgacagtcaactagatctgtatcatgctgatctctgcggtcagatcaagccgaaaaca

SEQ ID NO: 55423 - DNA, 441 bp, Zea mays
  unsure (1)..(441): unsure at all n locations
tgggcacccatttgaacttcagctcagcttanattcttcagacagacggtcagactaaaagaactaatcagatcctagaggatatgttgagagcctgtgcgttgcaagacaagtcaggatgggacaaaagattaccttatgcagaattctcctacaacaatagttaccaggccagcttgaagatgtcgccgtttcaggcactctatgggcggagttgtaggactccgctgcattgggaccagcctggggagagacaggtgtttggccccgacatcttgcttgaagccgaagagaatatcaaaatggttcgggagaacctgaagacagcccagtcaagacagcgaagctatgctgacagaaggagaagagaactgagttttgaagtgggagactacgtctatctgaaggtgtcacctatcangggagtcagaaggttcggag

SEQ ID NO: 55424 - DNA, 470 bp, Zea mays
  unsure (1)..(470): unsure at all n locations
agcttcttgaatcctcagaggctaaagtgcatgaaggaactaatgtgtgctttctgtatgtggaacacgtctcatggcgatgaagtctaagtacaccttctccaacaactgttacaacaattttgtgaaactgattattgatatcagcccaccgaatcataacatgccgaaggacttgtaccattgcaagaagctcgtagttggtctcagcatgaactaccaaaagattgatgcttgcgaggacaattgcatgttgttctggaaggagcatgaaaataccacacattgcatctactgcagtaagtcaagatatgcagtggtgctagatgaggatggaaacgaggttacgacaaaggtgtcgtcaagcaactccggtacatgcctatcactccacggcttaagcgtctctttctaaatcaagagacaacaaagcanatgatgtggcataaggaaggagatcgccagggtca

SEQ ID NO: 55425 - DNA, 451 bp, Zea mays
  unsure (1)..(451): unsure at all n locations
agctngagacgggaacaaccgtggcatgcactttatttcttgaagaaaatgtcaaggatttgaggatcgccaagaggaataaacaaaagaagaaattcaacacctcctccaaaagcctcaaccacgcctccacaaaaggtaacatccaaggtaatgatcaagccacacttcacattaagaggtgtagtgaatgctntaaagaggggcacttgattaggtcatgtccctacattaaaaatgacttgattattaacaaggatgatagactttgttttaaatgctccaagaagggacacttgcttagatcttgtccccatttaaaacaaaaaggcatagggttagaaaagaaggtttttactaaccatgtagcaggcaacaaacaaggaaagaagaaatcttcaaaatttggaaaacgcctatgctacacatgccgaaagaagggacatcaatg

SEQ ID NO: 55426 - DNA, 326 bp, Zea mays
atgtgatgaccacgtctagacctctggagctgttgcatatggaccttttcggacccgtcgcctatctaagcataggaggaagtaagtatggtttagttattgttgatgacttttcccgcttcacttgggtgttctttttgcaggataagtctgaaacccaagggaccctcaagcgcttcctcatgagagctcacaatgagtttgagctcaaggtgaagaagataatgagcgacaacgggtccgaattaagaaccttcaatggaggagttccttgaggaggaagggatcaagcacgagttctccgctccctacacaccacatcaaaa

SEQ ID NO: 55427 - DNA, 239 bp, Zea mays
aagagaaagacaggagcagttgcgcatagcaggcaacgaagcaagatgctctccatcatccacacaagagcagtctgaccacttacccgccgatggagctcactacacatggatctataccgcccgactgcttacatatacgacgacgggagtaaggactggctatacattgggaatgaatatgctcgcttcacttgtgtgttctttatgaaagaaaaaactcccacccgacacacctt

SEQ ID NO: 55428 - DNA, 194 bp, Zea mays
gcatagcaagcggcgaagccagttgtatcccatactacacacgagaatatgatgactaccgacacgccgcttgagctactacacatggatcttttcggcccgattgctcacataatcatcagcgggagtaagtattgccttgtaatagaggatgaatattaacgcttcactggggtattctgtttacacgaaaa

SEQ ID NO: 55429 - DNA, 399 bp, Zea mays
gtaggagtgtcctacctaccacaagaaaaaagcagacaagaataaattttatcctgtaaaaggaagaaggtggccgctcattaatgttctttcgcactgcactagagatgttggttgcataaaaaaggtctcaaaatagacagcgagaatctagccttctagcgtcatcgcacaaaccgcgccgacaaatctcttttttaagtgttttttaaaaagaaagagcatcactcagatactgtttcacctttagaaattcgcagatcaccaaagtccctacgaaatctagcgcacgccacacgggaaataaaaaaaatgaagcaggcggcaaagctcacgagcacgcgaaccccaaatttcgcaggaaatcgctacacgacagggtcagcctccgcacgatcg

SEQ ID NO: 55430 - DNA, 432 bp, Zea mays
  unsure (1)..(432): unsure at all n locations
agcttatgctctttggtcaaatatatnngctactattatggaacaaaaagtgagcatgaggaacactatgatttggttatgaagaaatcaaattttcatttgaaatactttctcatgagaatggtaatgatatgtactcacacttaaatttcatttttagaagatgtaaatgcatggggtcacataattaacaaaaacaaatgttgtgagaaagatctttagtgtngtccgaatgaacaaatatgggaacatcgtcagcatgctccatcaagttgatttatccactactacaccaactcaaatcttaggaaatataaatgctcatgagatggtgtgaatgttcagggaaggtcatttangattctaatataaaaagctactatgggtcaccatgctaggaccaccactcctaggaccacattcccagggaac

SEQ ID NO: 55431 - DNA, 470 bp, Zea mays
  unsure (1)..(470): unsure at all n locations
ttttcgattgtagcttcggcaaacatcttcatgtcacgtcttgtttgttgtcatcttgccgaaggtgtttttgcttagaggaccttccgtgtagaagaaggcccccaacagtagcccttcgcggtgctagatcgtttttcgtaacgagttcgatccgcgaaaaactcgaaggcttcggaatgccgaaggtccgaaaaacaccttccctgagctcgttgccgagaaacgatttataatattccaagcgtcgagtggtccaccattcaacgagtgcaggagatctggcggttcgccttcccacctgtagcactatataaacagacgggttggtgaagagttaccacatcattcattgccattgcactgttgtgctgntaaaaatnttaaccatagccaaagctntatgcaccgcgctttctaagcgaanacttcatcgttaaggtaacttcatcaaacgggttagcttcatc

SEQ ID NO: 55432 - DNA, 333 bp, Zea mays
cccttcctgtaccattgccattcgcatgctgggggctggacatgattctacctattaagaaagctcatggaggctacgctcatgtacttgttgccattgacaaattcacataatggataccggccggtaccctaattaggggtactgtcactaccggctttataaggcgaacccaatgcgaaccatgtacgcgccaggatcagttattcacgcacacagcatttacataacattgacatcatcacacagtgctcgtaataggatctctaagggaaatcgtctattacatcatacgtttgagaccgccatatagaccttacaataaatcaaagt

SEQ ID NO: 55433 - DNA, 468 bp, Zea mays
  unsure (1)..(468): unsure at all n locations
tgtgggcgccctcggcgtcttgtcgcagtccaagtactttgtctctttcttggaagcctcggggccgaaccctgtgggcatggtaacgtcgcatggactgctgataccgcgccgagtgtagtaaggccacgtcccgagcctcttccagctggtccaacgaatcttctcggttggtctggttgctttggtcgttgtaagcctttgtcctcggggaaccgtattctaagtccgtgggtaagatggcctcggccccatagactagaaagaacgacgagaaacccgtggctcggctcggcgtcatactcagactccaaaccaccgagggtagttcctttatccaccgcttgccaaacttgtgtaggttgttgtagatcctcggctttagtccctgcaaaatcataccgttggcgcgctccacctgcccatttgtcattgngtgagctacggcgagccagtccacactgatgt

SEQ ID NO: 55434 - DNA, 445 bp, Zea mays
agcttacataagaataagatttgaagcttttatttgtattctaagattatagaatgctccccctaaataagtgcttacttcaaaaacataattttggcctcagacgccaatttgcacatacttaggcaaatcgaaacatttctacaccttagcactttttagtatgcattgtggcaaaaatcaaaccatgatgctataccacacaaatgcatgtaatcagagttaaacatcattcaatttagtggatatatcacaggaatatcaaccttaccactattcaccattaatataccaatttaaactaagataccaatttaaagcaatcttaaagcaccattaaccacatgactatctattacactatagaagccaattaataatcttaaagcatcattcaccacatgactatctattacactatagaagccaattgataatcttaaag

SEQ ID NO: 55435 - DNA, 457 bp, Zea mays
  unsure (1)..(457): unsure at all n locations
tcataatacattcttatggaaggtgtgcaggagtccattttattttcataatcctctcatcctccttcttctcctccctgtcatgcttctcacgcatgattctaactttctcttgctcaatatctaataccgattggttgtgattacgcatttcctggtaccttttctcatcaattgtagcaagctgctggaatcgctcacctttgcgcacgctttcttcttgcatgatatttattttttgaatggacaggtcctgcatcctactagcatactctgaagaagatgtatcacctgacaccgatttagatttcttgctcgctgctttagctctgtctctaccaaccgacctttnttcagctgacttgtctgcatcaacgtgcaccctgttggagtcctcttccaagtcgtcgccttctagatgagcttcagcccaagttgtgttggttaccccatttgg

SEQ ID NO: 55436 - DNA, 398 bp, Zea mays
  unsure (1)..(398): unsure at all n locations
gcatatctnggaagtatttacattggctcaattccaagcaacctttgcacttacattatgcaaactagttcaattatgcacttctatatttgctttggtttgtgttggcatcaatcaccaaaaagggggagattgaaagggaattaggcttacacctagttcctaaataattttggtggttgaattgcccaacacaaataattggactaactagtttgctctagtgtataagttataacacgtgtaaaaggttcacacttagccaataaaaagatcaaatattggattcaacaaaggagcaaagggacaaccgaaggcccctctggtctgggggcaccggactgtccggtgcgcaccggacagtgtccggtgcaccaccggacagtgtccggtgcacc

SEQ ID NO: 55437 - DNA, 172 bp, Zea mays
tcacttatgtttcttactgcctcatgtaaattcatattgatctctctctggcacttcaattgacatctatcttgatatgcactatcgaaagacgagaactcatgactcatgtatgcgacttgtgatccctatgatatatgctagcgataacttgaacaagatcactacttgt

SEQ ID NO: 55438 - DNA, 443 bp, Zea mays
  unsure (1)..(443): unsure at all n locations
agctntctcgactaagacggggtcttttgtctctatgtgacgggtgaaagnacccgcgtaagcggcaagggccgaccgagnccgagggagttcccacgccctctgggatacggatacctcactcgtcccttccgcgaaaagcaactctcgctcacacaaacatccctgttaccgacagagtccagatgctcgaaacaagaggaaaaaagacgcagcttcgcaggcgcggcgaggttgtgtttttctggcctcggcggccgcagaaagcacacgctacaagatgatctgatcctgcaggctcgggtcttcacgctgaagggagccgtagcaccctcggcatcgacgacgtcttcagcaaagtccgacccagcctcgggcggcgacgcggtccagggactcctccgggaatccggcccgagcaggcggctcgaccggttacccct

SEQ ID NO: 55439 - DNA, 405 bp, Zea mays
  unsure (1)..(405): unsure at all n locations
ctattaaactcagcttgtaccttgtggggtggagaccctaccttgtatattcttgtgtctgcctctttctctacacaaactaaccaaacagcagctcctgccctttattgagaaaattgcagatcttctcccaagctggaaggcagagctgttgaacaaagctggcagaagaattctagtgcagcatgtcctaactagtatgacaatctatactgcaatggctattgattttcctaagcgggctctggatgcaattgataaaattagaaagggattcttatggagaggcccaaaggatgcttaaggaggtcactgtatggtagcctgngaaaaggtttgtaggcctctacatatgggaagcctcgggatttctaacctgactaaccttngttgggctctcacaat

SEQ ID NO: 55440 - DNA, 311 bp, Zea mays
tgaagatgcagctgtataaaagcatactcagaagccacatttgttgtttttgttcctataacaagagaaaagtatttcgtttctgttcacacattctggtgatctcacatcacatcaattggaatacaaccttcgccaaagcagaggtattattgtgttcaataattcactatattaaggagatacaaggaaaggcgtctaggatacacctatccccttaatacctttgatggtatgattatcccacaacatctattgggactatattacgaagacttaagctttctaattatgctcttatcaacgcttcc

SEQ ID NO: 55441 - DNA, 351 bp, Zea mays
  unsure (1)..(351): unsure at all n locations
gcaacttgtccagcaggtaaacaagtgggaggagcgcatcacaaccagaatgtgatgaccaccttaagacctctggagctgctgcatatggacctcttcggacccgtcgcctatctgagcataggagggaagtagtatggtctagttattggtgatgacttttcccgcttcacttgggtgttctttntgcaggataagtctgaaacccaagggaccctcaagncgcttctcaggagagctcaaaatgagtttgagctcaaggtgaagaagataaggagcgacaacgggtccgagttcaagaaccttcaagtggaggagttccttgaagaggaagggatcaagcacgagttc

SEQ ID NO: 55442 - DNA, 443 bp, Zea mays
  unsure (1)..(443): unsure at all n locations
agctttaccctgtaatttggactataagngtgttcatgtttgtgtccttatgcagcngaccatntccaacatttacgtaatgaggactctagggagaagcctcataacgagaccctggccattcacctcaaaagtgaatacgggtctagctaacccgggctagaagggaatcgcgactcatgggtaaagatgcgccacctctgcagagtgtaaaactgatatatcagccgtgctcacggttatgagcancctggactcctcacatgataattgaacttgaagatggaaataaatccagatccgatgatctgccaatggttttgcttaagtggcttcacttaagtgtttttgatatactcttgtaccttttgttaatgggaatacttgggattcacacttattagtaagacaagtgttgttaataaaatgttgaccaactaaaa

SEQ ID NO: 55443 - DNA, 366 bp, Zea mays
gaaagaagcgtgtgagtagtatatttccagaagagtaccggcacactatatactgattctaaagtcacaaaagaataatactagtatgttttataaatttagttaaagctaaaacagctttgactagaatctatcagaagttcataactaggtatctctttctgccggggccggactatgcctaaagatagcaatgggtaaatactatagatgaaaatacagcccagagcacgacaacccggcacgaggtccgattttttggcccggcccaagcacggtacgacccggcaggagtcgtgcccgggccggtccggaccaattaaccaagtcgtgcctgtgctgtcggcagcgcccgccgggcggcac

SEQ ID NO: 55444 - DNA, 417 bp, Zea mays
tgaggcatgcaagcttcgtccactcaagggacacgatctcgccatgcttttgtctctcctcgggcaagaacagtagacccaggcggattcacgcctcgcccgagggcctcctcaagcaacgggcgcaccttctactcgcccgaggcccagctcgggcaggcttcgcagtgaagcaaccttggccagatcgcctcgccaaccgaccgtatcgcaagagcattcaatgcaaagatcgcctgacaccttatcctgacgcgtgttcctcaggcgacagggccgaagtgaccgcaatcacttcgcccctccactgactgacctgacaggaaaacagcgccgcctgccctgcttcgactgctgtgccacccgccaaggtgaggctgacagtagcagagcccagccttaagcgccatatgaagc

SEQ ID NO: 55445 - DNA, 474 bp, Zea mays
  unsure (1)..(474): unsure at all n locations
tatactcggctgcatngttagaggtcgggaatagcaactgtttatctatacttgatgtgctcgcctccaggtgcagngaagagaatccctgctcctgctccctgcagcttcagcgagccatcaaaatacattcgccatacttctgccgtttctggattgtctggaacttgctgttctgtccactctgatacgaaatcgaccagtgcttgagttttgatggcagtgcaaggtcggaactcgatatcatgggatcccaactcgcaagcccacttggctattcggccaatggcttccttgttgtgaagaatatcccctattggaaaaccagtgactactatgactttgtgatcgtcaaagtagtggcgcagcttgcgggcagttagaagtactgcatataatagcttctgaacttgaggatactttttcttcgatggacctagaacctcactgatgaagtagacaggatgttgtacc

SEQ ID NO: 55446 - DNA, 447 bp, Zea mays
agcttctcatgtggggacttaatgggaattctttatttcttaattctgaaattcagaccttgagccaaagatcaaggatgttcaccttgatccctaactcgaatcctaatggccccattgacaaaaatgtgcctaattaacccctctgtcatgtgccaggagatggcattgggacgcgtgcctcggacacgtcaaaccagagatcttctccctgtgtgtggcagtgagacaaacaggatttctcccctctctatctcttaatccagtcagcgaaacttgctagcctccacacacaaacgacaaagggacctaagaggaagagatctctcaatgggatcgtggccttaatctcaaagaattgggcccaatccgcgtttgaacttgacctctctctgcgctgcctcgtgctcgacgctgtgccaggcgccagagcgcgcactggcgttc

SEQ ID NO: 55447 - DNA, 474 bp, Zea mays
  unsure (1)..(474): unsure at all n locations
tagcanatcgtagtgcacaagagctaaatattgagtgagcggttgcttttgttcagagagcgtgtcaaatgcgtttgcggtatggccgtatttatacgccaagtgcgttgaaaattgaaagaccccgcttgtcagtgaatgttgctattctagcaaagggaaggtgttttttcggaccttcggcgtaaagccttcgtccagatcgcaatctaaatttattattttgaacaaattaatattgcgaggggctactgttggggaccttcggcatccgaaggtcctcaaaaacaggatttaatagtgtttctggagtataatgtgtgaacaggtatcttctgactcaagtcaggcatcacagtagaccagaataatacgaaggttggtgaagcgccgaaggtgtaagcanganagcttcggcgagacagcagcagtngaaaccgacttaaagatgaaaaggctatntaaacctcgaca

SEQ ID NO: 55448 - DNA, 445 bp, Zea mays
  unsure (1)..(445): unsure at all n locations
agcttgaagtacatcttcacccagtcagaattgtatattatgcagagacgatgacttgagcttattaaggactatgaactggaaattcattatcacccaggcaaagccaatgttgtggcagatgcactaagccgtaaggtttcctgtcattgtcttacggtgaagacctctgacaacactttatgccaagagatggagaagctaaacctgngaatggtccaacaaggaactctgaatcagttaaagcttgagtcagtcctcttgcaaaggataactgatgcccaaaaggataatgagggcatgaaacacattcgtgagaagttaagggctggaaaagccaaatgtttcaaagaagatgatcaaggcattgtatggtttaataaccgcatagtggtgccaaagaatgaagagctccgccagcaaattcttgatgaagcacatctta

SEQ ID NO: 55449 - DNA, 194 bp, Zea mays
caccaaaaacccaagttacagactcaaaaaaccgcacgcacagaaaagggaacccaccaccaagaaccacaaccgaagccaaaaccaggacggcacaacaagagaagaaggcgaaagaaacccccccagggaccgcgaaaacaacacgaccaactcaaaaacaaagaggaccagaaaaaaaggaccggccacaa

SEQ ID NO: 55450 - DNA, 427 bp, Zea mays
tgggcagagactggcttcgtctggaagccctggaagcttgtgtttatcttgtcctttagcttctgccacaacataattgtgcccgaccgaagagaagaataccatgtctgagccacacttctgactgccatgacgaaggactttgccatgacggcagtattgccccatacgaggatatggttgcctcgtagctcatcacgaactgcttcggatctgaatgtccatcatacatggggagctaatgtggcttgtaagatggtggccacggggtagcctacaactctgctgcagaaggagaagcatcatcgaaagcaaagtgtccatggtgaaaattgtcgcaccattcatcatcattgattgggctcttttgaagaagctccctgtgatggagccttcggtcttggtcatcctgagtgagatgtcgcat

SEQ ID NO: 55451 - DNA, 442 bp, Zea mays
agctctctaagaaggacatgagcaagtcttatttttttataattaatgctcatattatgtgctctaacaatgtacctatgtgcttcaacaaagaaagatcaaagagaagtgttaggaggtgctatggatgcaaggagaagggtcattaaattggttcatgcccccacatgaagaatcaagaccttgcacgatcaagaaagatgaccatctaaaaagatgaaagaaaaaggcaaatgcattgcaaggacaagcacctcatttgctacaattgccgtgaaagaggtcatctattcaaggtttgtccaaagggtaaaactcctaagcctaacctgtcaatacattcaaatatacttaggagacccaaatttgactcttgtgctagaaaagtgatgagttcaccacattctaggactaaggctatttgggtgcctaagtccttatt

SEQ ID NO: 55452 - DNA, 465 bp, Zea mays
tgaagccatggtaagtagcataggcaagtaatatacgtattgttctcttcctagctacgggtgcataggtttcaccaaaatccaaacctttgacttgtgaatatcccttggccacaagtcgggctttgttccttgtcaccacaccatgctcgtcttgcttgttgcggaagacccacttggttcctacaacattttggttaagacgtggaactaaatgccatacctcattcgtcgtgaagttcttgagctcctcttgcatagccaacacctagtccgaatcccttagtgcgtcttccaccctatatggctcaatagaagacacaaaggagtagtgttcacaaaaatgagcaacacgagatcgagtggttacccccttttggatatcgccgaggatggtgttcacggggtgatctcgttgtatcgctcggtggactcttgggtgtggcggtcttggaccctcatcat

SEQ ID NO: 55453 - DNA, 442 bp, Zea mays
agcttatggactatgcgcataattattttattttattgggctaactcgaaatatttgccagactcatgctaacccactaatggacggcgggttgaatacctccaaagacgagggctcttttgaaaatgagtctcacgtgaaggggtactcttgattgtaagccatccgatcgcaatccgaaggcccaaattatatcgcgaaggggtacgccgcaatggccattggatgaccgatcaacggcccacacgtccacatcgatcaaagccgcatcatatcagattaacggttcagatcgcaccaggccgaatcggtttcggactactaatctgagctgaacacagggagatcaacggccaccattcatcttccagccccccgtcttcaaccacaagccagccagcagctactagacagcggtgccaccgacgagccccactggtga

SEQ ID NO: 55454 - DNA, 472 bp, Zea mays
  unsure (1)..(472): unsure at all n locations
tcagcttcacgggctactggcggagctagccgaacactggttgttaggatgttggctggagtgggctggccacngcggccgtagctctggcggcaatggcgggcggaaatgagctcaccggagctaatgaacggtggctggccggtgagggtgagtgcggggcgaaaagaggtgcgcccggggaggctttatatgcgcgggcgggcacggccgaaggcgtgggcgtgcggcggacttgaccggacgccggggcgagcgcgcgcgcgggttgggcgagctctggcgtgccgaccagggtcgaacacatgtgcccgtgcgttctgcccaagctctggtgcgtgtggtcgctcatccgagcctgctctcgccttggtcagtgcacaaaacctcttctcctccctacaagctaccattcttgtgtggaggtcataggattttgcctactgtgttgagagatatggagccaggaaat

SEQ ID NO: 55455 - DNA, 442 bp, Zea mays
agcttatgaagattcttcatgccaacatgttctatttttctgtgccagagccaacccatgttagtcttagcaattaaacatgtgtcgagctcacctctatcaaaatctactaagtatagctgaccctctaacacacctttaaatgctattgaatcatcacttcttctaaagacagtgacacctatatcagtaaaaagacagttgtagcccatttgacataattgggaaacagaaagcaagttgtaatctaatgaatcaacaagaaaaacattggaaatggagtggtcaggtgaaatagcaattttacccaaacctttgaccaacccttgatttccatccccgaatgtgatagctcgttggggatctttgtttttctcatatgaggagaacatcttcttctcccctgtcatgtggtttgtgcacccgctgtcgagtatccaac

SEQ ID NO: 55456 - DNA, 482 bp, Zea mays
  unsure (1)..(482): unsure at all n locations
caaaaactcagcttctaagggagaacacgtgataggtttaactaatgcgcaattcttataatatagaccttgtgcagcttgtcaagcaggtgaacaagtgggaggagcacatcacaccaaaaatgtgatgaccacatcaagacctttggagatgcttcacatggacctcttcggacccgtcgcctatctaagtataggaggaagtaagtatggtcttgttatagatgatgacttttcccgcttcacttgggtattctttttgcaggataaatctgaaacccaagggaccctcaagcgcttcctaaggagagctcaaaacgagtttgagctcaaggtgaaaaagataatgagcgacaatgggtccgagttcaagaaccttcaagtggaggagtaccttgaggaggaagggatcaagcacgagttctccgctccctacacaccaccgcanaatggtgtggtagagaggaagaacatgacactta

SEQ ID NO: 55457 - DNA, 372 bp, Zea mays
  unsure (1)..(372): unsure at all n locations
tgggagcacccgacttgtccgtgtacaccggacagtgtcccgtgcaccataagactccaactcaaacttcccaccttcgggaatttccggaggcgactcgggtattattcacccgactgtccggtgtacaccggacagtgtccggtgccgccaaggaggtcggcctcaggaaactcccagcttcgggaaacttcaacggctagtccgctataattcaccggactgtccggtgtgcaccggactgttcggtgcgactccagagcaactgctatcttcgcgcccaccgctctctgccgcgcatttaatgccggctttgcctgcgcagatggcaggcacgctcatgctggcacaccggacagcanacagtacctg

SEQ ID NO: 55458 - DNA, 404 bp, Zea mays
  unsure (1)..(404): unsure at all n locations
gcgcatgtcaagcagggaagcaaattggagctcatcatccacacaaaaacatcatgatgactcacaggtcgcttgagctaaccaatgttcattttgagaaagacaaggtttgtagcgcatgtcaagcaaggaagcaaattggagctcatcatccacacaaaaacatcatgatgactcacaggtcgcttgagctactccacatggacctattcggcccgatagcttacataagcatcagcgggagtaagtattgtcttgtaattggggatgattattctcgcttcacttgggtgttctttntgtaggaaaaatcacaaacccaagaaacgttaaaggggttcttgagacgggctcaaaacgagttctacttaaggataaaaaagattagaagcgacaaccggacg

SEQ ID NO: 55459 - DNA, 436 bp, Zea mays
  unsure (1)..(436): unsure at all n locations
agctntacagcctcaccaggggctatgattctttggtgggacgacgtcgactgactactcggcatgacacattctacctcgaccaggtcgaggccacggtcatcccgacgccaacatgaggcgtcagcgtctatgcgctcaccctcagtgaggggcgcacagaccaacgaccatcgggcagaactcgaccgtaggcgtgtgggagaggatgcccgggtctctttggagagggcgcgcgagcgccgccaaaacatcgaggaccgcaacctcgatcaagacttcgctgcggcagcaccgcagacaccaatgggcacccggtcccaagcgggtgtccccttggccggcgtgggctacaccgccctcacggatcatctccacgcggcgtcgtggccgcgcaagttctggccgcacctgccggaaaagtacgacggaacgt

SEQ ID NO: 55460 - DNA, 385 bp, Zea mays
  unsure (1)..(385): unsure at all n locations
gacacataaaactcagcttctaagggagagcacattntatgactaacctatgtttattttgataaagacaggatctgtagcgcatgtcaagcaggaaagcaagttggtgcccatcatccacacaagaacataatgacgtccgacaggccactggagctcctacatatggatctattcggcccgactgcttacataagcatcggcgggagtaagtactgtctacttattgtggatgattattctcgcttcacttgggtattctttttgcaggaaaaatctcaaacccaagaaaccttaaagggattcttgagacgggctcaaaatgagttcagcttaaggatcaagaaaattagaagcgacaacgggacggagttcaagaactctc

SEQ ID NO: 55461 - DNA, 440 bp, Zea mays
agcttaaacaaggggaagatactgttacactgtatctcaacaagttcaaccatttgtcccaatatgccattgatcaggtcaacactgatttgaagaagagaaattgttttatgagcggccttaatgaccggctacaacggaaaatggccacctgcctcgacctctcctacagcagggctgtcagcacggcgctagcagttgaagccaagtatgcaggcccaggaaagtcaaagggctatggaggtgacaggtccaaccaaggtcctgagaagcgacaaaggttggtgatctgaccttttaatcaaaatcgttcttcaccacgtccaccctcctacccctttaaacaacctgtctttatccgccctgccactgccctcacctcaacaaatcagccgagtgcccctgatactcgtttcccagcactcccgagttcatctact

SEQ ID NO: 55462 - DNA, 426 bp, Zea mays
  unsure (1)..(426): unsure at all n locations
taccgcatttgaagcatgagcgcttccccttggtcttggtcttgcttggctgccccttgcgaccatttagcgccgtcttgaatctcttgatgatgagagccatctcttcatcgttgagtctggccgcctcaatttgtgccaccttgctaggtagcgcctccttgcttcgtgttgccttgagagcgagaggttgcggctcgttgatcggaccattcaagggcgtcgccacatatctcgcctccttgatcatcattcgcccgctaacaaatttcccaagaacttcttcgggcgacatcttggtgtacctgngattttcacgtatattgttcaccaagtgaggatcaagaacggtaaatgaccttagcattaggcggacgacgtcgtggtccgtccatcgcgtgctcccgtagcttctttatcttgtga

SEQ ID NO: 55463 - DNA, 443 bp, Zea mays
agcttagatgaggcaagagcgccaagagatgcgtcttgaacgactagaaatgcgtcaagagatgaggcaagaatggctggaaaggtagcaacaaccaccgctacctccaccaccacctgttccaccccagaacaagcaccaagaattcatgagtcataagccacctacattttccagctctcttgatcctttacatgctgatgattgcctgaaatcagtggagaagatgcttaatattgctcagtgtacttatcgagagaaggtgctctatgcgtcgggacgtcttactggccccgctgctgattggtgggactcctacactgctacccatgatgctgccaatactattacctatgcagaatttgctacacaattcagaaactatcatattcctgctggcctaatgaaaataaagaagaaggaatttctatcactgaagcaag

SEQ ID NO: 55464 - DNA, 353 bp, Zea mays
  unsure (1)..(353): unsure at all n locations
aatccattggagacgccatcattagaagtgccctggcaggtctctatcaactttcctaacaaagccttgaagaatccgatagatatatcgctgaattctatgccccatcttaacagaacctgcatcgcgaccatacttgaagaacctttacacttacatgtcaatatcanggccaaactngggttaccgcgacagctcaaaatctatgttcaataccggactcaggctgccgaaaaagctcaagggtgcgcaatgcatccatcaactcactttcagtgatgatcaagacccccaaaatacatacttttataagctttgcaagggacaaaatctctgccctggccctggactaa

SEQ ID NO: 55465 - DNA, 440 bp, Zea mays
  unsure (1)..(440): unsure at all n locations
gctttgaatgtactaagcacatgccgggaataatggtaaccggtttatttttatctaagtgaagccgggcgtggactntatccctcatgcgacctgagactgggtctcccatgctagctacggtgggtacaagtgcggtcactgcacggcggcagccggggtcagtggaccattgtatgccaaggcggtgaagcctgtatgctaacagngaatctatggggacggttgtcatgtgcggggtcggagtaccctaacatgccgtgtgtttaggtttaccttgcaaggttaaaactcgattctaatcgtctgcttctcgcagctaatgagactgcttgaccccttatactgcatcgagtaagaagtgaaatgaggttacctgagataatttgttgattgaactanatgcttgttaccatgtatgcttaaaaggagaaaatcta

SEQ ID NO: 55466 - DNA, 455 bp, Zea mays
ctgcagctgcagcttaggagtggctgatggaaaaatcctaactctttttatacttcaaccaacatcttatgaaggggaaaacactccaaccttcataaagcatcggaaaacaaccacttcgtctttctcaggaagaggaacgatgttttctcctccagctcttactataaatacatcgtgaaagtacttaccctccatggccttaatatgacccttcttcacgaaagacttcccgaagttaacatagcttggcctccacgaccgatcttcggcatcatcagcaccgttgtcaacatcaaaactgaaagtcacctagaggggggctgaataggcaaatctgaaatttataaacttttaagcacaactacaagccggggttagcgttagaaatataattgagtccgaaaagagagggcaaaaacaaaatcaaccaaagaaatagagcggatgacacg

SEQ ID NO: 55467 - DNA, 452 bp, Zea mays
actttgggtcttcggaagttaaaggcaatgggaatcacattggttgttttttaactgattcccacgttatctctggtcatattgacaaaagttgtagggcaagagacccgaagcttgagaagtatctggatactgtccgaaggattgaagcttcctttgaagggttttctgtaaaaaatattcctcgaggagaaaatgagcatgctgatttgttagccaagtcagcagcacaagggctgcctttaccttcggaagtattttttgaaacaataaaagcaccttcggttgaacttcttgaaagagcggtcctcaacatatcttctgtttatagtgaagactggagaactgaaatcatctcttaccttaagggtaatttcctttcagatgacgaagcttataacatgagaatagaggcaagagctcgtccatatgtaataatagaacgggagctg

SEQ ID NO: 55468 - DNA, 440 bp, Zea mays
  unsure (1)..(440): unsure at all n locations
agcttcttcctcctctgcctcttagaagctggggtcntgtttaactctgnngcatccctgaagactaggagctttgctgatggccttgagcatggtttcccctgtcgtcatttgagttaagattatggattgttctgacatgcctagggtggagcctttcctccgaagcccctagtcatctcggagtatctgtaggcctcttcccttctctgccgaaagtcattattggccctgatgtacttgtcgatcttctgcagaagcttttcaaattttgtggtggattcctggcaaaatactgcgccgttggtcctggtcggagccctttgatcatagcctcgataacaatctcatttggcaccgttggtgcctgngccctgagtcgcagatacctttggacatatgcttgcaagtattcttcatggtcttgcgtgcactggaac

SEQ ID NO: 55469 - DNA, 443 bp, Zea mays
  unsure (1)..(443): unsure at all n locations
tactaagcttatgatctttattttcttttccagccctcgatataatcttattcttttatcttcgagggcttgtcgcattctcaatgctttacttagtagcatactctgtgcaaaataactntcatcaaaaatctttgcttcgtcacaaaagaataaaaagctgaaaaaaaaaactttaccttaaaattggaataaaatatgctggcgacgatatgttgtcgtccgtagctgctaatgtcagtttcaagctttggaaaaccaacacttttcggcagagcgctgataatcttcacaccggtgcggtctcgaatgcatcctaagggttcttcgttgattccaccaaagagcatggctcctggttggtagccacaggatatagcatactcctgcagctactccttctcggccttggataattcttgaccaactagattttgaaagct

SEQ ID NO: 55470 - DNA, 328 bp, Zea mays
acgagctgcggctttaagggacactgaagctttttttattttaaagatgaccgcgcgctgcagcagtaacagggaagctctctatccaaatggagaccacatcaaccttggagagcttatatgacttttgactgcgctattacatagagaatagatggcttgtatatgatatttcccctcactgggattctttgcggataattaacccaaggaccctagccttctaagaagctcaaagagttgactagggaaaaataagtgacacgtccagtcaaaccttcagggagaacctgaggaaggacaccgatttcgtcctccacaacaaagg

SEQ ID NO: 55471 - DNA, 422 bp, Zea mays
  unsure (1)..(422): unsure at all n locations
atgcagcttatacacttcgccacggtgatgttttttctgtatacgatggcctcttgaagagggctaaacgatgcacggagggaacacatgagaagaagagctaggtcttcatcatcaaactctacctccatagacgtgagatcggacacgatctccctaaacaccgatatgtgcgtcagaacggatcctccttcctgcaacttgtgggagaacaacttaattttgacatgcatcttgctggtcagatcctttgacatacagatcgactccagctacaaccaaatagcaccggcagttttctgcgccacaacctcctgcagaatattgatagacacggcccaagcctcccggcgatgggcctacgcttctgtcgacaacttggtcgccttgttgagaattggacacaaactcncgtatgttac

SEQ ID NO: 55472 - DNA, 183 bp, Zea mays
ctgcacgaaaaatgctaataggttccgtaatgttttttttttgatagggtaaaagagctaaaagtgacatagtgatgatcccacaacagcattttttaagacccacacaaaacatacgtccactcaaaccactccataaaccgcaacaagaatgttcgatatacataaagacgaagagtgaga

SEQ ID NO: 55473 - DNA, 438 bp, Zea mays
  unsure (1)..(438): unsure at all n locations
agcttatcccacanaccagcattagaaagcattttactaacatgctcagaatagtgtgattcatcctttcagtaacaccattctgctagggagtacctggaacagtcttgtgtctaacaataccttgatcaacacaaagagaatcaaacttaccattacaaaatttcaattcattgtcggttttcaatttcttaatttttctgccagtctgattttccactaaagctttccatcgccgaatgcagtaagagcattatttttatgcttcagaaaataaacccagactttgcgagagaaatcataaataaaaatggtcatataatcacaacctccagtagaagaatgaggagtctcggaatgaatataatcaagaatacttttagtgtagtgagtagataaagagaaactaactctctaatgtctgccacatacacaacg

SEQ ID NO: 55474 - DNA, 346 bp, Zea mays
  unsure (1)..(346): unsure at all n locations
acagggcctcatgagcgggtgaaggtacgttttatcggcaaggccgaccgagctgagggattcccacgcctctgggatacggatacctcactcgtcccttccgcgagaagcaaccctcgctcacacaaacattcctgttaccgacagagagtccagatgctcgaaacaagaggaaaaaagacgcagcttcgcaagcacggcgagaggtgtgtttttggcctctgcggccgcagaagcacacactacaagacgatctgatcctgcaggcttcggtcttcacgctgaagggagccggagcaccctcngcatcgacgacatcttcagcaaagtccgaccagcctcggac

SEQ ID NO: 55475 - DNA, 395 bp, Zea mays
  unsure (1)..(395): unsure at all n locations
caacagcagnaaaggctgtggtaacttcacaaccacccgtctgtttatatagtgctgcaagtgggaaggtgagtantcaagtcgctcgcacccactgaacagtcacccgcactcgctgaacggtggaccatagtgcccaagaagctgaatcaccagatcgcgcgtacccattgcatggtgggaccatccttcactcaaaatatttaaatcgtttcctggcaacgagctcagggaaggtgtttttcggaccttcggcattccgaagcctgagagagtttttcacgggtcgagctcgttacgaaaaacgatctggcaccgtgaaggggctactgttgagggtctgcttcttcaccgaaggtcccataagaaaatacaccttctgaagaatgacacac

SEQ ID NO: 55476 - DNA, 429 bp, Zea mays
  unsure (1)..(429): unsure at all n locations
actcagctgagtcatcctttacaaagatatggatgctctatttatttgttggatgaggaacatccatgataaatagagccggaaaagcaaaatgtttcagaaagatgatcaaggcattgtatggtcaacaaccgcattttgtgccaaagaatgaagagatcgccaacaaatttagatgaaccatcttatcgctatctattatcccggancactaagatgtatcatgatctaaagcacattattggggacaaagatgaaaattgaatcgcacgctatgtggaagatgtgacacatgcagacgtgtcaagcctacatatgaagactgtggccattaaatcttaccaataccaacatggaaatgggaaatataagcatggacttattgtggatacccagaccgcaaggcgatgatctattgggtatattgac

SEQ ID NO: 55477 - DNA, 380 bp, Zea mays
taaacccaagccgtttattttctttcataggaacacacccgcaaaacgagtacatgatatgaactcggaatcactgaccctcccagcggagtgcagaggaaggatttcatggtgcacggccacctcttccgtgcatccctcctttgagacgaaactaagcacactcaagcaaacggttagtctcaaagggtcaagctgaagcacagctccccccaaatatgcgcatcacatgcaaaaaggactcgtgaggaacatggagtgtttgtacaacttgagcaccacactaagcaacaaagtgcagagcgaacaagatcaaaggcataaacacacgtatgctacaatacaatccaagtggcgcgaatctaggacattcagctcac

SEQ ID NO: 55478 - DNA, 453 bp, Zea mays
  unsure (1)..(453): unsure at all n locations
tgccaatacctgtcaaaacaacagcacatgccagcacagtatctatatactataccaggaacttggcctattgcatgctggggattggatatgattggacctttcaagaaagctcaaggaggatacacccatgtattggtggcaaatgacaagttcactaagtggatagagtttcagcccattgcctccttaacctctgctaaagccgcggaattcatacaaaacataatattcagaattgggataccgaacagtatcatcactgacttgggatccaacttcaccagttcagaattctttgacttctgcgagcaaanaagcattcagatcaagtatgcatctgtagcccatccgagagccaacgggcatgttgagcgagccaacggaatgatattggaagcacttacataaaaggtctntgataaaaatgaagaatctcacgaacatggataa

SEQ ID NO: 55479 - DNA, 246 bp, Zea mays
  unsure (1)..(246): unsure at all n locations
acatggacatgngcgtgctgnggactggacactgatggaccctgtcagatagctgtaggaggatacagtctcatgcggggtgtcatcgataaattcactaaacggatagagggcacacctattgctttctttgacctgcggctaaggcttatanaacgtagtacagacataatattcaggtttggaataccaacatgcgttataactgagttgtgatctgatctcactacctgtgaattctttgac

SEQ ID NO: 55480 - DNA, 402 bp, Zea mays
agctataaagaatagggaaaaatcattctgtgtatcatgtatcaatagaataacattggaacaagaaagtaactctctgaatcttgaagaccatgaaaaaacttcttttcacgcctcttatattctctttggccaccgtatcttttttctgttcatattctggtcctggcatgagttatgtgtttttttgtatcaacaaattaatctatgaacatgctggctttatttacataaatcttgtgctgcatcaaagaattcggttcattcacggcaaaatatgattctatatgatctgggatgtacatgaaatctataacgtcctcaatacatgttttcataatctcacagtagtatacatttacaggaagaagggcgagcccatcaagctctgtttcaccggca

SEQ ID NO: 55481 - DNA, 258 bp, Zea mays
  unsure (1)..(258): unsure at all n locations
gcccacgctagncttagctattaagcatgcatctagaccggcctcttcttttgcgaaatcaactaaataaaggttgccgcctaattcacccttaaaagttagggaaccataactcttttatagacagaacatctacattggaaatagacagtttttcccatatgacataatgactaacagatggcaattatttccagactttccctaaaaacattaaaatgaaggcttttaaaatggaatttactaacctttacttgc

SEQ ID NO: 55482 - DNA, 453 bp, Zea mays
acctgccgcatgcaagctttatcaaatggacgcgattttatgtctttctctatggaccaatcaaggaagaggtctatgttgagcaacctcccggctttgaagacagtgagtatcctaaccatgtgtataggctctctaaggcgctttatgggctcaagcaagccccaagagcatggtatgaatgccttaaagatttccttattgcaaatggcttcaaagttggcaaggccgatcctacactctttactaaaactcttgaaaatgacttgtttgtatgccaaatttatgttgatgatattatatttgggtctactaacgagtctacatgtgaagagtttagtaggatcatgacacagaaattcgagatgtcgatgatgggggagtcgaagtattttctatgattccaagtcaagcaacttcaagagggcaccttcattagccaaacgaagtaca

SEQ ID NO: 55483 - DNA, 378 bp, Zea mays
  unsure (1)..(378): unsure at all n locations
tctcttatatagctaaaagatggatcngaatatggtcgaatgttgctgctccatggcagcagcagcccctgccagttgaccattctgacgcgccatctcctagcattatgctttcttgtagcttcatttggaaaaggcagattgctggaaattcaaatttagttcaaatgtgaactaaatcctatggaataacatttcatgtttagctgcaccacaccagggtgtcatcaatcattcagccccattctacagatgtaaatcgtgcaaatcctttttcttcgagacttttgagaatgagctgttttgttacaagcttctcttatatagctgacagatggatttgaatatggtcgtggattgtaaaaattctgtaacaac

SEQ ID NO: 55484 - DNA, 229 bp, Zea mays
ggctatttttttttttcaaaaaaatagaactctgcactgtcaacaggaaacaaggggaggctctatacaccaaaatggatgaccacataaaccctggactgctaatatgacctttcgacccgcgctatctagctagagaagtagatggttattattgtaaactcttcccataattgggtttttctgcagaaaaataaaccaggacctcaaccttcttagaagccaaaga

SEQ ID NO: 55485 - DNA, 429 bp, Zea mays
gagaacacggatggtttgacaacgtgcatttttttatatatttatcttgtgcagcttgtcaagcaggtaaacaagtgggaggagcacatcacagcaagaacgtgatgaccacttcaagacccctggagctgctgcatatggacctcttcggacctgtcgcctatctgagcataggagggagtaagtatggtttagttattgttgatgatttttcccgcttcacttgggtgttctttttgcaggataagtctgaaacccaagggaccctcaagcgcttcctcaggagagctcaaaatgagtttgagctcaaagtgaagaagataaggagcgacaatggaaccgagttcaagaaccttcaagtggaggagttccttgaagaggaagggatcaagcacgagttctccgctccctacacaccacagcaaaatg

SEQ ID NO: 55486 - DNA, 448 bp, Zea mays
actgaggcatgcaagcttatccatgtaaggtcattatatccacgtttttgtttattgtatgccacgcccatatattaataaatgttttatcttggactcaataggatataccaaggctgaaaaaattccacgcaaaatcattccctttgttctatgaactggaaaagctgcctgaatgtattgtaatattcgtatcacatacctttcattaattaaggaacttgttttatgaactgcaaaaactgcatgaaggttcgatatctcgctctctatttgctatgagaaacacgaagcattgctacaggtgatttaaacttcacatcaggtgaaccagcgccccaaccaactgaacatgttagcactatcgatattgatgctcatgaatctcaccttaaccctttccttgcgaatgtggatgatcacatgccatctaggggacccatataca

SEQ ID NO: 55487 - DNA, 224 bp, Zea mays
acaaagagcataacggcctctggaaacacaaaagagggcaaacactaagaagacaacttctaaaagaccatacacgaaaaagttccataaaaacacaaaaacaaaaccaactttactaaacaaaaaaagccaaaagaagtccaacctacgcgatcacacaacatgaatggattatcgacagaggaatcctcccgcaggatggacgcgcaatacggacccagaaa

SEQ ID NO: 55488 - DNA, 450 bp, Zea mays
agcttcccctatagccctcgaattccacgattttcgttctctacaacgccaagagagaggaagatttcgcctgaaccccgttaaaggggcaacacatgttctacaccgacaaacaggattgtcagccctaaaaaagcaagagtgactggatgagggaaaaagaataccatatcgtatcttcttcagtctcgtaggaggcagcacattcaatcttttcctgagaaggcatttctaggtaaacgtatcgaatgagccctccgctaccgaagggacgggcgaaccaggacccccactatgtatcatagaatgggaagggtcatgctccttgttgcacgagccgaaatgggatgatggtgaccacagactatagtcatcccctcaaatgaagagcgaagtcattattgggggccttcgtcttccgaaggtcctcaaaaacatgatttaacaatg

SEQ ID NO: 55489 - DNA, 415 bp, Zea mays
tagggtacggaaccatgctaagcagctacacagctccggactatctttttagacgagcgcccattctctagaactggcacccacgttgccggaccccctgcagcagtagaggggtcctgaactgcaagcctggctacttgttggggactcgttctcaaatgctatgagttaagaacaaggcaacacagacaatgctaaacgttaaagtcctttgtcctctcaagcattatatccctcttgagaaataatgtttttcggacgaatgttgagaaagacgtaccttcctcaaagcaacatatgaacgaagaatagaaaacatatgaggtgtaaaagataatatcaacagtcatttattaccatcaactcatctttattttatcacttaagaaaaatacgaatgttaacaatgtacaaa

SEQ ID NO: 55490 - DNA, 442 bp, Zea mays
gagctcgagacattattacttaatgggcttgtgttgtcctaattacacactaaagggcataatatagacgcaccaaagaaccatataaagccttcaatgcccatacaatctctgtaatggaccacattcgttcctttgaaacaattcaaagaacttaaccaattcagatcagattttaagataagagggacttaaaatctcatttccgatgatactcatcaagtatccatcttatgggaaaaataaccaatagaattgttcataacttttcatttcatcccaacaatgggatgaccaattcaatcttacctagcatggtaagtatcatcacttgaaaagttataacatatgcaacactttgtataggaggatgtatgtagaatacagtccataagaaatgtttctaagaaacatatgcaatatccatcactatcaccttgta

SEQ ID NO: 55491 - DNA, 351 bp, Zea mays
gaaaagactgctgtcaaggtaggatatttgtcaatatatgtgcttcgactttggcacactgctattgactgtgcgagcttcggattgttctctgaagtccctttgatgtggagcatattggcccccttctggctgttgaccttgttgcagcggtggtggaggcggaggctgttgccaggaagcttgaggttgacttgccgaagcaacagaaactgcagggtgattgcctacatattctgggatgtaaggcgaatggtacgaagcagtatgcatgacctgcttcgactgagcttgttgtgccacagcttcagctatttccttttgctttttggatggaacatgacacatcct

SEQ ID NO: 55492 - DNA, 138 bp, Zea mays
tttttttacggagactcgcttggtctgcaaaggccgagaaaaggcagcattgataagcctgatgcgggtttattccgtgtcttaaacgcctgcaccatgggccctagggctgcaactactcggcgtgctccagtgctg

SEQ ID NO: 55493 - DNA, 452 bp, Zea mays
  unsure (1)..(452): unsure at all n locations
gtacactccanaacataaaagaatacttcttctttatgtcgaagcaaccacttagtaacacagatgccatgaatgaatgcttatgaatgcaaatgctatgatgtaatgtgatgtgcgaatgaatgtccaaaacatataaccgaagccacactcaaccattatttccttggaatcaaccacacatcagctctgcattcccttaggaacgactttggagcttcctcgtcttttacttagacagtataaactctgcattcccttacgaacgtctttggagtttcttcgccttttacttaggcggtataaactctgcattcccttaggaacgtctttggagtttcttcgccttttacttaggcggtataagctctgcattcccttaggaacgtctttggagcttcttcgtctcttacttaaacggtaccagcgttgacttttcgctgagagctctg

SEQ ID NO: 55494 - DNA, 431 bp, Zea mays
  unsure (1)..(431): unsure at all n locations
agcttttgaactgtagtttggggcgaattatatggttatattcgtccctgcatttgctccattgatgttgagttgcgtaaacttaaggcaggactgcgtgccctatgtatgctgtttggctggtgggtgagctgaccagcatgtcggattcggttgttcttcctggccgacagcgttttacaccaagattggccaacgtcatcgatgttactaacatttttttttaatcttgcgaggacacatgggagttcgtagtcgacggacgtgaacgagggcattggttcggtgggtggaggctgaggatagtgggtaatgataggagagcgctggtgaagaagatctcatgccaatatggaatgttagagcatcttcaaaagacttctaaaaaatcacctccaaaacatggtttttcagagtagcctaanaattat

SEQ ID NO: 55495 - DNA, 454 bp, Zea mays
  unsure (1)..(454): unsure at all n locations
nggtcattntattgccaactgtcccgacaatgatagtgatcttgtatctaggaacaagagggagaagaagaagaactattagaaggcaaagggcgaggcacatctatgcaaggagtgggattcggattgctcctcttccgactccgacaatgaaggactcgccgccaccgccttcaacaagtcatccctcttccccaacgagcgtcacacatgccttatggcaagggagaagaaagtaagtactcgagactccacttatgcttcttctagcgatgatgagtctagtgatgatgatgacatagactattcatgcttattcaagggcttagatagatctaagatagataagataaatgaattgattgatgccttgaatgataagaataggctattagaanagcaagaggaccttntatatgaagaacatgataagttngtagaagcacaaaaatca

SEQ ID NO: 55496 - DNA, 444 bp, Zea mays
  unsure (1)..(444): unsure at all n locations
agctttttgcgttatgcttcagaccttgtgtttttttctgtccacacgaagatgttcagctttataattgcctcgggggtaagttgatggagatagatttcgaatattttcagcacctccacaacgaagctgctcaaaggaaatcgcagtccaactttcaaaaagcttcggtacactacgacttcattctcttcagggtgggggcaagttttctccccttcgtcggccctcacaatggacagatcccgaaaataccttcctctcatgttgataagatgattctctttgatagttgatttaccataaactgaatggcttggtcgccatggacgatcttcggagtcttcaccaccactgtccacatcatagctgtcactatcaccagtatcctcagacaaaccttccagaatctccttggtgattctntctgtgttggtctttgac

SEQ ID NO: 55497 - DNA, 465 bp, Zea mays
  unsure (1)..(465): unsure at all n locations
tgtcgtctaatacacccttaaaggctagtgaaccatcacttcttctaaagacagacacatctaaatttgtaaaaagacaattatatcccatattgcatagttgactaacagatagcaaattgtaaccaagagactcaactaaaaacacattggagatagagtgctcattagaaattgcaattttacctaacccttttaccttgccttgattcccatcaccgaatataattgaatcttgggaatccttattcttgacgtaggaggtaaacatcttcttctcccccgtcatatggtttgtgcatccgctgtcgataatccagcttgaacccccggatgcataatcctgcaaggcaaatttaggcttgggtcttatgtacccaactcatgttgggtcctacaagggtagtgcaaatattcttatggacccaaatggcagttttgctcccttgcattntgcccctaact

SEQ ID NO: 55498 - DNA, 443 bp, Zea mays
atcttaagtgactgggatcacttgtgggctcggcgctgtttcttttttttccaagtctaccacttgcaagcctcagggctgaacccttcaggcgtggtagcgtgttaaagactgctgataccgtgccaagtgtattaaggccacgtcttgagcctcttccaactggtccaaggaatcttctctgctggtctggttgcattaggcgtcgcactccttctttctctgagaaccgtattccaagttcgtgggtaagataacctctgccccatcgactaggaaaaacagcatgaagcccatggtccggctcagcgtcgtgctcagactccagaccaccgagggtagctgcttgatccatcgcttgccaagcttgttgaggtcattgaagatcctcggatctagtccctgctaattcataccgttggcgcgctccacctgcccatttg

SEQ ID NO: 55499 - DNA, 448 bp, Zea mays
  unsure (1)..(448): unsure at all n locations
aaaactaagcttcgcatgttcgcagaatagggaaccgacttgaagatattatgttatttatacctcgataaattactatagaattaccaccaaatgtaaagggcatgtatgtaattttgtatgggttgtaccccgtgcctataaataggtgaacagtacccccgtactgtgcacgctgatttggtgttcacttttgcgtcacgcttgtactttcatttncttcaaattggaggtacatctgtaattcaacgatattcttatttatatataataatgatatatgatgatctacgcaattctttatgtttcttgtaattcattcttcgtcaatatgtaatgcatttataaaggttcgccttttgtgaccttcgtccgaaaatcattatgtcccaagggaaataatgcttcgtaggacgaaagacttaaccgattaacattntctgtgttg

SEQ ID NO: 55500 - DNA, 382 bp, Zea mays
  unsure (1)..(382): unsure at all n locations
atagaaaccagatctaaaaaccttccccaccagagttctggatgatgcatgtactccgcactgcccggcatggatttcgtctaataattgtttcccaatagtcgagtgaatgcacttcatgaggactcacgtcgcacctcttctatacagtgtgccccctatgagggtgtagtgggctgactgccttgcgatgcattccactatcgccttatcattcggntcttcttcatttttatgtatatgatgataggctctctccagtcattcgggtccaactctggttggctcaaggtgttgcattcttctgtctgatctgagagaatcctcgggtgtgatatttcttgaacgaagatcccgcgtgggacctgggctcgactggatc

SEQ ID NO: 55501 - DNA, 458 bp, Zea mays
  unsure (1)..(458): unsure at all n locations
tgtggaggttcttcatccccacatgtgctaagcggcgtttcctcagtttgtccatgcaagtcttagccattaagcatgcatctagaccggcttcttcttttgcaaaatcaactaggtaaagcttgccgtctaatacacccttaaaagctagtgaaccatcacatcttctaaagacagacacatctatatttgtaaataggcagttatatcccatatgacataattgactaacagatagcaagttatatccaagactctccactagaaacacattatagatagaatgctcattggagattgcaattttacctaacccttttaccttgccttgattcccatcaccgaatataattgaatcttgggaatccttattcttgacgtaggaggtgaacatcttcttctcccccgtcatatggnttgtgcatncgctatcaatgatccagcttgagcccccgaat

SEQ ID NO: 55502 - DNA, 336 bp, Zea mays
acatatcagaagcgatagcaaccctacagatgtttgctgccatgaaatcaatggctctcttcttttctatctcatattgcgtcataacggcattcctaaggaaatataagttatccaaaacacactaagtagtttagtacagttagccaaaacacactaagtaccctacctaatagtgttccttgccaccattttaaacaaaggttgaactgcgctaacaaatcttctaaatcctgtattgatcaaccatgcgtaatgggtatatatgccataccattatagatgcaagctccttttagcaatttcttgatcaaaagtatagctctccactgacac

SEQ ID NO: 55503 - DNA, 279 bp, Zea mays
  unsure (1)..(279): unsure at all n locations
tctcgaaacaagtgggcttcctaacctaccatcttaaggcacacttacacctttcacgcatcttagcaaaccctttctgagcccttagccatccaanagaaaacctcttcacaaacaaaatcccccaaagagagtgagtaccttgtgaaattggagaaggaggcatctacttttttgctttaaagaaagaatgacggggtttctaatcgagcagaagacatgaccgcctctatgggtcatgctactcgtcaagaacctagacgctaagtgtttgctttg

SEQ ID NO: 55504 - DNA, 435 bp, Zea mays
  unsure (1)..(435): unsure at all n locations
agcttgtaattagtttgacaatcttgtatatattcaaaatgaatctgcggtaatatccaactagtccaaggaaacttcaaacttgatgtactatagtaggcggtttccattctaaaatatccttgacattgctgagatcgaccgcaatccctttagcagacaatacatgtccaagaaactggatttcctctaaccaaaacgcgcatttgttgaatttagcatacaacttgtcggtgtttcggaacccggggggtccctggaccgacgagtgaattgtcgccgcgtgccccagcctagatgggtcgacgcaaggcggaacgcgaagaggggaaggaagcagccggagggagacaggcgcgagagagtggaacccgcggccttcgtgttagccccgcgcccaggttgggtgcgcttgcagtanggggttacaagcgt

SEQ ID NO: 55505 - DNA, 365 bp, Zea mays
  unsure (1)..(365): unsure at all n locations
tggtgcatttattgctaactgtcccgacaatgatagtgatctggaccaagggaacaagagggagaagaagaagaattataagaaggcacagggcgaggctcatcttggcaaggagtgggattcggactgctcttcgtctgactccgacaatgaaggactcgccgccactgccttcaacaagtcatccctcttcccaaacgagcgtcacacatgccttatggcaagggagaagaaggtatgtactcaagacagtactacttattcttctagtgatgatgattctagtgacgacgatgaaatagactattctagnttatttaaaggtctagatagaatttaaattggcacaataatgagttaattga

SEQ ID NO: 55506 - DNA, 376 bp, Zea mays
  unsure (1)..(376): unsure at all n locations
cgactggctgatatatccacctgagagccccaggacagcaccagaaagagaaccagcggcacgcactacaaggtcaagaacagngagcggaacgacaccaacagcaattacaacagcagcaccaattgcaacaagggccgagatgccgagtatgcgccccttatgacggcgaccaccatcaggcacaacctcggntggngacataggatccgaagaagtgccagggtccaacacgacaggttttggtatcacaccacgacaagacgaactgagccccgcgccacaaaggccaggactatccgacacacaagatagggggagggcgtcaaagaagccaccgggagggagacccccacagagccggntatgcgaaaca

SEQ ID NO: 55507 - DNA, 474 bp, Zea mays
  unsure (1)..(474): unsure at all n locations
aactcagcttggtggatatctggcatgcagtctggggcggtggatcttttatttatgaccttgaaactntcttcacactttgaggtccacacaaatttgttgtctttcttgaagagttcggtcaagggttttgcaatgctagagaatcccttgataaaatgatggtaatatcccaccattcccaaaaaaactttgaatttcactaacgttggttggttgcttccatttggatactgcttctaccttggatggatccacttctatcccttctgcaatcaaaatgtgcccaaggaaggctatcttttctaaccaaaattcgcatttgctgagcttagcgtagagctgatgtgctctaagtctcccgaggacaatccagaggtgatgatcatgatcctcacaactctnggagtagatgaggatgtcgtcaataaagactacaacaaacttatctaactcttccataaacaccttgtt

SEQ ID NO: 55508 - DNA, 442 bp, Zea mays
  unsure (1)..(442): unsure at all n locations
ctgagctgcactggggatgaggtctatgtatgatatttatttgtttgaactctctgcaatntgactgtattatcatactacgaatggttagtgataaaatgttgcctgctgttgtggactacatgattggttagtgatcaaaanaagggagttgcatatcaatgtattttatcatattaaccactattcatataatggtgttctctgcctctcgcatgcgtgagttgttggctcgcatgcgtgggttgttggctgaccgagctaacatcgtagcacacgttcgttgccccccgaccctcgcgtcgcactaccttgcacgccaccggcgctgttgtcgttcacagatacgtgctcttctttcctgtccagtcgataaacactgccctatgctcccttctttcaacagttcccgttgcaacgcacgggcactcaactagtatta

SEQ ID NO: 55509 - DNA, 464 bp, Zea mays
  unsure (1)..(464): unsure at all n locations
tcggatctcttgctgtataactctngtcaagatggccagaaatattctgtgaatcagtntanagaaccgcccttctaattcccattgcctttaatttccaaagacccaagagcaaagcttcgtactcagcaatgttatttgtgcaactgaaatcaagtcttgttgcataacaagttctaactttagaaggtgcgaccaacacagcagctgctcctgctccgaaggtcccccaagaaccatcgcaaaatactgtccaaactttggcatctttactcgtttcttcttcctgagcccctagcgtctagtcagcaatgaagtctgccaacgcttgggactgaatcgaagatctatgcacataatcaatgcaaaactcattgagttccgcagcccattttccaacccttccagtagcttctctatntctcataatatccttcaatggttgtgaagaacggacaattata

SEQ ID NO: 55510 - DNA, 445 bp, Zea mays
agcttatgaagattcttcatcccaacatgggctattttgttgtgccagagccaacccatgttagtcttagcaattaagcaagtgtcgagttcagctctatcaaaatgtaccaagtatagctgaccctccaacactcccttaaatgctattgaatcatcacttcttctaaagacagtgacacctacatcagtgaatagacagttgtagcccatttgacataattgagaaacggaaagtaaattgtaatctaatgaatctacaagaaaaacattggaaatagaatggtcaggagatatagcaattttacccaatcctttgaccaaaccttgatttccgtccccgaatgtgatagctcgttggggatcttggtttttctcataggaagggaacattttcttctcccctgtcatatggtttgtgcacccgctgtcgatgatccaacttg

SEQ ID NO: 55511 - DNA, 464 bp, Zea mays
  unsure (1)..(464): unsure at all n locations
gacctataaaactaagcttcatggtactactcgaatccgataatcagaatacatattttggaaaaatgcctcataccatgtgtgtaccttaaccttgcctgaatcattgatccactgaatgtggtatggatgtggccgtggacgtgtggtcaggccaagcttcttgaccaaatctgaactcaccaaattattgcagcttccaccatcaataataacacgtgcacgctgattctcgatggcgaagaaagtctggaacaaattatggtgttgctgcttctctgatgattcacgatgagaactaagaacacactgcaccatgatgctntgaaggttcaccgtagcattagcaccaagcatggcatcatcattagcagcaacatcactggagtcatcatcgtcaccctcaatgtcgaaagcattaatgtagccatcatccgtagcaatgtatgttcgctgactcggac

SEQ ID NO: 55512 - DNA, 389 bp, Zea mays
aatagaggccaggtctatgtaacctacctgcgacaaattagtttggctattggctcatatactgacgtcgttgactgtgatgtaaagcctatggacgcttgtaatattcagctacgtagacgatagcaatttgactcatattgtatgcatcatggtccatcaaatcaatattctctcatacaccattgaaagaaaattaatttgcgtcccatgtccccggaggctattgtgcgtgatgatgttgctaaagctaccatcgctaaaactgagaacaacaagaatattaaacgcgttggtaataacttagatgggataaaattgaaaggacattgcttgcttgcaacacaaactgatgctaatgaattatttgctctcattagtgttgccta

SEQ ID NO: 55513 - DNA, 197 bp, Zea mays
cgcaaccaaccgccttgagaaaccacaaagggggaccaacgcaaaagaaaacgaaagccgccacaaaagacgaggcatagacagcgaaacaaagatgaaccgtaagaaccacgaacaaacaagctcaaagcgaacagcaaggtgacaaagaaacaccggcgagacaaaggaaataaaggggaaacgaggaaaagcag

SEQ ID NO: 55514 - DNA, 435 bp, Zea mays
agcttctaaagggagaacacgtgacatggttgtctatcgtgcatttccaaaaagatagaccttgtgcagctcgtcaagcaggtaaacaagtgggaggagcacatcacagcaagaacgtgatgaccacttcaagacccctggagctgctgcatatggacctcttcggatctgtcgcctatctgagaataggaggaagtaagtatgggttagttattgttgatgacttttcccgcttcacttgggtgttctttttgcaggaaaagtccgaaacccaagggactctcaaacgcttcctcaggagagctcaaaatgagtttgagctcaaagtgaaaaagataaggagcgacaacgggtccgagttcaagaaccttcaagtggaggagttccttgaagaagaaaggatcaagcacgagttcttcgctccctacacaccac

SEQ ID NO: 55515 - DNA, 442 bp, Zea mays
atgtcactatagcactgaccggcatatcatgtattgctcacaataatcagctgaatgactcggccatgttactacactggaactcatatctccatccacctaagtcgtgagctctcgtccacttctccaaatccggcatcaatccattcaaccaatctctaccctcggcatttgttgcgactttgagcttttctaacttttctctaaagaacttgtcttccacctgccgacatgtctcctggaaaagctcaaagttatccttgacaccatccttacgcaaaagattctcagcaaggtgtcgagtacaccacctgtgatgcaaaggagggtacccatcgatctgctcacggaccgtgttgagtattccctggagccgatctgatattacacgcacattcctgttctgggccaaccacatgtatccggaccagtcgcacgaacc

SEQ ID NO: 55516 - DNA, 424 bp, Zea mays
  unsure (1)..(424): unsure at all n locations
ggatcttaagtcacctgcggcatgaagctntccagctctcgaccggcagtattttatgtgaaaccaagatcgtcctcgccggacttcagccgcccgcctgcgtgcgtagaccgagcaatccggtgagtcgttcttcaattcctcgcacacacaccttccttgatcccaggtaaagctctctgacccgtttgattggtcaattgtgccctggataggccggactcctcgccgccgacgagctcccccgcctgcgcacgtggaccggctgactccgatcatccccgacggtgacccgcacatcgccgtgaccctcaggacctcccctacaccctcaaccacctcatcggagcagtcttgccgccggtaagcccctccaccctttcctccaccgcgggtactgttaatatggggtaaggaccttggg

SEQ ID NO: 55517 - DNA, 426 bp, Zea mays
tctccatagattgtggtggcttcctagcacaatattgtattgtctgtcctggccgaagccccttgatcatggcttcaatgacaatctcattatgcaccgttggtgcctgtgctctgagtcgcaagaatcttcacacgtatgctcgcaagtactcttcatggtcttgcatacattggaacagtgcttgggcagtcactggcttcatctaaaaaccctggaagcttcttaccagcatgtgcttcagctattgccatgacgtgatcgttcccgggcgaagggaagaataccacgtctcatctacactcctgatcgccatgacgaaagaattttccatgacagccgtgttgcccccatatgaagatatggttgctccgtagctcattagaaactgcttcgaatccgagtgcccatcatacatgggaagct

SEQ ID NO: 55518 - DNA, 429 bp, Zea mays
agcttgcactaaactcatctattatgtatctctgtttacataaagctgggatcgcaaagcgtcatattatattggagactctgccaatgtcgaaatttatgattgggcaaagtagcaattttctgtccatgcctctgttttcttttggcattttacccttggatcatgattgcttgatttacatttcatgttatttgttgtcatcaatctaaagtgaacttagtgttttgacttacatgtagatgaattgttatgagcgctgcactgtaggccatagggtacaatatcatcgactgccaagcagttgagtgtaagcatgccaacttacatcactttaatcaacatagtatgatagtaaattcttccattaaaagataaaaacagtagaacaatgtatattatggtcgatataattctagcctgatgatt

SEQ ID NO: 55519 - DNA, 382 bp, Zea mays
  unsure (1)..(382): unsure at all n locations
gaagaggcaccagcgcgtatcggaataattaagcgtcccgaatatgtgaagagaggtaaacgtcgaccaactttgacgtggacagatgctgtgaaaagagactctgtagagaggaatattgacaaagagctcgccgcaaataggacagggtggaagtgtgcaattcacgtgccagaaccctgattgatagattcgcttttccttcttaatcgtttgaccttttcttgtgcccattttagatcttgctggttcttgtgggtattatctcttttatgtggttacccgtttcgttgttttcggttctcctttgcctttgtatcccttctctggtcttagagtgttgagctctgagggtttcataccgnggtttatctctagccta

SEQ ID NO: 55520 - DNA, 353 bp, Zea mays
  unsure (1)..(353): unsure at all n locations
acaagcgggaggaacacatcacagccaagaatgtgatgaccacctcaagaccactggagctgctgcatatggacctctatcgacccgtcgtctatctgagcataggaggaagtaagtatgggctagttatggttgatgacttttcccgcttcacttgggtgttctttttgcaggataagtctgaaactcaagggaccctcaagcgattcctcaagagagctcagaatgagtttgagctcaaagtaaaaaagataacgagcgacaacgggtccgagttcaacaaccttcaagtggaggagttccttgaagaggaagggatcaagcacgagttctccgctcnctacacaccacaa

SEQ ID NO: 55521 - DNA, 431 bp, Zea mays
  unsure (1)..(431): unsure at all n locations
tgtgaagattcttcatcctcacatgggctagtcggcgatgccttagccaacccatattagtcttagcaattaagcaagtatcaagttcagctctattaaaatcaactaagtataactgaccctctaatactcccttaaatgctactgaatcatcacttcttctaaagacagtaacacctatatccgtaaaaagacagttgtaacccattttgcataattgagatacagaaagcaaattgtaatctatagaatctacaagacaaacattggacatagaatggtcaggtgatatagcaattntaccaaatcctttgaccaaaccttgatttccatccncgaatgtgatagctctttggggatcnttcgttttctcgtaggagaacattcttttctcccctgtcatgtggntcgtggcatcgctatcaatgatc

SEQ ID NO: 55522 - DNA, 349 bp, Zea mays
actttctgtaacggaaggttcattttttgttatcctaggcctctctttttaatggcagggactttccagatccttacaatgatatctatctgagaactcaagaggcactatggtcttcaccacaattggctcctggattaaaacatgcttgctaagttactgaaaaagaagcataccccttatcacaaatgattgtgggtgccaatcccagtattcaagttggatactttctatcttctgcattgacattgctcgttattgaagtgatcttaatcatagttgtgatgtgcattgcctacccatgggagagaagaccagacaatatggacaaacgttacgtgatcatttc

SEQ ID NO: 55523 - DNA, 352 bp, Zea mays
  unsure (1)..(352): unsure at all n locations
tgccaatacctgtcgaagcaacagcacatgctatctcagctattacaaaccataccagtaactnggcctttcgcatgctggggattggatatgattggacctttcaagaaggctcaaggaggatacacccatgtattggtggcaattgacaaattcactaagtggatagagttccagcccattgcctctttgacctctgctaaagccgtggaattcatacaaagcataatattcagaattgggataccaaacagtatcatcactgacttgngatccaactntaccagttcagaattctttgacttctgcgagcaaaaaagcattcacatcaagtatgcatcttgagcccatc

SEQ ID NO: 55524 - DNA, 428 bp, Zea mays
  unsure (1)..(428): unsure at all n locations
cttcgttaattccgccgaagagcaacgctcctggctggtttcctttgatatagcatactcctgcagctcctctctttgagtcttagataattcttgaccaactatattttgaaaattgaagcctttttcctccaaagtatcttcggcgactgccttccctttttcaggaattgtggccacaacttccttggcagctgtagcggcttcttccgcggtcatatacaaaagtattctatcaatatcagataatgtgctttccagattcgaggcttcagccattgtagcttcngcagntgtagctatggtgggagcaacttcggtagctgcagcaacttcggcagctggtgttatttttgacgctgagaccggcggcgatgnttcttcaattgcttgcataacaataataatcctttgcttttttcgccaac

SEQ ID NO: 55525 - DNA, 457 bp, Zea mays
  unsure (1)..(457): unsure at all n locations
aactaagctagcaatcgtaggcacaaactaaaattgaagagcggtatttttgtgcgaaagcgtgtcaaatgagcttgggtatggccgtattatacgccaagtgcgttgaaaattcaaagaccccgcttgtcagggaatagtgctattctagcaaagggaaggtgttttttcggaccttcggcgtaaagccttcgtccatgtcgcaatctaaattcgttattntaaacaaattaatattgcgaggggctactgttggggaccttcggcatccgaaggtcctcaaaaacaggatttaacagtatttctggaagtataatatgtgagcaggtaccttcggactcaagtccgtatcacggcacgagaagaccagataatactaaggtcttgatacagcgccgaagatgatagcatgaaagcttctgcgtggttgcaaaaaatgaaaccgacttaaagatga

SEQ ID NO: 55526 - DNA, 316 bp, Zea mays
cagctctaccacaaggagcacaagacatgacgattattttctctgatcattggagcagggctcgttttcaagataagagcttactgtgattcagtggataacaacatgtgagagagaattaacaactgcattatggatgctatgtactatgcaatcatttccatgtgtgaagccattagaaagatggttattgtgaggatacaaaacaatagggcccacgctgataagtggacaggaacaacctagcctattatcttcagaaaattaaaaatcaacattctgaggtctggaacttgtgatgggctcgggaatggtg

SEQ ID NO: 55527 - DNA, 359 bp, Zea mays
gctgaatagactgaaaaagttgaagtcctgactttagacaaccaaaaattgaagaattacttgactgatgcaactactaaaggaaaagttgctattgagaacaatgatttccacaatgagctggcagtgggaaatcaaaggcttaagaatgagggccagaaactaaaaagggaaaatgaacatcttgcaacaagcgtgcaaaagttcgacaagggtcaatacctccaaaatgagctgcttatgaacactgttatgaaaaataacaagagtggtattggatacaatgcttctgtgccaaagaaagctatcactcaatacaagccaaagcagactcaccagcctaacaaatgctttgagtg

SEQ ID NO: 55528 - DNA, 431 bp, Zea mays
  unsure (1)..(431): unsure at all n locations
agctgagtttgagagccctatattgatatgttcttgactctctcaataaggactctgccacccagatttgtctaagtctactcttatttggtggacctaggaatgtaaccttaatctttccatttgcaacctttcttagaacatagtgagcattgaaagcaaatgatcttgagtgcttatgcaagggagctggtggtttaactttgcagttgtgggcaaaatgaccttcatttccacactcaaagcatttgataggcttgtgagtctgctttggcttgtattgagagatagctttcttttgcacaaaagcattgtatccaataccactcttgttacttttcataacagtgttcataagcagctcattntggaggtattgacccttggtgaacttttgcacacttgntgcaagatgttcattttcacttttt

SEQ ID NO: 55529 - DNA, 454 bp, Zea mays
  unsure (1)..(454): unsure at all n locations
taacatgcctggttcaagtgcattcttttcatttgcaagattttctattaggttntcatgttaattacttctttatctttattctctatagttatcttgactaaagagacttccttagtcaagacatctagcatttcatctttattgtgaatcaactcttgaagctctaggtttctttccttttcaaggataagcaagtcttcttgagcatcaagagttgcttttcttttatctagcttctccatntaattggtgataacattgtatccattcaagccaaattctttaatcattttatttttcatggcaatttgatcatcatcatcatcatttgaaaaatcattactaaataagggtaccttatctccctttgccatgaggcaagttggagtgtaggagtcgtcttgtacgttggtgaaaagttgcgcgcttgatgtanaatggatggccacat

SEQ ID NO: 55530 - DNA, 408 bp, Zea mays
agcttgccagtacttgtcaaagcaacatcatctttttttcacagcaactgcagacaataccagagacttgacccttcgcatgctggggactggatatgattggacctttcaagaaagctcaaggaggatacactcatgtactggtagcaatcgacaaattcactaaatggatagagttcaaacccattgcttctttaacctcaactaaggccgtggaattcatacaaaacataatattcagattcgggataccaaacagcatcatatctgacctatgatccaacttcacaagttcagaattcttcgatttctgcgagcaaaaaagcattcagatcaagtatgcttctgtagcacacccaagagccaacgggcaggttgaacgagctaacgggatgatattggaggcac

SEQ ID NO: 55531 - DNA, 344 bp, Zea mays
attgccgagacgcgcatactggcttatcggtggaccaataagcgccattaattttatattcggttttaataacaagctctggagggtgttttttggaccttcggcatccagaagccttcgtattttttgcggatcgagctcgttatgaaaaaatgacctagcatcgccgaaggtcctcaagacgaagatacattttgtaagcgatgttgagggtcttcttctccaccgaaggtcctcgagatgaagacattgtctgatagcgacaacgatgaatgtcgaagctatagccgaagaacgacaacttccgcttaaggtggcgacgaatgtcaaacatgatgtcgagt

SEQ ID NO: 55532 - DNA, 437 bp, Zea mays
  unsure (1)..(437): unsure at all n locations
agcttctaaagggagaacacattntaggattattttatgttattntgagaaagacagaatntgtagcgcatgccaagcagggaagcaagttggtgctcatcatccacacaaaaacatcatgacgactgataggccgctggagctcctacacatggacctattcggcccgattgcttacataagcatcggcgggagtaagtactgtcaagttattgtggatgattattctcgcttcacttgggtattctttttgcaggaaaaatctcatacccaagaaaccttgaagggattcttgagacgggctcaaaatgagttcggcttaaggatcaagaaaataagaagcgacaacgggacagagttcaagaactcacaaattgaaggcttccttgaggaggagggaatcaagcatgagttctcttctccctacaccccacaac

SEQ ID NO: 55533 - DNA, 463 bp, Zea mays
  unsure (1)..(463): unsure at all n locations
ggagtgaaggtcttaatacgctccataagaccatctaatctcttttatgtttggcgctttctaatgactcgaagcaatacaaataattctaacatggcacattcaaaatnttaacatggcacattcaaaattttaacatgtatgcaaataatttctgctgaaatagcaaatgtgtcgtggatgaaattgcgctctacatggcacattcaaaattttaacatgtatacaaataatttctctatgctgtgttctttgttatttgatatgattactttttaaaaaaacttcaatcaccggtcttattcaaaaaatgtaggtttcatctagttttttggtgtatatcctattgctagagcaagtttagtatttattatacttttatatgtttacattaattatttgaataaactgaactattaaagtttctttaaaaaagtcaacttcatcatataaataataataa

SEQ ID NO: 55534 - DNA, 413 bp, Zea mays
gagaacacagcgcatgattatctgttgttctatttgagaaagacaggatgcgtggcgcatgccaagctaggaagcaagctggcactcatgaaccggatcttaacacattgactaccgacagagccctgaagctcctacacatggatctattacgcccgattgctcacataagcaccggcggggagaagtactgtctatctagtgaggaggaccattctctctgcactcgtgaatgctttgtacaggaaaaatctgaccttaaagggagtattgagacaggctcataatgagctcggtttcatgatcaacaaaataagacacgacagctggacggagtgcattaactctcaaatagaaggctatcttgaggaagagggcgtcacgcatgaattctcttctacctacacgccaca

SEQ ID NO: 55535 - DNA, 427 bp, Zea mays
  unsure (1)..(427): unsure at all n locations
agcttgtaacatcacaaagnatttctatatattctgctagctgtnngctgttgaagaaaataaaacagtgtaaaatatgttatttaatcgtctggcctcacaatgtacgctgtcgctcattctgaattagaccataaccttgccaatgcaatttcacatataaaattagaatctcctgctgtgcctcctcttttaccactttgaaactctgtttgcttgattttgtgttaacggtgtgtttcttttccagcttgctgagattgacaatcatggaaaactggcatctaatgagatcaacatacatctcctgccaattctttaattgagttagttgaatgcttcctttccaacctgctgagattgtcaatcaaggaaaactggtgtctgatgagatcatcatacatctgttgtcaagacgcctggaaga

SEQ ID NO: 55536 - DNA, 399 bp, Zea mays
  unsure (1)..(399): unsure at all n locations
ttatcaaatggacgtgaaaagagccctcctcttgtgtttcttctagaagaggtctatgttgagcaacctcccggctttgaagaccgtgagtatcctaaccatgtctataagctctctaaggcgctttatgggctcaagcaagccccaagagcatggtatgaatgccttagagattttcttattgcaaatggattcaaagtcggaaaggccgatcctacgctctttactaaaacacttgagaatgatatgtttgtatgccaaatttatgttgatgatattatatttgggtctactaacgaatctacttgtgaagagtntagtaggatcatgacacagaagttcgagatgtctatgatgggggagtngaagtatctcttaggattccaagtcaaacaactc

SEQ ID NO: 55537 - DNA, 445 bp, Zea mays
catgcaagcttgattgacacgtcagcattatttttctatttgtacaacacataataatgagcaattcaccatttatataatttttaagttataacaaccatttcaagttagctctgcatttactccaaaatctttcttgagtggggtgttagaccaaacttctctacatcaaggaagggcacacatttaaaactacatgcatttatgcaatagaaggcatgagatctcaaaaaccaatccaaaacaaatattaaccaggcccggagtaacataagaaatgtctggagataaaacaaagaacaaatgagaaaagagtacataaagcatcttgtagtaaatagtaaaggcgagatcaactacatggttgcttcagaaacttgttacctagcctcacacctgttgcggtcctaattagcattcaaaaaagtaatggtatattaattat

SEQ ID NO: 55538 - DNA, 448 bp, Zea mays
tctaagggagaacacactttgggactaacatatgttcattttgagaaagacagaatttatagcgcatgtcaagcagggaagcaagttggtgctcaccaaccacacaagaacatcatgacaactgataggccacttgagctactccacatggatctattcggcccgatagcttacataagcatcggcgggagtaagtactgtctagttattgtggatgattattctcgcttcacttgggtgttctttttgtaggaaaaatctcaaacccaagaaacattaaagggattcttgagacgggctcaaaatgagttcagcttaaggataaaaaatattagaagcgacaatggaacggagttcgagaattcacaaattgaaggcttccttgaggaggagggcatcaagcatgagttctcttctcctacacgccacaacaaaatggtgtagtgga

SEQ ID NO: 55539 - DNA, 422 bp, Zea mays
  unsure (1)..(422): unsure at all n locations
agcttggactcctgcagctaataaattgattatgccgctgcctaaaaatgcaaagcaagtaagttgtttctactaatgcaagtacaagtgattatggagttgtacttgatacatttcctcccattttacttctgacgttgtattcatttcatttcttaacagataatagccgctaatgaacttgagaggacagttcatatttctcaagcaacagcgacactttcatctgatgtcatgatgcatgtgttgaggttgttacgtangagagattctgaaatgaatatcgagaatgagccggctagtgcagatttggccagtgatgacgatgaggctttctactttggatttgaggacgatgcggaaaggaacgaaagggaaaactctgatcccagagaatgcaacatgacatagctaanacaact

SEQ ID NO: 55540 - DNA, 303 bp, Zea mays
  unsure (1)..(303): unsure at all n locations
ccacatgaacaagggagtgatgccagagccaccccatgttaatcttaacaattaagcaagtgtctagttcagcattgttatcattgaaatcaactaaatatagttgaccacctaacactcccttaagagctactaaatcatcacttcttctaaagaaagtaacaccaacttcagtaaaaagacagntgtaacccactttgcataattgagagacagaaagcaagttgtaatctaaagaatctacaagaaaaacattagaaatggaatggtgaggagatatagcaatttcaccccaacctttga

SEQ ID NO: 55541 - DNA, 382 bp, Zea mays
gcttggcttctatcttgagtgggcgcaaacaaagccaatgtactactaaccaactcaaggtgactcaccagcggtcgatgcaatttaacagacttctcgtcgccgtgcggcttggcggcaacaatgaactccggcaagccattccccctgcttgctgtggactttcccgtgatcagggtgagaccacatgcagacttagtgcgacacaactatgttctgaaccatctgcggccgctacggtaatgatcttttccagctctcctgcacgctatgcgactgggcactcgacttcccgcacaactagcttggacatgattggagcgaggcagccgatgtttatactcagcagggagacgagtccgcgccctatggagctatctcg

SEQ ID NO: 55542 - DNA, 437 bp, Zea mays
  unsure (1)..(437): unsure at all n locations
agcttcatatctgaaactaaaccttcaacatgacgcccattcccgaatctcccgtaaccaaagttatgtcgccctggatggcctcctggccttggaagaagtggtgggcctctaccacctcgtcctccaaagcctcctcgagaatgattattagtgttccgaattggaggaagcactgcaagaaattacccatgacggactgaagtattaatacttccacctttcaattcaaatccagtcaagcttttaaaatcattagttgcactaagcccccaaaatatgaagtatcttgcccatgaaaaaaaatcagttcatttgtcacatcctttagcatatagcaagggtccttctataacagagtattgatagattgaatggacatttaaacggcagaattngagttgtcacatacaaaagcctgtgcttggtgtcagcat

SEQ ID NO: 55543 - DNA, 458 bp, Zea mays
  unsure (1)..(458): unsure at all n locations
cgatatgaggtggacatgatgacatacctgcatgcactccggctgaccatgatgagcacagacatgggcaagagtaggacccacgccttctctaagcctagaatttatactagcagacctgcctacaagtgcacgaacacatcgtggagagccagcagccaaagcaaatactataggagggtcttcatccttatctaatatatctacattctcttggtaagcaacaatagcttccacaagctctgccgagcctcggcggcatgctaaatgtanggcagtgagcccatctgtattttgtgcttctaagagagaacggattaaactatcgtttctctctgatgcagcttttgcaagtagatccctggtatttgcaaaagggttagtgcgaaatattatatgatatacatgcaaccatacaagagttgccagagacanacctaacaccagcagcatcttct

SEQ ID NO: 55544 - DNA, 450 bp, Zea mays
  unsure (1)..(450): unsure at all n locations
agcttcatattatctctaagtacctgcnaaatcttatttagtatattttggtacccatctcatgatgggtccatcaaggttagccaataaagacttaaacacccaaatagccttggtcctagaatgtggtgaactcatcacctttctagcacaagagtcaaatttgggtctcctaagcaaatctgaatgtattgacaatttaggcttatgagttttaccctttggacaaaccttgaatagatgacctttnttacggcaattatagcaaatgcggtgcttatccttgcaatacatttgcctttngctttcatctttcttgatagtcatctttcttgatagtgcaaggtcttggttcttcatgtggaggcatgaatcaatttcatgacccttcttcttgcatccatagcaccttctatcgcttctctttgatctntctttgttgaagcacat

SEQ ID NO: 55545 - DNA, 458 bp, Zea mays
tgacaacgaggaaatggcgctcatcatcaagagctttcgctcaatcctcaagcaaaggagggggaaggactacaagccccgctccaaaagggtgtgctaccggtgtggtaagtccggtcacttttcgctaattttttatattctagtgaaagtgacagggacgaagacaagaaggggaagaagaaggagaagaagagatactacaagaagaagggcggcgaggcgcacatgggcgcgagtgggactctgacgaaagctccaccgacgaggacgccacaaacgttgctatcaacaagggcctcctcttgcccaacgtcggccacaagtgtctcatggacaaggacgacaaaaagaagaaggtcactctagagccacacccaaatataccacatcttgtgatgagggtagctctagtgaaaatgaagatgatttagtttctctctttccaacctcaccat

SEQ ID NO: 55546 - DNA, 453 bp, Zea mays
caagcttatgggctcataagatatctaaacatattgtttcttaagtatctcctcttgagctagtctatgggcaagaagcagcgttgcctgtggaaataagtttgaatgctgtcaagttcgccagacaaaatgaatctactgctactgattattatgattcaatgactgataatattaatgaggtgaccgacaagaggatgatagctttgggagcaatataaaaggacaagatcatggtatccagggcctacaacaagaaggtcaaagcaaaatcatttcaagtaggggacctggtgtggaagaccattctgcctctaaggaataaagaccggaaattcgggacatggtcaccaagctgggaaggtccttataaagtaaaacaggtgatgtctggcaacgcctatgtgctacaaacattacaaagcaaggacttgcctaaagctttgaatgggt

SEQ ID NO: 55547 - DNA, 465 bp, Zea mays
gtatcaaatggacgtgaaaagtgccttcctcaatggacctatctatgtagaagtctatgttgagcaacctcccggctttgaagatagtgagtaccttaaccatgtgtataaactctcaaaggcgctttatgggctcaagcaagccccaagagcatggtatgaatgcctgcgagatttccttatcactaatggcttcaaagtcagtaaagccgatcctacactctttactaaaactattgcaaaagatttgtctgtatgccaaatttatgttgatgatatcatatttgggtctactaacaaatctacttgtgaagagtttagtaggatcatgatacaaaaattcgagatgtctatgatgggggagttgaagtatttccttggattcaaatcaagcaactccaagaaagcaccttcatctgtcaaacaaaatacattcaagacatacttaacatgtttggaatgaag

SEQ ID NO: 55548 - DNA, 445 bp, Zea mays
  unsure (1)..(445): unsure at all n locations
gagcttagagtatcgacgcgtctgttccagtgttttctcagtaagtgtcatgccaccttgatcgcatcctgcgatcaaggtgttgtctccctcattatgttacctttgtgtcttcttgtactgaagcattttttatggcgaanagcactagctatcatagtatgcatagagtaagattggtagtttcaccgtatgtacatgtcctctgatcgtgagagttaactgtcccgtgagtatcttcgagcatgagggtggtgcctcgtcccgtttcatctgcgtagatctggtttgtcatggttagtcctcgtgcaccgaggatctacctaacatctgcatagttaggccctacacacgcgtcgaatgttctagctacatgccggacacattacgtcagccagagcanggattgttccggcgatcgactctcgctggtccttaggcctct

SEQ ID NO: 55549 - DNA, 247 bp, Zea mays
  unsure (1)..(247): unsure at all n locations
caattggaaatgggctgccgagcttaatgaattttacattgattatgtgcacagatcctcgatccaatctcaaacattggcggattttattgccgactggacgccatgggctcatggcgaagaagcaaataaagatgccgaancatggacagcgttttgtgatggctccttgggaacctctcggagcacgagcagctgctgttttggtttctccgtccaaggttaaaacttgctatgcagcaagact

SEQ ID NO: 55550 - DNA, 291 bp, Zea mays
taatgaggtcgctcactgtaacatattatggtttttctgctaaggttgtggaagaatatatattctattcctaagatcattcctatccgttaaactttattgaagtgtatattatccctacttgtggacatatgaaccatcagttttgaatatatggtttgggacgtatatggtttttaaaaaatataaaatatattctttatggtactaacttaacattctgctgtcgtatgccgcttttgtaaggtaaatgatctttacggaatagtttcatcaaaccgctggctcacc

SEQ ID NO: 55551 - DNA, 382 bp, Zea mays
tatgttgagcaacctactggctttcaagataatgagtatcctaatcatgtatataaactctctaacgcgctttatgggctcaagcacagccccaagagcatggtatgaatgcctaagagattttcttatcactaatggattcaaagtccgaaaggccgatgctactctcttcactaaaactcttaacaatgatttcgttgtatgccaaatttatgttgatgatattatatttgggtctactaatgaatctacatgtgaggaatttagtaggatcatgacacaaaacatcgagatgtcaatcatgacggagttgaagtacttcttatgatttcaagtgaagccactccaagagggcaccttcattatccaaacgaagtatatt

SEQ ID NO: 55552 - DNA, 374 bp, Zea mays
gctatgaagatattcatccaattaggctattctgcagtgccagagcccacccatgttaggtctatcaattaaccaagtgtcgagttcagctctatcaaaatctaccaagtatagctgaccctctaacactcacttaaatgctattgaatcatcactgtttctagagacagcgacacctatatcagtgaaaagacagttgttacccatttgacataattgagatacacaacgcacattgaatctaatgaatcaacaagacacacatatgaaatggaatggtcaggcgaaataacaaatttacccaaacctttgaccaaacctagatttccatgctcgaatgtgatcgctctttggggatcttgagctttctcata

SEQ ID NO: 55553 - DNA, 440 bp, Zea mays
  unsure (1)..(440): unsure at all n locations
tggccactgggccanggattgtcggtagccactacttggtcattccaacgtcgcacaagcggaggcggaggaggaggccctgctcctggcacatgcaagcatcgagccatctccagcggcaccggccgcagcggcactcctccaccttgatgagtcgaaagcacgcgctttcctcggcgacggctccaacaaggacatgatcgaaggatggtgcctcgacaccggcgccactcatcacatgaccggccgacgggagttcttcaccgagcttgactctagcgtccgaggctccgtcaagtttggggacgcctccggcgtagagatcaagggcgccggctcagtcgtcttcaccgccgcgtctggtgagcacaggctgctcaccggagtctactacattcccgcgttgaggaactctatcatcagctggggacagctggatg

SEQ ID NO: 55554 - DNA, 447 bp, Zea mays
agcttaatgcccctcctaaaagattgtcttctttgttaaaggcaaagctcccatgcctcaagataacgagggttacattttataccctgccggttatcccgagcataaaattaggagaattcactctaggaagtctcactctggcccatgctaaatagcctaaaaagaaatctcctattgcatcaaatgaacctaatatttcatttaagacttttgatgcatcttatgttttaactaacaaatcaggtaaagtagttgccaaatatgttgggggaaaacacaaggggtcaaagacttgtgtttgggtacccaaggtgcttgtttctaatgtcaaaggacccaagaccgtttgggtacctaagaacaagggcctaaattgttttgtaggtttatgcatccggaggctcaagttggatcatcgatagcgggtgcacaaaccacatgaca

SEQ ID NO: 55555 - DNA, 458 bp, Zea mays
  unsure (1)..(458): unsure at all n locations
tcagaccaccaaanagagtgatccaagactctttggaattcttggcaaaagtactacacaacttttataatcaccaagaattgattctatgttgaactgaatcaaacaattcagttttcgaaatctgttctgtcagtggacagaacacagccaccaagttgtaaaattcataactcttaaaccgtcaggcctttagttatgaaattttaacacaagcaagatcaaaaaagcatctacaactttcttataatctacaaggactgattctaacattaacttaagcaaacaatacagtttctgaaatctgtacagaatttggacagattcagttactgaatttgcaaaatatgtaactcctaaactgtcagacctatggctgtcaaattntaacaccagcaagataataaggttatctacaactttcttgtggccaccaataacttaattcaacattaaca

SEQ ID NO: 55556 - DNA, 460 bp, Zea mays
agcttgagttagcccactaggagatgagtgtgtttatttaggacacctaactggtggctacattcccggagaatctttgtaaaggctacgtagtgagaccctgcctactcaccttgtgagtgttcaagggtccgtacaacccgaagcaaaaagggaatcacggctcatgggtaaagtgtacaacctctacagagtgtttgaaaactgatatatcagtcgtgctcgcggttatgagcagccaagggagctccagtgattagtggtacttgatcagagatgtttggattgcaggtggcaatgagattgatggttcttggttatgactctggtaatggtaagtggtactctttccgtttcgaaaggagtacgtttgggttaataacgtgggctaaatctaaaacatggctttctctactagtaacaataataatctgacaactaagagcgactgcttgactta

SEQ ID NO: 55557 - DNA, 401 bp, Zea mays
atcacaagtctattgaagaatcatactatattttattggtctccacagcgtaatgaagcctctgagaacttgaagatattattaaccactgctctggtattggctcaaccggatattaataagcccttcgatgtgtattgtgacgcataacgcagtggtctcgactacgtattaatgcaggaaggccgaataatagcgtatgcttcaagacagatgcgccaacatgacgagcattatcccactcatgatctggagctagcagcagtggttcatgccctgaagatctagcgccattatttgctgggtaatatctgccacatttatacagatcataaaagtctgaagcatatcttcacccagtccgagttgaacatgatacaaaggccatggctcgagctgat

SEQ ID NO: 55558 - DNA, 459 bp, Zea mays
  unsure (1)..(459): unsure at all n locations
agctntctcactgacagctatatattatataataaagaatgctgcatggagcctttgtggtacgtacagccgccggtcgtatatactctctcattaaacaactgactcggtatattccttgttaattgcctgcatgctagctagtgacacgtgtgatgatctgagatgcatgcactgttttttttgtcttgaacttgggcctcttcacatccaagttcatcacataacaatcctcgctgatgatcacactccctagctcgttcacaagaaaaggctagctagcttaccctaagctgccttgcttccctgtaaacaacaatgtctgtttgacctagacgcaaaacaatgcaagaagcttattccttgggcatcttcagcttcttggttgcatatacttgcatttagggatggcaacgggtacatacccatcgngtactgccattccatacccgtgcccat

SEQ ID NO: 55559 - DNA, 454 bp, Zea mays
  unsure (1)..(454): unsure at all n locations
ntaccaaatggactgaagagtgccttcctcaacggaccattcaaggaagaggtctatgttgagcaacctcccggctntgaagatagtgagtaccctaaccatgtttataggctctctaaggcgctttatgggctcaagcaagccccaagagcatggtatgaatgccttagagatttccttgttggctaatggcttaaagtcggcaaagccgatcctactttattcactaaaactcttgacaatgatttgtttgtatgccaaatttatgttgatgatattatatttgggtctactaacaaatctacatgtgaagaatttagtaggatcatgacaaagaaattcgagatgtcgatgatggnggagttgaaatatttcttatgatttcaagtcaagcaactccaagagggcactttcattagccaaacgaagtatactcaagacattctaagcaagt

SEQ ID NO: 55560 - DNA, 450 bp, Zea mays
agcttctaaagggagtaacacatttgcgactatccaatgtttattttgagaaagacagggtttgtagcgcatgtcaagcagggaagcaagttggtacccaccatccacacaagaacatcatgacgaccgacagaccgcttgagctactccacatggatttattgggcccaatcgcttacataagcatcagcgggagtaagtattatcttgtaattgtggatgattattctcgcttcacttgggtattctttttacaggaaaaatctcagacccaagaaactttgaagggattcttaagacgggctcaaaatgagttcggattgagaatcaaaaagataagaagcgacaatgggacggagttcaagaactcttaaattgaaggctttcttgaggaggagggcatcaagcatgagttctctctctcctacacacctcaacaaaatggtgtag

SEQ ID NO: 55561 - DNA, 458 bp, Zea mays
  unsure (1)..(458): unsure at all n locations
ntaccaaatggacgtgaaaagtgcctttctcaatggaccatataaggaagaggtctatgttgagcaacctcccggctttgaagacagtgagtaccctaaccatgtctataagctctctaaggcgctttatgggctcaagcaagccccaagagcatggtatgaatgccttaaagatttccttattgctaatggcttcaaagtcggaaaggccgatcctacactctntactaaaactcttgaaaataacttgtttgtatgccaaatttatgttgatgatattatatttgggtctactaacgagtctacatgtgaagagtttagtaggatcatgacacaaaaattcgagatgtctatgatgggggagttgaagtattttctaggatttcaagtgaagcaactccaagagggcaccttcctaagccaaaccaagtacactcaagatattctaagcaagtttg

SEQ ID NO: 55562 - DNA, 463 bp, Zea mays
  unsure (1)..(463): unsure at all n locations
agcttctaaagggagaacacgtgataagtctaactaatgttcaattcgaaaaagatagaccttgtgtagcttgtcaagcagggaaacaggtgggaggctctcatcacaccaaaaatgtgatgacgacatcaagacccttggagatgctgcatatggacctttntggacccgtcgcctatctgagcataagaggaagtaagtatggtttagttattgttgatgacttttcccgcttcacttgggtgttctttttgcaggaaaagtctgaaacccaagggaccctcaaacgcttcctcaagagatctcaaaatgagtttgagctcaaagtgaagaagataaggagcgacaacgggtccgagttcaagaatcttcaagtggaggaattccttgaagaagaanggatcaagcatgagttctccgctccctacacaccacagcanaatggtgtggtagagaggaagaa

SEQ ID NO: 55563 - DNA, 374 bp, Zea mays
  unsure (1)..(374): unsure at all n locations
tctaaagggagagcacantttgggaataacaaatgttcattttgagaaagacaggatttgtagcgcatgtcaagcaggaaagcaagttggtgttcatcatccacacaagaacatcatgacgactgataggccgcttgagctactccacatggacctattcggtccgatcgcttacataagcatcggtgggagtaagtactgtctagttattatggatgattattctcgcttcacttgggtgttctttttgcaggataaatctcaaacccaagaaaccttaaagggattcttgagacgggctcaaaatgagttcggcttgaggatcaaaaagattagaagcgacaacgggacggagttcaagaactcacanatag

SEQ ID NO: 55564 - DNA, 468 bp, Zea mays
  unsure (1)..(468): unsure at all n locations
agcttgcatttcatgtttaaatttctagtattgcatctatggctcgtctaacctagttaagataaccgccaacaaagcgagtgagaaagcttaactcaagctcaaacttgacaagtcttagtcttaagcttttagtacttaaattcctattcactatgaaaattgttggttcttgagatatgcatgaactactgcacttagggggagtattcaaaactcanatctttcatgaaaatacctagtgcaaagccaaaatgcaaatctcaccatttgcctattttctctaaaaattttctagcctataggtaaattttgaaaattatgagaaaatatatgagggtgccaatacctgtcccaataggtgttctttagtgtgattataagttgagaattggtttggttganaactagatagaanatttaaaaattttatctaagtcaccggacagtccggtgtgaccggacact

SEQ ID NO: 55565 - DNA, 183 bp, Zea mays
cgcccccttttgatatttcaatttttgggcataaaactgagcctcgttcttttctttttcaatcaactttttccccgaagcatgtcggaaaacataaatgaaagcctcggaaaatgcttccggggcgggagtgccgggttcttcagccaaaaattgatctgctgcttctgtttcttttgtttc

SEQ ID NO: 55566 - DNA, 424 bp, Zea mays
  unsure (1)..(424): unsure at all n locations
agcttcatatctganactaaaccttcaacatgacgctcattcccgaatctcccgtaaccaaagttatgtcgccctggatggcctcctggccttggaagaagtggtgggcctctaccacctcgtcctccaaagccttctcgagaatgattattagtgttccgaattggaggaagcactgcaagaaattacccatgacggactgaagtattaatacttccacctttcaattcaaatccagtcaagcttttaaaatcattagttgcactaagcccccaaaatatgaagtatcttgcccatgaanaaaaatcagctcatttgtcacatcctttagcatatagcaagggtccttctataacagagtattgatagactgaatggacatttaaacggcagaaattgagttgtcacatacaanagcctgtgc

SEQ ID NO: 55567 - DNA, 469 bp, Zea mays
taaacgatatgaagtggacatgatgacatacctgcatgctctccggctgaccatgatgagcacagacatgggcaagagtatgacccaggccttctctaagcctagaatttatactagcagacctgcctacaagtgcacgaacacatcgtggagagccagcagccaaagcaaatactataggagggtcttcatccttatctaatatatctacattctcttggtaagcaacaatagcttccacaagctctgccgagcctcggcggcatgctaaatgtagggcagtgagcccatctgtattttgtgcttctaagagagaacggattaaactaatcgttctctctgatgcagcttttgcaagtagatccctggtatctgcaaaaggtttagtgcgagatattatatgatatacatgcaaccatacaagagttgccagagacaaacctaacaccagcagcatcttcttcgcata

SEQ ID NO: 55568 - DNA, 465 bp, Zea mays
  unsure (1)..(465): unsure at all n locations
agcttgaagccgatatcagccgctaccgatgatagcatatcgtcggtagtttattctattctaatttcaaggtaaaaacttttctttggctctntactggtttaacaacgaaggtgtttcctgacgaangttgttttttgcacagagtatgctattaagtaaggctttgaagatgcaataagaccttgaagataaaaaacatgagatcataattgaaggtttagagagcanaataaaagatcatgcagctgttcttgaaaagaaagattttgaacttcaaacaatggagggtttactggtagaagccgaagccaaaattgtaagaatgaatagttaactcctttcaaagtcagaaagcttcgagcaagaaaggcagaaatntgatacgaagcttgaagctgaagtcaaaaaagttcaaatttgcagaaatcattgaaagagcttcaagataaatgtctagagttc

SEQ ID NO: 55569 - DNA, 434 bp, Zea mays
tgaagctgatataagcggctaccggcggcaacatatcgtcggcagtctcttttactccaatttcaaggtaaaattcttttgcctagatttctgttatctttgtgatgaatcaaaattttcttatgtcagcttattttcacagagtatgctgctaagtaaagctttaagaatgcaacaagaccttgaagacaagaaaaatgaagtcataattgaaggcttggagagcaaaatcaaagattgtgaagctttccttgagaagaaggacttcctgcttcaatcaacggagggttcccttgcggaacttcaagctgaaaatgctcgactgagcgaggagcttctccagatccaaacaactttaagagaaaaatcagagtgcttcgaacaggagacaaaggaactgcaagaaaaatataaagccgaagctgataaaaaca

SEQ ID NO: 55570 - DNA, 472 bp, Zea mays
  unsure (1)..(472): unsure at all n locations
agctngcagtgatgaccctaaatttcagccttatcttctccatcacgtcttggaattgttcattctccggatcagacagcggatagctgcccaccagtgcagccaagtgctcgatattcttcctgacccgagctgtgaaggcattctgatcaatgagaattgcagacgtccacacatccagacagccctgaaagaaacccagttcttcaccgacctggaaacccatctttaaaccaacctgcctcccctcttcctttccagatgccaaaccatcattatagccatttttgtacccctcctggtaatgtgtctcatctaagagtacagttggttcaagaaaatcagcatcaatcttagcttgctgatccataatatgaacaagagcctagtttagttctccaacagatagttctcaagaaatgtgattccagaaagcctgcttcatagtcaaaaatannaggatgagcataat

SEQ ID NO: 55571 - DNA, 446 bp, Zea mays
  unsure (1)..(446): unsure at all n locations
ngacaacaccatttgacatttcacataaaatttctgagatcaagaatatttagttcattcctcaacatgcaaaagcgggtcttatcaagtggcttagtgaaaatatccgctaattgatcttccgacctcactccttctaaaatgatatctcctttagcaacatgatctctaaggaagtgatgacggatatcaatgtgcttggtgcgagagtgttgtacaggattattagcaattttaacagcactctcattatcacacaacaaaggtactttttctagaactacgccatagtctagaagagtttgcttcatatataaaatctgtgtgcaacaagcacctgcggcaatgtattccgcttcggcagttgacaaggcaacactatnttgctttttggatgtccatgaaactagtgatctaccaagcaaatggcatcccccagaagtact

SEQ ID NO: 55572 - DNA, 383 bp, Zea mays
agctagagccctcgccaaggatggagagatatatgtattctcataagtagagggaggcagcgttggatgacctgtctgcaatcatgtcaaagagtggtgtgccaacacaagcagcaatgaatgtaatgtcagaattatttggaggccgtcaaaactggccgttcatagagaaagatgtcaataacaagtagatcataaaaaacactgacatcatatctttgtgcgatatattgagatcagcagatttacttgttttttcttttatggtacaggaaaactgagcaagcaagggaggaacggatggtgacatggataaattcgtccaatgtttcagggagtgcaaagaacacactgtatactcttcactgtgatgaggattctga

SEQ ID NO: 55573 - DNA, 406 bp, Zea mays
  unsure (1)..(406): unsure at all n locations
acgcgaccttagaaactcaagcttcaagctctcgaacccggcagaacttcaccggagaaccaagatcgtcctcactggacttcggccgccagcctgcgcgtgtagactgagcaatccggtgagtcgttcttgaattcctcgcacccacaccctccttgatccctggtgaagctctctaacccatttgattggtcaattgtgccctggataggctggactcctcgccgccgacgagctcccccgcctgcgcacgtggacaggctgactccaaccatccccgacggcgacccgcacatcgtcgtcaccctcaggacctcccctacaccctcggccacctcaccggagcagtctcgctgccggtaagcccctccgccctttcccccgccgctggaactgntatattggg

SEQ ID NO: 55574 - DNA, 365 bp, Zea mays
tagcttctaaagggagaacatgtgatttgttttatcttcgagcacttccaaaaggatagaccttgtgcatcttgtcaagcacgtaaacaagtgggaggagcgcatcacagcaagaatgtgatgaccacttcaagacctctggagctgttgcatatggacctcttcggacccgtcgcctatctgagcatatgagggagtaagtatggtctagttattgtagatgattcttcccgcttcacttgggtgttctttttgcaggataagtctgaaacccaatggaccctcaagtgctttctcaagagagctcataatgagttcgagctcaacgtgaagaagatgaggagcgacaaccgggtcgagttcaa

SEQ ID NO: 55575 - DNA, 425 bp, Zea mays
  unsure (1)..(425): unsure at all n locations
tcatgtggactgacgnaacatatgcacttctccatgttatttttcatgtgntgcttccacttagcactctgcaagtaccaagtaacaccaattgacacacggcttagtttacaccatgtaccaacattttacaactaggaaatgaccaaagcgaagaaacttgcagaagtatgcattagtttacacccaggcatgcagtgccgaacatatagatatacactgtcttacaattcaaaaaaatcactatgttcattatagctcaaatatgcactgtatgcacaaagaaaaacctacatccaggcattgtatgcacaaatatgcactgtatgcacaaagatcataatgctatgttccaagtattctacaagctactttattatttaaggatgcagctatgtaaattggttggctaatatggcaggagc

SEQ ID NO: 55576 - DNA, 467 bp, Zea mays
  unsure (1)..(467): unsure at all n locations
agcttcggcttcatctatattatggattgcctttgaatctgtccagttcccctcagcctttgtggcagcttcctgactcccataaatagcaataggtccttgatccgaaagtatcttcatgcaaagatatgctggatgaagaattgcttcgaagtgttccacgaccaatgattgcattgtaagggtactccatgtcgacaatgtcaaacacaacttgctcagtccttgtattgttgacaaatctgaaggtcactggcatggtaatcttgccaagcgctacaatttgtcttcctccaaagccacaaagagggtgcgtagcatcatgaatcttgtcctctggctcttgcatctgtctgaaggctntagcaaatataatgttggctgcactgcctgtatcaaccaaaacatagtggactagaaatcctttgatgacacaagatatgaccatagcatcattgtgagggtaa

SEQ ID NO: 55577 - DNA, 421 bp, Zea mays
  unsure (1)..(421): unsure at all n locations
nttcttcatatagcaaaacataaaaaactacttcttctttctgccgaagctnttacatagcaaaacataaaagactacttcctctttctgccgaagcttttacttttacacaacgattcataaaaaaccaattctcttttttgccgaagcaaccactttggtacataaatgctatgaatgaatgcttatgtatgcaaatgccatgatgtaatgtaatgtgcaaatgaatgtccgaagcgtatatccgaagccacactcatccatcattttcttaggagcaaaacacacgtcagctctgcattcccttatgaacgactntggagcatctttgccttttacttaagcagtatcagcgttgacttttcgctgtaagctctgcatccccctaaggacgtctttggagcttcttcgtcttttactt

SEQ ID NO: 55578 - DNA, 430 bp, Zea mays
  unsure (1)..(430): unsure at all n locations
agcttttaattntgaagcttcggctctgattatagttctttagtgtctccgaagatgtctgaagataagaagactgctgctgagatgaagctgagcctcgacgaagagaaaaacttggggtttcttatagcgatgtcaaagaccaatacagaaaaaatcaccaaggagatcctggaaggtttgtctgaagatactggtgacagtgatagctatgatgtggacagtggtggtgaagactccgaagatcgtccctggcgaccaagccattcagtttatggtaaatcaactatcaaagagaatcatcttgtcaacatgagaggaaggtatttccgggatttgtccattgtgagggccgacgaaggggaaaaaacttgcccacaccctgaagagaatgaagtcgtagtgtaccgaagctttttgaaagctggac

SEQ ID NO: 55579 - DNA, 437 bp, Zea mays
  unsure (1)..(437): unsure at all n locations
tggcatacaactaacaatctcgtagcctctgaagtacttttctcaaatgctcctcatgttcttgttcattctgggaatatataagaatgtcatcaatgaacactactacgaacttgttgaggtagtccatgaacacaatgttcatcaagtacatgaagtangctggcgcattcgtcaaaccaaatgacataatcatgaactcatatagtccgtacttggtgatgaatgttgtctttggtatatctgagggtcggattctgagctgatggtagcctaacctcagatctatctttgagaacacattggctcctctcaactgatcgaataagtcctcaattctgggcaggggttacttgttcttgatagtaacctcattcaaggatctgtagtccatgcacatcctctttgttccatccttcttcttcacaaacaatact

SEQ ID NO: 55580 - DNA, 444 bp, Zea mays
  unsure (1)..(444): unsure at all n locations
agcttctntcttcctcctcatactcgtttgtgcttccgctatcattttcattagtcacacaacatatgtgggaatcgaaatgggaagacaaacctcttggagaggtggattcatcgcttggtctccatcgctcattttcttcttcttccttgcaagggttagtatcacaaagaccaaaggaagtagaagcacataatgaactatcatgtttggactcattaaattttcttttaattctagtccagatatcatgcacatcacaaataggtttatcatattttattatgaaggcatgataatcttctttgctaaaggatttacttaagatgtcataagctagatagtttaagcatatacatcttacatcttcttcggaggcattttccctagcatagttagaaagaatgatactcttgtctaaaattccgtctaattgaagatcta

SEQ ID NO: 55581 - DNA, 472 bp, Zea mays
  unsure (1)..(472): unsure at all n locations
ggacctataaaactcagcttggaccaggagtcgctttagagggcagcgttccctcttatcatgntttgggctctgctgatggtactgagttggctcctgctggttcgttgcaagctgcttctggtggcggccttacgcctggtcatcaattgatctctcatgatttgggggtcccttcgttcttttccaacttccaggtactgcgatatactttagcttgatttttacaccgcatgaactgctgtcattacactcatctgttctccttatcaggctttggtggacgggatggctagccagctgagattacagggtgcttctgttccataagtagcttcgtctcttgcacgttggaatccagcgttacttcaacatcgtgtctctgacttggaagcgacccatgctagttaagcgctttttgcttctctttgncttcactattaaacctgctgtacattctgacccctcttgt

SEQ ID NO: 55582 - DNA, 450 bp, Zea mays
  unsure (1)..(450): unsure at all n locations
agcaagctttaagttntctcaacttaagttaagttttacccctttaatcactatntaaggttaagtcctttaaccagggtcctatttgtaaaacattaaaataatacaacttggttgaaatttttgcctagtggatgcactctaagtgtgtcaaacatatgcaatgcccatgctcatgatgccatgctcaagttttagttatagtaacaccaggggtgttacatcctttcccccataaaagaatctcgtcccgagatttaaaatcctagggtgagtaatggaaaaggaaatgtgtcacattnttatttccttatttttggtacaaggcaggggtggtgtggaggtttattcctttattacacaactatacaaactttacaacttacaagaggctaganagcctgngaaattcttatctaagaagtcttgggtttcccatgtagcctcatc

SEQ ID NO: 55583 - DNA, 457 bp, Zea mays
  unsure (1)..(457): unsure at all n locations
taattcanaacttgaagccaaagtacaaaccaactcagatttgaagaaatcattaacaagccttcaggataaatgtttgaaatttagtaccagctgcattcaacaattaaagaagatcttttactcagttggagccagcagtgggaagtttaccccttcagctgaaaatttaccaaaaacctttgatcatattgaagctgaaattgatgagcttgacgaagttatagccgggcacggtgacttctgtgcctgngtagcttctcggggtaccgctgcagcgttcctgaaggccggctgcgagcatggaaaaatcgtcaacaggcccaatttcgccctgtcttcatcaattctagacgatattcctgacctcgcccgaagcatctcanatagattataaaaatgatatggacaaaaagcgggcgggagaaggctggagacgaagctcgaagtcatcttg

SEQ ID NO: 55584 - DNA, 391 bp, Zea mays
  unsure (1)..(391): unsure at all n locations
agctnttaagcaataatcaccttgtgcaatgaaagattgaaccttggacccacccctctcttgaagcttctagttgagagaaagattaagcaaatgcacatttcataatttaaacccttaaccaaagtttaagagtaccaaaatgtttacaaaagacagtaaaggaactttgcaaaaagacccctataagacccataaatcggcccccaagtggagaacactatggaatcacccccattccttctaagtccaaaatcaaccctaatctagagatcaggggtgttcacctagctaatggcaccaaaaccccagggtctaaatagcaaaaggagccaaattatctaaagaacctcctggaagagttngaacccaagccaagaccgtttgacac

SEQ ID NO: 55585 - DNA, 443 bp, Zea mays
  unsure (1)..(443): unsure at all n locations
tggaggcgtccgatgggtgccgacttggtgtaaactccttcttcttctcctccngtgctttgaatgcaacgggttgagcttcggatgtggtggcatcatcgagctcgttgatcttcctcgagccttcgatcatgcattcaaaactcacaaaattcccgataacttcctcgggggtcattttagtatatctaggattaccacgaattaattgaacttgagtagggttaaggaaaataagtgatcttagaataaccttaaccacctcgtgatcatcccattttacgctcccgaggttgcgcgcttggttcaccaaagtcttgagccgattgtacatgtgttgtggctcctcccctttgcgaagccggaaccgaccgagctccccctcaattgtttcccgcttggtgatcttggtgagctcatcaccttcatgcgcgggtttgagc

SEQ ID NO: 55586 - DNA, 427 bp, Zea mays
  unsure (1)..(427): unsure at all n locations
agcttctaagggagaacacaatttaggactaacaaatgttcattttgagaaagacagggtttgtagcgcatgccaagcaagaaagcaagttggtgcccatcatccacacaagaacatcatgacgaccgacaggccgcttgagctactccacatggatctattcggcccgattgcttacataagcatcggcgggagtaagtattgtcttgtaatagtggatgattattctcgcttcacttgggtattctttttgcaggaaaaatctcaaacccaagaaaccttaaaaggattcttgagacgggctcaaagtgagttcggcttaaggatcaagaanattagaagcgacaacgggacgaagttcaagaactcacaaatagaaggcttccttgaggaggagggcatcaagcatgagttctcttctccctat

SEQ ID NO: 55587 - DNA, 407 bp, Zea mays
  unsure (1)..(407): unsure at all n locations
tgcacccaggtacattggtccattcctggtgattgagctatgtggaccagnggcgtaccgacttcaactacccgaaacattgtctgttgtgcataatgtgttccacgtgtcacaattgaagaagtgtcttcgggttcccgatcgaaccgttgaaatgactgatgttgtcctggaaccagatttaacatactcggaacatcctattcgagttctggatcaaaaggacaggattacccgaagaaagactctcaagttctacaagatacagtggaaccagcattctgaagatgaagctacttgggaaactcaagacttcttgaataagaatttcccaggctttctagcctcatgtaaattgtaaagcctgtataactgtgtaataaagaagtgacccccacatcacccct

SEQ ID NO: 55588 - DNA, 464 bp, Zea mays
agctaggctcctacctttatctcttatgccaaaaaaaactatcctggattcaagtagagggctgccccccatacagtttttgctccatttggcttgtccatctcttttcatagcactctagtacctccttctatagacttggttcctatttaaaagtttctttgattatgctctttacaacatccatggctgccatgatctccgtagtttctaggtgtttcatccccatctgttatcctcaacgcaacgagaagtggttgtgaaactcatacgcaattctttcatgttagcccaaaattggtgtgaaaggataatgttcacatttcacaacttgctttccttcaacagatgcatacaggctgttagtagtctactcatcactaacaacaaaaattctcaaggcattcctatgtttatgcatacttgccatggtagaaaaaagtagcacaacgagtcataatcag

SEQ ID NO: 55589 - DNA, 465 bp, Zea mays
actaagcttgcctatccatcctaatatgctataggtcaccatctacattgcaactctctctaagggcattagccacattgttgatagttcccatcatgttggtcatcatgaggacatcttcctcttaaacctcccatagttatcatcacctcagatatcttggttcccttagccagcaacttagtcttatcgtgacacacattattaccaaaggtcccctccatcttgtagacctcactatttgtctcattcgaattgaatccaagaggctcattgtacctaaggcaatgcctgcaattgtcatcctactcacaaacgttgtatccatgtgttcatagcacctgatggaattagtcagataattagtacgaaactacccaccaactaatatgtggtacaccattgtcgcttcactcttggtatccataaaggatgcaagcatctgggcccttggtgggttcgata

SEQ ID NO: 55590 - DNA, 474 bp, Zea mays
  unsure (1)..(474): unsure at all n locations
agcttcctctcttacacgtgggaccagcaattcacactccctctntntttatctcttgcacgtggaccccacttatcatagaattatattcttccttcggctactattttctctgcttcttccgttcgtagccgatggcgcccagctcacactcccaccgcctcgtctgcccggttttagttctatggtagacgccgccaaccgcactaatacctggctctagcttttccccttcctccccactatactgtacgccggctatttattctggtcattaatggttctaaattcttcagtttctgagcttcaatagccatcaaatctccaaccgtaatttcctctccctcgtctataaattgcgcacccgagctcacttncctgcccccactcgcgctcctcccttcacgctagacttctgccatgacctgttgctttgttgctcgcanaaacatgtcttcagtatctctgctcgtc

SEQ ID NO: 55591 - DNA, 440 bp, Zea mays
cttcccttttcctttcttcttctttagtcactgtttctagcacttggataaccatgttagtacacaaaacaattcactaagtctagaaacatacctttttccttgatttgcacttctcactttatttggcacattagaacttaattaaatgtgttgggcacttaatcaccaaaacattatagaaattgcccaagggaacatttccctttcaatctccccctttttggtgatttatgccaacacaaccaaaagcaaccaaaagaagtgcaacatcaatgcaattgaagaccaaattgtttttgactataattcggcttatttggatcactctttgccaccacttggtttgtttttgcaaatcaaatttattttcctatctctaagtcaaacacacttgtttgggcacataaagagttattccaagagtaaaattgatcaag

SEQ ID NO: 55592 - DNA, 473 bp, Zea mays
  unsure (1)..(473): unsure at all n locations
agcttagttaaaaaggaatagtcacttaatctggttttacaattgttcgcaatattctaatgcaagcatacatccaagggcacacaagaaagtgatagcctaatcacactgtttattatactaatctattgagggtggttatttattaatactcagattagtagcacaattattagaaatggtaacatctcatcaaatttgtttttcgtccatatagtgacacttgttaaattgacgtggatcgaagctaatttcttactagacgtcaaccatttaatttactactgcactagttacttgtatatctctaattatataatctactaatatagggatcatgagataacactatcaatcatactcaagcaagacaagagagtagagcaatcaaccacaatcaacaagattaggacagcagcacaacatttactcgtttcagtcgtaactcacaggatattcatctnaaaatagtg

SEQ ID NO: 55593 - DNA, 464 bp, Zea mays
  unsure (1)..(464): unsure at all n locations
tgtatctgagagcacctagagaggggtgaataggtgatcctataaatttcaacactaatagccacaaaaacttggttatgaaggttagaacggttaagtggcttgaaacgagctcttgtgaacacaaacaatcaaagagaacacaatcacaagagacacgtgatttatctcgtggttcggccaagtaacacttgcctacttccacgttgtggcgtcccaatggacgagggttgcactcaacccctttcaagtgatccaatgatcaacttgaataccacgcttttcttgcttttctctttntcccgtttgcgaggaatctccacaagttggagtctctcgcccttacaacanagatcacaatgaaaacacaagagtaagggtgggagcaacacacacaaatncgcagcacacacacgcacacaagccaagactttgacctcagatgaagcacaaagaagtcacac

SEQ ID NO: 55594 - DNA, 453 bp, Zea mays
  unsure (1)..(453): unsure at all n locations
ngacacanagtggtgntgggttggtcctatgatgtttctgaataactttntgaacgtagagaaaattatcatgaattgatcgttctttaatgaacacgttttgggcagtggagacgatcattcattcttggcgcaagtctatttgctaaaatcttggttaatattttcatgaaactggtgatgagactgatcggtctaaacatgtcaatcctgtcagcaccctcctttttttgtaaaagagtgatatttgcctcattaacgaggttcgggtttttgcatctatggtgatagaaatcatgaattgcactggatagatcatctttaatcagctcaaaacaacacttatagaagagccctatgaaaccacctggacccggcgcctttttagagtgccattccataaccacattnttaatctcatcatcgctgatcatataatctagatctgataac

SEQ ID NO: 55595 - DNA, 381 bp, Zea mays
  unsure (1)..(381): unsure at all n locations
agcttatgaagattcttcatcccaacgtgggcttgttgacgatgccagagccagcccatgttagtcttagcaattaagcaagcgtcgagttcagctctattaaaatcaactaagtatagctgaccctctaacactcccttaaatgctactgaatcatcacttcttctaaagacagtaacacctatatccgtaaaaagacaattgtagcccattttgcataattgagaaacagaaagcaagttgtaatctaaagaatctacaagaaaaacattggaaatagaatggtcaggagatatagcaattntaccaagtcctttgaccaaaccttggaattcatcttcaaatgtgatagctctttggggatcatggtttttctcgtat

SEQ ID NO: 55596 - DNA, 450 bp, Zea mays
  unsure (1)..(450): unsure at all n locations
ntaaggacaacgctaaaagcaagtcccagtatactttgtctccgaagttttgagtttatcaaagaanaactatacagaattggagaaggtgttgtatgttgtgttaatggcgtccaggaagcttcaatattattttccagcatatcacataattgttccttcatcacagcccttgaaggatatcatgaggaatagagaagctactggaaggattggaaagtgggtcgcagagcttaatgaattcactattgactacgtgcacagatcttcaattcaatcccaagtgctagcagatttcatcgctgattggacgccagacgctcacgaagaggggacaaacaaagatgctgaagctnggatagtgttttgcgatggttcttggngagccttcggtgcaagagcagctgcggtcttattggcacctttcaaagttaaaacatgttatgcagt

SEQ ID NO: 55597 - DNA, 385 bp, Zea mays
agcttgccttcgcctgagtatatcatctctagtccaacggagttgaggaacgcgccaatggaaatattttcacagctgtcaaaaagatgctcctcgacgaataaagggcaggtgggccgatctgttacccgaggcggtctgggcactaaacacgactgagtgcaaggcgaccgggttcaccccttttcgccttctatatggatcggaggccatgaccccacaagatataaaacatgggtccccgcgaacagttccgtcagccgtccccgacgtggacgagcccacttcgaaggatctcatcgatggagaccgagtcttcgccctacaggctctaaataaataccaagcccagacaaaagcatggcgcgaccacgcagtcatcccg

SEQ ID NO: 55598 - DNA, 452 bp, Zea mays
  unsure (1)..(452): unsure at all n locations
tgctacacgccttcttctgttctcatagcattaaccttactggaacactaccccacttaaagaggatgagggtagatctcttgaatcttggcgattcgaactccttgaagtacctcataacaagggtgttacggagccttcttctgtcgttgctgcttgagcacgctgccgagagatgactgacacggccgtgattctgggacaaccctcttcttatcttctcttcactatcttcttttcactgaccctttctttctctatgctcttnccactagaggattctatcaaagagtattaccatcacacattggaggaaaccaaagactatgaaccatgtacaacagtcttcaacccaagaatcaccacacattgtgatcttangggcgagggagtggaaaaacgagttgcttgcgatcttgcacatggaattttatcatgcgtgtgccttgctt

SEQ ID NO: 55599 - DNA, 462 bp, Zea mays
  unsure (1)..(462): unsure at all n locations
agcttcaccttntcaagacttccagttataatcattgcaaactaagaagcaagaacgctatgtttgaatgttgttattgcttatgcaaagaatggcaccctgaatctttatttcagccttcaagacacctctgcatgtgcataaatcgataattcatctgcacattgctttcctgatttctcacttgttgcatatactccaacatcttacatttgcaggttgacattgctgctggaggctggcattcaactgcactaactatagatggagaggtatttccgttatcttgattcttgaattcagggntactatcttattatatgctagtttatccagccaagccaccagataacacaaatatattgagggataggctattcttatatgctttcgaaactaacttcatgaaaactagtgtcatgttatgttgtgctgcagaaaattcacttgcttgctatttat

SEQ ID NO: 55600 - DNA, 455 bp, Zea mays
  unsure (1)..(455): unsure at all n locations
cgccaatttctatcaaagcagcaacatttgccattcacatattctgcagaccatacccgtaacatggccatttgcgtgctggggactggacatgattggaccgttcaagaaagctcagggaagctacactcacgtgttggtcgccattgacaaattcaccaaatggatagaatacaaacccattgcttctctaacttcagccaaggtagtggaattcatacaagatataatattcaggtttgggataccgaatagcatcataaccgacctgngatccaatttcactagctctgaattctttgatttctgcgaacaacggagcattcagatcaaatatacgtcagtagcacatccaagagccaacgaccaggtggagagggctaatggaatgatactggaagcactcangaagatagtcttcgacaagaatgaaaagctcgcaggaaagtggatca

SEQ ID NO: 55601 - DNA, 414 bp, Zea mays
tcccaccgtgggaaggcatctggcgagggcacacttctgttatcgcccagccatgcgccaaaggccataccccgaacgccacaaactcctcaaccaaatcgcgcccgctgctcaggccggcggcgcaccgaagggccccttcgtccgcatcctcatccgccacttcaaaaggcgggtatgctgagtaaaaatgcgagcacatctcggacacggggagccccggatggtcttcggctgtaccctccacgacgtagaaccaaaaatcctgccaattgccacacttgttgcgggcgcaaggaaccaactcaactacctgcatcgtggtcttgccggtcttcggcgtaaatgtacaggacccaaactgtgcaacttcactttcaatcatcctcttcttgcagtgcaggcaataatact

SEQ ID NO: 55602 - DNA, 457 bp, Zea mays
  unsure (1)..(457): unsure at all n locations
agcttcccactctcgagacatagtttatatttctaataacacccacccacacatttccctggttatggagatcatacacactaactgtcataccacaccagactcgtccacaccagtggacacggactattcgaataggtttgaactctgtgcagaggggtacactttacccactagtctaggctctgcgatctcatggccaatgagacccgaatccgaatcgcttttcgtccccgcacgtccttaccttaacggatataccggaaggagtcaagccaccgccatgtccaaaccggacaaaacattccccctctttatcctcccggtgctccccagccatcataactctgnggtttggaccgtatgagttcagattgagtgactgcccatataatctcgagtggttgtacttgtcatgagtacacgtagtgaaggatgactaaccggtccttatatg

SEQ ID NO: 55603 - DNA, 448 bp, Zea mays
tgttgcggacttgttctcagatgcttcgaattaataacattgcttcataaaacggtaaatatcaaagcccttcgtccatcgaagcattatacccctatggatataatgggtttcacacgaaggttatgaaggtcacaccttcataatcataatgaaaggtaagaaaggctcatgcataaaataatatgattactttaaatattaacttattcttatttttatttatttcacttatataaatgacaacaaattacaaatgtaccttcggcttgagggaaagtaaaaggtacaagcgtgatgccagtgccaagccagtgtgaacagtacgggagcactgttcatctatatataagcacgggacacaggcccggtaaaattacattaatgccctttaattctatcaataactctatagcaatttttcatagtctaatttgagctttcatct

SEQ ID NO: 55604 - DNA, 439 bp, Zea mays
  unsure (1)..(439): unsure at all n locations
agcttgagtcaatntgtatattacttgcctatgctacttaccatggctntaagctctatcaaatggacgtgaaaagtgccttcctcaatggccctatcaaggaagaggtctatgttgagcaacctcccggctttgaagatagtgagtaccctaaccatgtttacaaactctgaaaggcgctntatgggatcaagcaagccccaagagcatggtatggatgcctgagagattttcttatcactaatggcttcaaagtggtaaagccgatcctactctcttcactaaaactattgcaaaagacttgtttatatgccaaatctatgttgatgatattatatttgggtctactaacaagtcatcttgtgaatagtttagtaggataatgatacagaaattcgagatgtctatgatggggcgcgtaaagtatttccttggattc

SEQ ID NO: 55605 - DNA, 375 bp, Zea mays
  unsure (1)..(375): unsure at all n locations
tctanagggagagcacattgtaggattaacaaatattcattttgagaaagacaggatttgtagcgcatgccaagcagggaagcaagttggtgctcatcatccacacaagaacatcatgacgactgacaggccattggagctcctacacatggacctattcggcccgatagcttacataagctttggcgggagtaagtactgtctagttattgtggatgattattcccgcttcacttgggtattctttttgcaggaaaaatctcatacccaagagaccttatagggattcttgatacgggctcaaaatgagttcgacttgaggatcaaaaagattagaagcgacaacgggacggagttcaagaactctcaaattga

SEQ ID NO: 55606 - DNA, 423 bp, Zea mays
  unsure (1)..(423): unsure at all n locations
agcttcaccgccgccgtctccgactcccttctcgatgcgaccgctttcgcgccacgattcctctatccccgccttccccgcccgcgccggttcttgcacttgaccgacccaatccgcctatctgttcccctcttccgtgcgagaggtactatcgccggccgtttcgtttcgaggctgatcggatcggcggcagatgggccgcgacgctgaggatacttcgtctccggtgtcctcgtcggaattggagcaggaagacgacgacgattgctacctgagcgatcagggggacgatgccctagaagagtctgttctccatgttctcgaggacgagcacctcgaggactgccattggtctgcctcatctgtgcgtgttctgtcctgattntgtcctgagcatctgtctccagtggtagaccactcttg

SEQ ID NO: 55607 - DNA, 425 bp, Zea mays
  unsure (1)..(425): unsure at all n locations
taacaagtgcganaacgactacaccgaactgttcgcgcatagaccgactacatgcgcaccagaccaacataacaaatacaccagaccaagtatgtaacgccttcgcaagtatagccgaatgtgcgaaggcacacaaccttatcttacaagtcatcacacatgtacaagcgagggcatcacactctacatcggctcaaccttcggaataatccccatctccctacgcccagtactcggaccaggcacaacttcagcatccgcagcatgcggcgaagcctccgccgctgccacatccaaggccgcaaagtagtccaagtcctcatccgacgactcctcagtccactcaaccgagctcccagagtcaccaaaatcagaaaacttagatgcagacccatccgatttattaccatcatccacggtcgaag

SEQ ID NO: 55608 - DNA, 468 bp, Zea mays
  unsure (1)..(468): unsure at all n locations
agcaagcttctagtntttaaagcatgctatttgttatagatgttgatgtattactatataaatctattcaatatggtttttgaaaataataaaactatacgaaatcgtcttaaagctggtttggtgctcatggatcacgtggatcaatggatgaaatttctttctattcaattttaaataacaaaaagattttatcgaatggattctttgagcaccaaaacatctattagtcttgtgtggaacctctagaataattgttaggagctaagagcaactgcaaaagaagccctaaactaactcaaaaaatcaatattatgagagaaattgctttttcgtcgctccaacaactcgctcttcctcttcccaaaaatcttcacgtcctgcatatgtgccctctcgatattntcgcgtganaatagcttacccaatacggagcgtcattctnttctccgtgttttttacaaatct

SEQ ID NO: 55609 - DNA, 447 bp, Zea mays
tttcgcacttggctctatagcttgactcttcactgcacatacgaagatttccattcctattaatgcttcaagggtaagttgatgaaggtgaacctgatatattctcagaacttctaccacgaatctgcttagagggaatccgagcccagcttttataaagctgatgaagataacgacttcatcatcttcagggctgggcacagttctttctccggcatgtgctctcacaatagacatatctcgaaagtatctgcccttcatgttttcaaggcgactttgcccaataggtgattttccgaagactgaatggcttggtcgccatggccgatcttctgaatcttcacccacgctatctgcatgcgcactgtcactctcaccaatatcttcagatagaccttctaaaatctcccttggaatcatcttcggcatcgccttcgccattgactc

SEQ ID NO: 55610 - DNA, 474 bp, Zea mays
  unsure (1)..(474): unsure at all n locations
agctttcctgcttcacagtttcggcgctgtgccaaccttcgtatctttagagcttctccctttctgatacgagtccgaagagacctgttcacacattatactccagaaacattgttaaatcatgttttgaggaccttcggaagccgaaggtcctcaacaggacatgttccttagagcgatgcacggagcctcttcttcacctatctcatcaagatcaacttgctctacttgagagccgttagtttcatcaaacacaacgtcacatgagacttcaactagtccagtggacttgttaaagaccctatatgcccttgtgtttgagtcataaccaagtaaaaaaccttctacagttttaggagcaaatttagattttctacctcttttaacaagaataaagcatttgctaccaaaaactctaanatatgaaatgttgggctttntaccggttaggagttcatatgatgtcttcttgag

SEQ ID NO: 55611 - DNA, 449 bp, Zea mays
ttatcaaatggacgtgaagagtgccttcctcattggacctatcaatgaggaggtctatgttgagaaacctcccggctttgaagatagtgagtaccctaaccatgtgtataaactctctaaggcgctttatgggctcaagcaagccccaagagcatggtatgaatgcctaagagattttcttatcgctaatggcttcaaagtcggcaaagtcgatcctactctctttaataaaacaattgaaaatgatttgtttgtatgccaaatttatgttgatgatatcatatttgggtctactaacaaatctacatgtgaagagtttagtaggatcatgattcaaaaattcgagatgtctatgatgggggagttgaagtatttcttacgatttcaagtcaagcaactccaagagggcaccttcatcaaccaaacgaagtacattcaagacatactca

SEQ ID NO: 55612 - DNA, 472 bp, Zea mays
  unsure (1)..(472): unsure at all n locations
agcttctgcttttcttgatcaaagttntctgattgatagagaagtttcatatttaactctgttattntagcttcagcttccgccagtaagccttcggttgtttgaagctcgaagtctttcttttcaatagcagctgattgctcttttaatttgctctctaaattttcaattataacctcttgttttttatcttccaagtcctgctgcattttcaaagctttgctcagcagcatactctgcgcacaaacaaccttcgttagaaaacaccttcgttattacaaataataaaagttcgagaaaagttgtttaccttgaagttggaataaaacaaactaccgacgatgtgttgtcgtcggtagtggctgatatctgcttcgagcttcaagaaaccaatactctgtgacagagtaccaataaccttcgcaccagtctgatcccggacgcagcctaatctttcgtcatcgatgccacc

SEQ ID NO: 55613 - DNA, 374 bp, Zea mays
tccacattattcttacactcctctctcttctaaattttacgattccttttggattttaaattccactatatttcttgtcacattgctatgttatcttgtcacaatgtgcacacaacagaaaatcccagcattgatgcataattttcgcttttgggcatcttttgctatctatacatttggcctcatgtgatgttctcatggaatgataaatatgggtaacacacgtatatacacagaaatatcatttctccttctaggttatcctccacaaattacatgttgggttacaaatcctaccccccttaaaaagaatctcgtcctccagatttaagaacgtttacagaaacgatggaaaatctatgccgaactcttct

SEQ ID NO: 55614 - DNA, 468 bp, Zea mays
  unsure (1)..(468): unsure at all n locations
gcttacataatgataacatgtgagtgatattatgtgtntgttcatattatctntcatattccatatatttcacttttcattatcttataaccgtgatgatgaaggtagatccttcatgaccttcgtccgaagatcgttatatcctaagggaaataatgctttcaaagacgaaggacattaacatttaatacttcgtgttgcctagttcttgacttatagcatttgagaacaagtctccaacattggcgcccacctccggtgaactcacttccacaattgagctgatggcttcgtccaacatccaagctgaagctgcttcggctacgaagctgctgctcccaataacaggcggttcatgctcagaaccagccaacaagaagcataagaaggaggctcagagaagggtacaacatgttggggtgcaaagacccttcatcaagtcaaaatggtctccacatccaatcacct

SEQ ID NO: 55615 - DNA, 451 bp, Zea mays
gtgtcatatggacgtgaagagtgctttccttaatggacctatcaaagaagaggtctatgtcgagcaacctcccggctttgaagatagtgagtaccctaaccatgtctataaacactctaaggcactttatgggctcaagcaagccccaagagcatggtatgaatgccttaaaggtttccttatcactaatggattcaaagtcagaaaagccgatcctacactctttaccaaaacacttaaaaatgatttgtttgtatgtcaaaattatgttgatgatattatatttgggtctactaacgaatctacatgtgaagagtttagtaggatcatgacaccgaaattcgagatgtctatgatggcggagttgaagtatttcttaagatttcaagtgaagcaactccaagagggcaccttcattaagccaacgaagtatactaaagatattctaagt

SEQ ID NO: 55616 - DNA, 465 bp, Zea mays
  unsure (1)..(465): unsure at all n locations
agcagcttacataagaattgataaataagattttgaatcctatgatatagtttccttccgctaaatatgtgcattctagaaaataccaattttgtactcaaatgccaaaagcacatatttgggtcaaagtatggacaacttatatcatactattcatatggtgcagcgtgtcataaaataaacgtgatgctcatgacatggaatgcacttatcaactttctacatcttatgttnttttatgacttcccctttttgttacttatttctcccctttttaaaaatcttctaacacttagttacataagactaaaggtaaactttaatgcacaatttctccccctttgacataaatctccaaaaaggatagaaattatgattaagcgagatgtgaacacactatcatgaaagggatccttagatggcacanaggtaatagataagtgtcataagtgatgtacctttgcg

SEQ ID NO: 55617 - DNA, 454 bp, Zea mays
tgcacttacgaccaaaccgcacccgcatccatatcacattctatggtttaacaatagtggtaaggtcaaggtaaccaagctggtacgaattaattttgctattggttcatatcgtgatgttgttgactgtgatgttgtgcctatggatgcttgtaatattctgctaggtagaccatggcaatttgattcaaattgtatgcatcatggtagatcaaatcaatattctatcatacaccatgataagaaaattattttgcttcccatgtcccctgaggctattgtgcgtgatgatgttgctaaagctaccaaagctaaaactgagaacaacaagaatattaaagctgttggtaataacaaagatgggataaaattgaaaggacattgttcgctttgcgacaaaactgatattaatgaattatttgcttcacttctgttgctacgcctggatgcaaga

SEQ ID NO: 55618 - DNA, 469 bp, Zea mays
  unsure (1)..(469): unsure at all n locations
agcttgacctagttgagctcatggaagatgtctctatacccaaagctgggtttgtgtgcttcgcatttgggtgtgcgtgcttcacattgtgtagtggacacccaactaaacctaagccatgactcgggtggtcgaatggtcaaaaagaatgatcctcttgccctatgtgtaacactactgttacttgctaaaaattccatgtatttcaataacacactgcacatttctttatttcaataacacactacaaagcttatggagttttattatgtaacttatttttatcctatctcatcctacaaagagaagaggggagactatttttatataaaaatcctgactaggaaattancccanactctacttgaaatgatttggagttcattntatttgaatttgaaaactaaattcatatctggaacattaaaaagataaacagtgtggagctagccataaccacgtcatactc

SEQ ID NO: 55619 - DNA, 456 bp, Zea mays
  unsure (1)..(456): unsure at all n locations
agcttgccttcaccacgatatgtatctttcggagcaaggaaaaatgtcttctaatggacgcagagnaagcttgccgaagctacaaatagtcgttctaagggacgcagagtaagcttgccgaagctacaagaagtcgttcctaagggagcgcatcgtaagttttctgctccatagtcgttcctaatggaatgcagagctaaataccgccgaaagtaaaaggcgaagaagttccaaagacgtttctaagggaatgcagaacttacagcgaaaagtcaacgctgataccgccgaaagtaaaaggcgaagaagttccaaagacgttcctaaggggatgcagaacttacagcgaaaaataaacgctgattccgctgaagtaaaaggcgaagaagctcctaacggaggcttataatgaataagtcagtattgatacacaagattgtgctccattgcaggaat

SEQ ID NO: 55620 - DNA, 434 bp, Zea mays
  unsure (1)..(434): unsure at all n locations
agcttggttagaagttgcagcgacatttcttatccgtatcatgtccaatggttgaatgaatcgggagatatcaagattggttataaggcgaaagtttcgttcaagattggagagtatgttgacacggtggagtgcgatgttgcacccatgtctgtgtgtcacatgctgctaggaagaccttggcaatatgaccgatattctcagcattgtggaagaacaaatcaatacacgctagatctaaatgggagaaagtttgtactcaagcctatgacccctcaacanatcatggctgaacatttacaaaagaatactgaaattagtgcagcaagtagaggaggataagagcaaaagaaattgagtgccatccacaattcggcgagcgagtgctacaagccatattcaagagataaaaggaaggaagagggagaacatct

SEQ ID NO: 55621 - DNA, 427 bp, Zea mays
ctacggatgctaccagtgcaatgtatcctatgaatgctcaccgcggagctcggtctacgtgcgccgacggtcgggtgaagtccaccgacgttgatccggtgtctccggtgaggtatagttcaatccccggctctatgagcttcaccgaggtccgtagaggctatctcgagggtctgatggggcggcgagtggctaggctgaccattctacgatggtcgtggcttgcgtggccgctggcacgccgctctctatgcaaacgccggcgaacttgtgctcgggctgggtcagtggcgcgtgggggtgtaccgtcgatgccgggatggcttttataagcgcgggcgtggacgctaagttggtgctgcacctggctgcccgcgtgggctgagcgctgaaggcgtgctctggcgccccagaacgcattcaacac

SEQ ID NO: 55622 - DNA, 465 bp, Zea mays
agcttgtagctactaatatgttccttgttctgttgtctctcacggtgatcttatacagaagatattgcaaatatacctcaggaatagtgactctacttcagatctacttgctgagataggtcgagaattgcctaaggtggccatctcttcttctcgagtgatgctctgagagacatctcatttagcatatagttgtagatatgaactacatgatctctttttgccttagaatactccttatatgttcttattccatgttttaaggaaccttcgctcaaaacaaaagataaccaagatgtatcgtatggttttccaacattgtgttcctccactattacctcttggtaccgtgtgcttgtaagtatggccgttgatgcatttatgaaatatgccatgcttgtcttagcttctaacatctttgtcaccaatacagtccgaagagaacacaatggagttaaacaagac

SEQ ID NO: 55623 - DNA, 437 bp, Zea mays
taaccttgtaacgaggataagctgcctttgttccaaatgttgatggtccttaagcatctttgaaatccttataggaaaatgcttaagacacttataacatgctttcataagtgcataaactgtcatgagcatcacacttatactaggacacaatgcacttcactttctgtatggtatagatatgttctcattaacctcattgtgtgcaattggcatttcaaggccaaaatatgtattcctatcaaggcacatatttacggggagcaatctatattatatagaactatgatcatgcttaattgacatatcttttgatcatatctctttcattttggtacaaatgcatatatcttattattctcgtaccatgactacgactaatcatgttccaagtatacttctatactaagtcgtagattgaaagggaaatggagtct

SEQ ID NO: 55624 - DNA, 450 bp, Zea mays
  unsure (1)..(450): unsure at all n locations
agcttctcaagtaaaggtgcaatggtgatttctgaaattcagaattctgaatttcagcccttgagctaaagaccgagcgtgttcaccttgatccctagctcaaatcctaatgaccccattgacaaaattgtgcctaactaatccctctgtcacatgccaaaagatggcatggggatgcgagccctagacacaacaaaacccagcatttgcctcaagctcgggcagggagacagaccagacttcaaggctccaaatctttggaaccagtaagcaaaatcctatgaccctcacacaagatcgatagcttatagagaggagaagaggttttgtgcactgaccaaagcaagagcatgttcggatgaatgaccacacacgccagaacttgngcagaatgaacgcgcacacgtgtttgaccctggtcggcacgccggcgttcgcccaacccgcgcg

SEQ ID NO: 55625 - DNA, 453 bp, Zea mays
  unsure (1)..(453): unsure at all n locations
ntgcccacccttcgtccaattgtgtgatgaatctattatctatgcttcgagccaggctggggatatcagctaaatctactggtgataagctgaagttaggtctattgacgatcttcccatgcgtgcaaccaattttcatgaaagcaacagctgtgccccgagaagctagaagagcacagaagtcaccatgcccagctataacttcgtcaagtgcatcaacttcgccctcaatatgatcgaaggtgcctggcaggtcttcaaccgaaggttgaaatttctcagagctggctccaactgagttgaagacctgcttcagccgttgcacgcatctgttgccgaagtttagatatttatcctgaagctccttcaatgatttctgcaaattccaactcttttcgactctggctttaagcttcgtatcgagattcttcttttatagctcgattcttttga

SEQ ID NO: 55626 - DNA, 390 bp, Zea mays
  unsure (1)..(390): unsure at all n locations
agcttagatagtaataagagagaaataaaattcttctctccaanctaacaacagccacaaagaagcacttattatcctctcacaagtcctaatgcgctacaagtgaatagaggactttgaccggatcgatcacttgaatagagtctgtcgagaggagtctatcgctcttgaattgaatgcaatgtgaagaatgctcggatggttggagtggaagcgctctcctttccgtaaagtagctacacatgggctgacattactttcgcgcaatgatcacaatctcataactcaccttccgatgatctactagaacgacgcaccccaatatactccccgtgagatcgacaccggacaacagacacatctccttcctcaaggtaccctcctcacatg

SEQ ID NO: 55627 - DNA, 430 bp, Zea mays
ctgctcgaacacccatttactcccaatgggcttacacttataaggatgctcaaggacatcccaagttgcattatacataatagacatcatctcactccttattgtttccttccacaagtcaggatcaggagacgaatatgactcttcaacggtacttgtggtgccatccacaagatatacaatgtaatcatcaccaaaggactttgcaatccctggtcgcttactctttcgagttgatacaatgtcatcttccacaggattatgtatatgggattcctcaatgggttctaccggaattaaatgctcacggtgtatcgatggttcatcattagacgtatcatgtgtagctttcatatgatattcatcctacaagacgcagcatctctgaactcataaagtaccaacaaccatgtccagtctccggagttat

SEQ ID NO: 55628 - DNA, 466 bp, Zea mays
  unsure (1)..(466): unsure at all n locations
agctagtgaaagttcttcatccncacatgtgctaagcggcgatgccacaaccagcccatgcaagtcttagcaattaagcatgcatctagaccggcctcttcttttgcaaaatcaaccaaataaagtttgccgtctagtacacccttaaaagctagtgaaccatcacaccttctaaagacacacacatctacatttgtgaatggacaattatatcccatattgcataattgactaacagataacaaattatatccaagcgactcaactaaaaacacattagaaatagagtgctcggatgaaatagcaattntacctaatccttttaccttgccttggttcccatcaccgaatattattgaatcttgnggatccttgttcttgacgtaagaagagaacatcctctnnttccccgtcatgtggttagtgcatncgctgtcgataatccagcttgtacccccggatgcat

SEQ ID NO: 55629 - DNA, 457 bp, Zea mays
  unsure (1)..(457): unsure at all n locations
ntacttggaattcttccacactctgggctttggaagtacctttaccattgccgacccgggatggctggagggcaacatcagcttgttggaggtgctagcttggaacttcgtcgaggtaggaaacctgagtatctcaacattcctttgaaagacaacattaagggatggcgcttcgagtggtttacaatggaaaatcataacaaatcatttcccgcttgatcagggagacagcccgacacccaaacgcctagctagacagagatccccacagatttagagcttgctgagtctagggtgctattttagagatgtgcgttgagggacagaggcttcattgctgaagctgttggtgtcgactttgttttcaagaatattcagcctttgaaagatagagtctaccctgcttacctgtacactggtggtaatgaccccactcgaattatcaacaagcgaatat

SEQ ID NO: 55630 - DNA, 446 bp, Zea mays
  unsure (1)..(446): unsure at all n locations
agctngaaagagagaagaaagatgtggagcttgtccgactgccctaccactataagttcaagaaatatttcaaagcaccctgccaagaatggctcgaaacaatcgaagtaataagcactgaaattcttgggaattattctaaaaaagaggatcaattgatgatagcagccttcggcacccggccgaaacgaaggctaaacagagtgctcgatgctataggctttgaatatcctgattatgagcgactcgacaagggtgccgaagggcagaaaaggaaaagagtagctggcgctttgatcaaagacgacgaagatcaatcaaaaaagaagaaagaaaagtttgaatcgaaagtgttaacttcgaagaanataaaggaatcaatcccggaacaaaaatcaattgatgaagaagagaagacttctacgacatcttttgatgctgaaata

SEQ ID NO: 55631 - DNA, 453 bp, Zea mays
  unsure (1)..(453): unsure at all n locations
tcagnttacaatattgaatctagcttacaaacttcaatttagcttcagtttacaatcttcaatttacaatcttcagtttacaatcttcaatttacaagctccagtttacaatctttaaaatagtcattatgcacagctccaatttccacgttcatggtgaggtcgtgatgggatcacctgctccctccattcctcgcaggactgctctaggatccatcagagttgtcatctaaaggaaactgaaatgttaccctgtcatcagcatttgtagcctttagatagagacctgcaaaattggatgggatcgactccaatcagctccttgggattggctcgctctttatggcaggagggttcggctctagtcagctncgccaaaacggctggctctgtatggcgagagggatttattgcaagaaaatacagagatgccggacggaggtgggaggggac

SEQ ID NO: 55632 - DNA, 410 bp, Zea mays
  unsure (1)..(410): unsure at all n locations
agctntactcctgagtcttcggaagctaaaagcgatgagaatcagaagggcggttcttaaaactgattcccaggttatttctggtcatattgacaaaagttataaagcaagagatccgaagctcgaaaaatatttagacacggtccgaaagattgaggcttcctttgaagggttttctgttaaaaatattcctcgtggagaaaatgaatatgctgatttattagctaagtcagcagcacaagggctgccattaccttcggaagtatttttcgaaacaataaaagcaccttcggttgagcttcttgaaagagcagtcctcaatatatcccctgtttatagtgaagactggagaactgaaatcatctctttccttcagggtaactttctttcagatgatgaagcttataaca

SEQ ID NO: 55633 - DNA, 426 bp, Zea mays
  unsure (1)..(426): unsure at all n locations
tcatcatcatgggcatgtcgtcttcggacacattatatttctcaaaatctagatggctgggttntgtggggatcaaaatactgtaatcttcctcaacttcatcagcattttcttcttcaacaacaacctgttcagcttcatcatcaggagtaccttcgttaatagctcactctgtcacaactagtcctgatcgttccatgacttctaaaattggcgctgtctcagtgacctcgttctcttctccctcacgagacacccttgcagttgatcgcactctagccatttgaatgttttaacaatttgacgaagctaacttgtctgacgaagcttactttaaataatgaagtgctcgcttgagagcgcagcacagaaagttttggctatggttannaattttaacagcacaacagtgcaatgacaatgaat

SEQ ID NO: 55634 - DNA, 463 bp, Zea mays
  unsure (1)..(463): unsure at all n locations
agcttataagtttctggatgagaagaggtcacccaagttntgttgatgaagcaccagaagaccaatcaaggaaggaatccatgtggaagttcgctagagaaaggtttgcgtgttggcatcgatgcttcttcaataagctagctgccaagcgaaacctagaagcctgaagatgatctttgagtagccagaatcagcgtttgcaatcagcaaccggatgcccctcaaaggccagattttgttgaagttccatctcctcgaagagtctgcaaagtgaagatatgtagctgaagtaaagctatacccataacccttctaagccgaatctcgaggacgagattcattttaagtggggtagatttgtagcatcccaaanattcaaatcctggaatcttctcanacttgctctaaattcaaaatgaatttcanatttcatttcanaatgttggctangcaagtgatatca

SEQ ID NO: 55635 - DNA, 455 bp, Zea mays
tatcttggccatattaaatattgcgttatgtttgaagctgtttgtatatggtctgctcaacaaactaattgttgctcaaaatagaaaaaagagtttcacctttagataattagggcatctaatgtcttactgatgagataaagctacttattaagttttacgtgtttggatgaagtcttaaaaggattagctccctagtgacttgtagcttgtgatgacagctcgtaggtgtattctagatgtgttctttgttaccctctatgcaagttgcattttcatggcattgcacaagtattcataagcatgttatctcatgtagagctctctgaagaagtggacatcgaagagaaatttgctccagtacctgaatacccattggtggggttccatctaactagttatctaacagaaagcttttggatctcctctgcaacaaaggattttggatcttctct

SEQ ID NO: 55636 - DNA, 474 bp, Zea mays
  unsure (1)..(474): unsure at all n locations
agcttgtgaagattcttcatcctaacatgggctagtcgacggagccagagccaacccatgttagtcttagcaattaagcaagtgtcgagttcagctctatcaaaatctaccaagtatagctgaccctctaacactcccttaaatgctattgaatcatcacttcttctaaagacagtgacacctacatcagtgaatagacagttgtagcccatttgacataattgagaaacggaaagcaaattgtaatctaaagaatctacaagaaaaacattggaaatggtatggtcaggtgatatagcaattttacccaatcctttgaccaaaccttgatttccatccccgaatgtgatagctcgttggggatcttggtttttctcatatgaagagaacatccttttctcccctgtcatgtggttagtgcacccgctgtcgagtatccaacttgagcccncggatgcataaacctacaaaaca

SEQ ID NO: 55637 - DNA, 415 bp, Zea mays
tatagcactgcagattcccaaggatgatcaatattaggtgtggtggtaagtggctaagcactagcatgattcgaacatacagcacttcgatttctacaccgatatgtgacggcggcaagtcataaagaagagcataaactgcagggtacaaacctcatcgcagtttacttgaatgtagcgcgcaacagcttcgaatgcaaaattgtcaactgatacaaaatgtggaccagagaagtccagaattacaccgtcttctctgcagatgccaatgtgaccgataaagggcaccaaccaagtgatgaatggtattggagtccatactatgcagcaaggaaagcgggctcttcttggatcgatctgaccaagttgccttctatcattttccatctcgctgtaagttcaagcgctcgatcct

SEQ ID NO: 55638 - DNA, 462 bp, Zea mays
  unsure (1)..(462): unsure at all n locations
gctttgctttctggtcactgctggataatattagtgcatgctctatgatacttctatcaaccccacataagtcattgctaaccagacaaagacatgcttattatgaaacatgaatcttttgaggtctgattcttgcttcgaagacagctgtgagccaaagaaaaccctttgatcagccacatcttcgcagagcagaattggcttcggttgatctaccgaagatgctttttctttgatttgcttctgtgatgtttgagcttgcgcttcgccttcatcaatattgtagacgatgttgggatcttataaggtcccttctgcccttcttgtggccttntgacttccatacactcatgactccttgatttctttgtatcttcatgcagagataagctgaatgcaaaactgcttcgaagatattgagtgttcctcnttcaataattgcattgtatgggaactccatgt

SEQ ID NO: 55639 - DNA, 443 bp, Zea mays
  unsure (1)..(443): unsure at all n locations
acctataacactcagcttgcagttcctgacattgtggttgcgagttttcagcttctgcagcatcatctgctttggcacccgcagcagtcactattttggtcgatgaagctgaaggtggtgttcactcgatggcttgcatcacgttgactattcttcgtttcttttgcccttcaaccttctcctttgcagccgaaggttgttctttcttctgtaaaattttcgtgagttctggtcccagaggacatagcaacttgatgggtagggagtcagtcattacctttaaactttctgccacttcggcagcagagggtgttgaaggagcttcttctgtctcatccaccttcggctcagcagagggtgttgtatcaagccttcgctttctagaggatgtcgctttcggctcacgagctgttntcgctctcttcaacattttctcatcttct

SEQ ID NO: 55640 - DNA, 476 bp, Zea mays
  unsure (1)..(476): unsure at all n locations
tgcaagcttgtgaaaantcttcatcccaacatgggctatgtggcgatgccagagccaacccatgtgaggcttagcaattaagcaagtatcgagtttagctttattaaaatcaactaagtatagctgaccctctaatactcccttaaatgctactgaatcatcacttcttctaaagacactaacacttgtatccgtaaaaagatagatgtagcccatttcacataattgagaaactaaaagcaaattgtaatctaaagaatctacaagaaaaaacattgacaatggaatggtcaggtgatatagcaagtttactaagtcctttgaccaaaccttgatttccatccccaaatgtaatagctctttgaggatcttcgtttttctcataagaggagaacatccttttctcccctgtcatgtggttagagcatccgctgcctattatccaacttgagcgcccggatgcataaacctacaaa

SEQ ID NO: 55641 - DNA, 413 bp, Zea mays
  unsure (1)..(413): unsure at all n locations
tgggaaggttcttcatccccacatgtgctaagcggcgattctacagttcttccatgctagtcttagcgattaagcatgtatttagaccggcctcctcttttgcaaaatcaactaaataaaggttgccgtctagtacacccttaaaagctagtgaaccatcacatcttttaaagacagacacatctacatttgtaaatagacaattatatcccattttgcataattgactaacagataacaaattatatccaagcgactcaactaaaaacacattagaaatagagtgctcagatgaaatagcaattttacctaacccttttaccttgccttggntcccatcaccgaatataattgaatcatggggatcctcatttttgacgtacgaggtgaacatcttcttcttccctgcatat

SEQ ID NO: 55642 - DNA, 442 bp, Zea mays
  unsure (1)..(442): unsure at all n locations
agcttcgggaaaccaacactctntgacagagtgctgataaccttcgctccagctcgatgtcggatgcattctaagctttcttcgttaattccgccgaagagcaacgctcctggctggtagccacaggatatagcatactcctgcagctcctctctttcagtcttagataattcttgaccaattatattttgaaaattgaagcctttntcctccaaagtatcttcggcgactgccttccctttttcaggcactgtggccacagtttccttggcagctgcagcggcttcttctgcggccatatccaagagtattctatcaatatcagataatatgctctccagattcaaggctttggccgttgtagctttggcagttgtagcttcggtgggagcagcttcggtagctacaaaacctttggcagctggtgttattttgacgctga

SEQ ID NO: 55643 - DNA, 418 bp, Zea mays
  unsure (1)..(418): unsure at all n locations
gctttttcggcggatgaccaaggtgatgcttgtcgaagatgttcatttctcatgaaatggaagngagttcaccggaggtgggcgccaatgttggggacttgttctcacatgctatgaattaagaacaaggccacataaaatgttaaatatcaaagcccttcgtccttcgaagcattatttccctttggatataatggattccggacgaaggttatgaaggtcacaccttcataatcataataaaagataagagagatctacacataaaacaccgacaataacatgattactttgaacattattattaatttatgtctatttattttacttatataaacaccaacaattacaaatgtaccttcggcttgaaggaaagtaagggcacaagcgtgatgctaatgccaagtcagcgtgaaca

SEQ ID NO: 55644 - DNA, 426 bp, Zea mays
agcttattttcgagtcaggcccggtcttatttctcagcccgagcgccatgggcgaacccctcattatcggcccagacgcaaggccaaacagccatgccgcccgtcagcttgcgcctccgtgccgatttacctccgttccgccatgcccttcacccaagacatacatattaccttcggcgtctttccacacgcttggacttatcttatttccggggccatgccccgaacctcggatttccgcccctgcgccatgggcgaacccctcgttttcggcccaaacgcaaggccgaacagccatgccgccccgtcgccatcctgcccttcacccaaagcatacgtcgcatctgcggcggccttgcacacgcttggacttggcttgtattaggtcgtacacgaacccacagcgagcttcagcacactgcgctt

SEQ ID NO: 55645 - DNA, 142 bp, Zea mays
aaataagcttaatttacgcatgtggaaagacaccgaacatacagtgtatgtctttggtgaacggcacagtggaacggacggaataccacatggatgcacccggcgacgggcggtatggctgttctgccttgcgtttgggctg

SEQ ID NO: 55646 - DNA, 448 bp, Zea mays
  unsure (1)..(448): unsure at all n locations
agcttagaagtggtctttcttctatgtcgatatatgacctcgcagacagccttgcgtacaatagtctaaaggtacaaaagttatggacttataagcatattactttctgtgtctcttattattgagctgatccgttgtctccccctcttcttttgtacggcttaattctgagcaacgctttgagagcacagaatgatgttgaggatgaaagctaccagatagcacttggtaaccttcggtcagaggttatcaaattgaggaatgaagctacagagaaggataaaattcagtattccttagtagacagagtcaaggctaggtaaagccaatcttgccgcgcagtccgaagctcatagagccgaaattgataacttanagaaaaaacttgccgagaagaatgaagaatttgaagtggctaaagcanaacagaaaataagcgagtggacta

SEQ ID NO: 55647 - DNA, 332 bp, Zea mays
  unsure (1)..(332): unsure at all n locations
ctcagcttcgtccggctgcacccttatgcgactggtgcacggatagtctttacgaaagacttcgatttttcgcacttgttgtgctaatccagctgtacccttgggcgagttgtgcgccgatagtcttcgaggaagacttcgatatttcgcacttgttgtgctagttcggctgcacccttnagcgacttctgcacggatagtctccgcggaagaattcgaattttcgcacttgttgtgctagtacggctgcacccttaggcgacttctgcacagatagtctttgcggaagacttncgattttcgcacttgttgtgctaatccggctgcaccct

SEQ ID NO: 55648 - DNA, 418 bp, Zea mays
  unsure (1)..(418): unsure at all n locations
agcttgtgaaagttcttcatccncacatgtgtttagcggcgatgccacatctagcccatgctagtcttagcaattaagcatgcatctagaccagcctcctcttttgcaaaatcaactaagtaaagtttgttgtctaatacaccctagaaagctagtgaaccatcacttcttctaaagacagacacatctacatttgtgaatagacaattatatcctatattgcataattgactaacagataacaaattatatccaagagactcaactaaaaacacattagatatagagtgctcggatgaaatagcaattttacctaacccttttaccttgccttgattcccatcactgaatattattgaatcttgggaatccttgtttttgacgtaagaggtgaacatcttcttctcccccgtcatat

SEQ ID NO: 55649 - DNA, 456 bp, Zea mays
  unsure (1)..(456): unsure at all n locations
ttgcgatnttctcaaccaagtcgatctgagggatggaattttctgctcatgttcttacgctatctccaaatatgaaatactcaccaaaagccacttataaacgtttctttgttggctcagtctactttacaccttataagaagatttggtgtgtctgagctcctgctaagtatacaattttcatgtggatcggctgcacacaatagatgttggacggcagactggcatgtcaaggcctcccacatcatgaaagatgtgttctatgtgaccaacggaaagagaatattaaccatttacttctctcttgcgtcttcgcaagagatctttggttcaagactttcacgctatatggtctgcacccctggcccctaaacctacaaacaattnctggttttgttgctgggcacaagctgaacaaagaatatcggtgctgactacaaaatgatccccatcatt

SEQ ID NO: 55650 - DNA, 442 bp, Zea mays
  unsure (1)..(442): unsure at all n locations
agcttcnactgcttgcccatgacctaagcctgtgccgcctacaccctcacatcccgcgcgctcctctatcgcgccgtcaccgaccacccccaaatcctgcttccccaccgctcgcttccgttgggatcgtccgttctcccagaccgcgtgggcgcttcttcttcggaatctccgtgggccgagtggcgctgggctaaggattccggcccatggcgtggcggcgcgtcctcacccaggtgagagttctgcctgaccttttcttcgttaccgcgctttatagttgtattgagatacggaggtggcctcaaatcttcgatcttgtgtgtctgggcgggattgctagctgcgttgttaggctctgcgcatacgaacaacgtctgcagatgtctgttcgtatacatggctatcttgagagctgtctgcgaagatgtctcttgtgatg

SEQ ID NO: 55651 - DNA, 447 bp, Zea mays
tatgaagaattttcatcccaacatgggctagtctgcggtttcatatccaacccatgttagtcctagcaattaagcatgtgtcgagttcagctctatcaaaatctactatatacaactgaccctctaacacacccttaaatgctattgaatcatcatttcttctaaagacagtgacacctacatcagtaaagagacagctgtagcctattttgcataattgagatacagaaagcaaattgtaatctaatgaatctacaagaaaaacattggaaatagaatggtcaggagatctagcaattttacccaatcctttgaccaaaccttggtttccatccccgaatgtgatagctcgttggggatcttgatttttctcatacgaggagaacatcttcttatcccctgtcatatggtttgtgcacccgctgtcgagtatcctacttgagcccc

SEQ ID NO: 55652 - DNA, 335 bp, Zea mays
ttaagtcacctgcggctgcaagctagaaatcacctgctcctatgtttctgaaattccaggaaactccggagaaatctcgtctgtggttcgctaccaaagttctgctcaagctgcacctgacgattgtggcctgctaagccatttttgcatgacagtggctcacaagatattttctaacaaagtacatttggagctggaaagcgtggtatgactactcgacatttgtcaattagtataatcttatattagtagattggcattgtgaattcctttcactaatgcaaggtagtaagggtccttatctccatctgcgttcctttctacatgggattctc

SEQ ID NO: 55653 - DNA, 370 bp, Zea mays
  unsure (1)..(370): unsure at all n locations
ttacgtgacctataaaactcagcttttgatggctgcttctgcttcagctatctgcatattctcccatacagnncattttgcttcctctccctcaatcctttatacaaaaaagcaagtacatccaattgatctataagaaaacaaagctgaactacatgggatctgagcaacttttacgacgggaagttaaacaaatcaaatcaagcactgacgtagagatctagctaacctgcggtacaaatttaattagtatggacatgaaaacagaaggggcagcctagttggacaggttttatgaacctctgcatctccacatgatcaatatctcctgaaaaggaaaagaactcttaatgtcttgcacagttgcact

SEQ ID NO: 55654 - DNA, 396 bp, Zea mays
  unsure (1)..(396): unsure at all n locations
agcttgtggacgccgggcgtatgctatgttgttccctccactaangtctgccgtccgacgcgcgtaccgtgcatcttatccgtcaagaattgtgtatgattgccgaccgacatcatatcagatccctacttgcacatacagccatatctatctcaccctgagtactctagcgcgatcctgcaccgcatatatagatcaagtcgggctagatcgatcgatatgaacagcgcccagtggattaatctctcccatgaataagactcctgagagactagacgagttctgcgagccgactctcccagacgtctacgcatgggacttgcacgataatgcacccaacgcctcctgcggcccgcttaatatcttgttgagatgtctaggcttcactcacactga

SEQ ID NO: 55655 - DNA, 194 bp, Zea mays
ggcgtctcctactattcagcgtgcttctaccagattcaagtttttcattgttcaaatcatgttcatttatctgaccctttaattgtgccttgagagcttctggatcatcattttttcctaagagagcatgacctatatccgcattaagaccgtctgcatctcatgcagcataaaaggagctcgacagcagatgt

SEQ ID NO: 55656 - DNA, 407 bp, Zea mays
agcttctagatatgtcgaggtgacaaatgatgagggtgaattggtagttacgaaggtcgcagctaagcaacttcgtcggttgcctatcattcctcggctttcaaggctgttcctcaacaaggaaatagctctgcatatgacgtggccaaagaatggtgtacgtctcgtcactgatccagacataatggtccatccgtcggacggtgatgcgtggaaggcatttgacgagtttgatcccgaatttgcaaacgaccctatgagtgtacggcttggtctatcgacggacggattcacacctttcaataccagtgcaagcccttactcgtgttggcctgtcttcattgagccatataatcttcctcctgagttggtcaataaagaagagttcatgttccttgcactagtca

SEQ ID NO: 55657 - DNA, 449 bp, Zea mays
  unsure (1)..(449): unsure at all n locations
tcttttcctaatgtagngaatagagaagagctttgttcatgcccatttttaggggagttgctaaaaaattgggacattctattgaagatttcacttatgcctgtgttggttcctacagattgataagaattcaaaagcaatctaataataaaatgggaagcactctctagatattggatttagttcataggattcaaataagcctttaaccaattatgaaaaaggttacgaagttgattctctcatcttgtatagtgatgaagtttattatcttcattgactttttaaatatagtggtttatatttagttgcaaatggatatatgtatgatccatttttttctaagaatattttgaagacttgaagcatttaactatggaaaaagcttagcaacttcatactttcactcttgtatggtacaaagttttcttgatcttttaggaaatttg

SEQ ID NO: 55658 - DNA, 440 bp, Zea mays
  unsure (1)..(440): unsure at all n locations
agcttctaaagggagagcacattttaagattatcatatgttcattttgagaaagaacaggattgtagcgcatgccaagcagggaagcaagttggtgctcatcatccacacaagaacatcatgacgaccgataggccactgagctcctacacatggatctattcgacccgattgcttacataagcatcggcgggagtaagtacagtctagttattgtggatgattattctcgcttcacttgggtattctttntaaaggaaaaatctcatacccaagagaccttaaagggattcttgagacgggctcaaaacgagttcggcttaaggatcaagaaaattagaagcgacaacgggacggagttcaagaactctcaaattgaaagcttccttgaagaaganggcatcaagcatgggttttctttctcctacacgcctcaacaaa

SEQ ID NO: 55659 - DNA, 456 bp, Zea mays
  unsure (1)..(456): unsure at all n locations
tggttactaagatgttagtgcaatagaacccagtggctatatagtgagctcttgccaatcacaataatcacagagaaagacaacacatgaaacacagtggtttatcccgtggttcggccaagtataacacttgcctacatccacgttgtggcgtccaatggacgagaggttgcctcaacccctttcaagtgatccgatgatcaacttgaataccacggcattcttccttatagctttcttcccatttgcgacgaatctccacaaggtggagcctctcgcccttacaagactgatcataaagaaagcacagagtaaggttgggaagagcaacacacattataattaaatccacaccgccnacacgcacaccagtgagaagacgagcacacaaaacacgcgcggtgagttngcaactcgaaaagtgctccaatctcaagaacgatgaacaattgcgtg

SEQ ID NO: 55660 - DNA, 457 bp, Zea mays
agcttcttcaccatgtgatcacagttatctttaattgttgggcaatgcatttcccttttagttgagtcaagctcttctttaacctctcattttcttctttgagctttagatatgaatcatcatttgctcctgcaaattctagctcaaaagaagatttgcttgttgacaaacaacacgcattagcacatggtaatatagtattaatttgaatacatgtgcacgagtgaggttgttgggattctaagttctctatcacaacctcatgagcaatgtttaatatgatatgattatccataagatgttcatgagaatataaaagcatatcatatttatcttgaaaagctagatgttcaactgttagctcttctactcggtccttgagcaaggtattcctatttactaattgagagatacaatgagaagcgtctgcttgctcaattgaaatagtctcatacct

SEQ ID NO: 55661 - DNA, 435 bp, Zea mays
  unsure (1)..(435): unsure at all n locations
actcagcttgcaacaccatttgacactttacatanaatctgtgagatttagaatatttagctcattcctcaacatgcaaaagcgggtcttatcaagtggcttagtgaaaatatccgctaattgatcttacgacctcactccttctaaaatgatatctnctttagcaacatgatctctaaggaagtgatgacggatatcaatgtgcttggtgcgagagtggtgtacatgattattaacaattgtaacagcactctcattatcacacaacaaaggtaccttttctagaactacgccatagtctagaagagattgtttcatatataaaatctgtgtgcaacaagcacctgcggcaatgtattccgcttcggcagttgacaaggcaacactatcttgctttttggatgtccatgagactagcgatctaccaagcagatg

SEQ ID NO: 55662 - DNA, 429 bp, Zea mays
  unsure (1)..(429): unsure at all n locations
agctntnaaagacatgagagatccanagatattatcttcttccattaattcacatggagatgccgtctagagataagtcgataaatcgacgtcattgatccttagagaaagagtatgagaaggatcagaaatgagagattcaggcagatcgacatccaatacttgagaacgggttataacagatacccagataatgaggcaaaatggatgaagggtctagagatttggatgataaagccacaacatgattcacaaggaaacagagtactagatccaggtgaaaagagaggtaggcaaacaggattggctaagatgatcaatagaaatgttatgaagtttcgggacaagatctatggaaagaacatggccttgatagggtttgcgcaactagacaccaaacaacaattttnttgacataacacgtgcaca

SEQ ID NO: 55663 - DNA, 328 bp, Zea mays
tctaccttaccggacctcggtcttccgtcggcgcgcgcggaccgagctatctagtgagtctccgcccaattcctcgcgctcatatcttctctggcatctcgcggacctccctgacccatctgattgaactatctcgccgtgaccagtgcggtctcctcgccgccgacgagcatccccgcctgcgtgcgcggaccgaccgactccggccatctacgacggcgctccgcacaccgttgtgatccccgcgacctcaccttcgtcctcgaccacttcaccggagcaatctcaccgcccggaagcccctccggccttttctccgccgcggcta

SEQ ID NO: 55664 - DNA, 456 bp, Zea mays
atggacgtaaaaagtgccttccttaatggaccaatcaaggaagaggtctatgttgagcaacctcccggctttgaagatagtgagtaccctaaccatgtttatgaactctcaaaggcgctttatgggctcaagcaagccccaagagcatggtatgaatgcctgcgatatttccttatcactaatgacttcaaagtcaaaaaagccgatcctactctctttactaaaactattgcaaaagatttgtttgtatgccaaatctatgttgatgatatcatatttgggtctactaacaaatctacgtgtgaagagtttagtaggatcatgattcacaaattcgagatgtcaatgatgggggagttgaagtatttcctaggatttcaagtcaagcaaccccaagatggcacctttatcagccaaacaaattacattcaagacatacttaacaagtttggaatg

SEQ ID NO: 55665 - DNA, 406 bp, Zea mays
  unsure (1)..(406): unsure at all n locations
tgcaccgatattgatgaggacatcacttctatacatacaatgaatggaccgataacacgatcgcgtgcacgacagctaattctccaggtacgttctaccctagtcaattgtgtttcagagcttacgcttggggccatggatgttttgatgattaagaaccttggagaggaccagcaaggacttgngaaaggcctatgtgctgagaaagagcagcaagggcgcccacaacaggaaggagatcaagtccgactcggctgcgactccatctcgggttccaggaccagtctgcactaaaatggacgcccaagatgcatccagactccgattgcgacggacttgatatgtgtggaaagataaagagattatctaaccaactcaactggttccaccataaacttcatccgga

SEQ ID NO: 55666 - DNA, 444 bp, Zea mays
  unsure (1)..(444): unsure at all n locations
gtagaaaaatntanacaattcgaagataaagtttgtcagatcagattgtggggagagtactacgagcgccataataagtatggacaggtcccacggtcttttgcgaggttcctaaatgataatgccattgttgcccagtatttgacacctggtgaaccccaatagaatagggtagccgaaaggcgaaacaaacgataatgaacatggtaaggagtattcttagttactttagcttaccattgggtttgtgaatggaggctttaaaacctttatccacatacttaacagagtccctagtaaatcaatggctaaaacttcatatgagttgtggactggcagaaagcccacgctcaactactttcacatatgggttgtccgcgcaaagctagaatatttaatctcgacagggaaagctagatgacaggaccactagcttgcatttta

SEQ ID NO: 55667 - DNA, 433 bp, Zea mays
agcttggtgccgatggagaagcagaagtctttgaaatcttggttgtcgaactgcttgccgttgtcgaccgtgagttcggatggtactccgaagcggcaaacaatattttgccagaagaatttctgggccgtcttcgatgtgatggtggatactgccctcgcttcaatccatttggtgaagtattcaacggctacaaaggtgaacttgaggttcccctgagccgtgggcaggggcccgacaatgtctaggccccagcgctgaaggggccacgtgtgggcgatcagcttcgtgaacagcgaggggcatcccgagcgtggggaaaatttctgacaggcctcgcaggatctgacaacccgatttccggcgcagatgatggcgggccagtagaaaccttggcgtatcacctttgccgctagggccctatggcctgcgt

SEQ ID NO: 55668 - DNA, 448 bp, Zea mays
  unsure (1)..(448): unsure at all n locations
ntgacagctagtcgagcggcttctagctccttcacgactagcttcttggaagcacgtagatccctgatggtggaatccttggtcgataacagttgtccaagccacagaacctcatcttgggctacttgcagttcatgacgatgatgatccaggtctgacatagtgaagcggtggctcctctccaatatagtcatggagttactagcatcacagtataacctgtccagattgtcacgagaggccgcgagtgctcatttctcctcctacaaacaagaagcaacattcagcacccaatcaacaataagcatggcaaagtcaaccaagggagtttacatcatgtgccatcctttcagagtcaagctgggcattgagggaggaattcanagaacgtgcgccatccaaagaagcagaggtctgggccaagtcggcttgactttgagaatatttc

SEQ ID NO: 55669 - DNA, 467 bp, Zea mays
  unsure (1)..(467): unsure at all n locations
agcttatgaagattcttcatcccaacatgtgctagtcggcggagccagagccaacccatgttagtcttagcaattaagcaagtgtcgagtttagctctattaaaatcaactaagtatagctgaccctctaacactcccttaaatgctactgaatcatcactacttcaaaagtaacacctatatccgtaaaaagacagttgtagcccattntacataattgagaaactgaaagcaaattgtaatctaaggaatctacaagaaaaacattggaaatagaatggtcaggtgatgtatcaattttacccaatcctttgaccaaaccttgatttccatccccgaatgtgatagctcgttggggatccttggttttctcataagaagagaacatcttcttctcatctgtcatgtgagttgtgcacccgctatcgatgatccaacttgagcctcttgatgcataagacctacaa

SEQ ID NO: 55670 - DNA, 420 bp, Zea mays
tattaagtcaggcttttgtggcgtctgcaatggtcacatacagatcaagcacgaacagactgaggggaggtgttcgactgagcatgttgcttcactagttctcacttttctccacggatttttcttgattcaccatcaccatcaacaacattgaagatcacctctaggttacagctgttgttatgcacttacaaggtaatgtagctaaatggtggcagacacacaagccatcaacagtggaaaggagttctgttaggtcattcagctcaagttttggctcatacgagacttcagaactgctataactgaactgttatccctcaaacaaactgacacagtgaaggagtagaattctgcctttcaatcctcgcagtttgacattacaatgcacaatagcaactatgaggaaatcacagctag

SEQ ID NO: 55671 - DNA, 479 bp, Zea mays
ggatccttaagtcacctgcggcatgcaagcttgaatagatagctgtggaaaagactctattaattcttgtaataactattgtaaagaatattgtaactttagaattagattttactctgcaaactttgtccataccttgtaatatatttttacctttccatcaacgtatgaagtgcttcgatgtgaacaacacttgtacgtgcattgatttgctttgctgtggacgaaactagcattttttgagccgaaggcgaaaaacaccttcccttcttttcgtacacaacgaagcataaaactgcttctttttctcttttttgccgaagccttatttttagagccgaagcatctgcctgtgtctgtacgttatgatgatgatgatcctatgtatgtctaaatgaatgtttatgaatgcaaatgtatgatgtaatgtgtcgtgcaaatgaatgtccaaacacacatacgaagccacaaccatagcc

SEQ ID NO: 55672 - DNA, 450 bp, Zea mays
  unsure (1)..(450): unsure at all n locations
taatatgataattacagcccttgagtgaagtntgaaatgtcttggacatcgcttgatccccaaacccaaaaccctaactttctaaggtaatgctttccttatcctaatggagtactgactcagaaaaccctagttacacaggtgtaccatgaaggaaagctgtattcaagatacaacttgatgtatctcccttataactacatattcatagcatcacatgagcattcatgtatatgtatggttgcgcatagaaaacaaagaagtaattgtcgaagaagaagaaactgcaccacaaactgagactccacctgctacgaatagtttttattctgatatctgtggaacagatctcaaatcccctacaacacaaggcaagccccagagcatttactcattccttgctgtttagactctntatcacttgaaatgatgccatacgtgatatgagtt

SEQ ID NO: 55673 - DNA, 410 bp, Zea mays
agcttatgaagattcttcattccaacatgggctagtcggcggagccagagccaacccatgttagtcttagctattaagcaagtgtcgagttcagctctatcaaaatccaccaagtatagctgaccctctaacactcccttaaaagctattgaatcatcacttcttctaaagacagtgacacctacatcagtgaatagacagttgtagcccatttgacataattgagatacggaaagcaaattgtaatctaaagaatctacaagaaaaacattggaaatggaatggtcaggagatatagctattttacccaaacctttgaccaaaccttggtttccatccccgaaagtgatagctcgttggggatcttggtttttctcgtaagaggagaacatcttcttctcccctgtcat

SEQ ID NO: 55674 - DNA, 439 bp, Zea mays
  unsure (1)..(439): unsure at all n locations
tgcattgcatgtntaaattccttgtattgcatctangacttgtctaacctagctgagataaccgccaacaaagcgagtgaaaaagcttaactcgggtcaaacctgacaagtcttagttttaagcttttagcacttaaattcctactttctatgcaattattggttcttgaaatatgcatgaggtactgcacttanggggagtattcaaaactcacatcactcataaaaaccccttagtgcanaccaaaatgcaaatttcaccatttgcctattttctctaaaaattatctagcctctggcgaaatattttataaagtatatgagggtgccaatacctgtcccaacaagtgttattttgtgtgattataagttgggatttggtttggttgggagctagatagaacaattcanatctttccaaactcttctctgtctgggc

SEQ ID NO: 55675 - DNA, 457 bp, Zea mays
agcttcgttgcgccaacagcagtgcactggatgaagctacttataggcggcgccgagatctgaacatgcatggcattgcctgccgccgtgtagtcctcctgcaatggcatttctttggggggcgatggatggatagacgcttccagctcatacattttgttaggcggaactttgactcatggcggcgagtcgtatggcataacgaaccatctcttcctcgtgatcatttccgatcatcctcatcagcgtatgtatttggtccaaaatggacggaagtgacgacgacgtgttatccgatcagcacagttttgtggcttgacgcgcagctggtagaagcatcggttgattgatcctagccttattcaccatttcatgcgtgcgattcacaatgaggtaaaacaatggaatatagtgtgatgtacagtgtatagtaataatcttcccctctcgatctaat

SEQ ID NO: 55676 - DNA, 395 bp, Zea mays
  unsure (1)..(395): unsure at all n locations
tncacaacaatccaacacacaatggagtacggtgttacgctccggcagctcgaaccactctaaaccctcgcgtgctcttgtgttcatccctccatctgggataacaggcaaaacgcttatgcccctcctcatcttacgatttatggcgggtgcactccgccacccggccggagatttcctctccgacactatctttagaagaagtgatgattcagtagcatttaagggagtgttagagggtcagctatacttagttgattttaatagagctgaacttgacacttgcttaattgctaagattaatatgggctggctctggcatcgccgactagcccatgttggaatgaagaatcttcataaacttctaaagggagaacacattntgggactaacaa

SEQ ID NO: 55677 - DNA, 418 bp, Zea mays
agcttgtgaaaggtcttcatcctcacatgtgctaagcggcgatgccacagccagcccatgctagtcttagctattaagcatgcatctagaccggcctcttcttttgcaaaatcaactaaataaagtttgccgtctaatacacccttaaaagctaatgaaccatcgcttcttctaaagacagacacatctacatttgtaaatagacagttatatcccatatgacataattgactaacagatagcaaattatatccaagactctctactaaatatacattagagatagaatgctcattagaaattgcaattttacctaacccttttaccttgccttgattcccatcaccgaatataattgaatcttgggaatccttattcttgacgtaagaagtgaacatcttcttctcccccgtcatat

SEQ ID NO: 55678 - DNA, 438 bp, Zea mays
tctaaagggagaacacgtgataagtttgactaacgtgctattcacaaaagatagaccttgtgcagctcgtcaagcaggtaaacaagttggaggagcacatcacagcaagaatgtgatgaccacatcaagacccttggagctactacatatggacctcttcggacccgtcgcctatctaagcataggaggaagtaagtatggtctacttattgttgatgacttttcccgcttcacttgggtgttctttttgcaggataagtctgaaacccaagggaccctcaagcgcttcctaaggagagctcaaaatgagtttgagctcaacgtaaagaagataaggagcgacaacgggtccgagttcaagaaccttcacgtggaggagtttctcgaggacgaatggatcaagcacgagttcttcgcttcctacacaccacaacaaat

SEQ ID NO: 55679 - DNA, 445 bp, Zea mays
  unsure (1)..(445): unsure at all n locations
agctagccagtacttgtcaaagcaacaacatctaccagcacagcaactgcagaccatactagtaacttggtcgttcgcatgctggggactggatatgattgggcctttcaagaaagctcaaggaggatacactcatgtactggtagcaatcgacaaattcactaaatggatagaattcaaacccattgcttctttaacctcatccaaggccgtggaattcatataggacataatattcagattcggaataccgaacagtatcataactgacctaggatccaacttcacaagttcagagttcttcgatttctgcgaacaaaagagcattcagatcaagtatgcttcggtagcacatccaagagccaacgggcaggtagaacgagctaacgggatgatattggaggcactcagganaaaggtcttcgataaaaacgaaaagttcgcg

SEQ ID NO: 55680 - DNA, 321 bp, Zea mays
gtgctgagatgaagctgtgcgaagaggaaagctccttgaggagaagactgctggatttattgaatcaatagccaagaccaataccaaaaagaatactaaggagattctagaacgcttatctgaagatactgatgacagcgacagttaccatgccgaaagtggaggcgaagactctgaagatcggccctatcgaccaagtcatgcagtcttcgggaaatcgactatcagacagagtcatcttgataatatgagatgaaggattttcaaatatgtctattggagggctgaaacggagatagactgttctgttccgaaaaaatg

SEQ ID NO: 55681 - DNA, 472 bp, Zea mays
  unsure (1)..(472): unsure at all n locations
agcttgtggcgtcctcgggcgtcctgccgtatcttaagtaccaagtctcccacctagaaatctccggaccaaacccctcgggcgtggtagcgtcatagagactgctgataccgcgccgagtgtagtaaggccacatcccgagcttcttcgagctggtcctgtgagtcttctcggctagtctggttgcttcggtcgtcgtacgcctttgtcctcggggaaccatattctaagtctgtgggtaagatagcttcggccccatagactagaacgaacggtgagaaacccgtggctcggctcggcgtcatccttagactccagaccaccgagggtagctccttcatccaccgcttgccaaacttgttgaggtcgttgtagatcctcggtttaagtccctgcanaatcataccattggcacactccacctgcccattcgtcatggggtgagctacggcggcccagtccacacggatgt

SEQ ID NO: 55682 - DNA, 430 bp, Zea mays
  unsure (1)..(430): unsure at all n locations
ntanaacaagngatcaacagaacaatgaacacgatgcgttctaaattcataagctcggaacatggagatacatgatctcattagcaacactttagaaccaatattcagaattgttcaatggcagtgttgcgatgaaagcacgcaacttgtcataccactaccatatagcctcgaagcaagtactatcatgatttatcactcatcaacacattttagttacatagcttaccaaaatcagaactatcaaacaatagctgataaccaaattttcagttaattatttttagcttggaacgggtattttaaggttgaatacgttctcatggaactgttgtgtcatcgacatactctctatcctgtgtttctttcagttctttagttctgtacacaaattttaccccctaaagacacagacagtcagtgcttatat

SEQ ID NO: 55683 - DNA, 468 bp, Zea mays
agcttgaaccgagggcccgcgtcaccggagaatccatatcgcgctcaccggagttcaagaactcgccggcgcacgtggaccgggtaaaccccttcaccatttcccgattcgttgcgcgcatggcctctgtgtcatcccgtgaagctcctcgtgcccattaattgaactctcccgccgtggtttggccggagcaagcgccgccgtcgatccccgccgcctgtgttcgtggccaggggagctccgaccacctctgacgccgacccgcacatcgacgtgaccgtcgcgacctcctgaacatctccgaccacctcgccggacctccctcgccgccggtaagccacgccacccttttctttcccgcggctactgtttcagttaagggaaggactgcaggtgagagggagagaaatccagggggttaagtgaaaagtcagagactcaagtgaatagtggcgtaagggtagatct

SEQ ID NO: 55684 - DNA, 438 bp, Zea mays
  unsure (1)..(438): unsure at all n locations
aactaagcttcatacccanactccacaaacagaagtaacgtttagttgacaagcaagcctatttgcaatggagcctagagcctatatgcaatggagcaaacaacagtaaaacatttggaaataaaaataagaatcctctctctggtacttaggacttaccatattgatccttcaacatcttcttatgataatcgntaaggtacactgtttgatcataaataggatatttaacctgcatcaaaagtatagcaacatgaaacacctttgagaatttatttaagactaatttgacatatggaagaaatgagtcattacagaagacactgcttgacatctagctgcacattcttcctgaggaacagctagatattcattaagctttggaagatcctgcctgcggaatacatcccagacagaacaccagctagggattcttct

SEQ ID NO: 55685 - DNA, 467 bp, Zea mays
agcttgtgaagattcttcatcccaacatgggcaattctgcaatgccagagccaacccatattagtcttagcaattaagcaagtgtctaattcagcttggttatcgttaaaatcaactaaatatagctgaccatctaacactcccttaaatgctattgaatcatcacttcttctaaagacagtaacacctatatcagtaaataaacagttgtagcccattttgcgtaattgagaaatagaaagcaagttgtagtctaatgaatctacaataaaaacattaaaaatggaatggtcaggagatatagctattttacccaaacctttgaccaaacattgatttccatccccgaatgaagtagctctttggggaatcttcattttctcatatgaagagaacatccttttctccccggtcatgtggtttgtgcacccgtatcgattatccaacttgatccaccggatgcataa

SEQ ID NO: 55686 - DNA, 401 bp, Zea mays
tcggaataccacgacttcatcttcttcgggagtaggcactattttctcccaatatccgccctcacaatagacatgtctcgaaaataccttcccttcatggtatcaagacgactctgcttaatgctcgacttgccgaagactgtgggacttggtcgcccccgtcgatcttccgagttttcacccccactttctacatcataactgtcactgtcaccagcatcttcagataaaccctcccaggcttccctaaggatcttctccgtattgggccttgctattgactgaagaaagccgagatgcatctcctcagaaaggctcagcttcgctcaagaacagctttcttatcttcacacatcttcgcaagcgctgaaaagtcctcccgaaccgaagcttataaattt

SEQ ID NO: 55687 - DNA, 354 bp, Zea mays
cacccaggcgcattcaacacactaggacaaggtcacaaacaccgcccaccactaccgctccacaaatgaacaaaaacatccccaccgacggttggagtaccttcatcaacatcactggcaagctgcccccagacaaacaggcccgttctatgctatactgccccaaaactggctctatagaacatatagactgcatactatatacgacaacggttaagggacaagaggatgactacatgtatgactacagtcgactacgctcaacgaaacaagcgcaacgacaacgaatcgcaactggtcgccgcatcagagccatggcaactagggccgagtatatcatgtgaaaagaaagca

SEQ ID NO: 55688 - DNA, 467 bp, Zea mays
  unsure (1)..(467): unsure at all n locations
agcttggcgaccctctatgaataaatgaaatatgtgtttatgtttgaaactctgtgcttgcctttgatttataacattgttgtgcatgcaagtagatcctcaaaatacacattgtctcgctgatgcattattatggacttatggtttagtttcagtgtaaaagccaaggcttatcttcaagtattgggcggcagctggctcatgcgccgtttgactcctttctaaaagagaattttgattgggcatttcctagttggtcgagttttgtactggctatacatatcatgtagtattatacagttntgtttgtcatgactatgatgcttgagttatggctttcattccattcatcctgcatgccgtgtcggcgaatcgagcgccgctaaagtctaaaccatagccccctctccttgatcctgccgtattgcgttgcgttgaggcatttgcttagagcatgtgcctctccc

SEQ ID NO: 55689 - DNA, 434 bp, Zea mays
ttcatgagaacatgagtacgaaggtgaattgtagtacagcttatcaccctcagactgatggacagactgaaaggacaaatcaagttttggaggatatgttgagagcttgtgcccttcaacatggaggaagttgggataaaagtctatcgtatgccgagttctcatataataatagttaccaggccagtctgaagatgtcaccttttgaagctttatatgggaggaagtgcagaactcctttgtattgggatcagactggagagagacagttctttgggcctgaactgattcaagaagcagaagaacaagtccgtgtaattcgagagaatttgagggtggctcaaaccaggcaaaagagctacgatgataatagaaggaggccactggaatttgaagagggagaatatgtgtacctcaaggtgtcaccacttcgt

SEQ ID NO: 55690 - DNA, 459 bp, Zea mays
  unsure (1)..(459): unsure at all n locations
agcttcttgtcaaaggatgtttgtttctatctatttgtgcgcactggttaatttagttcatgctgttatggttgtcttcccattgctagcagattattaatgtcgattatgttttcttatcatgatatctatttatacgctgttgcgtccccgtttatgcaattttcaaaggagatgctgtcgaaattttatatacgaatgttagaagtgtagtttagtagcattctggagtgtttgtggatcccggggtgttacagtctcacaacgtagcaaagaactactccccaaaggaagggtgactaacaaaaccaaatcaaagaacctctgcaaccagcctcgacagagcaagtactgngaccggaccccattgactgtcctacgacgaagccaactacttctctcgttcctttaattaattagctaaaggcgtcccatttcaccctcatggttgcactggta

SEQ ID NO: 55691 - DNA, 424 bp, Zea mays
tattcgtgttgacggcgaagaaaccactccgactctgatatatgatgaagcagcacttctcaaaagctttttcagagcaggattaccgcttccactgaacgagatgattggagaacgtttggctaattatgtaatctatcttcattagctgacccctaatgctatcgtttggctcagcatcttcatctgggcccttcgaagccaagggatggacccaaatgctgaagcattttactgagtgcatgagttgcactatcaaacgaaggctagagcagatgggctgcacgataattttggctgctataatttcgcgtatcacaaggatacgaaggctccggtcctcagctatcgcatcaagtggccaaccggctggaagagtgagtggttctatatcaaggttgatgagaagaagagggagaaactg

SEQ ID NO: 55692 - DNA, 455 bp, Zea mays
agcttcttctcgagctgactccacctatgtctacgctgacaccgctgcctgttgctccggctcatcgcagagcagccgagggttctttaactgagcaagagaagccttgggtggtaaggtcgaccgagccgagggactcctacgcctccgggatacggatacctcactcgtcacctcccgcacagggcaactcacacttggttaagcggttcagccagccgacagacgagtcctagcgctcggaatgaggaagaaacacagtattacactcaaatacctagatgttcaggcctcgacagccacaatgaacaaacaccgacacttaaggtgccattacaaacggaactccggttccacccgcgcgggtatgaacaacctccacatcggagggcccgtgggacgaacaactccgggtggctcgccaccaaccactgtagcagcgtcaacgacctccg

SEQ ID NO: 55693 - DNA, 427 bp, Zea mays
  unsure (1)..(427): unsure at all n locations
tctanagggagaacacattctaggattaacaaatgttcattttgagaaagacaggatttgtagcgcatgccaggcagggaagcaagttggagtccatcatccacacaagaacgtcatgacaaccgacaggccgcttgagctactccacatggatctattcggcccgattgcttacataagcatcggcgggagtaagtattgtcttcgaactgtggatgattattctcgcttcacttgcgtattctttttacaggaaaaatctcaaacccaagagactttaaaaggattcttgagacgggctcaaaatgagttcggcttacggatcaagaaaataagaagcgacaatgggaccgagctcaagaactctcacattgaaggcttccttgaggaggagggcatcaagcatgagttctcttctccctacaca

SEQ ID NO: 55694 - DNA, 419 bp, Zea mays
agcttccccgtcgtcagccctttttccggtcagtccaaccctccctctgcttcgtttaagcttctcctcgtgtctgtgatgcttactgaaccgtccaactgggctagaagtcccctgaccgtcgggaacgcatggatctttggtccatccgtgcgctctccgtggccagaccaaagtaatccaccaattgtgcaattaacttaggggaatcgttggctggggtgtgaattcggtttcgactgaagaaggacgtcagtccttgccccaatcggccggcacagacagctcgccggagctcggccgtgctccacgccgccggggaccgtgaaacgtaaaggaatagaactcgagggactttcttgcaaagtgtcagtgactctgttaaatagtgagagaacccgttcgcagttagttaaaac

SEQ ID NO: 55695 - DNA, 433 bp, Zea mays
  unsure (1)..(433): unsure at all n locations
ggattggtcctttgatcggnttcgccaatctgctatgttcctcactacattcaatgtcgcatgtggaccatgggcatactancctttaccggtgtactatggatctcttctagtgtcaacacactacttggcgagtccgttgggggaagaaggagctatcaagatccaattactagagacatgtcagatagtgatagatttaaagatggagaaatcacaccaatccctttagttctaagacatcaaccatccaatgtcgcttaaaaggcttcctaatgaatttcgtcagatgattcaagtcgcttgatgccaatctaaaggcttttttagagagttgaccttctctacatctacttggtcatactggtgcattacactactacaccccaaggaaaggtaatgaagagtaaggacctatccattatgatatatc

SEQ ID NO: 55696 - DNA, 463 bp, Zea mays
agcttctgtgacaaaaatcacagcaagttctttgatggtcatttagttgtgagtctctaaagttaaatgccaaaaaggcactttctactgccttgctatttgaaaaatgtcaaacagtagatttcatattttccctatgttcttaataacaaaacattatttatcccaaggtttggggtgttttcaccttagggttacttttctagggtttttctaagtcttccttgttttcttaaagggaaatttggatccataccattaaaagatcaccactttggatccataccattactatctcacttacatgtgggtccacatgagtcaatgacatgtggggtccatggtatatatctaaagtttggatcttttaatggtatacatccaattattcctttcttaaaaaaaaagtatcccaattattttgtactaaaccagagcataatagattgttctagcgaactat

SEQ ID NO: 55697 - DNA, 412 bp, Zea mays
  unsure (1)..(412): unsure at all n locations
tnctggaagcgcgcagctccttgatgacagaatctttggtacacagtagcttaccaatttgggacacttcagtctgggacgccctcagttcatcacgatgatggtccaagtccgacatggtgaggcggtgactcctctctataatagccaaggaagtgttggcatcacgatatagtctatctagattgtcacgagaagcaatgagtgctcgcttttccttctgcaagcaagaacaacactaagcatcgaagcaaggaaagcacaatagaagcagccaagagagtttacctcataagccatcttctctgagtcaagttgagcattcagagaagaatttaaggcgcgagcactatccaaaaaagcagaggtttggttcaagtcagcctggctctacgtatacttcatctcagta

SEQ ID NO: 55698 - DNA, 441 bp, Zea mays
agcttcttctccttatcttccctgcattcagcaacacgcctcattttctcttcgtcttcacgttgttgctcggcagcaagctcctctcgtctttttttcatcctctctttgtcctctgcatcccacttttgaagattctccagccacttcttatctttctctgatatttcggtgtcaatccactgctcaaaatcacatagcggtggaggagtctacaaaatgtgcaattattagtacgcaaaaaaacatttacaaaaacattcacaaatgtaaacatattacaagactattctcaccattaaattcatccgacgttgaacaacagttggctcaaatgcaaagttagcacacatccaatacctctgtcgataggtgtcatgatcttcagacttatcgaccttacaaggatcaccacaaatacacataggcactggaacacca

SEQ ID NO: 55699 - DNA, 490 bp, Zea mays
atccttgagtcacctgcagctgcagcttacggaaaagaaaaggaaaaattgaacagtgatgggctgaaatcaaaccaggcggcccagtccagaggggaaagcgcgcccgcgcgctggcatctttgcagaaagaccctcgggtttcaggctaactagaattatgttcttttactatttctatgtgtcgctgacggtttgcaaataaccccttcggtttctaattcttcgcgacgcgaggtccacgacggcgttgaacgcaaccgaagtccggcgagctcctggaccggtcgattggggctatgaccggcactcccgagcggctaacactcaattgaactctcctcgaatgactctcctaagttaatttctcatttggtaaactatcatgttctgtccacgtgaaccgcggatgaggaagaaaatggtatgtgttcccggcgatccctggcggtccgattcaattaaaggggtcggcgagcatcaccatcat

SEQ ID NO: 55700 - DNA, 420 bp, Zea mays
tctgcgcgtcgatccgtcctccgtccgagcaggcgctgctcccttccacgggatcatccctgggaagcgcggtcagcccctcgggcgactcgacctctcagtctgcttcgggacaccctccaacttccgaagggagaccctgacgttcgaagtggtcgggttccgaggaacctaccacgccgtgctaaggaggccatgctacgcgaagttcatggcccgtcccaactacacctacctgaagctcaagatgccgggccccaacggggtcatcaccgtcggccccacgtacaaacacgcgttcgaatgcgacgtggagtgcgtggagtacgccgaggccctcgccgagtccgaggccctcatcggcgacctggagaacctctccaaggaggtcccagacgtgaagcgccatgccagcaactt

SEQ ID NO: 55701 - DNA, 471 bp, Zea mays
  unsure (1)..(471): unsure at all n locations
agcttctaaagggagagcacattntaggactatcattagttaattctgagaaagacagggtttgtagcgcatgtcaagcaagaaagcaagttggcgcccatcatccacacgagaacataatgacaacagacatgccactggaactactccacatggatcttttcggcccgatagcttacataagcatcgacgggagtaagtactgccttgtaattgtggatgattattctctcttcacttgggtattctttttgcaggaaaaatcacaaacccaagagaccttaaagggatacttgagacgagctcaaaacgagttcggattgagaatcaagaagataagaagcgacaacgggacagagttcaaaaactctcagattgaaggcttctttgaggatgagagcatcaagcatgatttctcttctccctgcacacctcaacaaaatggtgtagtggagaggaagaatataactc

SEQ ID NO: 55702 - DNA, 438 bp, Zea mays
ttgtagcagcgaggaggctggtattgactgtcaggcatgttgtcatcctcttgggctgctggctggccatgggctctgacacccataacagtcggataagagttgccaaacagaaagccaagcacacctaatgattatttgcagaacaagcttcaggagtaaagcatgatattttttttctaaaaaagacatataatattatagtccagcctggaaaactaatacccatgtaaagacacataaggaagcttatgcttgttactgtaggattggagaaacatagccacaaatatctaatgtagaactattaataaatgctcaaaagattgcaaaaacaatacatgtgtgctgcattttcgtgaaaaaaagaatagtatcaaactgcctatatattcaaaatccttgtagattgtcatgacatattgaaaaattctgact

SEQ ID NO: 55703 - DNA, 385 bp, Zea mays
agatatctgatatatatcctgagtaagaatttcccccaacacttgggctggagaagacgtagatagaacactccttactaacatgggcacaatggtctcatacttttctggaagacatctaaggaacctatgagtgagatccacatccggtacattaaaaccaagtaccttgagttcattcactatctcatctaaccggttgaacatatcggatacacttccatcttctttcataacgaatagctcaaatttgtctttgcacacatataggttggcactcttcacaactgtagttccttcatgaatttccattagcttaatccacatctcatgagcggttgtgagattcttgatacagctgaactcattatatcaagagcatcat

SEQ ID NO: 55704 - DNA, 278 bp, Zea mays
  unsure (1)..(278): unsure at all n locations
acaacgacggccctattccatatcctgctggctatccacaacatacgattacgataattcattctatgatagtcnactctgactctcatcatgctttatgtctaacaatgaggcatctaattctacgcaatccactcatgttaagtcgcctaacagaaatctcctactacatcacatgaatctattgtttcatttaaaacttttgatgcttcatatgtcttaactaacaaatcacgcatagcatttgccaaatatgttgaggccaaacacaacggctc

SEQ ID NO: 55705 - DNA, 473 bp, Zea mays
  unsure (1)..(473): unsure at all n locations
agctngacaatgaggagatggcgctcgtcatcaatagcttccgccaaatcctcaaacaaaggagggggaaagactacaagtcccgctccaagaaggtttgctacaaatgtggtaagcccggtcattttattgctaaatgtcctatatctagtgacagtgaccgaggcaacgacaagaaggggagaagaaaggagaagaagaggtactacaagaagaagggcggcgatgcccatgtttgtcgggaatgggattccgacgagagctcaagcgactcctccgacgacgaggacgccgccaacatcgccgtcaccaaaggactcctcttccccaacgtcggccacaagtgcctcatggcaaaggacggcaaanagaaggttaaatctaaatcctccactaaatatgaatcctctagtgatgacaatgctagtgatgaggaagataattngcgttccccttttgccaaccttaacata

SEQ ID NO: 55706 - DNA, 447 bp, Zea mays
ggcacacatagctcatttgaatacctctgatcatatctcctttatatgctatgactaatgtgttttcaagtctatttcaaaccaagtcataggtatattgaaagggaattggagtcttcggcgaagacaaaggcttccactccgtaactcatgcttcgccatcactccgagcaactctctattccttggggagaaatgagcatcaaagaaaaggacttcatccttggaggagagagtaaaagctcaaaagcaaaaggaccggatttcgtctttggtataatcttaactcatttacttatgaccaaaggggaagaaattacttacgagggctctaatgattccgtttttggcgattcatgccaaaaagggggagaaatgagcccaaagcaaaggaccgcaccaccaccaccaaaattcaaaacttagtgctttccaaagtcttatcat

SEQ ID NO: 55707 - DNA, 396 bp, Zea mays
  unsure (1)..(396): unsure at all n locations
ccncttgcacacatagctcattttattatcttctatcatatcgcccttatntgccaagactaatgtgaactcaaaacgactcctcacctactcatatgtatattgaaacgaaattggagtcttcgtcgaacacaaaggcttccactccgtaactcatacttcgccaccactccgagcaactctctcttctgtgtgggagaaatgagcatcacggaaaaggacttcatccttggagaagagagtaaaagctcaaatgcaaaaagacctcagcttaggtataaccctaactcactcattcatgaccaaaggggaagaatgcacttcaagggctctaatgattccagtttcggcgattcatgccaacaagggggagaaatgagcccaaagcaatacgac

SEQ ID NO: 55708 - DNA, 445 bp, Zea mays
tgagagtgagccgaagatcataaagcgcattgtattatttattagcccacgccacaggttgaactgtgtgaagacacagccccatcaatcaagcatagcataaaagaagtcttcagctgctgataaacataaataaatctgggtgaatacactatgtattccgcaagcccacccggctcctgtatagaggaagcgacccatattgtacatgctttatatggtggagtcgaagtcactcatactttttcagagaaaggcagtactcattgatgtatgtcttttccaagacattagaaataacacttgcttgaccaccactgagctttccgctctcgtggcaccattttcttttcagaacatacacacacgtttctctgttctcggctgtagtagaaacactaattgttataccataccagactcgtcctaccagtgacactgacta

SEQ ID NO: 55709 - DNA, 404 bp, Zea mays
atgcttatgcgcgatggagaggagaactaataataagccgcctccaaataaactaaaagtgcgtgtacttgacatatcgtatttgcggtgcgcaaataaataaaatgtgctcgtctctgtaatggcgttaataatgaacgtctataacatacgaatagctagcgcttgcgtataggcgttgcggtgtcttacaatcaaacgttagtctgctaccatgtacttatatagctagagatattttcatggtattcatacatatgcatcctgcatctcatttaagaccgagaggtgaccaccgtgcaagggatgtggcgccaaccacaagatgtagtctgtggacgtactgaaagatggcggacttaaccagaggatgctgcgccagcgagtgccccgcagctgacact

SEQ ID NO: 55710 - DNA, 387 bp, Zea mays
  unsure (1)..(387): unsure at all n locations
cgcgcataagctattnatcgagcgagcgagagcaagtgacaagagagcgtaccaaatgagctcgcggcatgctcttattatacgctcggcgcggtacaaattgaaagaccccgcctgccagtgaatgttgctattctatcacagggaacgtgtttattccgaccttcggcttaaagccttcgtccatgtcgcacgctagatttattattttaacaaattaatattgcgaggggctactgttgggggccttcggcttccgaaggtcctcaaaaacatgatctaacagtgtgtctagagtataacgtgtgaacaggtatcctcggactcgtatcagagagggacaagctcataagatacgaacgttgacacagcgccgaagctgcgagc

SEQ ID NO: 55711 - DNA, 467 bp, Zea mays
  unsure (1)..(467): unsure at all n locations
agcttcgacgatggctaaggattttggcagttaaacagtgcaaatagcaatgaatgctgtgataacttcacacctactcgtctgtttatatagtactgcaggtaaggaggcgaagcgccaggatttttacaccaggcggacgcccgctcgcactcgctgcgtggtggaccgcagggaccaaacagtaactctgcaaggtggggccgctacgcgctgggaaattgaatcgtttctcgacaacgagctcagggaaggtgttttttagaccttcggcgctccgaagcttaagaaacttttttcacggatcaagctcgttacgaaaaacgatctatcaccgcgaaaggggctactgttgggtttatgcttcgtcgccgaaggtcttctaagaagaagcggctntcggttgaagctgtttgtataagatggccgaagggtcctcttcacgaagcttcggtatcgcaaaccga

SEQ ID NO: 55712 - DNA, 459 bp, Zea mays
  unsure (1)..(459): unsure at all n locations
tggtcattntattgctaactgtcccgacaatgatagtgatcatgatcaagggaacaagagggagaaaaagaagaactattagaaggccaagggcgaggctcatcttggcaaggagtgggattcaaactgctcttcgtccgactccgacaatgaaggactcgccgccaccgccttcaacaagtcatccctcttccccaacgagcgtcacacttgcctcatggcaagggagaagaaagtaagcactcataatactacgacttatgcttcttcaagtgaagatgagtctagtgatgatgatgagatagattactcatgcttattcaagggattagatagaaccaaggtagacaaaattaatgaattgatcgatgccttgaatgatacgaatatacttttagaanagcaagaggatctgctgtatgaagaacatgataaatttgtacaagctcacaaatctct

SEQ ID NO: 55713 - DNA, 466 bp, Zea mays
  unsure (1)..(466): unsure at all n locations
agctcgcagatatacttcaatagggtattctgtttcttgcccgtacaccaatncaaaaggcgtcactttggttgctccatatccagaaactctatgagcccacaatgcctcggacagtacttcatgccacctctttggtttttttgcaatcttcttctttatcaacctgatcaacactttagtgctagattcggcctgcccattagcttgtgcataatatggcgactaattcaacaacttaatctgcaaagacttggcaaattctttaaattggtgagacataaaagcaactccttgatctattgctaatgtctgcggaatgccaaatctgtacacaatatgctctaatacaaaatcaatcaactccttatatttttaaaggcacaactccagtccatntagtaaaataatcggtagccactaacacaaatcgatgcccctagaagaagatggatgaatttcacca

SEQ ID NO: 55714 - DNA, 413 bp, Zea mays
  unsure (1)..(413): unsure at all n locations
tggattatagataatctgcccctcttgatatcataatcttagcacatgtctcctacaagtattcaaaacgtgtatgtacacttttagggggaggttactctataatctaagtctttgagactaatactcgttttcaagtctattatgtgtagtactgtcactgaaggaaaatggagtccccaggagaaagacaataagcttccactacaatctacaagtacttctgcaagtggtttcattccactatcagtatncgttacatgtattctccagattttgattaaactatattacatatcttatgcatcccatgttgctataaatgcatgtgcctgtaaaatatatcttttacctatgtatacggggagctagtctaatcaatcatatcttgcccctcttttctcatgtgcttt

SEQ ID NO: 55715 - DNA, 436 bp, Zea mays
  unsure (1)..(436): unsure at all n locations
tcggctccatctatattgtggattgctcttgagtctgttcaatttccttcagcccttctagcagctttctgacttccatgaatagtaatacgtccttgatccaaatgtatcttcatgcatagatatgctggatgaacaattgcttcgaatgcgttgagtgttccacgaccaatgattgcattgtacgggtatttcatgtcaacaatatcaaacacaacctgtttagttcttgtattgtggacaaatccgaaggtcactggcatcgtgatcttgccaagtgctacaatctgccttcctccgaaaccacgaacagggtgtgtagcatcatggatcttatcctctcgctcttgcatctgtctgaagaccttagcaaatatgatatccgatgcactgcctgtatcaaccagaacattgtngactacgaaatccttgatga

SEQ ID NO: 55716 - DNA, 280 bp, Zea mays
agcttagccaccagtactagctcactcttcagctctccaatcccttgtcgagaactctggcaaagcctctttaccgcaatttcttggccatcaggcaggactccctgtgtccaagtaaagaaagtaaacatttagaaatccgattataaccttcacatatacacgggccccctaatatatacccgtggatattattttaccttataaaccataccaaacccttctttaccgagcattttgctttcagcaaagtcatctgtagcaactcgcaatgttgata

SEQ ID NO: 55717 - DNA, 424 bp, Zea mays
tgggagatgcgacgggggaaggtgtggcggcgcggtggcttgcgacgagaggcgcgcgcgcggcgagctcggccgtggcactgggcttcagcggggaggcggagaagccccgcgaggagggcaagctgatgttgagttccgcggacgaggggcccggcgacgacgacgcagttgaagagccgactccacggacggtgcaattgcgggtacgtggtgcagcccctgtcaccgtccctattcttggaagtggaacggctagcagcccctatcgccgcctttgcctagctccacggctccgcccctgttcttcccatcctttcgaatgctagctgaaggtctattgaatctgggcataggtgattatcttattagtgctattgaactaattatagaaaagggcaaattcagagaatctaatgtttct

SEQ ID NO: 55718 - DNA, 450 bp, Zea mays
  unsure (1)..(450): unsure at all n locations
agctagtcatcttgctcaaacaactatatataaactctacaacaaaagttattaagggtctgtgtcatgaaaatgtcgagaaaataccccaattgccttaaatatctaatttgaagccttataatgatactacgttgaccaaagtgaaactttgatttacattcaacatacgaggtttgatttttaataaaagttgtagaacctgtgttatacaacaaattttataattacccatagccttgattcaatccctaagtatctcaaacagtgccctcgtgacggaataaaggcacaacatatcaaaagatggcgttcatctgaccccgttgacaaggttttgagggcaatttctaaccctcatcagcaccctgacactagtaactntgagcttaattacctactaaccctttcaccaaatgtccgagcaccctcaaccaaatntgtagtgca

SEQ ID NO: 55719 - DNA, 455 bp, Zea mays
tactcagcttcgctttggtcatattttggcagcaaacaactcaatatccatgaatgctgttggaacttcacacctacccgtctgtttatatagcgtcgcacgtgggaacgtgaatagtcaaggtcttccgcaccggacaaacagccacccgcactcactgaacggtgggccacagagtccgagaaggtgaatcgccagggcgcgccgaactgctgcaagatggggtcacctcgcgctcagattattttaattgtttctccggaacgagctcatggatggtgtttttcggatcttcgacatcccgaagcctacaaatttttttcacggatcaagctcgttacgaaaaacgatctatcaccgtgaacgggctactgttgggggtatgcttcctagccgaagatcctaaagaaagaaataccttcggcagatcctcaagaaagcagtgccgaagctat

SEQ ID NO: 55720 - DNA, 437 bp, Zea mays
  unsure (1)..(437): unsure at all n locations
agctnggatcgccatcgaggatcacttcctctgcaatcaggagacccgtgccctccacctagacgccaagtttcgcgcatttgcccaaggtgacctctccgtcgccgactattgcaaacatgtttcgcgcatttgcccaaggtgacctctccgtcgccgactattgcaaacacttcaagaagatggccgccggcctcgctgaccttggcgaacacgtgactgaccgcactctggtcctcaacgtgattcgcgggctcaacgagcggtacagggacatcggggtccacctccgtcgcggtcgccccttcccttccttcgccgtcgtccgcaatgaactccttgaggaaatcaacatggtgcagactccctctgctcctccgactggcctcgttgccactggctctccttcgcctcgctagtccgcgacgaccagcagc

SEQ ID NO: 55721 - DNA, 211 bp, Zea mays
  unsure (1)..(211): unsure at all n locations
caaaagaaagcacaaagactcatcgtatgtatggcagctctgagcagatttatatccaggctgggagaaaaaggcttaccattntataagttactcaagaaggtggacaaatttcagtggacttcagaagcacaggaagctctagatgcgttgaanaagttcctgacaacaccaccagtgctgaaaccatcgcgtcgagccacgccgactc

SEQ ID NO: 55722 - DNA, 368 bp, Zea mays
  unsure (1)..(368): unsure at all n locations
agcttgatatatagaaaataatggcnntccttgttgtttattactgcttgaggtccataatgccccagtggtgcataatatagagccacatctcttcacaaatagaattatgtatcatgaaagtcgtgactcaaagtagttggctttagggttatttcaacaagtaaaaccattattgagcttaaccttaaaacctatgttttgttttatatgtttttataagaatcatgctaagatatatcatcatgaaatggaggagaagttgaattatgaactaaccctgaggcagaaaataagaaagatacattaaactggctcgtaagactataagttatgttctattaagcccttatgactatgagtgacat

SEQ ID NO: 55723 - DNA, 380 bp, Zea mays
gcatgcaaactcctaaagggagaacacaaacaaggattattttatgttcattgcgagaaagacaggatcggaatcgcatgccaggcagggaagcaagttggagccatcatccacacaaaaacaaaacgacgaccgaccggccgctcgagcgaccccacatggaacgaatcggcccgatcgcttacataagcaacggcgggaggaaacatcgtcccgcaaaaagggaggagaatactcgctgcacttgggcattcttttcacaggaaaaatctcaaacccaagagaccttaaagggattctagagacgggctcaaaacgagttcggattagggaacaaaaaaataagaagcgacgacgggacggaagccaagaactcacaa

SEQ ID NO: 55724 - DNA, 380 bp, Zea mays
  unsure (1)..(380): unsure at all n locations
agcttcgtcgttgaggttgtttggnatccatcaattgaaccttcagggcaattcttcctcttggcaggagggcggcaagctcagttggtgtttagtgtgaactcactaactctattgggagcaatgctgctggcaacccaattgttgaacaatgtagcacaaatagcaatcacttcacaaatcttggttcttttttaaggaagaagtggagttaggtcaatagttattcctttgttgtaaagaagacaaaaaggcctaatcgccaaggctgatgagccatatcatattactggtttttccgcacaaacaacaaatctatacggcatccgaagagtcgaagacacctgtgccaaatgtcttatctgaattaagttgttggc

SEQ ID NO: 55725 - DNA, 329 bp, Zea mays
agctttggatgaaacttgacactcgggtcgtctttattcgtgacggccgttaactatacctagtgtcaggagttgacactcggcaaaaacttcttgccgagtgtatactctataaaaaaatttcattctcacatttttttccttagaagttagatattttacattgactaaatatatataatattaatatcagtagcatatttatgaaaccattgacttttaaaaaaaactctgaccattcgtcattcaaaaaaataatgagttatcggagcatatataatattaatactagtagcatatttatgacaaccctcccataattatggcgc

SEQ ID NO: 55726 - DNA, 374 bp, Zea mays
  unsure (1)..(374): unsure at all n locations
gggaatcaaaagggccattcttaaatatgnatnctcaagttatttactggtcatattgacaaaagttacaaagcagagacccgaagcttgaaaagtacctagatacagtccgaaggattgaagcttcctttcaaagtttctctatcaaaaatattcctcgtggagaaaatgaatacgctgatctattggctaagtcagcagcccaggggctgcctataccttcggaagtattttttgaaacaataaaagcaccttcggtcgagcttcttgaaagagcaatccttaacatctcctctgtttatagtgaagattggagaactgagatcatctctttccttcagggtaattttctttcagacgacgaagcttataac

SEQ ID NO: 55727 - DNA, 383 bp, Zea mays
  unsure (1)..(383): unsure at all n locations
agcttctaaagggagagcacgtgataggttttactaacgtgcaattcgaaaaagatagaccttgtgcagcnttgtcaagcaggtaaacaagtgggaggacacatcacagcaagaatgtgatgaccacttcaagacctctggagctgctgcatatggacctcttcggacccgtcgcctatctgagcataggaggaagtaagtatggtctagttatagttgatgacttttcccgcttcacttgggtgttctttttgcaggataagtctgaaacccaaaggaccctcaagcgcttcctcaggagagctcaaaatgagtttgagctcaaggtgaagaagataaggagcgacaacgggtccgaattcaagaatcttcaagtggaggag

SEQ ID NO: 55728 - DNA, 261 bp, Zea mays
ttacctagttgtttttgcaaaagaagagccggtctaaatgcatgcttaatggctaagacttgcatgggctggctgtggcatcgccgcttacacatgtggggataagaaccttcacaagcttttaaagggagaacatgtgataagtttaaccaatgttcatttccaaaaagatagaccttgggcaacttgtcaagcaaggaaacaagtgggaggctctcatcacaccaaaaatgtgatgaccacatcaagacccccggagct

SEQ ID NO: 55729 - DNA, 371 bp, Zea mays
agcttttctcttacaccaaaacggttcactatttttattggcgatactttccggtacacataatctttgacttgaaagtacaagggtcggcttttttgtctgaataacttttctgccgagcttgagattctttcaagtggtgccttatccgttgaacctttgcttctgtttccttgactaagtcaggcctgaaataccaccgttctccaggttcagaccaatttaagggtgtccgacaccgtcacccgtacaaggtttcaaatggtgccatcttgatgctctcttgatagctggtactatacgaaattttgccaagggcagacagtcatcccatttctgtggaaattccagaacacatgcccgcaacatgt

SEQ ID NO: 55730 - DNA, 364 bp, Zea mays
  unsure (1)..(364): unsure at all n locations
agcttctaaagggagaacacattttatgactaacaaatgttcattntgagaaagacaggatttgtagcgcatgccaagcaagaaagcaagtggctctcatcatccgcataagaacatcatgacgaccgacaggccgctggagctcctacacatggatctattcggcccgattgcttacataagcatcggcgggagtaagtactgtctagttattgtggatgattattctcgcttcacttgggtattctttttacaggaaaaatctcaaacccaagagaccttaaagggattcttgagacgggctcaaaatgagttcggattaaggatcaagaaaattagaagcgacaacgggacggagttcaag

SEQ ID NO: 55731 - DNA, 411 bp, Zea mays
tgactgggaccaaaggcgatcacgacgaaggataagacgatcaccaagctatgtgcagaaaagcttcgacataaccgcagaaaaggggaaccgacttaagatgaaaagccagaatagacctcgaagaattactatagggttattgttaaatgtaatgggtattaatgtacttttgcatgggctgcgacccgtgcctataaataagtgaacagtattcctgtactattcacgctgatttggcattggtttttgcgtcacacttgtacttttaccttctcacaagctgaaagtacatttgtaatttgatatcatctctattcttccgtcatgataaaatagaaatgagttatcaataaaatataatcgttcatgttaacttatatgtttcatatgaatccttcttcattatta

SEQ ID NO: 55732 - DNA, 371 bp, Zea mays
agcttacccatgacgaggcatgttttcttttttagggtcctcgggcagaaggcccacatcgacacgggctttaagagacttagacggagacactacaccgagactctcttctcgtgcaagtcacccgtccggtctcgtctttatcatttacaacccaaagtttggtacctgacagaggtacatcttttccgatgttgaacccatcatggccatgatggattcaccatcaagtcttttctttgaaaacttcccatcccatacgaagcatcatctgtgtttaaaacaaaacattttgttttctaaggcaagactaagcatcagaaaacttttaaataaaacacgtatcaaggaatggttaaccagttcaagga

SEQ ID NO: 55733 - DNA, 372 bp, Zea mays
agctttataactccagcggtacttatttcttccttcggatgcccgaggggctcaaaaatgctggaggaagcttcatcagaatgacagccaagttctccactctcaaataagcaaaaatgtgctaacttatgctgaggacatcatagtaaaaagcacgaaacaagaaaatcatattgccgatttgcaaaagacgtttgccaatttcaggccagctggtctcaagttaaatccagaaaagtgtgtttttgaagtaaaaaaaggcaagtttcttggttgtctggtatcaacaaatggtatcgaagctaactcaagtaagatcgaagctatcctttatatggaacccgccaattcaaaaaagggggctcaacgatt

SEQ ID NO: 55734 - DNA, 376 bp, Zea mays
agcttgagcagtaactggcttcgtttgttacccttggaagctggttatcagcatatccttcagcttctgccaaaggtgattgtccctggccgagaaaggagtaccacgtctgagcgacactcttgacggccatgacaaaagactttgccatgactgcagtattgccaccatacgaagatatggttgcttcatagctcataaaaaattgcttcgggtctgtatgaccgtcgtacatggggagctggggtggcttgtaagactggggccatggtgtagcctgcaattctgttgatagaggagaagcatcatcgaaagcaaaatttccatgatggaaatcttcataccaatcgtcctcattgtagaaaccttcctgatg

SEQ ID NO: 55735 - DNA, 325 bp, Zea mays
tctttcgaagaccaccccgaccactgcaatatatgtgagaaacatccataggggaatagttgataacgccacaatcatatagaaaggaagtgccattctctgtcacggtcccggactggttcctgctaaaagggcccgactgtcccgcgaccgttccaggtgactctctaaaaccctagtcgcctcaatcattcaatcgacgattcggcagaaaatatccatccaaactcgttcaaatttttgcacaacattcacaatgagtagcactaacaatcccaccaatcagatttgtgaatctattgctcaattctagatcaaagagaaa

SEQ ID NO: 55736 - DNA, 273 bp, Zea mays
ggatggcagaaagcgcgcaataattattgccagcccgtatttataaacccattatgtccgaaactggagggtcccattcgccaatgactgttgctattctaacaaaaggaacgtgttttttcggaccttccgctcatagcccttcgccatttcgtaatctgaatttatcattctaacaaattaatattgagaggggctactattgggggccttcggcttccgaaggtcctcaaaaacacgatttaacaatgtttctggagtaaagtacattaa

SEQ ID NO: 55737 - DNA, 384 bp, Zea mays
tattttatcagagcttactactgagcaaaattttgaggatgcaacaagacctcgaggacaaaaagaatgaaattataattgagggcctagagaagaagcttaaagaccatgaggctaccctggagaaaaaagacttcgaacttcaaaccatggaaggttaactggcggaagcccatgccgaaattgctagattgaatagtgaactttccatggagaagaaaatttttgaagccaaactcgaagctaaagctgagaaaaattcaaatttgcggaaatcactgaaagaacttcaagaaaaatgtgtagacttcggcaaccagtgcctgcagcggcttaagcaggttttcaactcgattgagccagcgctgagaattcagtccttcg

SEQ ID NO: 55738 - DNA, 282 bp, Zea mays
taccctgtatacaaaaaatgcacaaagtgaccaaggggtatgaacaaaaaatgtgggcttttaaaccaaggttgatcattctgtggcacatgcgggaatttgagtttttcaggcgtggggtggcaatgattaaggcccgactaaggcccccgttgattattttggttagagggactaaagattagcctctaggtttttgtcttatatagggttagtttggaaacatcgttttttcaagggatttccattctcccaagggaaaatgaacttattttcctttgg

SEQ ID NO: 55739 - DNA, 291 bp, Zea mays
tgatacaccttcgaggctttctctgcattttcattctatgaaaataatggacgggtgtagccatttggtcaacatacgaaatatactatctacttgtgttggaaataccaggtgggctgcgtctggaaaaaacagcactatgcagatcatgacactcggaaggggatatatgagattcgtatggtcttttcatttcgaaccccttgacatcactgtgtgcactcatattaagcaagtggcgctttaatgccgcccacctgcggatgaaaaaaaattgctattttaaccaat

SEQ ID NO: 55740 - DNA, 194 bp, Zea mays
  unsure (1)..(194): unsure at all n locations
agcttgacaactaggaaatggcgctcatcttctatagctntccgccaaatcctcaagcaaaggagggggaaggattacaagccccgctccagaaaggtgctacaagtgtggtatgcacggtcttttattgctaaatgtccattatctagtgatagtgacaggggccacgacaaaaagggaagaaggagagaaaa

SEQ ID NO: 55741 - DNA, 376 bp, Zea mays
agcttaagccccttgtccttgtccatttgtattttttggtcctgtcattgctagcacaaaacagagacaaaaaggcaacaaacaatgtgaaccctacactatctctcaaggtggtggtggtggaatacaaattatgaagcgtcttaccccgctcttacaacgttcttaccagcactgcaggtggcaaacggtaaccggtgtgactgtccaatgagcgtgggtgtgattgcaaaagagtacctattctgctcgagagaaagctggagttctgggaaggctgactaaatatatatatatatatatgtggcacacaagtcattaacagatagcaatgttgaataagtgttccaagtactcctcctagttgctggcctaa

SEQ ID NO: 55742 - DNA, 371 bp, Zea mays
  unsure (1)..(371): unsure at all n locations
agcttgaggagggatcaaatgacctgagattttttgaacatgaacatcctcaacttcatcattatgttggctttgtgaattctcatttatggcgaaaagatggaatgaccaccatattatcatcatcggcttccattggctttattttaccgatagccatagttttcatatcgtttctcaaatgaactccaccaacatcatcaatgttttaattttcatcttaagaaccattaatttcatcgaactctacatcatatgcttcttcaatgatcccatgagttttgttgaaaactttatatgccttgctatttgatgaatatccaaggagaaagccttcatcacattntttctcaaatttagagagtccacta

SEQ ID NO: 55743 - DNA, 378 bp, Zea mays
agcttgtgaacagtacaaattcagaaggtgatatttcttcttctcaaatcagccaaagcccatgctcttatgtgaggacatagcagagcagagggtctgttgggctctcaattatccgaagaacaggagaaaaccttgataagggttttgttcaacaacaaagatgtttttgcatggtcagccaatgatctttgcggagttaacagggatgttattgaacactcgttcaatgttgacccatccttcagacccaaaaagcagaggcttcggaaaatgtctgatgacaaggcccaatgtgctcgtaatgaagtcaaaagactccttagtgctagagttatcaaaagaagtaagtacccagaatggctagctaacactgtt

SEQ ID NO: 55744 - DNA, 280 bp, Zea mays
  unsure (1)..(280): unsure at all n locations
cttagtgactctcacaaatcttatgaggggttttgcacgttgacagtctatcaacccttatatatttagtaataagccccggatnaatcacgatgaaattatatgttgagggttgaccatgtacgtgttctgctatctaacggaaagccaccgacattatactcagcctcaccggtcatatctgccattgagccacagctaaactcctcatcgatggctgattcattgaaaaggtggggagggacatctttaatgaatgtaaaacatatattacactcat

SEQ ID NO: 55745 - DNA, 235 bp, Zea mays
  unsure (1)..(235): unsure at all n locations
accttgcttcaggccttcnttttcttcatttcngaactttactggaacactaccccacttaaaaagaatgaaggtagaactcttgaatcttgtggattgaactccttgaagtacctcataacaatggtgttacagatccttcttctgctgttgttgcttgagcaggctgcacaaaaatgactgacatagggttgatttcgggaagaccttctcttaatctctctcactattctat

SEQ ID NO: 55746 - DNA, 242 bp, Zea mays
  unsure (1)..(242): unsure at all n locations
aggagaacacgtgataggattaactatatgtgctattctaaaaagatagaccttgtgcagcttgttaggcggtaaacagtgggaggagcacacacancaagaatatgatgaccacatcaagacccctagagctgctacatatggacctcttccgacccgtcgcctatctaaaccataggggaagtaagtatggtttagttattgtggatgacttnttccgcttcacttgtgtctcttttttg

SEQ ID NO: 55747 - DNA, 398 bp, Zea mays
  unsure (1)..(398): unsure at all n locations
cccggganctttaagncacctgaggcatgcagcttgtcaaacttatcaaaatttttcttttaccagcacagcaactgcaaaccatacctgtaacatggccattcgcgtgctagggactggatatgattggacccttcaagaaagctcaaggaggatatactcatgtattggttgctattgacaaattcactaagtggatagagtacaagcccattgcttctataacttcagctaaggcagtggaattcatacatgacataatattcaggtttggaataccgaacagcatcataaccgacctaggatccaatttcactagtttagagttctttgatttctgcgaacaaaaaagcatgcagatcacatatgcatcagtggcacacccaagagccaacggg

SEQ ID NO: 55748 - DNA, 167 bp, Zea mays
gtggcttggtaaagatatcggtaatgatctttatattaatgtaaaaaatctccatatcccccttttggtggtgaaccctaagaaaatgataccgaatggctatgtgcttagtgcggctatgctcgacgggattgtcggccattttaattgcactctcattatcacat

SEQ ID NO: 55749 - DNA, 313 bp, Zea mays
cccaaggatcgcaagtacccgacgggcacgcggaccaaccgcgccacggagaccggctactggaaggccaccggccaggacaaggagatcttcaggggccgcggcgttcttgtgggcatgaagaatacgctcgttttttaccgcggccgcgcgccgggcggggagaagaccggatgggtcatgcacgagttccgcctcgagggcaggcttccccagccgatcccgcgctcctgcaaggtccggccctcgtgtacttactcgttccggcgttcggcgttgcaagcaagtctccttgccttaatttccggccggg

SEQ ID NO: 55750 - DNA, 371 bp, Zea mays
agcttgaagctggcctctgcgccttttttttgacgatcttgccgatagcctcgcatataacagtctgaaggtacaaaaattgatatttgaagtttataaattttgaattattcttttgctcttatactaattcttttcatataggggttaatacttagcaacgccttaagggcgcaaaaagaagccgaagacgagagctgcactattgctctcaacaaccttcgaacagaggttattaagctgaggaacgaagctttggaaaaagataaaattctacttacattggtagacaaggtaaagggtgatgaagctaactacaagacccaatctgaaatccaaaggaacgagattgaaaacctccaaaagcaact

SEQ ID NO: 55751 - DNA, 293 bp, Zea mays
  unsure (1)..(293): unsure at all n locations
ttcatccttcttcttcacaaacagtgctggacatccccaaggcgaagtgcttgggcgaataaaacccttatctagcaactcttgcaattgcttcttaattctgccaactcagcgggtggcattcggtagggcctcttggaaattggggtcgttcccggttgcaactcgatggcgaattcaatatcccggtccggtggcattcctggcaattcatcangaaagacatctgcatactcacagaccactgggatcttcttcaagggtaactccgtcatagagaaagcacatgactg

SEQ ID NO: 55752 - DNA, 194 bp, Zea mays
taaaaattcattacatattgtgagacaacttaaaaaaagttaaaggggtgataaatctagacgaatatttattttacttaacatattgaaaaattgaatacaataatacctctgccttggcaaagttggatttcagaaaatgccatggtaattaccagaatgcctgaacagtaaaggaatactgttcactattt

SEQ ID NO: 55753 - DNA, 378 bp, Zea mays
  unsure (1)..(378): unsure at all n locations
agctttactcagcaacatactctgggcacaagctaccttcgttagaaaacaccttcgttgttcaaaacaataaaaagtcgaataaaagcttttaccttaaattagaatagaataagctgctgacaagatgctgtcatcggtagcggcttatgtcggtctcaagcttcgggaaaccaatactctttgatagagtaccgataaccttcgctccggtttgatctcggacgcaacctaacttttcatcgtcaacaccaccgaagagtagtgcccttggttgatatccataggatatggcatattcttttaattcttatttctcagctttcgttaactcttatccaactaagttntgaaagttgaaaatttcctcttccgaag

SEQ ID NO: 55754 - DNA, 376 bp, Zea mays
agcttcaaagccggtaatacaccttggggaatggtggatctttcttcaccagtaccgtcaactataggtcaaacacatacatcctccacagtcagaaggagatgtgtgctgaagcgcatacattccctgaagaggttcttcaagagaaatcgatactaaccataaaagaattttacaggtaagttcctatttgtcatgctttatttaatattctgcaaatgatatatttgtgtgtttctcatttattacgaaatatatgctgagagataggtgtttattattagcactttaggatgttttatttaaaagtatttccctaagctatcaaatttgattaatctgctattttgtaggggttaataaccattttaagccc

SEQ ID NO: 55755 - DNA, 379 bp, Zea mays
agcttctaaagggagaacacattttaggatttacaaatgttcattttgagaaagacaggatttgtagcgcatgtcaggcggggaagcaagttggagctcatcatccacacaagaacatcatgacgaccgacaggccactggagctcctacacatggatctattcggcccgattgcttacataagcatcggcgggagtaagtactgtctagttattgtggatgattattctcgcttcacttgggtattctttttacaggaaaaatctcaaacccaagagaccttaaagggattcttgaaacgggctcaaaatgagttcggcttaaggatcaagataataagaagcgacaacgggacggagttcaagaactctcaaatcga

SEQ ID NO: 55756 - DNA, 368 bp, Zea mays
agcttgtggctatttagtattgaatttcatttgtatcacctattcacccccctctaggtgctctcaaaggtgcatcttcttttcagaagcctatctcaaagaacatgcaagttaagcgggcttggcttggagcaatttgggatgggtgaccgaccaggaagttttcttgggtacgcatgagtgaggagaaagtgtgcgcaaaagacccgtgttggtttatggggacaatatatgatcctagagagttgccaggagtaagtactgaaagggaattaggcttacacctagtccctaattaattttggtgggtgaattgcccaacacaaataattggactaactagtttgcccaagtgtatagattataca

SEQ ID NO: 55757 - DNA, 138 bp, Zea mays
ccagccgggtggacccgccaccttcgcaggggctacgtccgcgggtgctctgcagcaccaggcccagcctggttcctgccccgggtgaccagctccgctgaacagaatcggccgagctcggggacctgctttggagca

SEQ ID NO: 55758 - DNA, 386 bp, Zea mays
agcttgcattgcatatttaaatccaaggttttgttttttgggcttgactaacctagctgagataaccgccaataaagcgagtgaaaaagcttaactcgcgtcaaacggtgacaagtctctacttcttaagcttttaagcacttaaattcttactttcatgcaattattggttcttgaaatatgcatgaggtactgcacttagggggagtattcaaaacttaaattactgatgaaaacccctattgcaaaccaaaatgcaaatttcaccatttgcctattttctctaaaaattatctagcctatggcaaaataatttgaaaagtatatgatggtgccgatacctgtcccaacaagtgatcttttgcgagattataagttgggatttg

SEQ ID NO: 55759 - DNA, 232 bp, Zea mays
tgcgtctgagagcacaagcacctatagtgcccaatgaaaatgtcattgaggtcatgaaacaacgggcttttggcacagacctattacttaatattttgcccggaaactcccacaaaccctctggagaaccttctttataacaaggatgaatacattcggcctggtcatgaattcccccccaaaagggattaagcatattggttttcaaaattaccggggcttttgggaagaa

SEQ ID NO: 55760 - DNA, 374 bp, Zea mays
aacttaactaaagtcatctaacgggtttgttagctagagcaacaacacagcccgctagacagcatacccgtcggcttgcctattattatcaccattcgagacacaacatatataacaatcacttaacaaaatcaactcctgcctaacatgagttggctaatgacgtgactatttcccaattaccatcacacaccacctttcgtcatttttggataaccggcatgacacacagctattgtaatacatctcaagttcattcaacccatcaggggagcactagcatatttcagaaatttttcttgagactacgacgacaaggcatcgagcttatcctgcacataaaagcatcacaagcatttttacggaacctaacg

SEQ ID NO: 55761 - DNA, 52 bp, Zea mays
tagagatgtgtggtgccgatatcgggtggcttgtgactaaatcgacattttt

SEQ ID NO: 55762 - DNA, 362 bp, Zea mays
agcttgtgaaggttcttcatccccacatgtgctaagcggcgatgccacagccagcccatgctagtcttagctattaagcatgcatctagaccagcctcttcttttgcaaaatcaactaaataaagtttgtcgtctaatacacccttaaaagctagtgaaccatcacttcttctaaagacagacacatctacatttgtaaatagacagttataccccatattgcataattgactaaccgatagcaaattatatcctagagactctactaaaaacacattagagatagaatgctcattagaaattgcaattttacctaacccttttaccttgccttgattcccatcaccgaatatgattgaatc

SEQ ID NO: 55763 - DNA, 196 bp, Zea mays
gaaactattcctggtcagcgagaggtaccaccggaactaatcctgaagctctccgtatcccccacgagcttggtccttgtaagaattaatgtcctcaacttggtgcacacactgatgcccggagctatagcaccactcagatagttggttccaacatcaaaagtattaagcttcggcagcaagctggagtccatag

SEQ ID NO: 55764 - DNA, 374 bp, Zea mays
agcttctgcatggcccactcttttattttgttaacactttgaaagccaaaaattcctgcactaagtccctagtgccgatgtgctctggacaccctaaattcagccagcgcaatttgggttggaccctctggtgtcatattgcacgggggtctggtctctccgaagatcaactctaacgaactctgaaccaacttctccttatcatcgtcaactttgacgtagaaccattcagatttctagccagctggccacttgcttcggtaaatgatcactggaaattttgtagtcttgcggtacgcaaaattgtaacagccaaagttttcatgtaacccatctcctctaaccttggtctgataatgcagctcgtgcactcg

SEQ ID NO: 55765 - DNA, 326 bp, Zea mays
agcttgtgaaggtgcttcatcccttttatgctaagcggcgatgccgcagccagcccatgctagtcttaggaattaagcatgcatctagaccggcctcctcttttgcaaaatcaactaaatagagtttgccgtctaatacacccttaaaagctaatgaaccatcacttcttctaaagacagacacatctacatgtgtgaatagacaattatatcccatattacataattgacttacgaatagcaaattatatccaagcgactcaactaagaatacattacaaatagagtgctcggatgaaataacaattttacctaaccctttcacc

SEQ ID NO: 55766 - DNA, 296 bp, Zea mays
tgaagctgggctctgcgctatgacgaaggactatcttgcggatagccttgcatataatagtctgaaggtatgagaattgtatatttgaaaatttgtaatttttgaatcattcttttattcttatagtaattcttttttcatatagggtttaatattgagcaatgctttgagagcgcaaaagaatgcccgagacgagagctataatattgctttcaacaacctacgaacagaggttattaagctgaggaacgaactttggaaaaagataaaattctgcttacattggtggataaaat

SEQ ID NO: 55767 - DNA, 364 bp, Zea mays
agcttgacgacctccattaattaatcagatagtgtccttctgaaactgttataattgccaacaagcatcaataatcaaggaaaactgacatagtgtaaacaaacacattattttaaaaacataacggcatcgatcatatatatggcatgcttgagcatgttggtaaatacctacgtacctgcaaagaagaaactaatagcctgtataaggagagaataggagatggtaggtgctctatgtatgtctatgcatgtatatatatacacacggtgactatttggattgcatgcatcctctcggtgataacaatggatgtattttatggacccgttcatattgctaccgattttaatactcagctcgt

SEQ ID NO: 55768 - DNA, 137 bp, Zea mays
tgtagttttgtcgaaggatttgttgtggtgctctgtgatggtttatgtgatgtggatctatcattgtgcaatactaattaaatttgtatatctatgtgaatatgtgtataaaaaatggtgaattggtgagcttttgt

SEQ ID NO: 55769 - DNA, 361 bp, Zea mays
  unsure (1)..(361): unsure at all n locations
agcttgccgnctaatacacccttaaaggctcgtgaaccatcacttcttctaaagacagacacatctacatttgtaaaaagacaatatatcccatattgcatagttgactaacagatagcaaattgtaaccaagagactcaactaaaaacacattggagatagagtgctcattagaaattgcaattttacctaacccttttaccttgccttgattcccatcaccgaatataattgaatcttgggaatccttattcttgacgtaggaggtgaacatcttcttctcccccgtcatatggtttgtgcatccgctgtcgataatccagcttgaacccccggatgcataaacctgcaaggcaaattt

SEQ ID NO: 55770 - DNA, 375 bp, Zea mays
agctggttgaattaaataaggagacaattttttcttgtgagtctatggccctggtagaacacaagagacacctagatcttccataaaagatgttatcaattggtgaaggcatgtggtgctatagctggcagcaaagctcacttcattgcaactcgagtctttaccaaaaaagtgaaagagaaatgttcttgactttgggtacacctgaggagcactttcagtggttataaatgaagtatgagtggatgacaatgtacaagaagggctggtactatttgcttgctgttactgtattaattgatcataccatatcacttttatggatgagctattatttaatgaaacgttttttatattatgggacttgtgctgcta

SEQ ID NO: 55771 - DNA, 361 bp, Zea mays
agcttcaatgcctccacatgaactaaccttttttttttggaataaaacttctcctgcaaaaacaacaggggataaaaccctgagtacgcaattactcagaagacttacccgactaaagaaaagactcttaagggtatgctatctgattgggagtcaaggtaaagcttatcaatgatcaaagactccttttttgcagaaaagcttgctaccagttgatccttaagccaagttttatttcactagttaggttattacctgaatctatatttgcatgatctagttcaagcacttggcctatactagctccattttattcattctcatatttcacttggctactacgaagatgggcaccgggatg

SEQ ID NO: 55772 - DNA, 138 bp, Zea mays
ccgccagcaaatgcctgtggcactgcgaaaccccagtcacttcaagaacaactacccccagttgaaggcatcatgacctgcttaatccaactcggtgaatggccccaagaataccttagcacccgcccccaggcgccc

SEQ ID NO: 55773 - DNA, 382 bp, Zea mays
  unsure (1)..(382): unsure at all n locations
agcttcttagttatgtttaagaaatggaatttttttctttttgatncatcaattatgttcccataaccacactattacatgccaaaatggaaaaatggataaaaatggaaagccaagcacataccacttgttatatccttcaaaagggtcccctgtcagggaggtcaggaacctgaatagtggcacctgaatagtggtgaaaagtttaaggtgtcttgtgattaaaaatattgtatgattactatttgtgattattaactgacaggtcaaaattttcagcagatcagcaactcattatttagcgctgaaggtattgctaaaaatggaaaacacaagataacgacaanttttacccggcatgaatcacatgctaatcttaatg

SEQ ID NO: 55774 - DNA, 363 bp, Zea mays
agcttaaagaagaaaagaaaaagaatgaacttattctactgccctatcacttcaaggtcaagaaacatttcaaagagccttgccaagaatggttggaatgattgaagttatgtgcaatgaaattctgggcaactatactaagaaagaagatcaattgatgaccgcggccttcggcaccaaaacgaaacgaaggctgaatcgagtaatggatgccctaaaatttgaataccctgactatgaacggttaagcaagggtgccgaagggccaaagcgaaaaagagttgtcagtgttatgaagaggcaagctgctagaatgatagaagaagatgagaaagctttgaaaaagaaaaaaattcattgctg

SEQ ID NO: 55775 - DNA, 394 bp, Zea mays
gaactatgaaactaagcttatatccttgcctttctgcttttgtctacatggccagagataacttgggagtcagatttaaagatcgcccttcttattcccattgcctttaatttctgaagccctaacagaagggcttcgtactcagcaatggtatttgtacaactaaaattcaatcttgctgcaaagcatgttctgactttaaaaagcgctactaagacagcatcggctcggcgccgaaggttcccaagaaccatccagaagactattcggcttccgcgcttttgttactttttctgagccctagcgccaatcagcgatgaaattgcaatgcctcgactgaatgaggcctatgtacatagtcatagaaatcattgactcgcagccattttcgatc

SEQ ID NO: 55776 - DNA, 385 bp, Zea mays
agcttcagctccatctatattatggattgttttggaatcagtccagcttccttcggcccttctggcagcttcctgactcccatgaatagcaataggccttggtccgaaggtatcttcatgcagagataagctgggtgaagaattgcttcaaaagcatttagggtaccacgaccaatgatggcgttgtaggggtattccatgtcaacaatatcaaacacaatttgctcagtccttgtgttattaacaaatccgaaggttaccggcatggtaatcttcccgagtgccacaatctgccgccctccgaagccacaaagagggtgcgtagcatcatgaatcttgtcttcaagctcttgcatctgtctgaaagctttggcaaatataatgt

SEQ ID NO: 55777 - DNA, 397 bp, Zea mays
tgacccttgcactcaaacgaagcaccacctcggattctgcttcgtcacaagaagagcttcggaaaaaaggtcattaatttcaaaaaacttctggaaattcataatcaaggctagagtgcgttccacttccaaggttgatcgtgaagagatgaaaccgaaaccactgaaactgtcccaatttccgaagcaatgaagcagtctgggctggcaacatcagaggatacatctgccccgaagcaaaacaaactgacgttgaagaaaatgaatatgaaggtgagtacggtgcaatgccatctaaacccagccacttagagtttgggaagtctactattaccgaaggtgatatggctaaattacttgaactaggctattttaatgaagacaaaagggagctgat

SEQ ID NO: 55778 - DNA, 336 bp, Zea mays
gcggcgaagccacagccagcccatgctagtcttagcgattaagcatgccatctagaccggctcctcttttgcaaaatcaactatataaagtttgtcgtctaatacacccttaaatgctagtgaaccatcacttcttttaaagacagacacatctacatttggaaatagacaattatatcccatattacataattgactgacagatagtaaattatatccaagagactcaactaaaaacacattagagatagagtgctcattggatattgcaatcttgcctaaacctttcaccttgccttggttcccatcaccggatatgattgaatcttgggaatc

SEQ ID NO: 55779 - DNA, 369 bp, Zea mays
  unsure (1)..(369): unsure at all n locations
agcttgacgaattntgttcccacttatactgtggcaagggtcttcaaatgcttatcatgatcctggcaaatattcagataaaataatttcctaagtgccaaaaggcagaacaatgtcttatgaagcaagaaagacaagctatggcatacttgcaacggtaaaattcacggtggtaaaaatggcatatgactaacagtagatgggtggatagattgatgtgaagtcataacatcaagaagcataacatgcgctagactggcaacagaagatgatcattgtagtacagacacatattactgtcaggtgcaaatgataatccaggagcacacatgaatcaaatggaccttccataactggaccagatggaat

SEQ ID NO: 55780 - DNA, 281 bp, Zea mays
attgcttaatggtcatgtgttgtttcgaatgacacacttgaggtcatcatatagatgcaccaaagaaccatataaagccttcaatgtcctacaatctctgtaatggaccacactcgttcctttgaaacaattcaaagaacttaaccgattcagatcatattttaagataagagggacttaaaatctcattttcgatgatactcatcaagtatccatcttatgggaaaaacatgaccaatagaattgttcataacttttcatttcatcccaacaatgggatg

SEQ ID NO: 55781 - DNA, 351 bp, Zea mays
aacttgtgagaaagtctccacattttttctcttctagagatcactcaactgtttccatctcatcacctaaaaatttcatatttctaaagcatttggaaatagataaaatctcccttttgttattttctacggtcaacaatatattgatgtttggggctcttatttgcgaggcaaaggcgcattggatctctattcaggctttaactatggttttaaacaaataaaattaaatcgacatgtcttttgatagcagaggagataactcaagacttgttgatccctatggtttcaatcttcatactctaaaatggccacaccaacctttttcattggtgcttttctagaatattt

SEQ ID NO: 55782 - DNA, 235 bp, Zea mays
taccgcatttgaagcatgatcgcttccccttggtcttaatcttgctcggctgtccattgcgcccctttagcaccgtcttgaagcgcttaatgagagagccatttcttcatcattaagcccggccgcctcaatttgcgccaccttgcttggtagtgcctccttgctcctcgatgccttgagagcaatgggttgaagctcgtggattggaccattcaacgcgtcatcgacgtacctt

SEQ ID NO: 55783 - DNA, 296 bp, Zea mays
agctttgattgtgtcttggaatggattgctagctcttgtattgaatgcagaggattggaatgcttgggtgaactgaatggaggtggttggggtgtatttatagccccccaccacttcctagccgttcctccatttctgccaaccccggacggtccccgcccctgtttcggacggttcccccctagtccttaaccactgaaatcgcacccttcaacaggaatggctatactgcattcaatgcgtcgtcggatgccacatcaaggcacccaccgaccgtcccgtcgatctcccctgac

SEQ ID NO: 55784 - DNA, 290 bp, Zea mays
tgcaattccattttgcagaacctttccaagacctcttaccatatcaatcatgtacctgtattgtcttgatttgccattttacaggatcgactggtagattattgtcaagctgtttggcaaggaacctagcacaatacctcggagattatgatattattattcaactatagttgctatatcgaatgttgaaatttctgtgatgtaaatgcagcttgaagaaaatctcctccagagagtaaactcattagttcaaagttctgatttggatttctggagaaaaggaagttttt

SEQ ID NO: 55785 - DNA, 352 bp, Zea mays
  unsure (1)..(352): unsure at all n locations
agctttcgccggcaatttccagggtacgtatttgcgccccgggaattcctaggacctccgaagctgccgacagcagccgggagagtctctcgggattacatccggcgattctcgaagcagcgcaccgagctgcccaacatcaccgactcagatgtcatcggcgcgttcctcgctggcaccacctgccgcgaccaggtgagcaagctgggtcgcaagacccccactagggcgagcgagctgatggacatcgccaccaagttcgcctccggccaggaggcggtcgaggctatcttncgaaaggacaagcagccccagggccgcccatcggaggatgcccccaaggcgtcaactc

SEQ ID NO: 55786 - DNA, 283 bp, Zea mays
tatggtctcctttatgtgaatttagtgctcatgtgccaaatcatttgaagcttatggtctctttttattatgtgaattcagtgctaatagtccggtgcaaatatcttccatgaaattccaatggcatgattgttgaaacgaatttccaatttaaaatcttctacatgtgcaaggaattgactcggttgcttaagcttgtttggactacatgcattttggtacttttttaatgagacctaaatctatacaggagcaagaggtggaagtgtccaacgctatatct

SEQ ID NO: 55787 - DNA, 306 bp, Zea mays
  unsure (1)..(306): unsure at all n locations
ttttaagaaaaactggatcaccgcccggctgggaaggcccgggggcaacatcaattgggccggaggggcacagtctaaagaacgccccgcggggcggaaacacccagttatctcagagataccccctcaaagacagcatataagggttggcggccggaatggcttaaaatcggataattatggaaattctctcccttccccgctaggaaaacagccagacgcttctactccaaggaggactgagtctccacggaccaacaacggccgaagcaagcgtgtngcttactgaaagtggaatactgaaaa

SEQ ID NO: 55788 - DNA, 364 bp, Zea mays
agcttgcatgacaaaaccgtgaatgccatttatttgactcatcagaaaaattaacagaattcaccagtttattacacacatcatgcagggataagcggaacaagcctccgcaatcatatcctttaccaacaaaggtaccatatttcgacacaacacatttattagactcaagaacaactttatatccatctcgacatagcatcgaagcgctaacaagattcttcttgatagagggcacatgctgcacgctcttcaatggcaccgtctttcccgaagtaaacttcagaatgaccgtgccaacaccaagaacatgagcacgcgacccatttcccatcaacaaggcgccagacctcccgacctgata

SEQ ID NO: 55789 - DNA, 231 bp, Zea mays
tgccaaacattcaggaggagagttctagctctggtcaaaagcatggatttagttgtcaaaagagtcccttggcagtacttataactaaaacgtgtataaaaggaattaaaggaaaatgtgaaggagaaactctccctttttgccaagttccggtagggaaacattttaattcaaagcttcatatgatgtaaacacttcactccacgaagttatttcttcattgtttttttg

SEQ ID NO: 55790 - DNA, 377 bp, Zea mays
agcttacctttagtcttatgtaactaagtgttataagacttttgaaaagagggagaaatacttgacaaaagggggagaatcataagtaaaacataaatgaaggaaatcgatgagtgcataatatgtcatgagcatcacgcttattttatgacacagtgcaccccatggatagtatgatataagttgtctccatactttgactcaaatatttgcttttggcatttgaggccaaaattggtattttctgaaatgcacatatttagggggaggaaactatatcatatgattcaaaatcttatttatcaaatcttatgtaagctttaaatgtgttgtcatcaatcaccaaaaagggggagattgaaagtgcattcatccct

SEQ ID NO: 55791 - DNA, 375 bp, Zea mays
agcttatgataaggtgaagtggagctatgtttattttaccctacgtaagaaaggcttttcaagtaagtggtgtagttggatcgagacctttatgaaaggggccatgttgcggttaaagttaatgatcaaatgggcccatttttccagactccgaagggtgagacagggtgaatctgtgtcacctatactctttaatttggtagtggatatgcttgctactttgtgtcaagggcgtctacccctagagtagctggccctccactacagagattgtagtctcgatccatcttctccggcgaggttaatcacctctgccgcaaggttgttagaaactgcgaagaggggattaaacagataacaaattacttgattatt

SEQ ID NO: 55792 - DNA, 80 bp, Zea mays
tggaccccatgaaagacttcgctgacttcaacacttccaagaaaggtaagtttctctctgctgatctggatatgaatcta

SEQ ID NO: 55793 - DNA, 344 bp, Zea mays
tccaatgggagactacttgtttggggagactctttcttcttttctttcggagccttgaatgcaacgggtgcacctcacggtgggggggcgccttgctccaagttgacaatatggttggagtctttgatcataagttcaaagctcacaaacttgtcgatcacctcctcaagagacatctgtttatatctaggatctccacggattagttgtacttgagtgggattacgaaagacaagtgatcttaaaataaccttgaccatttcatggccatcccacttggtgctcccaaggttgcggacttggttcaccatcatcttgagccggttgtacattgcttgtggctc

SEQ ID NO: 55794 - DNA, 217 bp, Zea mays
tgtgagcaatacaagttcagaagggaaaaagctactctcttgctgatcagtccgaagcccatgctcttgtgtgaggatatagcagagcagaaggtgctcttgggatctaactgtccgaagagcaagagaaaaccttgataaagtttttgttcaacaacaaagatgtttttgcttggtcagctaatgatctttgcagagtcaacagggatgttattga

SEQ ID NO: 55795 - DNA, 334 bp, Zea mays
atcttaagtcacctgcagctgcagcttcgcttatttcagcctatcttatttttcccttcatctcaacctttgaaggatataatgagaaacagagaagcttcacgaagaattggaaatgggctgcggaactcaatgaattccccattgattatgtacataaatcctcaattcagtcttaagcgttagtaaaattcattgctgattggaacgccagggctcatgaagaagaagaacaaaagattctaagcctggacggtatttatgacgattcttggggaaccttcgtccaggagcgatactgctctgtagcgcccttaagtcagaatgctcgcac

SEQ ID NO: 55796 - DNA, 156 bp, Zea mays
caaagttcttctcacttttatataccaggggtgatttcatgttgaactgaatcgaacaattcagttttcgaaatttgtctgcagtggatagaaacgcgaccagtttgttaaattccttactcctaaactggcagggctatggttgtgaaaggttaa

SEQ ID NO: 55797 - DNA, 370 bp, Zea mays
agcttgaagccatggtaagtagcatatgctagtaatatgtgaattgactcaagcctagctacgggtgcataggtttcaccaaaatccaaaccttcgacttgtgaataacccttggccacaagtcaggctttgttccttgtcaccacaccatgctcatcttgcttgttgccgaagacccacttggttcctacaacattttgattaggacgtggaactaagtgccatacctcattcctagtgaagttgttgtgctcctcttgcatcgccaccacccaatccgaatcttgtagtgcttcctctaccttgtgtggctcaatagaggaaacgaaagagtaatgttcacagaaatgagcaacacgagatcgagtag

SEQ ID NO: 55798 - DNA, 377 bp, Zea mays
tgcagcatgcaaacttatagacatgtcggttaccatttttctagctttcaaacgaagctggtcacagctcaagctctgttccaatgtacacaagaccatgagataccttcaggcctatgtacgaaggttcttgagactaagggcacaagtgcctacagtgcccaatgagattgtcattgaggccatgattaagggccttcaggcaggacctatggctcagtacttcacaaggaagcccccgcaaactctggaaaagctgctttagaagatggatgagtagattcgagatgacaatgacttccgccaaagaagggaggaagcttatatattctctgaaatgaccaacggcttctgaggaaaaagtcattcgaggcacg

SEQ ID NO: 55799 - DNA, 228 bp, Zea mays
taacgatgttcttttgagaaagacgggtttgtagcacatgccaggcaggaagcagttggagtcctcatccacacaagtaacatcatgacgaccgataggccgcttgagctactccacatggatctattcggcccaattgcttacataagcatcggcaggagtaagtattgtcttgtaatagtggatgattattctcgcttcacttgggtattcttcttacaggaaaaa

SEQ ID NO: 55800 - DNA, 401 bp, Zea mays
catcccccccccggatcttaagcgactgagctgcagcttgatcatcctcctgaatttattttgacgcacaaagaaatgatatgggaatgaaacacattcatgagaaaatggaggccggtaagccaactgcttcagaagagatgatcaaggtgttgtatggtttaacaacagcgtagttgtgcctaagaatgatgaaatccaccagcaaattctagatgaagcacatcttagtcgctattctattcatcctggaagcactaagatgtatcatgatctaaaacaacattattggtggacaaagatgaagattgaaatcgcatgctatgtggcaagatgtgacacttgtagacgtgttaaagccatacacatgaaagctgctgggccattacaatctttaccta

SEQ ID NO: 55801 - DNA, 259 bp, Zea mays
tgtaacctgactgtggccgactctctctacgacggagctctcctaggcggcgtgaaaacctcagatcctggtggctgggttgaggagcggatgaagcgtcaggtacccacgatttatacacccagatgcgctacgatcggggaaatcggttaaaacgacagcgcgatatcagagccaaggcggaatccgaaatccccaaccaaatcgcacacgcacgccgcgttcgcggatttttgtgctagcagtgagtccgatttga

SEQ ID NO: 55802 - DNA, 376 bp, Zea mays
  unsure (1)..(376): unsure at all n locations
agcttggaccaatgatagngaatgtgtctttcttggttatgtcccgcgtagcatagtgtcgtggtttcggaatccagggggcaataagattgtgttcggtgggggatgctagtgcggactcactctgaatggtgaatcgctaggactcaacgatggatctgaaacgggggattatattagtttaagcttgcgccctagtctagtgtagtgctaatcatagtattgctgtggagcgtgttacaactggtgtgtttgtgtaggaagaaggaggggccctatccttttgtatctcaagtgtagaaccttacagtgggacttgtattctactggagagagaaagcaagagatacggagatagatctactccccgggttgg

SEQ ID NO: 55803 - DNA, 271 bp, Zea mays
tgtgaaggttcttcatccccacatgtgctaaacgacgatgccaaagccagcccatgctagtcttagcaattaagcatgcatctagaccgacctcctttttgcaaaatcgactaaataaagtttgtcgtctagtacacccttaaaagctaatgaaccatcacttcttctaaagacagacacatctacatttgtgaataaacagttatatcccatattacaaagttgactcacagacaacaagttatatccaagcgactcaactaagaacaca

SEQ ID NO: 55804 - DNA, 361 bp, Zea mays
tcaagcttgaagggctaattaacaatttggtttgagaaattcttccaatgcttaagcacaggtgattgattggcactataatccccacacagacaccaagggaaatgtattgcagtgtcattaatttcttttttgcagtttcactcacattgttagtactaatagtgtatgtaatctttcatactccctttcacctttaatttggaaacaagaccaaatctgcacagcttgccactgtcagttaatcttgaaatataacaatatctcatgctgtcaagaactacttgttacttttcttttacactgtcactttgtgcatttataattgaataaaaaatctcattgcagaatgggaagatgc

SEQ ID NO: 55805 - DNA, 216 bp, Zea mays
attaagctttttttattagaaaattcaacagaaagctgaatcttgagcaaacttgagccgaatccaaaaaatttagagctgaaaaattttgacaagccttcaaaaaaatgtctagattcaacaatcgatgcgttcaccggctgaagcacgtgttctattttggtggagccagcagcgagaagttcactccttcggctgaagacttgtctggtgcct

SEQ ID NO: 55806 - DNA, 359 bp, Zea mays
aagctttgagaaggtacaggtctgatttttttcatcaaaacaaaactaggcaggcccaagagcttgatcctacaagtggcatgcctaatccactaggtacaccttttcttattggatcaccacaacataagcgagctgatacctctggacttactttagttccaacaagttcaccaggtccttttgatgagctcccgcctgttccagggaataatgatggttctggcccccaggttgagagaagcgaaggaattgatcagctttctgccaatactggaaggcaatcttttggttcacttgaagatgttcaccaacaagattccagtgctatctcaacagtatcgtccagtactatgact

SEQ ID NO: 55807 - DNA, 218 bp, Zea mays
tgagggaagcaatgcaccccggacataaatgatggggttttatactattagatacccgttgattagcatcagaaataccgtagcaagccgctcatcacctgatgagagcgtagaatgaatctatacaacacatttggatgagcaggggtactaaactagttcaaatgagctttatacccgcagaccaagtatagcaaagtggcaaaatataacatcta

SEQ ID NO: 55808 - DNA, 373 bp, Zea mays
agcttttgtcttgactatgaaggggccctctcacttgggctccagcttgcccttggactccgtccgagctgttcggacgagtacgaggtccccctcctgaactccctcgggatgactgcgtggtcgcgccatgctttggtctgggcttggtatttgtttagggcctgtagggcgaagacccggtctccgtcaatgagatcttttgaagttggctcgtccacgtcggggacggctgacggaactgtacgcggggacccatgctttatttcttggggggtcattgcctccgatccgtatagaaggcggaaaggagtgaacccggttgccctgcactcagttgtgtttaacgcccagactgcctccggtaataagt

SEQ ID NO: 55809 - DNA, 272 bp, Zea mays
  unsure (1)..(272): unsure at all n locations
gtttaccannttcttttcctttttggggtcactgttggaccttttggttttttgctgtttcggcatttgctgcaagactcaaaacttctgatgctttttccttagtcggttttttcacttcttccattttttctgtggatggtgcttcggccatcactgcaatttctggcagcaaggttggctgttcagcttcagcggccgaagatgcttctccggtaaactcaggcaccgaagctggttcaatataacgtggccgatgcgtaagaaccctt

SEQ ID NO: 55810 - DNA, 372 bp, Zea mays
agctttctaaaagctggattaagattccctttattgggattattgcagagatactgaagaggttcggtatctattttcaccagctgacccctaacctatcgtcagacttattgtttatatctgggcactccgaagccaagcagtggaaccatttgcggacagcttttgccgggttcacgagttgcattatcaaacaaaggctagaaaggatggattgcacgacaattttggttgctataacttcgcctatcggaaatctacaaagtttcctgtaattagctaccgaagcaaatgggcagcaggctggaaatcagagtggttctatgttaaggttgatgacgacaaggaaaagcttgtgcaaagtccactcga

SEQ ID NO: 55811 - DNA, 180 bp, Zea mays
  unsure (1)..(180): unsure at all n locations
acaagacaactgctgatgccttgctaaanattcgaagtgtgaaaattgtatattggaaatttacaattgacattttttatttctaagtaatctttttcatataggtttaatactaagcaacgctttgagagcgcaaaagaatgttgaagatgaaagttataatatttctttcaacaacct

SEQ ID NO: 55812 - DNA, 381 bp, Zea mays
agcttaattgacctacaaaaatacctcattgtaggaaatttttcttatatgaaagcgagcagcacggcaggcgttatccgatgatggaaacacagacggtatgttgtcctacacttttgcacagatctgaaattctctcaagcataagcctgggaataaaagctctaaaggggttcctcgaattcaaaacagtaacaagtttaaggacatgctccttatctttcagaaccttctccaaccaatcaacatcataatgaagtgtcctggaatcgcaaccaccaactaatatgtcggtagcacctgtcatctggaacgacatgtaggtgatgaaataatttggtgtaaacatgacaatggaataaccagcatcacaagaagtga

SEQ ID NO: 55813 - DNA, 315 bp, Zea mays
aggacctatacaaactcagcttaactaaagtcatctagcaaggtgattaaccaaaggaatggcatagcccgccatacgacatacacgtcggcttgactattattatcgtaatccgagacaacacattttaacgaacacttaacgaaattgactcctatttaacatgagttggctaatcacagtagaagacttagcgaaccattttagacatcgcaactcaaaacatgggtgggagcaggttacttaaatgtttttaaccctttctcaacttaaactggacaacacacaagtcacttaaaacaccatattttaggg

SEQ ID NO: 55814 - DNA, 379 bp, Zea mays
agcttgccttcgcttcagtctatcacccgtttccaacgaagtcgtggagcgcgccaatgggaaaatcttcacaactgtcaagaaaatgctcctcgatgaaaaaaaggcagatggatcgatttgttaccggaagcagtctgggcgctaaacacaaccgagtgcagggcgactgggttcactcctttccgccttctatacggatcggaagccatgaccccgcaagaaataaagcatgggtccccgcgtacagttccgtcagccgtccccgacgtggacgagccaacttcaaaagatctcattgacggaggccgggtcttcgccctacaagccctaaacaaataccaagcccagaccaaagcatggcgcgaccacgcagtca

SEQ ID NO: 55815 - DNA, 224 bp, Zea mays
tcggcttcatctatgttatggattgcctttgaatcaattcaattcccttcggcctttctggcggcttcctgactcccataaatagcaatagtccctgatccaagtatcttcatgccaagatatgctaaatgaagtattgcttccaaagcattgagtgttccacgaccaatgatagcattgtaaggatactccatgttaacaatgtccaacacaatttgctcagt

SEQ ID NO: 55816 - DNA, 306 bp, Zea mays
aaatgatcaactgcattgattatataattaatgaagggacaatattgataaggtgaccgcaccagaagggtgataagcttctgggagccaatagaaaattgaccagatcattggtagcccagggctctacaacaaagaagggtcaaagcacaagtcattttcaagtaggggacctggtgtggaagaccattcatgcctctaaagaacaaaaaaccggaagtttgggaaatggtcccccaagctgggaagggttcttattaaggaaaaacacggtaatgtctgggtacacctatttattaccaatat

SEQ ID NO: 55817 - DNA, 387 bp, Zea mays
tcaattctgcgtattttaactttcggatctccttcatgtgacattttcaaaatattccaaatgtcacgtgcatcttctcttccttgaactttccagtactcttccgacaaaaggcttcctttgattatgctcactgcttgagcattgcgaagcacctcttgcatcatttcccatggcatctcttctccttgggtaggcttatgcatacctatattaacaatcttcccaatactaggatgcacaccgaataaatgcgacttcatcttattggcccactcatcataattcactcactaagagtgtgaacttctgaatggagacaaagaaattggaataaaattttaaaataaacaattgaaactcatgaaatcggactctactttggtg

SEQ ID NO: 55818 - DNA, 375 bp, Zea mays
  unsure (1)..(375): unsure at all n locations
agcttgtgaaggttcttcatcccctcttgttctaagcggcgatgccacagccagcccatgctagtcttagcgattaagcatgcatctagaccggcctcctccttttgcaanaatcaaactaaatagaagtttggtcgtctagtacagcccttaaatgctagtgaaccatcacttcttctaaagacagacacatctacatttgtaaatagacaattatatcccatattacataattgactgacagatagtaaattatatccaagagactcaactaaaaacacattaaagatagagtgctcattggatattgcaatcttgcctaaacctttcaccttgccttggttcccatcaccgaatatgattgaatcttgggaa

SEQ ID NO: 55819 - DNA, 151 bp, Zea mays
tgaaactgatttacctataacgctttgttgtacggagacaaccaaaagctgatcccaattggcgatatgatgaatgatgaagctcgaagacactgttatgaaaaagctctagagaaaatcttgaattaaccttgtaaaaatattgtaattt

SEQ ID NO: 55820 - DNA, 372 bp, Zea mays
agcttgtgaagattcttcatccctttttggctagtcggcgaagccaaagccaacccatgttagtcttaacgattaagcaagtatcgagttcagctatattgaaatcaactaagtatagctgaccctctaatactcccttaaacgctactgaatcaccacttcttctaaagacagtaacacctgtattcgtaaaaagacagttgtaacccattttgcataattgagaaacagaaagcaagttgtaatctagtgaatctacaagaaaaacatttgaaatagaatggtcaggtgatatagctattttacccaatcctttgaccaaaccttgattccatccgcgaatgtgatagctcgttggggatcttggttttt

SEQ ID NO: 55821 - DNA, 312 bp, Zea mays
cgaggccatgaaccgggctggtgtcctcggggacagctggctgaggcttctgggcggccggccgagccgtctgctcgggccgggttcctggaggagaccctggcggcgatggcccatgcgtggtgctgacattcgccttcagagcggagatccttcgcccgtgttgccgtccgaggctccgtcggacttcgccgaaggtggagttgacgccgagggtgctgctgctcctcctccatcgacgtctgagcctgcaggatcggttcgcctgtagtatgcatatgttttttgcggccggtgaggcccatacatact

SEQ ID NO: 55822 - DNA, 259 bp, Zea mays
tgagtgagacggaaggcgattatgacgaatgataatatgtatcacgaagctatgcgcagaaaagctttggcatgacagtaggaaaggggaaccgacctaagatgaaaagccaaattagaccttgaagaattactatagagttattgataaatgtaaagggcattaatgtaattttacacgggctgcgtcccgtgcctataaatagatgaacagtactctcgtactgttcacgctgactgggcattcattttgcgtcacg

SEQ ID NO: 55823 - DNA, 236 bp, Zea mays
tgtggcggcggacgacgctgcgctaaagccggcaactgacgacgcctcgacgcatcctgccattctcgttggccggtatcacctgattcccactaccagcttcttgcctttttggcttattctccctcatccagcccggcactccacgatttcgtgcccgctgccatcaaattcagctaagcactcgctgtcagcccggcaccaactccgcgctgggcactacgccttcacggttt

SEQ ID NO: 55824 - DNA, 379 bp, Zea mays
agcttgacattgctttggctccctttttgtaacccaatgacatccttaatgccagggcgtctcccattatagagcatgcttctagcaaattaaatttttcattttcaagttcatgctcggcaattttagcagttaatttagctatgtgatcattttgttgtttaatcatagtaaggtgatcatcaatagcttcaacatttacatctctacatctagtgcaaatggtaacatgctcaacagtggatgtagagggtttgcaaacattcaatttctctatcttagcatttagtctagcattatcatctctaagacagataattgaatcattgcaaacattcatttttcaatcttagaaaattaattttcattctcaattcta

SEQ ID NO: 55825 - DNA, 301 bp, Zea mays
taggaatgaactcaatatcctcgattctcgtttcttttattgaaatcttgcacacattgctcatttatatacctttgaacatgtctctttcatttggtacaaatgaaaatttcttatttttcttgtgccaaagcaaagactaatgtactttcaagggtattactatccttagtcttaaattgaaaggaaaatggagtattcgacaaaggcaaggctttcactatgactctgtcagtatcatttatcctttgccctactcatgaactctcattcatatcttttccaaaagggggagagagta

SEQ ID NO: 55826 - DNA, 368 bp, Zea mays
agcttaggggctttcttcgttgtggctctccggcgatcatcgggcatgcaagacgtgattcactatgacgtggtacaacgcttgagcacgtggcacacagtggtaagtggccaacggcggcgaggtctatcccgacaagcaagtgggtacgataaaactcatccgcgaccgagcccgagcctatcttgtgccaagatctttactccgtcgtgattatccccttaccagagagcatgaatcgcggcgatagcgcaaatcacggcgcaaagggtcaccgggctgaacttgtgatcttgttcagtcactgtaccatggtggttaccattagagcgtctgacagaccattttgtagggctcggatctcaaat

SEQ ID NO: 55827 - DNA, 253 bp, Zea mays
actccgctttggacctataatatcgcttgaccagtctccttgaattgccaggggttagcttaccagctcgcgctcgaagaacggggagtgcgtgatgagtgtcatctccttccacccgctggttagccaaccgtagttcccgagccacagttcccgccttgtctcccctaagtacttggtgatggtagtcggggtttggaaccgggtcgggaacgacgcccgtctatggcccgatgaaagcttgcgaccggtg

SEQ ID NO: 55828 - DNA, 370 bp, Zea mays
agcttgacgcgccgtccggtcccgtccatcggaggctcaggctcctctgatcttgacgtgcaggtcagatggcagctacacagtacagcgcgatcgaacaacagagaaaagcagaaccactcaaccacacacagtgctcgttcgcaagctcaccttaacacggccgtccgatggcgacggctactgtgccgtcccctgacaacggtcacgacaaggctaccacgtcatcctcacctcaccggttggctggcgctggccatagccggcgtcttctctctagctagctaacccctcctcatttcttgcgcacctcaaaaacagcgcctctcattcattcctcctctggtttcttctttccaagcaacgtact

SEQ ID NO: 55829 - DNA, 251 bp, Zea mays
cccatcacaagtttattaaagaatgataccaaatttaaccggtcctccagatgccaccaaaccctccagcaactgaagtgttatgacaccttgcttcgtattaactcaaccggacattgaaaagccctttgatgtgtattgggacgcatcaagcagtggcctcggatgtgttttaatgcaagagggccgagttatagcctatgcttcaagaacagttgcaccggcatgaggaacattatccaactcatgac

SEQ ID NO: 55830 - DNA, 369 bp, Zea mays
  unsure (1)..(369): unsure at all n locations
agctttcctgctcacaccttcggcgctgnatcattcttcgtattatncngggctactgtggtgccgacttgagtccgaagatacctgttcacacatatactccagaaatactggtaaatcctgtttttcaggaccttcggatgccgaaggtccccaacacaggttaaacaaggaatacaattgaataatctaggaaatccttaattatgtaaaacccatcaaattatgcaacatattaaaagtaaatattattatatgcaatgagtgggtacaaaaagaatatgcagagggagaatccacttgccttgctcaaatgcgtcctgtggatcgtcctcgaacgaatttggttcgtctaccacaccgtccacc

SEQ ID NO: 55831 - DNA, 411 bp, Zea mays
  unsure (1)..(411): unsure at all n locations
tttaggcaataaacaccttggtgcaaggggagtgaatgaaacactatgtggctccctcttctttttgtaagcncttnntagttgagtagaaagagaattaggcaaatgcacatttcatgatttacgcttaaccaaagtttaagagtaccaaaatgtttacaaaagacagtaagggaactttgcaaaaagacccctataagacccctaaatcagcacccaagtggagaacactatggaatcacccccattccttctaagtccaaaatcaaccctaatctagagatcaggggtgttcacctagctaatggcaccaaaaccccaggtctaaatagcaaaaaggggcaaaattatctaaggaaccccctggaagagtttgaacccaagccaagaccgcttgacacaagatggcac

SEQ ID NO: 55832 - DNA, 380 bp, Zea mays
agcttttaaagagttttgtggacaaattgttttttatatccactttgcatcgggtagggcatccagaagtcaaaatctctctaaaacatctgaatcaccatgcaggggaaatcttaaccctgctttgaagaagcttttaaaaaccaccacctcatcttttttgggcttcggggtaacttcctctcccccgaagcgaaatagctccctcttgtcttcgctaaaatagcctaacttcagtaacttagccatatcaccttcggtaatagtagacttcccaaactctaagtggctgggtttagatggcattgcaccgtactcatcttcaaattcatcttcttcaacgtcagcttgtgttgcttcggcagtaggtgtttcctctg

SEQ ID NO: 55833 - DNA, 393 bp, Zea mays
actcagcttgtgaagagtgttgtggcctttgctgctggctccctctatcaccagtttgagcacagttatggattgacctaacatgcctcgggtgaaatcttcctccgaacccctggtcatatcagagaacctgaatgcttcctcccttttttggcgaaagtcattgtcagctcgaatgttttcgtccatcttctggagcagcttcttcaacgcttgtggtggcttcctggcaaagtactgcgctgatggtcccggccgaagccccttaatcatggcctcaatgacaatttcattgggcactgttggcgcttgtgccctcaggcgccgaaaccttcggacatacgcctaaatgtactcttcgtgggcctgcgtacactggaagagagcctgggc

SEQ ID NO: 55834 - DNA, 375 bp, Zea mays
  unsure (1)..(375): unsure at all n locations
agcttccttgaggccatcaatacagnatataacaccttttcccactctggataatttttctttgataagcttacaacttcggagacaaaatatactgtgcttgttttttgacctaaccatcttgcttctcctgtacaagcgccgcactaactgcagagtgagaggctgctacatataagagcaatggagcccctggcgaaggtggagttagtgttgtcaagtcgatcaagtattgctttaactcttcgaaagccctttgctgagccggaccccattggaaaactttggctgacttcaatatttcaaagaatggtaaattcctttccgctgatctggatatgaatctatttaacgatgccaacctttctgccaacc

SEQ ID NO: 55835 - DNA, 237 bp, Zea mays
  unsure (1)..(237): unsure at all n locations
aatactagctttggaatanacacanaccatggccaaagaattcattttatctgaaaaatattcctctataactagctttttgatgaagcaaatgatgataattgtttgaccagaacaacaagattggtatnccgcctaggatccttcttcaacaacagatagtactgctctcatgcgaaggagtcatcatgactagggaaaatgccacaggtcttcataagaactttatatttttat

SEQ ID NO: 55836 - DNA, 379 bp, Zea mays
tgcaagcttatgtggagcggtgcggaagtgttattttttcatacacagccgaacacgcgaaggtggtcataggaaggggctgtgccgtatagggcgaagtaggggtaaggtggcgcaccgccttcgagggaaaaccgttgaagaagtgggtggcaatgtgcaaggcctctgcccaatagctggcagggaaagaccgcctggaagaggaggcagcggagcatattggtggtggtgcggatcatacgttcggctcggccattctgtgcagaggtgcaagggcacgagagtcgcaactagacgccatgagtgaggaagaaagagcaagaggcgtggttatcgaactcgcagccattatcacactgcagagcacggaccgggc

SEQ ID NO: 55837 - DNA, 263 bp, Zea mays
gctttacgacctcctgtggaagctatccgaggactcggatcgaaaggtatgtttggtcgcggaatggtctgggcccatggcgggccgccctcgggcggctctggcgggtcgcggaagtctcccgaactactggcgagctctggaaaattaagcgccgtgcggaagaagcaaccggaaaaatggtcatgcatgaaggtgggctttatagccgctcacgggcacggtaccggcatgggcaccggggtggccgaccatacgcgggg

SEQ ID NO: 55838 - DNA, 382 bp, Zea mays
agcttcccttttatcccgaaacgcgatacttctttcgttggtgaaaccttcaagtagacgtagtccccttcaagaaaaacaagggccttcgccgttgtctgcataacccttctgacgagcttgggctttcttcatattatgaataattttctgaaccttttcctcggcctccttcaccatatcaggcctaaagaagcacctttccccaggttcagaccaatttagcggagtacgacatcgtcgtccatataaagcttcgaagggtgccatcttgatactttcttgatagctattattatatgaaaactccgccaaaggcaaacattcatcccatttctgtgagaagtccagaacgcatgctcgcaacatatcttcgagtatt

SEQ ID NO: 55839 - DNA, 63 bp, Zea mays
ccaggttattattctgatgaacgatctttttgtacaaaaaaaattatgcttactttggtggag

SEQ ID NO: 55840 - DNA, 373 bp, Zea mays
agcttatagaaatggcccaacggttcatttccttttcagtcagccaattctaattcatgttctcctgagaagaagtgttcatgaaatttccctctaattcttcccaagagttaatagagtttggtggcaaggctgtgtaccatgcgaatgcggtatcagtaagggacaacgagaataaaggaacgcggtaggcttccccatcagccaattctcccaagtgtgctatgaattggcttatatgttcgtgtgtgcttttcccaccttcaccagaaaatttagagaagtctggtattctagttccctgtggatacgacacggtgttgaatcggtggctataaggcttccgatacgattgccctgtacctgacacact

SEQ ID NO: 55841 - DNA, 260 bp, Zea mays
tgaagcgggctctgcgctatgacgaaggacgatcttgctgatagccttgcatataatagtctcgaagtatgagaattgtatatttggaaatttgtaattttgaatcattcttttattcctatactaattcttttttcatatagggtttaatactgagcaacgctttgagagcgcaaaagaatgccgaagacgagagctataatattgctttcaacaacctacaaaccgaggttattaaactgaggaacgaagcttggaaa

SEQ ID NO: 55842 - DNA, 405 bp, Zea mays
atcatcatgaccccccggatcttaatcgactgagcatgcacttaaaccaggaagcacattgtctataataagcgaattgactcaagcctagctacgggtgcatacgtttcaccgaaataaaacctcgacttgggagtatcccttggccacaagacgagctttgttccttgtcaccacaccatgctcgtcttgcttgttgcggaagacccatctggttcctacaacattctgattaggacgtggaactaaatgccatacctcattcctagtgaagttgttgagctcctcttgcatcgccaccacccaatccgaaacttgtagagcttcctctaccctgtgtggctcaatagaggaaacaaaagagtaatgctcacaaaaatgtgcaacaccaaatctagtggttac

SEQ ID NO: 55843 - DNA, 282 bp, Zea mays
ccacatgtgctaagcggcgatgccacagccagcccatgctagtcttagcaattaagcatgcatctagaccgacctcttttttgcaaaatcaactaaatagagtttgccgtctaatacacccttaaaagctaatgaaccatcacttcttctaaagacagacacatctacatttgtgaatagacaattgtatcccatattacataattgacttacggataacaaattatatccaagcgactctactaagaatacattagaaatagagtgctcatttgagaatgc

SEQ ID NO: 55844 - DNA, 381 bp, Zea mays
agcttgtgaaggttcttcatccccttatgtgctaagcggcgatgccacagccagcccatgctagtcttagctattaagcatgcatctagaccagcctcttcttttgcaaaatcaactaaataaagtttgtcgtctaatacacccttaaaagctagtgaaccatcacttcttctaaagacagacacatctacatttgtaaatagacagttataccccatattgcataattgactaaccgatagcaaattatatcctagagactctactaaaaacacattagagatagaatgctcattagaaattgcaattttacctaacccttttaccttgccttgattcccatcaccgaatatgattgaatcttgggaatccttattcttg

SEQ ID NO: 55845 - DNA, 262 bp, Zea mays
aaactattcctggtcagcgagaggtacgacagggatctcaactcctgaagctctccggtatcccccacgagcttgttccttgtaagatttagtgtcctcaacttggtgcacacactgatgccaggagctatagcaccactcagatagttggttccaacatcaaaagtattaagcttcggcagcaagctggagtcgatagcaatctcactagagagcgagttgttcctcaagctgataccctcagcatggagaactttaccgg

SEQ ID NO: 55846 - DNA, 378 bp, Zea mays
agcttctaaagggagagcacatttttttattaacgaatgctcatttcgagaaagacaggatttatagcgcattccacagcaggaagcaagttggtgctcaccatccacacaagaacatcatgacgaccgacaggccactggagctcctacacatggatctattcggcccgatcgcttacataagcatcggcgagagtaagtactgtctagttattatggatgattattctcgcttcacttgggtgctctttttacaggaaaaatctcatacccaagagaccttaaagggattcttgagacgagctcaaaacgagttcggcttaaggatcaaaaaaattagaagcgataacgggacggagttcaagaactctcaaattg

SEQ ID NO: 55847 - DNA, 245 bp, Zea mays
tcatgatcggaatgaataacaaactcttttggccatattttttgctgccatgtttcaagcgctcggaccaaagcatacaattttttatcatacacgaataatttaattgagcacctcccaatttttcactaaaaaatgctataggttttccttgttgcattaaaactcctcctatcccaatcccactagcatcacattctacttcaaaagttttagtgaaatcatgaagaataagtacaggtgct

SEQ ID NO: 55848 - DNA, 344 bp, Zea mays
agcttgcgaagaaatttttgtctttgctgttgacttcctctgtcatcactctgggtggagttgtgaattgacctgacgtgcctcgggtggattcttcctccgaagcccctagtcattttagagaacctatatgctttttcccttctttggcagaagtcattgtcagcccggatgtatttcatccatcttctgaagcagcttctctagagtctgtgggggctttctagcgaaatactgggctgtaggtcctggacgaagccccttaaccatggcctcaatgacaatttcattgggcactgtaggcgcttgtgctctaagatgcaagaaccttcggacatatgcct

SEQ ID NO: 55849 - DNA, 339 bp, Zea mays
  unsure (1)..(339): unsure at all n locations
gaatttggatgaccaatggggtcattgatgggggtgcaacgtggtggtcataaatcttccaccccagcaaacccatcaaccttcaatcattcaattattgaagaagttgtctacccacaagaaatgccaagtattgtggaagatgagcaagaagtggttgctagtgaagatcctcttgaacaagaggataatgatgatcaaatacaaagacaacctctaatgcctcatccttcagtgcaccanggcattcaaagggatcatccagtggacaacatccttcgtagcattaggagaggggtaacaactcgatctcattagcaattttgtcaattttactcg

SEQ ID NO: 55850 - DNA, 365 bp, Zea mays
agcttctgccacgacgtaatagtccctgtccgaaaagaagaataccatgtttgggctacattccggactgccatgacaaaggactttgccataactgcagtattgcctccatacgaagatatagttgctttgtagctcatcaaaaactgttttggatctgaatgcccatcatacatgggaagctgaggtggcttgtatgatgggggccatggggtagcctgtagttctgctgccaaggaagaagcatcatcaaaagtaaaggcatcatgattaaaatcatcataccatccgtcttcgttgaataagccttcttgacgaagctccctatgttggggccttcgatcttgttcatcttgagcaagatg

SEQ ID NO: 55851 - DNA, 89 bp, Zea mays
actcaattgcggtttgatgttttctggggaactcttatggacaccaaattccataagcatcaggtgattgactcggaatacagttgggt

SEQ ID NO: 55852 - DNA, 211 bp, Zea mays
agcttacctgggccggcttaccacactttattccatctggaacccccccttccgcacataccactacttatttttcacgcgcgcgcacagcctagactcagaggatatctccctttctccgacatgtgtggccagggctgctcaaatctattcgcgccctactaatttttcctctcccacctttgaccggatgtcaacagaactcgtgggc

SEQ ID NO: 55853 - DNA, 377 bp, Zea mays
agctttatcgggagagtccgacaacaagaagagggaggaatcacctccccgcgtcaagtcgcaccggagtggcaacaagaagaagaaaatgaagaaagggtctactacgagaccgattcttcgtcgccttccacctccggcttcgacacgtcgtctgtcacttctaagcgccatgagcgcaagaagtttagtaagatccccttacgctatccacacattcccaaacgcgctcctttactttccgtcccactaagcaaaccaccggtttttgacggtgaagattattgtatgtggagtgataaaatgaggtaccatctaacctcactccacgatagcatttgggacattgttgagtttggtgcgcacgaaccatccat

SEQ ID NO: 55854 - DNA, 270 bp, Zea mays
  unsure (1)..(270): unsure at all n locations
gcttntaaaggggagaacacgtgataggtttgactaacgtacaattcgaattatatagacctgtgcagcttgtcaagcaggctaaacaagtgggaggagcacatcacgcagaatgtgatgaccacttcaagacccctggagctgctgcatatggacctcttcggacccgtcgcctatttgagtataagaggaagtaattatggtttagttattgatgatgacttttcccgcttcacttgggtgttctttttgcaggataagtctgaaacc

SEQ ID NO: 55855 - DNA, 383 bp, Zea mays
tgcagctgccagcctacaaataaattccagaaccatttatattagctcatgcctaaacctggtaaaagattgttcatcaagcggcttggtaaagatatctctattgatctttattattaaagtaaaaaatctcgatatcccccttttggtggcgatccctaagaaaatgataccgaaaggctatgtgtttagtgcggctatgctccacgggattgtccgccattttgattgcactctcattatcacatagcaaaagaactttggttaatttgtaaccgtagtcccgcagggtttgcctcatccaaagcaattgcgcgcaacaatggcctgcggcaatatactcggcttcggcggtggaaagagccaccgaattttgcttcttc

SEQ ID NO: 55856 - DNA, 384 bp, Zea mays
agcttatgaaggttcttcatcccaacatgttctttacggcggggccagagccagcccatattagtcttagcgattaagcatgcatctagatcagcatctcttttgagaaatcaactaagtagagcttgccatctaatacacctgttggggggccttcgtcctccgaaggtcctcaaaaacgtaatttaacaatgtctttcaagcatggcttatggacaggtaccttcggactcaggttaaaagcatacacgatgagaagagcatgatcgtgatgaaggttgccgttgctacgaagctacgcgcaagggagcttcggctcaatcgcggaaagaggaaccgacttaaaggggaaaaggctatctagtcctcatagatttgtctata

SEQ ID NO: 55857 - DNA, 381 bp, Zea mays
agctttctagaggccatcaatacagcatattttttcttctccaattccgtgtaattcttctttgatgggctgagtacttcggagatgaagttatcatgcttgcttttttatctggccatcttgtttctcttgtacaagtgccgcactaaccacagcatgggaagcagccacatatagaagcaatggtgtccctgatgaaggtggggttagagttgttagatctatcaagtactgcttcagctccttgaaagctttctgctgggctggacaccattgaaagacttcagctgatttcaatatttcaaagaaaggcaggtttctctctgctgatcttgaaatgaatctgtttagtgatgccagccctcctgctaacctttgaac

SEQ ID NO: 55858 - DNA, 277 bp, Zea mays
tgtgaatcataacttctatagtcatttctagcatgtctcctattatgatacataaaagcatgggtctttttagtactacttgccataggagccttccctttctctggcggggatgggaaccttatggcttggtaaattcttggctttcctcttgaagccaaagccatccttaattgaagggtgtctaccaatcgtgtaggcatccctcgcaaaatttagcttatcaaaatcgctcttgctagtcttaagttgagcattaagactagccaattcatca

SEQ ID NO: 55859 - DNA, 370 bp, Zea mays
agcttgagtaatctactttattatcactttagtcatcatcacttgaagtagcatacttaggggtatctcgagcgcttacctttttctcctttgccatgaggcaagtatggcgctcgctggggaagagagatgacttgttgaaggccgatgcggtgagtccttcgccgtcgtcggaagaagagcaatctgaatcccattctttgccaaggtgcgcctcgccttttgccttcttgtaggccttcttcttctccctcttcccgctcttttcttgttcctgggcattagcattatcgggacaatttgctataaaatgaccagtcttaccgcacttaaaacaggagcgctttccctttgctctgctcatgttggg

SEQ ID NO: 55860 - DNA, 270 bp, Zea mays
ctctgaatatccttgactttgccgggatcaaccgcaatcccatttgctaatagaacatgtcctagaaattggatttccttcagccaaagcgtgcacttgctagaatttaacatatagttgacgttctcttaagcgcgttaatatgatccgtacatgctgagcatgctcctgtttattcttggaataaaccaagatatcatcaatgaagaccaccacaaatttgtccaactcatgcataaataccgagttcatcagatatgtgaagtgggc

SEQ ID NO: 55861 - DNA, 372 bp, Zea mays
agctttattttttcctagggctagatcatataacattattgctctactgctactatttcttttgcactacgctccatctacatctaaagattttgtcatgagtcactgtatcacatgaaaataaatgtgacgacgttcctatactttgactggcagatggtgtttctgagtgatgatgaaggtgcatctggtgaaacatgttatgtgccttcatagcgtttgacattttcaaaaaagtgtaaattggaaagtcttgcacgtttctttggtgaatgatggccctgtgacgatgcaaatcgactcaccctcaccgcaagatgctgctcggtcatggtacattgaaatatggagtgcactgtactgtacgtaaat

SEQ ID NO: 55862 - DNA, 349 bp, Zea mays
  unsure (1)..(349): unsure at all n locations
tagactgcacatgacgagtctgaagaaaaaaaatgctggaaagaagcctggttaaacaaaattacacgaacgaagatcttatgaagcagaaagttctttgtgatgatgtaagcaggcacgtacctcaaaagatttccccgatctctcatactcgagcatactgagagctacttcacagctctgcgagactatgggctcaggatcctttgcaaactcctccaaaagggcaatgctttcttggtctacaacacagcacggtcacaatttcaggtaactggagaatgtctctatgcatgggctggagtttgtaaatgacattncgncaaactcgcagtttagttacctgcga

SEQ ID NO: 55863 - DNA, 381 bp, Zea mays
  unsure (1)..(381): unsure at all n locations
agcttgtgaagattctccatccctttatttgcaagntgaccatgccagagccagcccatattagtcttagcaattaagacaagtgactagctcagcttgattatcattaaaatccactaaatatagctgactatctaacactctcttaaacgctattgaatcatcacttcttctaaagacagtaacacctatatgagtgaatagactattgtagcccattttacacaattgagaaacaaaaagccaattgtaatacaaggaatctacaagaaaaacattggaaatataaaggtcacaagatatagctattttacccaatcctttgaccaaaccttgatttccatccccgaatgtgatagctctttggggatctctattttt

SEQ ID NO: 55864 - DNA, 270 bp, Zea mays
tagtgtctcttgctttgattacaagtgccttgtataataaaaatgggaaggaagaaagcacgattgcaaaagccaagcgacaagagcgacaaataaccacggatcactctctttctctcttaagtcactaatcactaatgatcacttgtctcaattgtggaacttggagagattggaggctttgattgtgtcttgaaatggaatgctagctcttgtattgaatgttgaacgttggaatgcttggatgaagtgaatggaggtggttggggg

SEQ ID NO: 55865 - DNA, 310 bp, Zea mays
ggaccttaaatactcacctttaatggagaacatttatacgtcaactatgtgttttcttaaagacagaccttgtgccagctagtcaatcgaggaaaaaggtgggatgctctcttacaccaaagatgtcattaccgcattgtgacccttgtggatgcttcatatggacctatttcgagccgacacctatctagttttacgaggaagtaagcatggccttgttataatcgcagattttacccgcttctcttgggtattatttttgcaggacaaatatgaaacccatgggaccctctggcactttctcatgaga

SEQ ID NO: 55866 - DNA, 370 bp, Zea mays
agcttctaaagggagaacacattttgggactaacaaatgttcattttgacaaagacaggatttgtagcgtatgtcaagcagggagcaagttggtgccaatcatccacacaagaacgtcatgacaacagacaggccactataattactccacatggatctattcggccaaatcgcttacataagcatcggcgggagtaagtattgtctagttattgtggatgactattcttgcttcacttgggtattctttttacaggaaaaatctcaaactcaagaaactttgaagggattcttgagatgggctcaaaatgagttcggcttgaggatcaagaaaataagaagcgataatggaacgaagttcaagaattct

SEQ ID NO: 55867 - DNA, 347 bp, Zea mays
  unsure (1)..(347): unsure at all n locations
acactttnaatactcagctttcatgaacaaaacctttatcaagaagatcttgcacttgcgcttgnatttccctaacttcttcacgattggttccatatggggacggttagaagtgcaacccctggaataagatccatttgatgctcaatccctcgaattataagtagtccaactgatgtttcttgtggaaacacctttttaaagtcctgcaaaagatcagccacaacactatgaaaagatgttatgtcattaggagaaatcaaaacatctttgttcacaagtacaaacagcacttgatatgggctgttcctcagttcttttagctcaaatttgtggctagcataact

SEQ ID NO: 55868 - DNA, 369 bp, Zea mays
agcttccgcatactccattcctttaacgttgggaatactctattggctaagtattcctgaaccaaatccctagtactgatatgctcggacacaactctaaattcgcccacagcatttgggcatgatgatcccggcgtcatgcggcactggggcctagttaacccgaaggttacgtccagtgggctctgaactagcttctccttcttctcatcaaccttaacataaaatcatttagttttccaaccggttggccatttggtgcggtagctaaccactgatgtcttcatgtatttgtggtacgcaaagttatagcagccgaaattcttgtgcagtccatcttctctagcctttgtctgatagtgaagttcg

SEQ ID NO: 55869 - DNA, 370 bp, Zea mays
agcttctaaagggagttctcattttatgattaaccaatgttcattttgagaaagacaggatttgtagcgcatgccaagcagggagcaagttggtgcccatcatccacacaagaacatcatgacgaccgataggccactggaggtcctacacatggatctattcggcctgatagcttacataagcatcggcgggagtaagtattgtctagttattgtggatgattattctcgcttcacttgggtattctttctgcaggaaaaaactcatacccaagagacattaaagggattcttgagacgggctcaaaatgagttcggcttaaggatcaagaatattagaagcgactacgggacggagttcaagaactca

SEQ ID NO: 55870 - DNA, 244 bp, Zea mays
tgttgaatcaatttacaccactggcttcatcatcaattatctgatgctatttagaatggggaaaatgaatacccctaagccttctcacttaatgacaccattttttactattggagagctaaaatatcttgttacaatggaagggtcaattccatgttggagaagtactcatgatgaataacaaacccaaagaattccaaaaacttttgaagggatgaaaaataattaaattggttaaaatgaa

SEQ ID NO: 55871 - DNA, 416 bp, Zea mays
  unsure (1)..(416): unsure at all n locations
agcttgtgaagccaaacacaagggtgnttattaatgacattaagttcaattgggcctctaagtgcaatgaaggctttgaacaactgaagacactattgaccactgctccggtattggctcaaccggacatcactaaacctttggacgtatattgagatgcatctggcagagggctcggctgcgtactgatgcaagagggccgagggattgtgtatgcttaaaggaagctgcgccgacatgaggagcactatccaactgatgatctggagctagccgctgcggttcatgccctaaagatatggcgtcactatatgctgggtcataactgtcacatatatacagatcatacaacgtggcagtgcatctcctcccactcagagttaaatatgaagcagagacaatggctcgagctcatt

SEQ ID NO: 55872 - DNA, 305 bp, Zea mays
gcgcttgatcgatcttagtctgatcatacgcctttattactgaatggaaaagccccgaccacacctgggaatttctctgagcttaaatcatagttaggatggctcattccagacggattgtttgatatggtttcttccatttggcaaccagaaaagagaggtgaaaccgccgttcagatatggtaaaacaggattatgtctcttcgacactatttaaggtgtggggcaaagaactcatcgtggttagtataaaaggagaaacaacatcttttgaaaatgatagatgatcttgataaaaaggcgga

SEQ ID NO: 55873 - DNA, 408 bp, Zea mays
agcttctaaagggagaacacgtgataggttttactcaatgttcatttccaaaaagatagaccttgtgcagcttgtcaagcagggaaacaagtgggaggctctcatcacaccaaaaatgtgatgacaacatcaagacccctggagctgctacatatggacctcttcggacccgtcgcctatctgagcataggaggaagttagcatggtctagttatcgttgatgacttttcccgcttcacttgggtgttctttttgcaggataagtctgaggcccaaggaaccctcaagcgctctctaaggagagctcaaaacgagtttgagctcaaagtgaagaagatcaggagcgacaacgggtccgagttcaagaaccttcaagtggatgagtttcttgaggaggaggggatcaag

SEQ ID NO: 55874 - DNA, 473 bp, Zea mays
tgaagcttagctaggagaactatcttatcttatgggcctatatgttttactttttctaccgctagaagttgctccggactggtcaacgtctagctttttaacccgtttttgtgagaaccgcttggtaaaaagagtctaaaatcaacgtgaatatcaaattggccaagtcgtcatagtaagtatctgtcactatctagatcctaaactctacaaaatcttatcttctcggttccgcttaatgtttattttcaaagagcattggtgggtgaaaacctgaggctatggcatctgttggttctcagagtagctcacgttgagctatgtggggaaaatgatatgttcaaatgggatttatttgtgacgggtcttttctcggtcacgtcaatgtatagagcactccttaacaataatcatgtgacttataataagactctgtggtctttgaaagtacctttgaagataaaatatttatg

SEQ ID NO: 55875 - DNA, 352 bp, Zea mays
  unsure (1)..(352): unsure at all n locations
agctngagacantattacttaatgggcattttttgttccaatgacacacttcaagtcatcatatagatgcaccaaatacccatataaagccttcaatggccataccatttatgtattggaccacactcttcccttcgaaacatttcaaaaaacttaaccatttcaaatccacatttaagataaaagggacttaaacatccactcccaatgacacttatgacgtttccatcttatgggagaaccctgccccacagaagggcccatacttttttcttctctcaacaggggaggacaataaatcttaccccacgggtaaatattacccttgaaaatttaaacatctcaacctttt

SEQ ID NO: 55876 - DNA, 431 bp, Zea mays
tctcaatgtaagaacatgaagaagaagatgatgaagaagaagaagataatgatcaagcctcgacatcatcctccaaggacgaagaaacagtctgacgcgttgaaaaggtaatgtggatgattcacaagattaatctaatgtgtgtgccccagcaggtcgaggatcttctctttaacattgataagaaaaagtaaagaaagagaggatgcttcgcatgtggggagaagggccactttcgagataattgctcaaattcagtcgaacccaaaaagaggagcaaaggccagacacaagtgtcaagacttgagatggttcttcaaggacccgcagccaccactcatcaacatgttcttcacgttcatcacacaaatgccttatggcaagaggtaaatcgagtatcccattctcaagtgacaatattagtgatgatg

SEQ ID NO: 55877 - DNA, 397 bp, Zea mays
agcttttggattgaacagtgtgaagaaatcgtattttttagaaaaggtgaaagaaagagaaataacagtctagtgccccttaaccgatgtcaggtgggtaaattcttcgaacttgactttgttgccaccgttggaaaagcaagaatctgtctccttcatgagttcaactacggaaaagcaactgcggtgggaaaagcaagggctgggtgggagacctatggtccaactttctacttttttaagcagaaacaggtgttaaaagcagaaccaagcacaccctaaaacattatgtctgaccaaacccaccacataacattccttggtattttatcgtacgccttctccaagtaaattaaaaccatgggtaggttgtgctccctacatcactccctaactt

SEQ ID NO: 55878 - DNA, 449 bp, Zea mays
  unsure (1)..(449): unsure at all n locations
tcgtcagcaatntccttccctttccncgacgctgcggccgctttctcttctgcggcagtggtagcttcttctgtggccatgtctagcagtattttgtcaatatgttcgattgtgctctccaggttcaaatcttcaactgaggcagcttcggcagccgcgacctccgaaggtgtgatttcaatatctgttctttcctcagccgctggtgtcttctgagctaaagctcttggcggtgtcttgtcaatgacctctgtcacaccgatgattctctgtctctttactttagtcgttttcttcgtttttttgggctccttttccttctaaaaaaactttgtcagttgaggccccaatggacttagcttcgcaggcagagattcagtcattaccttcaaaatttcctccacgtcagtggcagaaggtgatgcggnggtttcttcttcgtcggatat

SEQ ID NO: 55879 - DNA, 417 bp, Zea mays
  unsure (1)..(417): unsure at all n locations
agcttntaaagggagagcacattntttgattaacaaatgttcattntgagaaagacatgatttgtagcgcatgccaagcaggaaagcaagttggtgctcatcatccacacaagaatatcatgacgactgacaggccgctggagctcctacacatggacctattcggcccgattgcttacataagcatcggcgggagtaagtactgtctagttattggggatgattattctcgcttcacttgggtattctttttgcatgaaaaatctcatacacaagaaaccttaaaaggattcttgagacgggctcaaaatgagttcggcttaagaatcaagaaaattagaagcgacaacgggacggagttcaagaactcacaaatcgaaggcttccttgaggaggagggcatcaagcatgagttct

SEQ ID NO: 55880 - DNA, 469 bp, Zea mays
  unsure (1)..(469): unsure at all n locations
ttangagaaaatcttctttgggcagntntacatattcgcctttaatttcgggagaacctctctgtgaacatcatatctattatatagattttgaggaaatattataacagcttaacatagggtgccatccaatgcttctagcgactaaaatgtactattttagcagttgtaatttactaaaattaaaagcagagttgcagcctagaattactatgccacatgcatcttgctgcatgttgcgagtggtaagcctaacagtggagaaggaaacaaaaaaggaacatatgtgattggaactaaaatgacactttntacagaaatccattacagaaacccattacagaaatgtctcttatagaaatccattacactaatntctacgttgctcataatctacccatatatgataagctatcatgtctcttaagtaatcccttccatattttcttcatcatntncatggtcacta

SEQ ID NO: 55881 - DNA, 417 bp, Zea mays
  unsure (1)..(417): unsure at all n locations
agcttgaaaatagtgccgaagctttctattgtcatcaagacagcatacaataccttctccaattctgtataatttttctttgataaactaagaacctcggatacaaaatatattggggcctgcctcttgacttggccttcaagcttctcctgaacaagtgctgcacttaccgctgagtgcgaagctgccacatataataacaaaggagcccctggcgtaggtggagttaatgttgttagatctatcaaatactgcttcagttcttcgaaggccttctgctggattggtccccattgaaagacttcggctgacttcaacacttcgaagaatggtaagtttctctctgctgatctagatatgaatctgttgagggacgccagccttcctgtcaatctttgagccccctttnttgtactt

SEQ ID NO: 55882 - DNA, 378 bp, Zea mays
tggatgttcttacgaagcatggatattctcacgaagcatagatattcttctttacgaagcatggatattctcacgaagcatagatattcttctttacgaagcatgaaaagaagggaaggtgttttttcgccgaaggctcaaaaacggtatgtatataaaagtttcatgcatcgcaaagaagtaaattgcaaaatagtttacacattagatccaaaactatacacatcaaatattatagacttagcccaacaaatgttacattaatcgcctaaaaacgtttttacaataactactagtcttccttcagaaccttcttcgcaacttcgttaagcaatttgttaacgacttcgtcaacaacagattcggctatattaataa

SEQ ID NO: 55883 - DNA, 416 bp, Zea mays
agcttggaggcgtctattggttgtttacttggtgtagactcctccttcttctcctccgttgccttgaatgcaacgggttgggcttcggatgagtcgccaagctcgttgattttcctcgagccttctatcatgcactcaaaacttacaaaatgcccgataacttcctcgggggtcattttagtatatctaggattaccacgaatcaattgaacttgagtgggattaacaaaaatgagagatcttaaaataacatttaccacttcatgatcgtcccactttttgctcccgaggttgcgcacttggttcaccaaagtcttgagccggttgtacatgtgttgtggcttctcctcttcgtgaagccggaaacgaccgagctctccctcgatcgttttccgcttggagatcttggtgagctc

SEQ ID NO: 55884 - DNA, 302 bp, Zea mays
agcttggtgccgatggataaacactttttttgtaatcttggctgtcgaactgcttgccgttgtcaactgttagctcggacggtactccgaagcggcaaacgatgttctgccagaagaattttgggccctctttgatgtgattgtggaaacagccctctcttcaatccatttggtgaagtattcgacggctactaacgtgaacttaaggttcctctgaacggtgggcaggggcccgacgatgtccacgccccagcgctggaaaggccatgtatgggcaatcaatttttcattttgcgaggggt

SEQ ID NO: 55885 - DNA, 426 bp, Zea mays
  unsure (1)..(426): unsure at all n locations
ntattaaggctggtgtagtcgatgcacatccgaagcttcccgttcgcctttggaacgatgactggattggccagccacactgggtgatgaacctcttcgatgaagctggcgtccagcagcttccggacctcctttcagatgaagtcctaccgctcgacggactgtctccgaggcttctgactcaccggtttggcgtcagggtggatcttctgatggtgctcgatcacctccttggggatcctaggcatctgcgacggctcccatgcgaacacgtcggcatttgcctggaggaaggcgacgagcgcgagttcctatntttcctccagatcacccgcaatgcgagtggtctggggggaatctacgcagagctggatggccttgacagggacgtcgtccgctccggatggtcgcacctttggcaccttg

SEQ ID NO: 55886 - DNA, 426 bp, Zea mays
ttaagcaccgcggctgcagcttgcctcagtcggaccatacctctttgttccccacaatgggagtggagagatggcgagagtagtgtgtaccctccgtggcaagaggttggatggtggtgtatctgtgctctcggttggcgtgaacccattctggtcttgagaaaaccaatggcgagttgacatgtgcaacggttaagtgctacatatgtcgtgtggatggagatccccagctgggtattaatcgattcagatcgccgttacttctcggacatgaagacttgaagatggctagcataggccaagtgcctgatctaggatagaaagaaacctagctacaggtaactacttaacttgaaaataaaaatggattgttaaggatccactcttagtaagattttcttgcaacagagtctttgaattttgatg

SEQ ID NO: 55887 - DNA, 456 bp, Zea mays
tctaaagggagaacatgtgttaggactaaccgatgtctgttttgagaaagatagaccttgtgcagtgtgctaggcagggaagcaagtgggaactactcatcctagcaaaaaatgtgatgacaatgtcaagaccactggagctcctccacatggatctcttcgagcctgttgcttatcttaacatcggaggaagtaagtatggtctcattattgttgatgatttttctcgcttcacttgggtattctttttgcaaaataaaatagaaacccaaggtactctaaagcgcttcctaagaagagctcaaaatgagttcgagctcaagagctcaaggtgaagaagatcaggagcgacaatgaatctaaattcaagaaccttcaagtagaagagtttcttgaggaataaggcatcaagcatgagttctccgctccctacacaccacaacaaaatggtgtagt

SEQ ID NO: 55888 - DNA, 407 bp, Zea mays
  unsure (1)..(407): unsure at all n locations
tgtgaagattcttcatcccaacatgatctagtctgcgatgccagagccaacccatattagtcttagcaattaagcaagtatcgagttcagctctattaaaatcaactaagtatagctgaccctctaatactcccttaaatgctactgaatcatcacttcttctaaagacagtaacacctatatccataaaaagacagttgtaacccattttgcataattgagaaactgaaagcaagttataatctaaagaatctacaagaaaaacattggaaatagaatgatcaggagatatagcaattttaccaagtcctttaaccaaaccttgattntcatccctgaatgtgatagctctttggggatcatcattnttctcgtaggaggagaacatctttttctcccctgtcatg

SEQ ID NO: 55889 - DNA, 242 bp, Zea mays
gaccagcacgcgctcactactattccccatgttttatgcaatatcggcctcgctatcaaattcggctttattacagattgtaactataaggggtgccaaatttatgaggtgccaagaaaaaagttagcctgcaaaacgacaaaaaaaataaagaaaatgaaataaaagggtaacctaaacgcgtctttgagggcatgtctttaggctcctggcagtacgctacaggtactagacagacgtcc

SEQ ID NO: 55890 - DNA, 428 bp, Zea mays
  unsure (1)..(428): unsure at all n locations
ngacaatgaggaaatggcactcgtcatcaagagcttccgcctaatcctcaagcaaaggagagggagagactacaagtcccactccaagaaagtttgctacaagtgtggtaagcccggtcactttattgcaaaatgtccattatcaagtgacagtgacagggataacgacaagaagggcaagaggagagaaaagaaaaggtactacaagaagaagggcggcgatgcccacgtttgtcgggagtgggactccgacgaaagctcaagtgactcctccgacgatgaggacgccgccaacatcgccgtcaccaagggactactcttccccaacgtcggccacaagtgcctcatggcaaaagacggcanaaagaaggtaaaatcaagatcctccactaaatatgaaaccactagtgatgataatgctagtgatg

SEQ ID NO: 55891 - DNA, 420 bp, Zea mays
agctagtgaaggttcttcatccccacatgtgttatactgcgatgccacagctagcccatgctagtcttagcaattaagcatgcatctagaccggcctcctcttttgcaaaatcaactaaataaagtttgccatctagtacacccttaaaagctaatgaaccatcacttcttctaaagacagacacatcttcatttgtgaataaacaattatatcccatattacaaaattgactaacagacaacaagttatatccaagcgactcaacttaaaacacattggaaatggagtgctcggatgaaatagcaatctttcctaaccctttcaccttgccttgattcccatcaccgaatatgattgaatcttgtggatccttgttcttgacgtaggaagagaacatcctctgtttccccgtcatgtgg

SEQ ID NO: 55892 - DNA, 475 bp, Zea mays
  unsure (1)..(475): unsure at all n locations
tagaaaagtctggtataaatctgcggtaatatccagccagtctaaggattcttctgacctgatgaacagnggtcgggggtttccactccaaaatgtccttgactctgctggggtctaccgcaatccctcttgcagatagaacatgtcctagaaattgaatttcctccagccaaaatgcgcacttgctgaacttggcatacaactgatgttccctcaggcgcgttaatacgatccgtaaatgttgggtgtgctcctcttcattcttggaatatatcaaaatgtcatcaatgaagaccaccacaaacttgtctagctcgggcatgaacaccgagttcatcaaatatgtgaagtgggccggagcatttgttaacccgaaagacattaccagatattcaaacaacccataccgcgtagtgaaggcggtctttggtatatcttcgggccgaatacggatctggtgatagcccgatctgag

SEQ ID NO: 55893 - DNA, 410 bp, Zea mays
agcttctccggcgaactactgtcccggacatgctggacagggacccctcaaaaaaaaaacttcacccacctccaactccgagtcccgtccatcgcacgagcgcacggcgcaccttgcacagattcttgctgccgcagtgccgctggcttaaattataattataatccgtttcactttttatgcctggttcgatacacttgtcttattcaaattttttcgaaaaaaataaaaaaaaaataaaactaaacttaaaatatattatacgctaaacaatatcacattaaaatttaacaataattagattcttttgaataatatgagtcggtcaaacttataaaaaagtcaaacggattataaattagaacgtatggagtagtatttttcacattaactgcggccagctaaaataa

SEQ ID NO: 55894 - DNA, 446 bp, Zea mays
  unsure (1)..(446): unsure at all n locations
aactcaagctacctgactccttcttctncaccagcacaatattggagacccactctgcgtatctgcaaggtctgataaaatcagcttctagcaaccggtggatttcgtccttgatgcgtgggagaagatctggatgaaatattctagctctctgcttgaaaggtctgaaaccagatttaataagcagccgatgctctacgatctctcggcttaatccaggcatctcagtgtaattccaagcaaagcaatctgaatattccttcaatagaccgatcatctcatccctaggatcggtctccagggtcttggttacaaaagtcagccttggagttttaccatctcctatgtcaatctcctccaaaggatcggccgatgtaaacccctgtcctagtttatcaagatctctgaatgcctctattatgttccccacagaggaattagatgat

SEQ ID NO: 55895 - DNA, 417 bp, Zea mays
  unsure (1)..(417): unsure at all n locations
agcttgtggaatntaagatgtcatagaatctgtgtctagaagaaaccactatatcaagcgaaagcatagctctcacatgtgatgagcataagatgaagcgcactaagaaggttgagacaagattattcaagatcatcaagtgaagatgaagatgatgatgatagttttgataaatgtgatgataaatactccacctctacctatgatgacgaagccaagcaattgataggagttaagaagatgatttgtaatatgagagctaagggtatgtccattacaattgaagatatcatatttaccgaccaaagaagaaggcaaagaacaaattggtgctttatttgcagttaaaaatggacactntgtgtaagaatgtccaaacaagcccacacccaaggttaataagacagtgtgcaatgc

SEQ ID NO: 55896 - DNA, 449 bp, Zea mays
  unsure (1)..(449): unsure at all n locations
gatcgtgacgaaaggtgtcgtcgctccgaagctgngtggaaaggagcttctgctaaatcgcacgaaggggaaccgacttaaaagggaaaaggatgttcaatcctcatacaattttctataagtcaatagtaaatgtaaagggcataattgtagtttctcataggctgtgtcctgtgcctataaatagatgaaaagtacccccgtactgttcgcgctgacttgtacttgcttttgcgccacacttgtgctttttgccttctgtcaagccgaaggtacttttgtaattcgatattatttctatttttccatgataatataataagaatgaattaacaatgttacatgattgtttatggtgtctcttacacttcatatgcttcttcttttattaatatatattgcaatgatgaagatatgtccttcataaccttcgtctaaagatcattata

SEQ ID NO: 55897 - DNA, 395 bp, Zea mays
agcttgacatttctaaggcttttgactcggtatcgtgggccttccttctcgaggtcttgaaaaaacttggttttggacagatctggtgtgatataataagcgggttgttagctacctcttctaccaagattttactaaatggtctgccaggggaaagtattgggcatcaacgcggactgaggcagggtgatcctctatcgcctatgttgtttattcttgtaatggatgtcttgaatctgctcgtgcagcgagcctctgaggaagggtttcttcaacctctctcttcaaggaatatgcagcaccgtatctcgttgtacgtggatgacgcagtgttatttctaagtcctactgccctggacatcagtatggttatggatattcttcattatttggtc

SEQ ID NO: 55898 - DNA, 419 bp, Zea mays
actcagcttcacagaatgacagcgaaggttctccattctcagataggcataaatgtgctaacctatgttgatgatattatagtcaaaagcaccaagaaagaaaatcacattgctgatctgcaggagacattcgctaatttcagacaggctggtctgaagctgaatccagagaagtgtgtcttcggagtaaagaaggggaaattccttggttgtctggtctcaacaaagggaatcgaagctaatccaaataagatcgaagctattcttcggatggagccgccaagcacaaagaagggggctcaatgactaacaggaagactggcatctctcaatcgattcatatctagatcagcagagagaaatttaccattctttgaagtgctgaagtcagctgaagtctttcaatggggatcagctga

SEQ ID NO: 55899 - DNA, 418 bp, Zea mays
agcttctaaagggagaacacgtgatttgtttatttacgtacaattcgaaaaagatagaccttgtgcagcttgtcaagcaggtaaacaagtgggaggagcgcatcacagcaagaatgtgatgaccacttcaagacctctggagctgctacatatggacctcttcggacccatcgcctatctgagcataggaggaagtaagtatggtttagttattgttgatgacttttcccgcttcacttgggtgttctttttgcaggataagtctgaaacccaaggtaccctcaagcgcttcctcagaagagctcataatgagtttgagctcaatgtgaagaagataagaagcgacaacgggtccgagttcaagaaccttcaagtgaaggagttccttgaggaggaagggatcaagcacgagttctcc

SEQ ID NO: 55900 - DNA, 479 bp, Zea mays
  unsure (1)..(479): unsure at all n locations
catagaaactaagcttgtcacagttaactcaggggttatcctcctcttatgtttatttgcgagcacgggctgctgcaatgacatgagaacatggaaagtggtactgcctcggttccccacaagtgcatgacaattcattaaggatgaccacatgtttccttgactcttgtgattcaccatctgaagttgtactatcttgtaggtacacctcataagtccctgattggaagtcaaaaaaatcaaccgtatgtgttgtggcccattcctttgccttctcaagaaaagcctttggttgtggagccgatctctctccatcactccacaatcccacatcatgggcgtgtctatcattaaaccaagcaacaagcttgtagaaagtaaaggacactatagcagtcatcgacataccacgtactccacnaatccaacaatttgttgaaggactccgccaagtaactacactggaactcatacccgca

SEQ ID NO: 55901 - DNA, 419 bp, Zea mays
  unsure (1)..(419): unsure at all n locations
agcttctaaagggagagcacattntgttatcttaccaatgttcattntgagaaagacagggtttgtagcgcatgtcaagcaggaaagcaagttggtgttcatcatccacacaagaacatcatgacgaccgacaggccgcttgagctactccacatggacctatttggcccgattgcttacataagcatcggcgggagtaagtattgtcttgtaattgtggatgattattctcgcttcacttgggtgttctttttgcaggaaaaatcacaaacctaagagacgttgaagggattcttgagacgggctcaaaatgagttcggcttaaggataaaaaatatcagaagcgacaacgggacggagttcaagaactcacaaatagaaggctttcttgaggaggagggcatcaagcatgagttctc

SEQ ID NO: 55902 - DNA, 479 bp, Zea mays
  unsure (1)..(479): unsure at all n locations
gaatactaagcttggtaagtngaccaaataacatgaagacctatagtgctattattgtgattctgtccaaaggtatgaagccatttctattgagcaagttagaactattgattctttatcatgcattgctatattcgaaaatgaaaatgtgatgctaaaggaaacaatagaaatgctaaaatttgaaaagctagccttacaagataaatatgatatgcttttgtattctcatgaaagatttatggatgatcatatcatgttagataatgctcatgaagttgttctaactaatttgaaatcataccaacctcacaagtgcacatgtcttcaaattgaaactatnttaccatgtgctaatctttgttgctctcaagcaagccaaccttccattgatctagaattnttangaacaagtaatgtttcatttgcaaaagaaaactatgagctcaagtaagaaaatgagaggctaatatgatctt

SEQ ID NO: 55903 - DNA, 415 bp, Zea mays
agcttgcacgacaacatcactgtataagatcagcaaagtgcctgagatacaccattgatcataaacgctaagtggcgcggaaccatcacaaataccaagccagatgcccaaaagttgttagtggagctactcaaaagcttatccagcttcaggctcatattctcagaaagctgtagaaaagaccattaataaccaaacaaaaatgcactattttgacatgtgactttaaaaaggaagcatacttgttgccatgcagactcaactaaatgaacttatactgttagaataatacaatcatgtctaatatgactttctatatcagtagggctacttgataaccaaccaagaatctgaaaaatcaggattcaagtgttaggtcaggacacatgtgagtttaactgcaaaggaagacaca

SEQ ID NO: 55904 - DNA, 469 bp, Zea mays
  unsure (1)..(469): unsure at all n locations
nttggctntntttcattatgcanaagggataatccacaattttttcctgatttccagntaaacaacgaaggaaaaatattgagtattttttggtctcatgctagtcagcaaggagagtatgttgattttagggatgcagttacatttgatacaactcataagactaatttgtatggaaaacccctaggaatgtttgttggtgcaaaccaccacctacaatgcacaatgtttgggttctcattgttgggagatgaaactgttgaaacattcgagtgggtgtttaatgcattcaagacatgcatggngactgaaggaccaagagtaatgttgacaggtatgatttatgtatagataataactatgaactcgaagtacatggagtataaattcaatatcttgtgcatanttacaatgcatgtgagtcatgttttggtatgtaccatacattgtttacataaaaataaccatc

SEQ ID NO: 55905 - DNA, 416 bp, Zea mays
agcttagcaaaagaaatttctagaatcattattattgagctcatgcctaagtctggtaaaagattgttcatcaagtggcttggtaaagatatcggctaattgatctttagtattaatgtaagaaatctcgatatcccccttttgttggtgatccctaagaaaatgataccgaatggctatgtgcttagtgcggctatgctcgacgggattgtcggccatcttaattgcactctcattatcacatagcaaagggactttggttaatttgtaaccgtagtcccgcagggtttgcctcatccaaagcaattgcgcgcaacaatgtcctgcggcaatgtactcggcttcggcggtggaaagagcgaccgaattttgcttctttgaagcccaagacaccaaggatcttcccaagaactggc

SEQ ID NO: 55906 - DNA, 462 bp, Zea mays
  unsure (1)..(462): unsure at all n locations
tgccagcccctcctcatgctagggcgcctgcccgatgccctataactgtgtcgccggcagcgaatcgccgtcgagcccaccggcggccgggtttttccccgcggtcggtcggttcgccccgccccgtcagccgctggcgccgtctccccctcctgctctccctgacgcgtgggccccatggaaacgtcgtcgtctctcgcgtgcctgtgccgtttcgtgttgtgggccgtggctgggccggcgtgctcgcgcccgcgcgcgcccctgtgcccggctaggccggatttcgcccccccggcccaccaaagccaaaaacctttctcttttttcttttccaccctttntatcctctagttatttatatcttaatantttatgtactaaaatttatcanaacactgtctaagtcacataaaataataatattagaaaatgacgcactccactcagaagaccactatt

SEQ ID NO: 55907 - DNA, 360 bp, Zea mays
agcttgcattacatgtttaaattccttgttttgtatctagggcttgtctaacctagttaagataaccgccaacaaagcgagtgaaaaagcttaactcgggtcaaacttgacaagtcttagttttaagcttttagcacttaaattcttgctttttatgcaattattggttcttgaaatatgcatgaggtattgcacttaggggaagtattcaaaactcaaatcactcatgaaaacccctagtgcaagccaaaatgcaaatttcactatttgcctattttctctaaaaattatctagcctatggcaaaatattttgaaaagtatatgagggtgccaatacctgtcccaacaagtgttatttt

SEQ ID NO: 55908 - DNA, 364 bp, Zea mays
tattacggaacttagaatctcagctttacggatacctttacccccctctggtgctctcatgcccgcctggatgtccggtggcgcaccggacatgaactgtagagtgtccggtgcgtctgctcgcgcgtgcctgacttctgcgcgctctggcgctgtcacactgtacaccggacatgtccggtgaattatagcggactagccgttgcgaattcccgaagctggcgagttcagagtcgcgtccccttggagcaccggacactgtctggtgtacaccggacagtccggtgaattatagcgcggtggctctgagcttttccgaaggtgaggagttcagcgcgtggagaaccctggtgcaccgaacatg

SEQ ID NO: 55909 - DNA, 338 bp, Zea mays
aggggttggcggcgaggcactggcgctgcatgcggagggcggcaccgaccgcgggcatggcgaccgcacgaggacgacactacggctcggacgaaaccctctgcctgtacacactcgccctctcccaccgacgtctttgtgcagccaccacgggatgggatccctgcgggagacccgccaaatacacgtaacgggccactttgagcggcccattccagcccataaacagcggcaaacaaccgccaagcccaggggatatatgctctctggtggcgactacggcgtggatgcaaagtgtttgagtcccccacggacaaaatgaatgagatccccattat

SEQ ID NO: 55910 - DNA, 461 bp, Zea mays
  unsure (1)..(461): unsure at all n locations
tgtcgtagctgacttccgntttaagattcgtttactacattattagcataacaaggtcactagaacaaagtggtggaagcttaaaggggatgtggcccaaactttcaaggagagagttatcgaggagggcccttgggcagaagagggagacgcaaacatcatgtggaggaagatggcaacatgcatccgaaagatagcttcagaagagtttgggttaagtcaaggaaacagaagggaagttaaagacacttggtggtggaacgaagatgtccaaaaggctaccaaggagaagaaagattgctacaaacgcttacatcatgacaagtgtgcagacaacatagagaagtacaagatagcgaagaagtctgcanaaaagcgcggttagtagagcccggcgtcgcctatgacgacctcttatcaacggtggacacacagcagggagaaaaggatatctatatgat

SEQ ID NO: 55911 - DNA, 420 bp, Zea mays
agcttatgaattggacgaggtcacccaaattcttcctttgactcccaagccaccactatactccttgcctctctatgtcgagaggagtataacaaggttgaaagggaaataggcttacaccttttcctaattgattttggtggttgaatttcccaacacaaataattggactaactagtttgctctagattatgagttctacaggtaccaaagattcacaacaaaccaataaaaataccaacaaagggttcaaataaaaagagcaaaaggcaaccaaagtgtgccctggtctggcgcaccggactgtccggtgtgccaccggacagtcgccggtgcactagggaacccaactccgaacttgccaccttcgggaattctgagagccgctccgctataattcaccggactgtccggtgtgcc

SEQ ID NO: 55912 - DNA, 454 bp, Zea mays
  unsure (1)..(454): unsure at all n locations
atttttgatatgcaagtacacctaatcatacatctcgtggatcagataaaaatattagggccactatatttacatcatatgtttcagttggagcgatacctgngagtattaaaaggttatgtgcgaaatcgcgctcacccagagggttcaatcatggagggatacactacagaagaagtgattgagagctgtatagattacataagtgacggaacaatgataggtgtgcgtgtacctaaacatgagggtaaactatgtgggagagggagaatgggcaagaaaacttttcgcgttgaggattacaagctagtacattgtgctcatggtagtgtactacaacatctcacgatagccgagccttacatagaggaacacctggatgagcttcgtaaagaaaatcagaaccgcacagaggactggatcatgagggagcacaaacatcgtttcagcgaat

SEQ ID NO: 55913 - DNA, 404 bp, Zea mays
agcttattaccatttatgacgtcgagatgactgttgtactgggtcctccagagcgccgaagccgacactttggccaagggcaccctcaagttcccggagctgagccacgaggtggaagaccagggcgacgaatatacctgggagagtactctcagcacttccgagggttcagcggaagaggtgaccaatcagctggcctacaaggtcgtcaagaaggacttggtggaaaaggtgctgcaagtcattgcaaagttccgtcccgccctcattgagacgcacgcaaaggaccttggccatggcgacggtgcagctagcagtggtaccagtacgccttccgccgcagtgccagcggtctctacagagtcggcttccggcagtgctgctgcttctaagagcgctgcctc

SEQ ID NO: 55914 - DNA, 478 bp, Zea mays
  unsure (1)..(478): unsure at all n locations
tgaaggcatcacaagcgtctcagtgccatcgttcggcgcatgagcagctggcaatgatcacgaagctcttcagccatgaggaagctaagaaacaggagaggtatccaagggagtgtccgctgctggacggcgggaactatgtacaggatcgaagcatgccagtgtggaaagttcggaggagctcttggcggtcttgaaaaagagtacgatgactcgcttccgagagaacctgtggatctatgtgtcaaggaagtcggctgctctctgctccgagaacgggtctttgaaagccactatgccaacgactatgccagctgcgaagaagacgatgctgacgagcagccagaggacaccccaaagctgtggcggtcctcctaccagtctcgaanaagcagaagcatccgattcgtggactttgcgaaagaccagatcgtcgatgatgtcccagaccgagtagaggcatgacatgacgcccatg

SEQ ID NO: 55915 - DNA, 420 bp, Zea mays
agcttctaaagggagaacacgtgataggtttgacttacgtgcatttcgaaaaagatagaccttgtgcagcttgtcaagcaggtaaacaagcgggaggatcacatcacagcaagaatgtgatgaccacttcaagacccctggagctgctgcatatggacctcttcggacccatcgcctatttgagtatagggggaagtaagtatggtctagttattgttgatgacttttcccgcttcacttgggtgttctttttgcaggataagtctgaaacccaagggaccctcaagcgcttcctcaggagggctcaaaatgagtttgagctcaaagtgaagaagataaggagcgacaacgggtccgagttcaagaaccttcaagtggaggaattccttgaagaggaagggatcaagcacgagttctccg

SEQ ID NO: 55916 - DNA, 476 bp, Zea mays
tactgcatgtatcgtgcacgcacacaaagtgtcacacaacagcactgcaaactagctaagatttgaaaaaatattgcatcatttacaagctttacctaaaaagagctgcaaacaccgtgtttacagtgttgagactcgacaagtccagctccagttcctgactatcagattcgattgcctgaagaaaatgcaaatgttataaaataataaagtaaggggacataatacaccaattatctgtgtgaattacatcaaatcctgatgtatcgtactgccgcctcttatcgggatctgacaggatgttataggagaatgtgacttcctggaacctgtctgatgcaacagggtcatcgccattcttgtccggatggtacctgccgcaattcaccagaaggaaacaccataatgagtgctatcctaaaccaggctaccgttaggcagcccaatgttcagacaaaaaatggctcgcaagtcac

SEQ ID NO: 55917 - DNA, 413 bp, Zea mays
  unsure (1)..(413): unsure at all n locations
agcttctncttgcctcataaccttgattatatttcattctgattnccagcctgccggcctattgcttcggtagctaattacaggaaactctgcggttttccggtaggcaaaattgtagcaaccgaagttttcatgaagcccatcttttcgggcctttgtttgataatgcaattcatgaactcgacagaaactgtcagcaaaaggctccactgcttggcttcggagggcccaaatataaacgctaagcctaacgatagcgttaggagttaactggtgaaggtagatgccaaacctcttcaatatctccgcaacaatctcgtgaacagggaatcttagcccagcctttaaaaagcttttgaagatgacaacctcgtccttctctggcttcggggtggtctcttctcctccgaagc

SEQ ID NO: 55918 - DNA, 449 bp, Zea mays
  unsure (1)..(449): unsure at all n locations
ttggccncacctgcagactcgcatccgggggccactgtctgtaccctgatactaaggtaccccttactactgtataaagacgcagtacccgcgcggctatttttagtcacgtgataaaagagttgtatgtgtgaccaggccatgactcgccccagcctcgagcgactactctgggccagcaacaacacctaaccccaccacatgggcgggtccgctgccaccacgtgtctagtgaaagtgacatactctgtgatatcaccaatgagtccggacccccaagggaaggtgccggaccccagtatatacggtctcggcctccaagtttggtccaggacctccacgtgtgcgaaccggaccactagaatgggatccggacccccagtatggggtttgggccacccacagtgnggtcctacggttccaggacagaacatacctgngccttaatc

SEQ ID NO: 55919 - DNA, 422 bp, Zea mays
agcttcagctctcctttaagactttgacttgttgtttcattcaaaagcttgtcgacagctttgtcaatagcatcactagcaattttgattatatcaagcgcctccttgacggatgggttagcttcatggttatatggctccaggggcagtgaaagctcagctgcattgaaacacaaatatctatcagtgccgaagctaaaaaacttactaagatgagttataaagagcataccaataagtctcgcccgctcggcaacttcttcagctcttttggcctcttctaaagcctcatgagattctttttcattcctcttaaaagctttatcagcaatttctcgcccaccctgcaaccatatctcggaaataaaattcccacctaaagtagttgctttcactgaaaggtttctaacatcattagctga

SEQ ID NO: 55920 - DNA, 421 bp, Zea mays
cctcctaacgccggaccggccgcgcggatttcacggattccacagatttcgcgtacctcacaccaacctggtgactcctcatccctatagatcgtgtcccgatgcccccaccttcatccacgccaactggaagtcgccacggatacctcagggaacagagagcctcgtcgcatgagagagagagagagtgagagaaagatggctcgggtcgccgccgtggttgcacgcccacatctgcgccggggccttgggatgccatctatgttcatcgctgtgacccgttgcacctgtgcgtgacctcgctgggtgggattgtgggctagatatccggtgattcctcaccggtgtggaaacaccaccggcgtgccgcactacaccatcgaccggccctgtcttcatgcctaccctcggtaatacacct

SEQ ID NO: 55921 - DNA, 417 bp, Zea mays
  unsure (1)..(417): unsure at all n locations
tactatgtgaactatgccgatccattttgtttgatccagaactatcagcgcttgccagatgcccccgttccggtcgaccacgaccagcacccaacataagactttcctagttatttagccaagactatagccatgagaggtctcatggtagcactgctttcccgggtggtcactccatgttccaattaatatgcaataactcttgtttaaccatcgggttaacaacaataaagtaaacttaccatttggaacattagtatcatacaggagtgactacataaggttaaagctgtancaatagcattgctactaaacgaaagtacaatacccaggtttgatcaacgaataatgttggaaaggctacgggtatctaaataggtctcccatcaaattatgcatattatatatatccaagaa

SEQ ID NO: 55922 - DNA, 436 bp, Zea mays
taaagccatggtaagtagcatatgccaataatatgcgaattgtctcaagcctagctacgggtgcataggtttcaccgaaatccacaccttcgacttgggagtatcccttggccacaagtcgtgctttgttccttgtcaccacaccatgctcatcttgcttgttgcggaagacccatttggttcctacaacattttaattaggacgtggaactaaatgacatacctcattcctattgaagttgttgagctcctcttgcattgccactacccaatccgaatcttgaaatgtttcctctaccctgtgtggctcaatagaggaaacaaaagagtaatgctcacaaaaatgtgcaacacgagatctagtagttaccccttatgaatgtcgccgaggatggtgtcgacatggtgatctcgttggattgcttggtggactctt

SEQ ID NO: 55923 - DNA, 411 bp, Zea mays
  unsure (1)..(411): unsure at all n locations
agcttcatgaaagccgggcttcggtttctcttttacaaattgntggtcgaagttttgaaaacctttgaaatttaccttcataaactcactctcgaagctatcattgaagtgtggatctttatatgggccatgaggagccaaggactggaaccacatgcaagatgcttctgcaacattcattagttgtcttatgagacgaaggctaccggaaaggagcagtatcacaacaactttggttgttacagcttcgtgcctcgatctgaggcaagctacctagtgcctaagttttgaaagaggtggccgggctcctggatgtaggaatggttttacgtaaagaatgacctaagtcagagggaggatgtgatagggattattcaacgccctatatggtctcgcttcgggattaagaaa

SEQ ID NO: 55924 - DNA, 470 bp, Zea mays
  unsure (1)..(470): unsure at all n locations
tgtgaagattcttcatcccaacatgggctagtcggcggtgccagagccaacccatgttagtcttagcaattaagcatgtgtcgagttcagctctttcgaaatctactaagtatagctgaccctctaacacacccttaaatgctattgaatcatcacttcttctaaagacagtgacacctacatcagtgaaaagacagttgtagcccattttgcataattgagatacagaaagcaaattgtaatctaaagagtctacaagaaaaacattggaaatagaatggtcaggtgatatagcaattttacccaatcctttgaccaaaccttgatttccatccccaaatctaattgctcgttggggatcttggtttttctcataggaggagaacattatcttctccccagtcatgtggtttgtgcatccgctgtcgagtatncaactngagcccncggatgcataaacctacaaaaca

SEQ ID NO: 55925 - DNA, 382 bp, Zea mays
  unsure (1)..(382): unsure at all n locations
gcaagcttaaattatataacgcactcttgtattnttttattgcggctgacntttatacttaaaaaccgtcctatcgtcccgggttgtacatacccttagggcttgttcggctagctctcaatccatgtggattgagggggaccggatgatcttgaatcccaaacaagacaaacttcttatcatttatttgtaatcccatccaatccatgtgtgttgtgaataaccaaacaagcccttacgaggtgtctgccatcaacgcacacactatattcttatatctagtcaaacaccaaggcctttttactgggttctactcacatcaccactgagaaatatggggaaacggattcaaatgctctctggacattagctatttcatact

SEQ ID NO: 55926 - DNA, 455 bp, Zea mays
  unsure (1)..(455): unsure at all n locations
tctaaagggagaacacattntaggattaacaaatgttcattttgataaagacaggatatgtagcgcatgccaagcaggaaagcaagttggcgcccatcatccacacaagaacatcatgacgaccgacatgccactggatctcctacacatggacctattcggcccgatcgcttacataagtatcggcggtagtaagtactgtctagttattgtggatgattattctcgcttcacttgggtgttctttttgcaggagaaatctcatacccaagagaccttaaagggattcttgagacgggctcaaaatgagttcggcttgaggatcaagaaaattagaagcgacaacgagacggagttcaagaactcacacatcgaatgctttcttgaggaggagggcatcaagcatgagttctcttcttcctacaccccacaacaaaatggtatagtggagagga

SEQ ID NO: 55927 - DNA, 370 bp, Zea mays
agcttcgttaaggtgaacgaaaatagtgattttgttaatggagttcgggctcaagtgagtcatgttgatgtgataaaaatcaaggataccaccgaaaaaaggagatatgggaaggccgatgccgctaataagaaaaggactgtaaaccactgactcgcgggtatcttccgttgggacagtggtcccgtggcaagaacgccaagaacagagttcccgtggagggagaaccccgatggaaacaatgcggacaagcttaacttcataaatcacagacatatggttacctgcgaagggtaactgactgttggggtcgatggcggtgatcactgtggcagacgagttcgcggtcttcctcttgggcgccatcttg

SEQ ID NO: 55928 - DNA, 455 bp, Zea mays
  unsure (1)..(455): unsure at all n locations
tcatgaaggttgggcttcgnttcccaatgcacaagatgctggtttaagttctgaagacatttgaaatataccttcattagcttacccccgaagctttgattaaagtggggtttttatttgggctatgaggagccaaggactagagctagatgctagatgcttttgtaatatacatgaattatcttaccaggcaaaggcaaccgaggagtaataccataacaacttcgggtgctactgtttcgtgccccgctctaaggcaagttatctcgtgccaacattcctgaagaaatggttgggttcttggatgaagcaatagttctacgtgacaaatgatttgagtgagagggaggatgtgaagggcattatttatcatcccatatggtcacgcttcngcattagaaggccattaattgcaattgngaatgtggtgcaagcatgcctaatggttttcaata

SEQ ID NO: 55929 - DNA, 388 bp, Zea mays
agcttaccaaagaaaatggttaagactgtttatcttttttaattaagttggtcaaaattttattagcaattactaagtataagtagatacaactcaattaaattattgatcgatataaaagtaccataaagtaatcccacaatgcaatgcatggcgggttaaatttaattccatagattactcatgtgagggtccgagtcactcttgactgtgagcacgaatgatatatcagttttacactatgtagaggttgcgcatctttagccacaaggcgtgctcccttttcgccctgagttgtacgaacccttaaacacttctaaggtgagttggtgagggtacactactagtcatttacaaagttccactaacttaagaaaacctgctacta

SEQ ID NO: 55930 - DNA, 414 bp, Zea mays
  unsure (1)..(414): unsure at all n locations
gggatactntggttcccaaccgatctcagcccgagtttttgaattctccattctcttccccaatggaccgtcagtacctggagttaaaacacacttcgggttaattaagctatatgctattgcctgtgcactcaagaatatgaaagaatcaaagaaccatagcaggtcgtacaagactaaccagtaaagcctccaaacttcgtgtcaaattttccactattgttaacagcatccattatttcttgcatgtaaagttttttttccttttaaattaggcaaaccgaaagagtaactctgcacagcaaaactgactaaaaaacaaagaaaccgatatgaacaaggtcagcagttaccttganaggggctttgtgtcacagcccagaaatattcgactctgcagtccctttttcatga

SEQ ID NO: 55931 - DNA, 408 bp, Zea mays
  unsure (1)..(408): unsure at all n locations
agcttaacaagtgtgagtnctgtttctctatgtttctattcttgcgtcatattataaaccgagatggactacctatcgatccaaagaacgtagcagccattctggactggaaatcaccaaaagatgttcgaggaatcaagagtttcattagaatggccggttattatcgacgtttcattgagggtttctccaacattggcagaccaatgacagccttgctagcaaagaaggttgatttcaagtggacccccgcgcgccaagaatctattgagatgttgaagcaaaagatgacaacaccaccactgttggttctgccagatgttcacaagccattctcattatactgtgatgctncgcacaccagactatgatgtgcgtcaatgtacgaagggagagtagcgtcatact

SEQ ID NO: 55932 - DNA, 157 bp, Zea mays
cccggccatacctacccatattgcgtacatcctaaaatcattaactattgagttctccacagacatgaaacacttgagggcatgaatagtagcaaacctgggtcctagatcctggggtgagaaggaggctcttaagaatctttaactgatcgctata

SEQ ID NO: 55933 - DNA, 411 bp, Zea mays
agcttataacaaaaaaagggaggctttatctttaccatatgtgataatagaaggggaattgtataaacatggagtttgttcaccactcctcaaatgattatcaagaaccaaaggtatggaattaatgaaagagatacatgcaggtctgtgtggatctcacattggatctaggtccttgttaggaaaagtttttcgacaaggattttattggccgaaggcagcttctgatgcagcagaattagtccaaaaatgcgaaggctgtcaaaaatgtgcaagggatcagaagcaaccttcatctctcactcaattaatacaacccacttggtcgttgcaaaggtggggcctctatttgctaggcccacttccaccagcacaaggaaatctaaaatatgttgtggtggcggtagagta

SEQ ID NO: 55934 - DNA, 453 bp, Zea mays
  unsure (1)..(453): unsure at all n locations
tgacagcaccatntgacattntacataaaatttctgagatcaagaatatttagttcattcctcaacatgcaaaagcgggtcttatcaagaggcttagtgaaaatatccgctaattgatcttccgacctcactccttctaaaatgatatctcctttagcaacatgatctctaaggaagtgatgacggatatcaatgtgcttggtgcgagagtgttgtacagggttattagcaattttaacaacactctcattatcacacaacaaaggtaccttttctagaactacgccatagtctagaagagtttgtttcatatataaaatttgtgtgcaacaagcacctgcggcaatgtattccgcttcggcagttgacaaggcaacactantttgctttttggatgtccatgatactagtgatctaccaagcagaatggcatccccagaagtacttttctta

SEQ ID NO: 55935 - DNA, 415 bp, Zea mays
agcttaatacccctaaaaattatctaactttgtaaattgcaaggctccccttgttcaggataatgaaggctacattttatatcctgctaattatcgtgagcacaaaattaggaagatacatgctaggaaacctcaaaatgtttctcaccatgcatttatatataaaaatgaggcttctagctctaggcataccacacatgttaagatgcctagaaagaaaattcctgctgcatcaaatgagcataatgtttcatttaagacttttgatgcatcatatgtgcttactaacaaatcaggcaaaatagttgtcaaatatgttgggggcaaacacaagagtccaaagacttgtgtttgggtacccaaggtgcttgtttctaacgtcaaaggacccaagcctgtttgggtacctaagaac

SEQ ID NO: 55936 - DNA, 478 bp, Zea mays
tccattaccatcatgacgagttaagcttaatagcgtctctgtcagtgaaatgcaacttgtagtcaatgtagtgaaatgatgctatttgatttctggaaagcactggggtccagaaccctttcttttttctagcgaggatttcatgatattattgccagaagattgacaccagttccttggtttcaaatttgattgctactgtcgatggaatccctgcaaatgctgatgtgggttgtggaaatagctgatagatttgtatggtcttctcttcaccgggcaatagcttgcctatcatgttgccttctgttggattggatcccagcagaactaggcatctgtgaacaacatggctacagaagaggacctggaaactatataattcttcagcatcatgtgtcagaaaaattacaaaactgatcctacgaagtcaacgattcgcttctccacgccgaagtaattagagctcgtactccaatgg

SEQ ID NO: 55937 - DNA, 414 bp, Zea mays
  unsure (1)..(414): unsure at all n locations
agcttgcaggtcgcttcaaatcaatgcgctctttgcatatgatgctgactacactccaaccactgattcagaggcccaatcttcagctgggagcactgaatctatggacacagaaaaaattcctcatacacatcccgactacccaattgacatcacaggatggacatttccaaagaggaggttttctatggctgaatactgctcaaggagaactgngaatcaatacactctgccatctgacaccaatgttcaattcttccatactcagctccaatttgatgttttttggggcacattgatggataccaacttctataaacatcaagtgattgattggtccttcatgctacgacaatcagttatggaggatctgattcctaagtttgagacatgtggtctgtatcagtttatggg

SEQ ID NO: 55938 - DNA, 116 bp, Zea mays
  unsure (1)..(116): unsure at all n locations
actcagctntgtgtggagttgggagaggatatgatctctctggtgtgccctttatataacgctacctcttgtaaggtgtagaagagtggaaacttggataccattgaatgtggggt

SEQ ID NO: 55939 - DNA, 416 bp, Zea mays
agcttgccaatacttgtcaaagcaacagttcattctctcacagcaactacagaccataccagtaacctggcctttcgcatgctggggactggatatgattggacctttcaaaaaaactcaagggggatatactcatgtattggtggcgattgacaaattcactaaatggatagagttcaagcccattgcttctttaacctctgctaaggctgtggaattcatacaagacataatattcaggttcggaataccaaacaacatcatcactgacttaggatccaacttcactagttcagaattcttcgacttctgcgagtaaaagagcattcagatcaagtacgcatctgtagcacacccaagagccaacgggcaggttgagcgagccaacggaatgatattggaggcactcacgaaaa

SEQ ID NO: 55940 - DNA, 472 bp, Zea mays
  unsure (1)..(472): unsure at all n locations
tgtgtcgtgggaaacagtcgagtccaggctcgcgaaagccgttgcacgggcggtagaaagagatgagcatctccgcagaaggattctaaggaaacagcgtttagctcatgcaaacggacagagcagagctaggtctcgcgctcggcaagggaggcaaggagaccaggaagtcgccaggagccgtcccgtggaggcatgacaacgcagctggtaaatggggtgcatcangacaccgttatgtagctgaatggcgatcaaccttttccctggtgacagtcttgagagcttgcatggtcatattggtctgttttaggccgcatccaccctcagcactgcgaggagggtgggagtaagtttgctaagtaggattangggtagaggtagagatgtaaaatagaccagaattcgtcagacttggactcttggagaaaatcgttttgctcgtattctttgtgggatgtgagtgacaatg

SEQ ID NO: 55941 - DNA, 409 bp, Zea mays
agcttgtccaatacgggttaccttggccttatattgaaaatagatgcatcttttcggaaaggagatacgaaccttctcctcttgtataacaaacaggcctccccaaaaggcagaagcatctccgcttggttataggctgccttcaaggaaatacgtgatacccgttcccttggctagactagagccgctaaagatccatttgatgggttgcctctgaggagctgtgccgtccgttgacaccttcctcaagtgtctgaatcaagtaatgggtttgttttttctcgtacctgcatggtttcctacttattggcttgaagccgacccatagctttgttgtggtgaggatgactctattcctctatttctgatttcgatttgattcacgactgatccacagttcgatgtcttt

SEQ ID NO: 55942 - DNA, 467 bp, Zea mays
  unsure (1)..(467): unsure at all n locations
tnccaacccanacctttcccggcaagcaaatagaatagaattctatcctatgaaacaagcttctactattcaaatcaaacctcagagtcttcagatgcacgtgctttgtgaacattccatctcctgcacaagacaaactcagctgtgaaggaatgaatgggaatgggcttgtcggctgtgaagactatcatctgtaggcgagcgaagcaaagccctagttcaatctagaggccgtcacgaagggatccctcgggtcaacaagcaagggatgagcgctttgttgctttattatcacattagagaagcggaacctccaagctcagacatctcgaactcagaaactacccttctatccaccctgctcctccggcatcggaagcagaactacctgaccgaagggagatagacaggaagggaagacggtcatacaaaggccgaataaagctctcttgaagctgcatctgaat

SEQ ID NO: 55943 - DNA, 420 bp, Zea mays
  unsure (1)..(420): unsure at all n locations
agcttgcattgcatgtttaaatatcttgtattgcatctatggctngnctaacctagttgagagaaccgccaacaaagcgagtgaaaaagcttaactcggatcaaacttgacaagtcttagttttaagcttttagcaattgaattcttactttttatgcaattgttggttcttgaaatatgcatgaggtactgcacttagggggagtattcaaaactcaaatcactaatgaaaacccctagtgcaaggccaaaatgcaaatttcaccatttgcctattttctctaaaaattatctagcctatggcaaaatattttaaaaattatgagaaaaaatatgagggtgccaatacttgtcccaacaagtgttattttgtgtgtttatatgttgggatntggtttggttggaaactagatagaaaaa

SEQ ID NO: 55944 - DNA, 287 bp, Zea mays
  unsure (1)..(287): unsure at all n locations
ctacggctcgatcctccctgagggggttttgggccactgtctgtacacctaaacatgggtaccccctgctactatatgaagacgtagtacccacgcggctatatcttattcgcgtggagatggtgctgcgtgtgggaccaaagcgtggctcgccccagcctcgggtgactactctgggaccgcaacagcgcctgacccaccacacaagcgggttccgagccgccatgtgtccggganaggtgatatgcgccaaaacacctacagtaagtccggacccccatgggagt

SEQ ID NO: 55945 - DNA, 378 bp, Zea mays
ttttttggggggggaaacatttgatttatctgcaggatacacacttgagttattccaagtgaacttcggggtttgatcgtttctcttgtgcctatgttccttcacatcctattgaacttccgatgtcaggtcaatgctttcgttctttcgtcaaacattttgtagctgaattgttacaagtatagctttgggagcctccgtgagtacctccaggtctactactcctcactttatatgtttcctattttttatgatagattagcaatctgtaataggtcaattaaactaagcttgttcgttttgctctcaatccagattgagtaagtttaattctcaaataggttaaaaattttcataattgtttcttatccacggata

SEQ ID NO: 55946 - DNA, 471 bp, Zea mays
tctaaagggagaacacactttaggattaacatttgttcattttgagaaagacaggatttgtagcgcatgtcaagcagggaagcaagttggagtccatcatccacacaagaacatcatgatgaccgacaggccgcttgagctactccacatggatctattcggcccgattgcttacataagcatcggcgggagtaagtattgtcttgtaatagtggatgattattctcgcttcacttgggtattctttttacaggaaaaatctcaaacccaagagactttaaagggattcttgagacgggctcaaaatgagttcagcttaaggatcaagagaataagaagcgacaatgggacggagttcaagaactcacaaatcgaaggcttccttgaggaggagggaatcaagcatgagttctcttctccctacactccacaacaaaatggtgtagtggagaggaagaatcgaactctatt

SEQ ID NO: 55947 - DNA, 414 bp, Zea mays
agcttggctgccttgcattatgccttttatatataaatttccaatccgatttgggctccatatagaaatagttttccaacacatcaatgataagatatggttaccaatctcaatataaaattagctaacttaactctggactggtttagcaaagatgcagcaactttcgcagacctttttgtgcctaccagaggttatgtaccccacatgacatctccagcccttataagggagaatattgaaagggaaatgtgcatttgagccatttctagttgttttggtgattaaatgctcaacacaccatattggactaaccactttaatatgagcatgagcataggtgttatgaccggccgccactacaggcgccggataacaacagaggcaacggctagacatgcagattatttggat

SEQ ID NO: 55948 - DNA, 469 bp, Zea mays
  unsure (1)..(469): unsure at all n locations
tcatagaagtccaattcaaccaagggaaattgtttacagtatttaaataaacaagggcacttgtttattaaaacagcacaccctacctaacttatttttatcatgtcaattagtcagtatctagtaaattcactaagagttaaaagatcatgtgcaaattttaaggaatgttatatgcaaatcaataatgaaaacctcacgtgcaaaaaaacatgacaactcaatatacataacaaataaaattttatgacgccatcctaatcctaatatgacctgatgtcatgatctccacagaaacccttagctagtaacacactgcaagtaactcgagttactaaatcacagttcatcccgcgtatatgtaattatgtatatctgaaagctccaatccctggaaccatggtaaccatatattaaaatcaccgtaatctgcagcaaaatcaacatactctgcagcanaggatacatc

SEQ ID NO: 55949 - DNA, 398 bp, Zea mays
agcttgtgaaggttcttcatccctacttgttctaagcgacgatgccacagccagcccatgctagtcttagcaattaagcatgcatctagaccggcctcctcttttgcaaaatcaactaaatagagtttaccgtctaatacacccttaaaagctaatgaaccatcacttcttctaaagacagacacatctacatttgtgaatagacaattatatcccatattacataattgacttacgtatagcaaattatgtccaagcgactcaactaataatacattagaaatagagtgctcatttgagattgcaatcttgcctaagcctttaaccttgccttggttcccatcaccgaatatgattgaatcttgggggatccttgttcttgacgtaggaagagaaca

SEQ ID NO: 55950 - DNA, 451 bp, Zea mays
  unsure (1)..(451): unsure at all n locations
ngacgaggaagagaggnggtatcatggatgcatttaaattaatccatatggggatgatcccatggccatggccacacgtcgtcgtcgtcgaggcgctctcggcgtgcctgccgtacgtacgtctggacttttagctccatcgatcaggtaccagatggtgctgcgcatgtgtgagcaagctggccggcaggcatagtggacgtgggaaggcatcatcaatccgatgtacgcaatcgcatgtctgcgccggccggccggttctggccaccacgttggaatgcacatgcatgtatatgcgatgcaaatatgggtgccgctttgaggcctgctgccacgttcggccatcggtccaccagtacgcatacgcattggtagtgttacgtaatgtgggtgcacgactgcacgcttctgcaccacggccggccggtacgagaaaaagaagaagaataac

SEQ ID NO: 55951 - DNA, 429 bp, Zea mays
  unsure (1)..(429): unsure at all n locations
atctctacaaccatntgtggattattcttttatcttttatagtaagcctcctttaaacacagattttaactcttatctttcgcgcacatgtttttacaatgagttgtttatctcaatctaacatcactatgattgctgaatgataatatttcttgcgccggtatgttatatgaacacaacgtgtttacatcaccctctttggcaacacattatgatttacaaacccaaccttggacttcaacaaggctattgcaagcttggacggaactcaaggatcacaacattctatcaatatatctatcactatacacctacagggatgtttcacacttatctgtatgttatctcacttcatgtctaatatcgggcacatgtgcattccaccacgactgacaaagtctgttgttcatgtgattgacgtggcacacg

SEQ ID NO: 55952 - DNA, 468 bp, Zea mays
  unsure (1)..(468): unsure at all n locations
tcagtttcgcccccctcacgctcaaccctggcggtagaactttctctggccatttaattatgaatntgtggaagtttaatacttttttcttccgaagttttttcttcggacgaagcaggcttcaagctggagcttcgttcgattccgagagtcaagcttcggcgatggctaaaaattttggcagcaaaacagtgcaaatagcaatgaatgctgtggtaacttcacacctactcgtctgtttatatagtactgcaggtaagaaggcgaagcgccaggatttttacaccaggcggacacccgctcgcactcactgtgtggtggaccgcaaagaccaaacagtaactctgcaaggtgggaccgctacgcgctgggaaactgaatcgtttctcgacaacgagctcatggaagggtgtttttagaccttctgcgccccgaagcttaagagactcttttcacggatcaagctcg

SEQ ID NO: 55953 - DNA, 372 bp, Zea mays
agcttaccgcatttgaagcatgatctctttcccttgggcttagtcttgctcggctgtccattgcgaccctttagcaccgtcttgaatctcttgataatgagggccatttcttcttcattaagaccggccgcctcaatttgcgccaccttgctgggtagcgcctccttgttccctgtggctttgagagcaaaagggtgcggctcgttaatcggtccattcaaggcatcgtgcacataccttgcctccttgatcatcatccgcccgctgacgaattttcctaggacttcttcgggcgacattatggtgtacctgggattctcacgaatattattcaccaaatgaggatcaagaacggtgaaggacctgagcatt

SEQ ID NO: 55954 - DNA, 394 bp, Zea mays
  unsure (1)..(394): unsure at all n locations
tgtgatntatccaatttaaaacaagcaccatctcttaacatatgatttctatggataaactcaacacaagagatgacattagtagcacaagcactagtttcttatttagcaaccctttatatgtggaaggcaagcgagttgctaaaatagagaaacctcataatatggactaaatttcccttgagccctcatgcacaatatattttgaatgacatggataatatgcatggttgttaaatgaagtctaaagggctgacttaatccatattatggtgagtgtctatgtgatacccggtttgcaaagaagagaagttggggttgttctttntggttttttcctcattcgggtgttgcattntggggaaattggaattgtggaaaacattcacaacta

SEQ ID NO: 55955 - DNA, 414 bp, Zea mays
agcttctaaagggagaacacattttatgtctaacaaatgttcattttgagaaagacaggatttgtagcgcatgccaagcaggaaagcaagttggagctcatcatccgcataagaacataatgacgaccgacaggccactggagctcctacacatggatctattcggcccgatcgcttacataagcatcggcgggagtaagtactgtctagttattgtggatgattattctcgcttcacttgggtattctttttacaggaaaaatctcaaacccaagagaccttaaagggattcttgagacgggctcaaaatgagttcggcttaaggatcaagaaaattagaagcgacaacgggacggagttcaagaactcacaaatcgaaggcttccttgaggaggagggcatcaagcatgagt

SEQ ID NO: 55956 - DNA, 430 bp, Zea mays
  unsure (1)..(430): unsure at all n locations
ntagggttttgcttgtttacttgctcagcatgatggtgcaaatcgttgagcaccgcgccgagactttagtggatttcctggtggaggaagaagctgcttattccacaccacaagttcccaaccgcccgatgccaggtgaaagtcgcctaaagggagggtgaataggcggaatctgaaaattataaacctgagcataactacaagtcagggttagcgttagaaatataagtgagtccaaaagagagggcgaaaacaaatcacaatcaaataagaatggatgacacggtgatttgttttaccgaggttcggttcttgcaaacctactccccattaaggtggtcacaaagaccgggtctctttcaaccctttccctctctcaaacggtcacttagaccgagtgagctngcttccttgatttcccgggtcactt

SEQ ID NO: 55957 - DNA, 413 bp, Zea mays
agcttctaaagggagaacatattttatgattaacaaatgttcattttgagaaagacaggatttgtagcgcatgccaggcagggaagcaagttggagtccatcatccacacaagaacatcatgacgaccgacaggccgcttgagctactccacatggatctattcggcccgattgcttacataagcatcgacgggagtaagtattgtcttggaataggggatgattattctcgcttcacttgggtattctttttacaggaaaaatctcaaacccaagagaccttaaagggattcttgagacgggctcaaaatgagttcgccttaaggatcaagaaaataagaagcgacaacgggacggagttcaagaactctcaaattgaaagcttccttgaggaggagggcatcaagcatgag

SEQ ID NO: 55958 - DNA, 425 bp, Zea mays
  unsure (1)..(425): unsure at all n locations
ttgagagcactaaaagggaaaatgcctaatcccggttctggcacgtgaatagcttcttttcaaacacttctatcgaaacacaactccattgggatattccattctttcaagtcccttttgattgcctcctcccatatcaagtttggtcgtcctctacctctcttcacattattgtcccgtattatgatgcctctgtgcaccggtgcctctgggggtctccggtggacatgctcaaacatctcaaccggtgttgaataagtttttcttcaattggcgctactactagccgatcacatatgtcatcatttctcactcggtccaatcttgtgtgcccacatatccaacgcaacatacgcatctctgcgacactttttgtgntggatatgtcgtctcttagtaggccaacactcagccccatataacat

SEQ ID NO: 55959 - DNA, 312 bp, Zea mays
  unsure (1)..(312): unsure at all n locations
gcagcntcatatttatgtagaacgaacgactttatatatgtttcgtgccgtaccggacctactcggaggcggtgaagagagcgaccatgcgctgctgaaacacatgttatactgaagtggagctgcggctcacatgaggacgaaacaatggtctttacacatacaggtcgatgataccgaccctgctgaagaccatggacgtgtacacgagtgctgacacttatggtgcatacctgctgcttttttgccttgcccgcaaacagacgaaaagcacgtacacgtcgagctgctacgacatttaatacacctcat

SEQ ID NO: 55960 - DNA, 453 bp, Zea mays
  unsure (1)..(453): unsure at all n locations
atgatgacaggaaggaaagaaccgacttaagaaggaaaaagctatctagaccctgatgaactactatagagttattatcgaatgtcaagggcttgaatgtaattatgcatgggctgcgacccgtgcctataaatagatgaacagtactcccgtactgttcacgttgactgagtatttgtttttgcgtcgcgcttgtatttttactttcttcaagccgaaggtacattgataatcattatctttatttattcatgataataacacaaaaataatgcagtaatgataacatatttgattgttcgcattgctcttgttttgtataaacccctcttcatttttatacgtagtactcatggaggtacgctttctgtaaccttcgttcgagaatctgtatatcctaanggaaataatgcttcgaaggacgaaggactctaacanttaacattctttatg

SEQ ID NO: 55961 - DNA, 418 bp, Zea mays
agcttgagtggcttggtgcaccggactattttgtctgagaggacttctatagggcttcggtggcctagagtaccggactacttacgcagaacaattatttgtagaagagctgaagcacatggcttatactagttggacagactctagataggtttttctaagtcataggaattctctcaaatacagtcaaatggaatcaaagaagaaaatcccaatttggacttaactccagcaggtctgcggtgcatcggaccagttacacattgaaggcagacttcaagcttgagtggcttggtgcaccggactacttgcgcagagaggacttctacagggcttcggtggcctgaagcactggactacttacgcagaacaattatttgttgaagagctgaagcacatggcttatactagttggaca

SEQ ID NO: 55962 - DNA, 432 bp, Zea mays
  unsure (1)..(432): unsure at all n locations
tgtgagcaatacaagtacagaagggagaaggctgcttctgctgatcatccgaagcccatgctcttatgtgacgatatagcgaaacagaaggtgctattgggatctcaattatctgaagagcaggagaaaaccctaataaggttcctgttcaacaacaaagatgtcttcgcatgatcagctaatgatctctatggtgtcaacagggatgttattgaacactcgctcaatgttgatccatccttcagacccagaaagcagaggcttcggaagatgtctgatgacaaagccgaaggtgctcggaatgaagtgaaaagactcctcagcgctggagtcatcagagaagtaaaatacccagaatggctagctaacactgttatggtgaagaaagccaatggtaaatggagaatgtgcattgattntactgatctcaat

SEQ ID NO: 55963 - DNA, 420 bp, Zea mays
agcttaacactggagctgaactaagcagttttttgagtgttgaaaatgccagctcatgatcagatgtccatacatataatgtcccttttttgagtaagtcagtcaagggcttggcaatgactgcaaaatggcgcacaaatctcctatagtaaccagcaagactgaggaaactccttaattccttaacattagttggactcggccagtgcaaaatggcgtcaaccttggaaggatcagtggccaccccttcttcactaatgacatgccccaagtatgatatagatcgagcagcaaaggtgcatttggaacgtttgacaaaccatgagtcttttttttaacagagcaatacttgttccaaatgagtcaggtgctcctcgaatgtggaactgaacaccaaaatgtcatcaaagaagacaataa

SEQ ID NO: 55964 - DNA, 474 bp, Zea mays
  unsure (1)..(474): unsure at all n locations
tatatatgcgagctagtagaacctggctggcgtgaggaactgagaccctgtttgggaacaaagnttttggaaaccatggtttttgaaatactacagtatactttagtcatgacaataccacagtttaaaatactataattttagaataccacaatattgaatacatagaggtgtttggaagcaaagtatttttttgcacgcgggagagatgcgcgcgttgcgttttacagagaaaattgaggtagaaatctaagtttaaaatagttcaaaagagctgcagtatttgtaatactttagttttgaaacagagattttagctagcttgccaaacacctttcgatatataatactacagtttttgagaatactgcagtattcttccaaaactttgaaaaaacttcactcccagacaccccctttagtggacgcgagaaaccaagagctagtagaactatatttccattttttttttct

SEQ ID NO: 55965 - DNA, 416 bp, Zea mays
  unsure (1)..(416): unsure at all n locations
agcttaanacccctaaaagaatgtctaattttgtttatggtaaggctcccatggttcaggataacgagggttacattttatatcctgctggttatctcgagcacaaaattgggagaattcattgtaggaagtctcactctggctctcatcatgcttttatgtataagagtgaggcatctagctctaggcaatcaacccatgttaaattgactaaaaagaaatctcctattgcatcaaatgatcataacatttcatttaagacttatgatgcttcatatgttttaactaacaaatcaggcaaagtagttgccaaatatgttggggccaaacacaagggctcaaagacttgtgtttgggtacccaaggtgcttgtttctaatgtcaaaggacccaagaccgtttgggtacctaagaac

SEQ ID NO: 55966 - DNA, 480 bp, Zea mays
  unsure (1)..(480): unsure at all n locations
actcagcttgtgttacaagaaagaaagtgggagcgctgctgtatttctgatcttgtatgtggatgacatattattgattgggaatgacattcctatgctggagtccgtcaaggcttcactgaaaaagagtttttctatgaaggacttangggaagcagcatatattttgggcataaggatctatagagataggtcgaagaggcttataggattaagtcaagatacgtacattgacaaggttttgaaacggttcaacatggaacagtccaagaaaggtttcatacctatgtcacatggtaaacaccttagccagatgcaatgtcctgcgacggctaatgagcgggagcgcatgagtaaggtaccatacgcctcagcgattggatcaatcatgtatgccatgataagtacacgcccagatgtttcatacgctataagtgctacgagtagataccangctgatccaggtgaggatcactggac

SEQ ID NO: 55967 - DNA, 408 bp, Zea mays
  unsure (1)..(408): unsure at all n locations
ttaagtcanctgcggcatgcagcttgcccggggccctcgcaccgttattcttttcgcgctaccggagttaagaacccgccggcgcacgtggaccgggtaagcccctgcaccgttttccaattttttgcgcgcatgggctctgtgtcaccccgtgaagctcctcgtgcaccctaattgaactataccgtcgtggtttggccggagcaagagccgccgacgacccccgccgcctgtgctcgtggccagaatatcttcgaccaccttcgacaccgacccgcacaccgacgtgacttgtcgaacctctcggacgtcactgaccacctcgncggagctctactgccgccggtaagccccaccgccgtaaactatgccgccggtactgtttcatccggtcaaggagcgcggggt

SEQ ID NO: 55968 - DNA, 476 bp, Zea mays
  unsure (1)..(476): unsure at all n locations
tcctgggcacatctcccattaccacccacttagacctaatgtcttagttatataggcaccaacacgcacaacagcagcgtgattntcgggagtaatccgaagctcgcacagtcaacagcattgtgccagagtccaagcatatctattaaagagtatcatgttcttgatgtatctttaccttttatgccattttaattttcgtatgagaaacaagtcatgaaggactaaatttcgattttctgtaataattgtgactatatcaacgagtaaaatacgtcttanacagatttctgaagctacaaaacttgttcctaagggagcgcagagtaagttccaaagctacaaaagtcgttcctaagggagcgcagagtaagttccgaagctacaaaagtcgttactaaaggagcgcagagntaagtttctaagctcagaagtcgttcctaaggggatgcagagcttanataccaccgaaatat

SEQ ID NO: 55969 - DNA, 416 bp, Zea mays
  unsure (1)..(416): unsure at all n locations
agcttctctcgttgtcggcgtcaaactctcttgtccggtgcggcacaggcccctgcccggctggacccaccctgtcgcgcgcctccctccttcatcgccttcgtcggttctgtcgctgccgcggccttcccgatcggatccacgttgttgcggccatcccggctagatcatccatccctttggctggatccgtcgctgtcgtggctttcccgaccggatccgccgataccccctcttttctgccgtggtcgcgaccaccctgaccgacgcagacgcgtgtgctgtcgccgtcctccctggcgaggctcgtcgacaaccgatcgcgaaacgaagcaagaaggccttgaggttgttgctgctctcttgttgtgtcgccctcgccgntcgttgacgctcgaacgtcgacccctcccgaa

SEQ ID NO: 55970 - DNA, 444 bp, Zea mays
  unsure (1)..(444): unsure at all n locations
ttaaggttatgtccatgtatttgtcagaccaattcttattgttgagttatcatacattcaaggatactcacgattaagaacaactccctccgttcgaaatcataaatcgttctggctntttctagatacacaacctttacagtatatctagattatgtatcaagaaaagcgagaatgacttataatttggaatgtagggagcagtttaaattttagagtgagtaagggacaatcctgtgatgttatgatgttgctatgtttccagctgaaagtaatgccgggctctaggcctctagttctgaattccatcactcaaaataccgtacatactgcaggaaaaaacgagcgaagagcattaaaacgccctatagcttctaagtgcacagtatcagtacaccacgaatttgaacacgtgattnttgaccagctccaccgcgatgacct

SEQ ID NO: 55971 - DNA, 416 bp, Zea mays
  unsure (1)..(416): unsure at all n locations
agctntatcaaatggacgtgaagagngtccctctaatggaccgatcaaggaggaggtctatgttgagcaacctcccggctttgaagacagtaagtatcctaatcatgtctataggctctctaaggcgctttatgggctcaagcaagccccaagagcatggtatgaatgccttacagatctccttatttcaaatggcttcaaagacggcaaagccgatcctactttattcaccaaaacacttgacaatgattagtttgtatgccaaatttatgttgatgatattatatttgggtctactaacaaatctacatgtgaagaatttagtaggatcatgacacacaaattctagatgtctatgatgggggagttgaagtatgttctaggaattcaagtcaagcaactccaagagggcacct

SEQ ID NO: 55972 - DNA, 323 bp, Zea mays
agcttttaaagggagaacacgagataggtgggactttctgtgcattcgaaatatttataccctgagcggcgaggcaagcaggtaaactagtgggaggagcacatcacaacgagaatgcgatgaccacttctagacctcttgagctgctgcatatggacctattcggaccgcgaccctatctgagcgtatgacgaaagcagctaggtctagggattgctgatgacttttaccggttcacttgggcgttctgtttacaggataagtctgaaacccaagggaccctcaagcgcttcctaaagagagctcacaatgagtttgagctc

SEQ ID NO: 55973 - DNA, 378 bp, Zea mays
cgatgccatagccagcccatgcaagtgttagcaattaaacatgcatctagaccagcctcctcttttgcaaaatcaactaagtagagtttgtcgtctaatacacctttaaaagctagtgaaccatcacttcttctaaagacagacacatctacatttgtgaataaacaattgtatcccatattgcataattgactaacagatagtaaattatatcccagaaactccactaaaaacacattataaatagagtgctcatttgagattgcaatcttacctaaccctgttaccttgccttggttcccatcaccgaaaattattgaatcttgggaatccttattcttgacggaggaagtgaacatcttcttctcccccgtcata

SEQ ID NO: 55974 - DNA, 478 bp, Zea mays
ttacggacactatgaatactaagcttctaagggagaacacgtgataggtttgactatcgtgcaattctaaaaagatagaccttgtgcagcttgtcaagcaggtaaataagtgggaggagcacatcacagcaagaatgtgatgaccacttcaagacctctggagctgctgcatatggatctcttcggacccgtcgcctatctgagcataggaggaagtaagtatggtctagttattattgatgacttttcccgcttcacttgggtgttctttttgcaggataagtctgaaacccaagggaccctcaagcgcttcctaaggagagctcaaaatgagtttgagctcaaggtgaaaaagataagaagcgacaacgggtccgaattcaagaatcttcaagtggaggagttccttgaggaggaggggatcaagcacgagttctccgcttcctacacacctcagcaaaatggtgtggtagagggg

SEQ ID NO: 55975 - DNA, 322 bp, Zea mays
ttacaggatcttctgcgactaagcatacccccaacagtcgcaatgtttgaataggatttttgtttgagtgccatggtcttattgaatgttggccctaatagcatattaaagacataaacttcagctattcccctctagaatcattaggactcctcactcctctaaagaatttcactttctaaccaatcagatggcgaacgctcatttctgacccaactataacaggaaccaccgtggttaacagataccaccacgaccgcgacaccctaacatggtacagattatctgcgctcatatgcagcttgctgagggattactacat

SEQ ID NO: 55976 - DNA, 456 bp, Zea mays
  unsure (1)..(456): unsure at all n locations
tgtgaagattcttcatcccaacatgtgctagtcggcgatgttctagccagcccatgttagtcttagcaattaagcaagtgtcgagttcagctctatcaaaatctaccaagtatagctgaccctttaacactcccttaaatgctattgaatcatcacttcttctaaagacagtgacacctacatcagtgaatagatagttgtagcccatttgacataattgagatacagaaagcaagttgtaatctaaagaatctacaagaaaaacattggaaatggtatggtcaggtgatatagcaattttacccaatcctttgaccaaaccttgatttccatccccgaatgtgatagctcgttggggatcttgtgttttctcataagaggagaacatncttttctcccctgtcatgtggtttgtgcacccgctgtcgagtattcaacttgagcccccggatgcat

SEQ ID NO: 55977 - DNA, 380 bp, Zea mays
  unsure (1)..(380): unsure at all n locations
agcttatgtcgatgacgtggtaatcataatagaaaactcagcaaacttcatcgaagatttgcagctggtcttcaacagcctgaggcgataccggtggaagctcaatccagagaaatgtgttttcgaagtaccagcagggaagttactcagattcattgtcagccactgaggaatcgaagccagcccagaaaaaatcaaggccatcatgagaatggaagcgctgcgatcacaaaagaaagtacagaggcttactggatgcatggcagccttgagcatgttcatatcaaggctgggcgagaaaggcatgccattctacaaattgctgaagaaggtggacaagttttantggaccacagaagcacaggaagctctataagcac

SEQ ID NO: 55978 - DNA, 368 bp, Zea mays
cggcatacagatgacaatctcgtagtctctgaagtacctttgtcaaatgctcctcatgctcttgctcattctgggaatatatgagaatgtcatcaataaacatcaccacgaacttgttgaggtagtccatgaacacgctgttcgtcaagtacataaagtgggctggcgcattcgtcaagccgaatgtcataaccgtgaactcatatagtccatacttggtgatgaatgctgtgttcggtatatccgaaggttggattctaagctgatggtaacctgacctcagatctatcttcaagaacacactggcttctctcaactgatcgaataaatcttcaattctggacagggggtacttgttctttgatata

SEQ ID NO: 55979 - DNA, 414 bp, Zea mays
agctttacaaaaagtacaagatcatctatatcggagttcagagctaaaaggtacggccaaaatacgacaagcaagcattggctgtctagtgcacaccggactatcctgtgcgccatcttcagaagctccaacggctacctttagcggctcgtacacgtggcatgtccggtgcattactagacagtccggtgttccgcagaaagctgcagaactgctttcaaatggctatatttgagttggggcctatatatacttcacctaaccggccatttggaggtgtgggagttcaagaaacataccaagacatattgtagacatttccaagtgctcatacatccaagtgcttaatagaatcactcggggattagcatgggttctttgcgaagtgcttaggttaattagaccgcttatgtg

SEQ ID NO: 55980 - DNA, 459 bp, Zea mays
  unsure (1)..(459): unsure at all n locations
ttgaaactcagctttttaaaaaagatggtacattcgactgcaacgattttctcagagaaggaggaagccttttgtattctgaaatgactaagggcttcgaaggaaggctccaccccacgcatgtcaggacaatccacaaccccagctcatgtgatgacagaggaaaccactctcaagggcatcaacagagctcccaaactttatggatgcaacaaagctcctacatgccaccggctccaagaggaagaggaggcagatgcttcgaatgaaggtatggtaatcagcctangaaactgttttgcctattctgtggcgaagacaagggacacaccacaaggacgtgccaagtcatgatccagaagtagaaagagatacctgaagcaaaagcaaggcagaatcagccgaagtaggtcctgcataccgcttcatgctattccccatacattctcgagtatgtgg

SEQ ID NO: 55981 - DNA, 377 bp, Zea mays
agcttgcacacatagctcatttgaatatctttgatcatatcctctttatatgctatgactaatgcgttttcaagcttatttcaaaccaagtcataggtatattgaaaggaaattggagtcttcggcgaagacaaaggcttccactccgtaactcatgcttcgccaccactccgagcaactctctcttctttgggggagaaataagcatcaaggaaaaggaccttatccttgggggagagagtaaaagctcaaacgcaacaagacttcgtctttggtataatcttaactcacttatttatgaccaaaggggaagattgcacttcgagggctctaatgattccgcttttggcgattcatgccaaaaagggggagaaatg

SEQ ID NO: 55982 - DNA, 412 bp, Zea mays
tggcctcggcaccgacgtgtacaccgccgcttgccattattgtgctctacgccagaggcggaggcaggctaaaagcctaaagcgaagcctgatgagcaccactgtgattgcagataacagcccatcagcatctactaattaactcaccgtcgtaggattcgtctccgtcgaaaggtaagaactggagttcaattgcaatcgtgctcgaacgatgaaggttgctgatttgattgagctgacgaggacatggactactctctcgtttctcttcaactgtacatagaatctcttcaactctcttctagagagtccgtgcacacggtgagcaactctgacgtgtactggcgacgaggtgtactatctgcacgttgtgactatgtagaacacgtgctggcacgccattacgtatact

SEQ ID NO: 55983 - DNA, 421 bp, Zea mays
agcttgagtaaaacaaatagcttcagatgatgatgcagtaagcaagcttcggcttgggtcaatattttggcagcaaaatagtgcaatagcaatgaatgttgtggtaacttcacacctacccgtctgtttatatagtgccacaggtgggaaggtgaatcgtcaacgtcttccgcaccggacaaacagccacccgcgctcactgcacggtgggccacagagtccgagaaggtgaatcaccagggcgcgtgtaactgctgcaagatggggccacctcgcacacggattattttaatcgtttctcgccaacgagctcagggaaggtgttttcggatcttcggcatcccgaagcctaaaagattttttcacggatcaagctcgttacgaaaaacgatctaacaccgcgaaggggctactgttgggg

SEQ ID NO: 55984 - DNA, 462 bp, Zea mays
  unsure (1)..(462): unsure at all n locations
ntacaaaaagtacaagatcatcaaaatcagaagttggagctaaaagttatggccaaaatacaacaaagcatattgttgtgtgttggatgtccggtgcacaccgaactgtccggcgcgccatgtccggtgcaccatcttcagaagctccaacgattagtacacgtggcttgtctggtgcaccactgaacagtccggtacaccgcggaaagctgtagaactgctttctaacggctagtttttgttggggctctataaataccacaccactaggtcatttggagttgtgagagctcaagcaacatatcaagtgaaagggaaatgtgcccttgggccatttctatatcgttttggtcattaaatgctcaacacattatgtttagactaaaatcatcttacatgagcaatgagcataggtacttaaagcaaactgagcttgaaagagggcataatgcanatctatat

SEQ ID NO: 55985 - DNA, 421 bp, Zea mays
  unsure (1)..(421): unsure at all n locations
agcttanaaaaattcggaatgaatcggttgttattaccagccagtccaagaaaacttcggacttgatgtacagtggttgggggtttccactccaaaatatccttgaccttgctgggatccaccgcaatccctttggcagataatacatgtcccagtaattgaatctcctccagccaaaatgcgcacttactgaacttagcatacaattggtgttcccttaagcgcgtcaataagatccgtaagtgttgagcatgctcctcttcattcttggagtatatcaagatatcgtcaatgaagaccaccacaaacttgtccaattcatgcataaataccgagttcatcagatatgtgaagtgggcaggagcattcgtcagtctgaaagacataaccagatattcaaacaatccataccgcgtagtga

SEQ ID NO: 55986 - DNA, 474 bp, Zea mays
  unsure (1)..(474): unsure at all n locations
nntcaattgagagttcttgaactccgtcccattggcgcttcttatcttcttgatccttaagccgaactcattntgagcccgtctcaagaatccttttaaagtctcttgggtttgagatttttcctgtaaaaagaatacccaagtgaagcgagaataatcatccacaataactagacagtacttactcccgtcgatgcttatgtaagcgatcgggccgaatagatccatgtgtaggagctccagtggcctgtcagtcgtcattatgttcttgtgtggatgatgagtgccaacttgcttccctgcttggcatgcgctacaaattctgtctttctcaaaatgaacattggttagtcctaaaatgtgctctccctttagaagcttatgaagattcttcatcccaacatgggctagtcggcggtgccagagccaacccatgttaatcttatcaattaagcaagtgtcgagttcagctct

SEQ ID NO: 55987 - DNA, 423 bp, Zea mays
tagcttgccagatagtaacccttcgccggatgattattctggtgactcaccgccgtaccccatgtggcttgcgcagataagctcgccggtgaaccgccgtcgcacggccttgcgccgtgtgtccgagccttgccaccgcaccgccacgattactttagctccccgttgctcaccgaaatagctgccacgacgttgaacacgtatttgctgcgccagtggtcttcttcatctccggccgccagcacggctcggccgaattgatcaccaccgctcgctatccctataaattgaagcctcctcaagctctgtagggcagtaaactatccacccaccacgaatcagcctcgatcattcgcctgaatccacgaatattgagttctccccaaaccggtcttcgccaccgtgaaacacaccccatcgtgg

SEQ ID NO: 55988 - DNA, 458 bp, Zea mays
  unsure (1)..(458): unsure at all n locations
atgcanattgctaatgaagatgttgacgaagtcttccacttactttatgtgaagccgctgaacgaattctgaaggaagactacattcttgttttactatgaaatgtaatatttgtgtatgagtctgacatcaagtatttatatgtatattgatgtaatatatttctttgtgatgcatgaaagctgtgtacataccatttttgagccttcggcgaaaaaacaccttcccttcttttcatgcttcgcaaagaaaaaatcaccccttctatgccacagctgttgtataatatcattgtcgatgaatatttactcggtgtgtaacattatatctatcgaaagtatactttgtgcttcagcacattgcttcatgatccatcacatatnttgtgagaagcgtctttcttctcacagattcgtgctgatggatatgatgcatgatgaatactatgcaaatgatgt

SEQ ID NO: 55989 - DNA, 423 bp, Zea mays
agcttgtgaacagtacaaattcagaagagagatagcagcttcagcagaccagccgaagcctatgctcttatgtgaggacatagcagagcagaaggtgctgttaggctctcaattatccgaagagcaggagaaaaccttgataaggtttttgttcaataacaaagatgtttttgcatggtcagccaatgatctatgcggagttaatagagatgttattgagcactcgctcaatgtcgatccatccttcagaccaagaaagcaaaggcttcggaaaatgtcagatgacaaggccgaaggtgctcgcaacgaagtcaaaagactcctcagtgcaggagttatcagagaagtgaagtacccagaatggctagctaacactggtatggtaaaaaaggccaatggcaagtggcgaatgtgcatcgattt

SEQ ID NO: 55990 - DNA, 298 bp, Zea mays
cgacacctaaacgaccctcggacagaaccaatgcaaaaacacatgtctctactgcggaccgtccgaggtaagagcaagcaccgtccgagaccacgcgcggaccgtccgggctcatgcgcggaccgtccggtaggtaaggaaccgaaaaacccgaaggtgacgggttcggcaaaatgaattatagcgtcctcgcggaccgttcggggtgcacgactggaccgtccgcgactggctttatctgacatctgatgatgcattaaatgcaatatagtcgttgatatagaccgtactgctgacc

SEQ ID NO: 55991 - DNA, 422 bp, Zea mays
  unsure (1)..(422): unsure at all n locations
agcttgcattgcatgtttaaaattccttgttctgcatctaggacttgtctaacctagttgagataaccgccaacaaagcgagtaaaaaagcttaactcgggtcaaacctgacaagtcttagtttttaagcttttagcacttaaattcttactttttatgtaattgctggttcttgaaatatgcatgaggtactgcacttagggggagtattcaaaactcaaatcactcatgaaaaacccctagtgcaggccaaaatgcaaatttcaccatttgcctattttctctaaaaattatctagcctatggcaaaatatttttaaaagtatacgaggctgccaatacctgtcccaacaagtgttattttgtgtgattataagatgggatttggtttggttgggagttagacagaanaattcaaaattt

SEQ ID NO: 55992 - DNA, 482 bp, Zea mays
  unsure (1)..(482): unsure at all n locations
tgatctaccatgtcttggtactcacttcctccaaaggatgaatttatctttaaagaagcaagcacaccacaatcaggaatcctcacaacagaaactcgtaaatgcaacgcatatttaggctcttgagggcatggaagaaggtctaagtgaagagaaagatcacttccagaactggcagttgcatcaatctcttcagctcgagaacataacttgaaaggttgcccttcaaggaaataatggaaatgttagaactcacttcaaggaaatatttactcttcttagaatttaacctgaattgtgaaaagttaattcatttatacaataatgggagctgcaacacatttgtcaagggacgagttaccaaacaatagtgctttgacaatcctcccaacattattgtcagtattcttgacaagcacctgcagatcagtagctgcatatcatggtccatggctacgaaactntaatggatccaaaccgac

SEQ ID NO: 55993 - DNA, 416 bp, Zea mays
agcttatgatgccttaggaccacctgtttctaatgttgtcggcactttatcgaagagtgttggcttcccgaaggttgaggcagaccttagcaggtaccggcggcagcatatcgccggtagcctattttatgctaactttaaggtaaaattcttaactttttattgcttttaatatgaagattgttttctgatgaagcttattttatcagagcttactgctgagcaaagtcctgaggatgcaacaagacctcgaggacaaaaagaacgaaattataattgagggtctggagaagaaaattaaagaccatgaggctaccctagagaaaaaggacttcgtacttcaaaccatggaaggttcactggcggaggcccaggccaaaattgctagattgaatagtgaactctccatggaaaag

SEQ ID NO: 55994 - DNA, 469 bp, Zea mays
  unsure (1)..(469): unsure at all n locations
tcaactctatgtctcttagctctgggatctccttcatgtgacattntaagaatattccaaatgtcatgggcatcttctcttccttgaactttccggtattcttccggacaaagacttcctttaattatgctcactgcttgagcattgcgatgaacctcttgcatcatttccggagtcatctcttctccttgggtgggcttatacatacctacattaacaatctcccaaagactaggatgtacaccgattaaatgcgacttcatcttgtcggcccactcgtcatagttcaactcactaagagttggtaactttccaagtggggcggaaaagaagttgggaatataatttctagagtaatcgaattgaacttttctaaatttggtacctttgcttttggtagatgatccttcggtgttgagacttaccttgctcaataccttagacaccaaaagatccactagatcatcat

SEQ ID NO: 55995 - DNA, 416 bp, Zea mays
  unsure (1)..(416): unsure at all n locations
agcttcaagcatcttatccagcatttttttatatgaaactaattcatttgataccataagaagattaaagttcagtcaactgtatgtagctggttgtatttgagagtgatgatgaagtgcttgtttgatcggagatggaataacagcggatttataggtaggaagattgtaatgagaagcagtgcaagtctgcaagacgacgtacatgcagtcttgtttgactctgttggcagaaggcgtcgaatttgacaaggaccactgtggcgtgctttctgttccggcgtgctgaactgaacatgtttgagatcatagtgggggtatctacttatcatcaaagttttagcatgcatcacatggtaaaggctaatgatctagtatgtaattgtaaacaccatgcanactacttcagcatgctt

SEQ ID NO: 55996 - DNA, 458 bp, Zea mays
  unsure (1)..(458): unsure at all n locations
tttttcggcggcatgacgaaggtgaggcntgtttaaagtattttagactcttacaacggaagtgagttcaccggaggtgggcgccaatgttggggacttgttctcaaatgctatgaatcaagaacaaggcaacataaaatgttaaatattgaagcccttcgttcttcaaatcattatttcccttcggatataacgaatctatgacgaacgtcatgaacgacataccttcatgatcgcgataaaggatggagaacattcatataaaatatataaaggaacataatttctgtacacattattattaatctatttccacttatattacttatgtaaacaatgataaattacaaatgtaccttccgcttgaaagaatgagaatacatgtgtgaggcaaaagcgaatgccaagtcatcatgaacagtactggaatactgtgcacctatttatatgcacaggtc

SEQ ID NO: 55997 - DNA, 421 bp, Zea mays
  unsure (1)..(421): unsure at all n locations
agcttgtgtatgttcttcatccctacatgtgctaagcggcgatgccacaactagcccatgctagtcttagctattaagcatgcatctagaccggcctcctcttttgcaaaatcaactaaataaagtttgccgtctaatacacccttaaaagctagtgaaccatcacttcttctaaagacagacacatctacatttgtaaaaagacaattatatcccatattgcatagttggctaacagatagcaaattgtagccaagagactcaactaaaaacacattatagatagagtgctcattacaaattgcaatnttacctaacccttttaccttgccttgattcccatcaccgaatataattgaatcttgcgaatctttattcttgacataagaggtgaacatcttctttctccccggcatatggg

SEQ ID NO: 55998 - DNA, 454 bp, Zea mays
  unsure (1)..(454): unsure at all n locations
tctccatagctntagaatnggaggaggcattacccaatgttatagaaaaaactttattaacaacaccataatcttcaagcacagtcataaccctcgcagcaatgttctcaccagtgtgagctgtttcaattagtctaaggccaatgaccctcttttctaatgcccagtccttagaaacataatgagcaaccacactaagatagtcttccttagcattaccactccaaatatcagatgtaattgcaatagaagaaacagattgcaagcactcaacaactatcttacgacgatcattaaagaacttgacaaagtccctaacagtagtttgatgagatactttcttaaagacaggattatgagatagtctaatatactcctcaaaagcaggtgactcagcanaattaagtggaagatcaagcctagcaatcaacctacacatctgagttctagcacg

SEQ ID NO: 55999 - DNA, 377 bp, Zea mays
agcttgaagccatggtaacgaacatattgttatattatacgaattgactcaagcctagctactggtgcataggtttcaccgaaatccaaaccttcgactcgggagtatcccttggccacaagtcgagctttgttccttgtcaccacaccatgctcgtcttgcttgttgcggaagacccatttggttcctacaacattttgattaagacgtggaactaaatgccatacctcgttcctagtgaagttgttgagctcctcttgcattgccactacccaatctgaatcttgtagtgcttcctctaccctgtgtggctcaatagaggaaacaaaagagtaatgctcacaaaaatgtgcaacccgagatctactggtaccccc

SEQ ID NO: 56000 - DNA, 482 bp, Zea mays
  unsure (1)..(482): unsure at all n locations
tacggacctataaaactcagcttccaactccgattccaataattcttggttctaaattcttatcgaattattccctatccaaccatgtcatcccttaagcatggttcatattccagaaaactcccaaaatactcttgtcccatattctgcctataactctcatgttcatactaagtcagacgattcattcgtcactattctcaccaacagtgaacttcattgtgctacaccacatacactcagctataaatacacccagctaccctctccctctccacacacactcaacaccctcagccaaggcaaacaccccacccactcagttactccgctctgccggctacacgcatagtgtcgcttcgcctctagtccaccctcctggtaagcacctncgctccaccaccagtaatatacaacaccacatgacacagattctactcaagactctacccatccatatatcgctattctgaccactatac

SEQ ID NO: 56001 - DNA, 415 bp, Zea mays
agcttgtctaacatcgattgagatggtttagacgtgttcaacggagaccaaaaagcactagtccttagtgggatactaaggcatgatagcaatgagaagagaggaaaatgaagactgaagttgacataagaagatgcagtaaaaggagacttaaaatgaaggaatatacccaaatatttagccttggataagagtgcatggaaaacaactatttatgtgtgcgaaccttcagttgtgggttatgttggatttttaactttagtaaccaggtttccgatctatgggatcgaggaacgtggtacattactaaaactaggtttttacactacagaaacgagattgttcccacgttcccgaaaacgagcaacatggcaaagttccatgttcccggtttctaaatttttaactctatcta

SEQ ID NO: 56002 - DNA, 375 bp, Zea mays
  unsure (1)..(375): unsure at all n locations
ntagtgggatgtgtattagcaacttgctttccagcttgacatgcactgcatggtttgtctttttcaaacaccacatcctttaatcctctaaccatatctttctttaataccttcttgagtgtgctcatcccaacatgtgcaagcctcctatgccaaagccatccaagtctgcatcttctgaagtgaaatccactaagtagaggttgttgtatctaaatcccttgaataccattgattcatcatccatttttgttacaataacctctgatggagtgaataagcattgaagtccaagatcacagagttgtcccactgataataaattgaagctcanaggtgcaactaagagaacattngatattgataaatcatttg

SEQ ID NO: 56003 - DNA, 408 bp, Zea mays
agcttgtgttttaggtacccatctcttgttgggtcctacaaggttagtaacaatagccttagggacccaaatgcaagtcttgtctcccttgcatttggcccccaatttcctagcaaccactttcttatttttacatgagagtacaaaatcagtgttgcaggtatgaaaaacggtagcagattcattttgcattttcctaggcacatgacgaacaacattgtttctaggcatatttctactatgcacaaaggaagaacttgaaacaatcatggcatgtgaatcataagcattataactcctattataatgagcattcctagaaaattttttatcataaataaatgcatgattcttttgactactactatccataggtgccttccctttctccttgttgagaatgggagc

SEQ ID NO: 56004 - DNA, 459 bp, Zea mays
  unsure (1)..(459): unsure at all n locations
gcttaacattngcttagcgaattgatgtattggcgtgtttgtatctacatgagcactntttatgagtttgttcatgctctcgctacgctgtgtagagaccatcaacccacaataatcatgtttgaaaaaagctggtatccaatctttacgaatttcatacattctggaaagactgatgttatcatgtagatggaaatcatcaaccagcattgcccaggcagtctcaaactcagttatagttaaaggacgatgtattatagattggaaccttgttttgaaatcctcttcctcaaatctagcgtacaactcgtttaaatacggaatatacctgttctgaacatgccacanagacaaatgatggattgtgtttggaaataccctgcctagtgcaactggcattgctgggtcttgatctgaaatcatcaattntcaaaacattatgcaacacattacanacta

SEQ ID NO: 56005 - DNA, 391 bp, Zea mays
agcttctatagtccacacacattctccttttaccatctttcttgttcacaaataaaactggggctccccatggtgatgaactagagcgaataaaacctttttctagtaattcttatatttgtttcttcagttcaattaaatatttgacatccattcggtaagctctttttgaaattggtgcggttctgggtaatagttcaatagaaaactctatattacgattaggtggcatacctggtaattctttctaaaatacgtttgggtattcacacactatcctgatgtgctccaaatatttttcttccaagtgatttatcattgcctctgcgtttgtggcatactgacattgacttaattctttcttcttgcgactattaatgaaccattcttt

SEQ ID NO: 56006 - DNA, 445 bp, Zea mays
  unsure (1)..(445): unsure at all n locations
tcatgaaatattntccgaagctataaaaaagttttgtgttgcgtttccgatgaggctacacttcatcttgattntgtcttagcacgattttctcttttccaaaatattctccgaagaccaacactgtatccccttcttgttccacatgcaatatgatgtatgatgcttatgttatgcagaatgatgtgatgatgttatgttatgcaaaaatgatatttgtgccgcagattcatatccctgtaatagagcacacacactttttatctcagcgctaacttttcgctgtaagcctcccttatgagcttcttcgccttttactttcagcggaatcagcgtttatttttcgctgtaagcctcccttangagcttcttcgccttttactttcngcggaatcaacgcttatttttcgcttgtaagcctccttaagagcttcttcgcttttac

SEQ ID NO: 56007 - DNA, 421 bp, Zea mays
agcttccatctatatcatctcagactgttgtttaccagctgtaagtcttcgatgaagttttccaaattctccgttttgattaccacatcatctacgtaggcctccacacgcttgccccagtgatcgactaagcatgtttgaatggctctctgataagtcgctccagcgtttttgaggccgaacaacatggaggtgtaacagaaagcaccaaacggagtgatgaacgctgttttttcctcgtcttccttcgccaaactaatctgatggtatccggaatagcaatccaagaaagacaacacagaacatccagcggtggagtccaccacctgatctatccttgggagcccgaagggatccttcggacagtgtttgttgagatcagtatagtcgacgcacatgcaccaatccactttattctttt

SEQ ID NO: 56008 - DNA, 488 bp, Zea mays
gacactatgaaactcagcttcgctcattatatatggttgttttgatctgccattttccttcatcctttctggcagcttcctggcttccatgaatagcaataggcccttgatctgaaggtatcttcatgcaaagatatgctggatgaagaattgcttcaaaagcattgagtgttccacgaccaatgattgcattgtaggggtactccatgtcgataatatcaaacacaacttgctcagttcttgtattgttgacaaatccgaaggtcactggcatcgtgatcttgccgagcgctacaatctgtcttcctccgaagccacaaagagggtgtgtagcatcatgaatcttatcctctggctcttgtatctgtctgaaggccttatcaaatataatatccgctgcactgcctgtgtcaaccagaacattgtgaaccagaaatcctttaataacacaagaaataaccatagcatcattgtgagggtagtccttg

SEQ ID NO: 56009 - DNA, 421 bp, Zea mays
agctttcaccaaatcctcaagcaacggaattgtgatgattacaaatctcgttccaagaaggtttgctacaagtgtggtaagcccggtcactttattgctaaatgtcctttatcaagtgacagtgacagggataacgacaagaagggcatgaggagagaaaagaagagataccacaagaagaggggcggcgatgcccacatgtgccacgagtgggactccgatgagagctccaccgactcatccgacgacgaggacgccgccaacatcgccgtcaccaagggactcctcttccccaacgtcagccacaagtgcctcatggcaaaggacggtaagaagaaggctaaatctaaatcctccactacatatgagtcttctagtgatgataatgatagtgatgacgaagataatttgcgtaccattt

SEQ ID NO: 56010 - DNA, 475 bp, Zea mays
  unsure (1)..(475): unsure at all n locations
nttttcggcggcatgacgaaggtgatgctngccgaaagtgtttattactcataaaatggaagtgagttcaccggaggtgggcgccaatgttggggacttgttctcaaatactatgaatcaagaacaaggcaacacaaaatgttaaatatcaaaaggcccttcgtccttcaaatcattatttcctttcgaacatagtgaatttaagacgaaggtcgtaccttcatgatcatgataaaaaaatggagaacattcaaacaaaataaagaaagtgacacaattattgtaaatattattattagtctatttcttatttttattacttatttgaacaagaataaattacaagtataccttcggtttgaaggagaagagtacaggcgtgacgcanaagtgaatgcccagtcagcgtgaacagtacggngatactgttcgcctatttatatgcacgggtcgcagcccatgcaaaattacatta

SEQ ID NO: 56011 - DNA, 440 bp, Zea mays
gatccttaatcaccgcggatgcaagcttgacattgttccctgtggaagttatgtcattcttaatgccagggtgtctcccattataaagcatgctcctagaaaattcaaaattttcattttctatctcatgctcattaattttgctagtcagttgtgctatgtgatcattttgttgtttatttaaagctacgtgatcatgaatagcatcaacattaatatctctacatctcatgcaaataaaaacatgatcaacggtggatgtagagggtttgcaaacatttaattcatcaatcttagcatgtaaaataccattctcatttctaagattggaaacaacatcattgcaaacatttaaatctttagcctttgaaattaagctagtactttcaattctaaggctagacattgattcaatcaatctatcaatcttagcaatcata

SEQ ID NO: 56012 - DNA, 478 bp, Zea mays
  unsure (1)..(478): unsure at all n locations
tgaagccatggtaagtagcataggcaagtaaaatgcgaattgattctagcctagctacgggtgcataggtttcaccgaaatccaaaccttcgacttgtgaatatcccttggccacgagtcgggctttgttccttgtcaccacaccatgctcatcttgtttgttgcggaagacccacttggttcctacaacattttggttaggacgtggaactaaatgccatacctcattccttgtaaaattgttgagctcctcttgcatcgccaccacccaatccgaatcttgaagtgcttcctctaccctgtgtggctcaatagaggaaacaaaagagtaatgttcacaaaaatgagcaacacgagatcgagtagttacccctttttgaatatcgccgaggatagtgttcacggggtgatctcgttgaattgcttgatggactctcgggtgtggcggtcttggaacttgttcatcttncttgtcttg

SEQ ID NO: 56013 - DNA, 396 bp, Zea mays
  unsure (1)..(396): unsure at all n locations
agcttggtcattntattgctaactgtcccgactatgatagtgatcaggatcaagggaacaagagggagaaaaagaagaactattagaaggcaaagggcgaggctcatcttggcaaggagtgggattcggactgctcttcgtccgactccgataatgaaggactcgccgccaccgccttcaacaagtcatccctcttccccaacgagcgtcacacttgcctcatggcaagggagaagaaagtaagcactcataatactagtacttatgcttcttcaagtgaggatgagtctagtgacgatgatgagataaattactcatgcttattcaagggattagatagaaccaaggtagacaaaattaatgaattgattgatgccttgaatgataagaatatac

SEQ ID NO: 56014 - DNA, 435 bp, Zea mays
  unsure (1)..(435): unsure at all n locations
agtgattagagagagagatttgtgngttcattngagctcttgcgcttggattgcttcttttctttctcattcttcttgtgatcaaactcaattgtaaccaaggcaagagacaccaattgtgtggtggtcctttcgggaactttgtgttccgtttgattgagaagagaagctcactcggtctaagtgaccgtttgagagagggaaagggttgaaagagacccggtctttgtgaccacctcaacggggagtaagtttgcaagaaccgaacctcggtaaaacaaatcatcgtgtctcgctctttgtttgctcacgatttgttttgtgccctctctctcggactcatttatatttctaacgctaacccgacttgtagttgtgcttaagtttataaatttcagattcgccctattcacccccctctatgcgagtttcaat

SEQ ID NO: 56015 - DNA, 338 bp, Zea mays
ctgcctgctgcatgcttaactaaccatgaacgctcgttaggtgttattatatatgcacacagaccgatgagctcttttatttcatgtgatactgctgtatgaccacgctggaaaaaactgacatatggactgtgtagagttactgcaaagaagtctggggccacttattgtgcacttgtcctccaccacattcaaccttggatgagagtgtatggcgagctgctacctctgcccctacctcccctcttccgctgtaccgtcaccggatcacgccgccggccaggatggcggtctcggggatcacggatggtccgtggggctgctcagctaggcgggtc

SEQ ID NO: 56016 - DNA, 361 bp, Zea mays
  unsure (1)..(361): unsure at all n locations
actaagcttgaagtggctgtcaggtgactgctatacacaacttcagttcttaacaacctgacactcgaactttgacggggtcttactctacatctctataacaactatgcttgcactctttagcaaagttgttctgctataatgggtcttcaactttgatgtggagacctanggcaaacaccctatgccctgcaagttacaaagtcccaaagttgagcccattcactaatttttcagacttagagcaaaactcaaatgacgtccattttgcatttaactccgaatgtttgggtattgctttcaagtccacatttctgagatccacccgacttaagaaacctatttggcttggtttttgcac

SEQ ID NO: 56017 - DNA, 410 bp, Zea mays
  unsure (1)..(410): unsure at all n locations
tgcttttctctaatnttgcccactttttctcttaaatgactaagaaatttagcatcacgatcagaaacgattgtgttgggcacaccatgcaagcgaacaatttcacgaaagaacaaatcagcaatatgagtagcatctggagttctatgacatggtatgaaatgtgccatcttagaaaatctatgaacaaccacaaacacactatcacgtccctttctagtcctaggcaatcccagcacaaaatccatagaaatatcttcccaaggagcactatgaacgggtagaggcaaatacaaaccgtgtggatttaaccgtgacttcgccttttggtatgtcgagcaacgagcaaccaatctcaccacatctcttctcatcttgtgccaaaagaaatgaccaacaagtatgttctt

SEQ ID NO: 56018 - DNA, 394 bp, Zea mays
  unsure (1)..(394): unsure at all n locations
tgagttntcgccaccggaaccatttcttcgtttttctaattatcatgcccaanccactactttaggtccaaaactgatgtttggggtggtttcgcgcaatttcgttgccgcacgtcacccattcaaaaaacgggtgtcggggtgcatacaagcacgagtttttttccaccggaaccatttcttcgtttttcgcaacgaacatgcccaatccactactctaggtccaaaactcatgtttggggtggtttcgcgcaatttcgttgccgcacgtcacccattccgaaaacgggtgtcggggtgcatacaaagcatgagttttcgccaccggaaccatttttcgtttttcgcaacgaacatgcccaatccactactttatgtccaaaactcatgtttg

SEQ ID NO: 56019 - DNA, 443 bp, Zea mays
atccttagagtcacctgcgggctgcaagcttcagcgacaggggctgccgctctgtttcactggatccgaaccaggagaccctttctcttcgagaggcccggagccagaagaggaaggccaccagtccaacgccataggaggatgagttggatcaagagatcaggaatatggagatgcttcatcagcaggtgcacgagaagaaggaaaagatggctctcctagctgacctgcaaaggcagatagacgaagcctctgaagaagttcgacatcttgctcaggatgagcaaaaccgaaggcccgagcacagagagcttcaccaagagggcttcgtcaacgaggacgactggtatgaggatttccaccatggaaactttgcctttgacgatgcttctcctctgtcagctgaactacaggctacaccttggcccccgtcttacaaacca

SEQ ID NO: 56020 - DNA, 442 bp, Zea mays
  unsure (1)..(442): unsure at all n locations
tgtgaagagtattgtggcctttgctgctgactttctcgatcatcagtttgagcagagntatgaattgacctaacgtgcctcgggtgaaatcttcctccgaagcccctggtcatttcagagaacctgaatgcttcctcccttctttggcggaagtcattgtcagctcgaatgtattcatccatcttctagagcagtttctccaatgtttgtggtggcttcctggcaaagtactgcgctgaaggtcccggccgaagccctttaatcatggcctcaatgacaatttcattgggcactgttggcgcttgtgccctcagacgccgaaaccttcggacgtacgcctggaggtattcttcgtggtcctgggtacactaaaataaagcttgagcagtgactggcttcgtctgaaacccttggaagctagtatagcatatccttcacttct

SEQ ID NO: 56021 - DNA, 367 bp, Zea mays
  unsure (1)..(367): unsure at all n locations
agcttgcgattccggtagtgatggttatataaatatttgtgataaagatactggaacatttgggagttcccacaaaatgctatacaaagtctcaaaacctcaatcatgcatgatccatggtaccttgttagttagagaagcaaacgaaacagaggacatatgccaaagctagctagtacggtgtgactcaccgtagcctgactgcctgagtatcgctattgcagcaatgtcgntggtccttagtgttctcattaagtgacatactgtcatatgcttgtcgttgcaaagtgccttgtggtccacgagccactgtaagaaggggacatgttatcatcaattaaaggcctcttgtggcagagctctcact

SEQ ID NO: 56022 - DNA, 411 bp, Zea mays
  unsure (1)..(411): unsure at all n locations
tttacaaataaggacctacttatttcatcttcaatgttnttcagaagccaaataagaaagaaatcatgggtgcaaaaaaaatggccaccatagattgtataattttctggattaaagaactaaacaaccctcgaattctaaaagagaaaaactactattaatgacatagaaggagaatgcagaagagtttcactatgagaatattacttgagggctgagccaccccatcaccgaggggctttccgtcgtagtcctcggcctcctagaactacatcgtcgcacaagctttcagaattgcttcgtttaaataagcataaaagtaactatatttggaatgtcctagttcattnttattgcaatggctactgcaaggtggcaagcgtcacatcctagttagtaatctaggacatc

SEQ ID NO: 56023 - DNA, 319 bp, Zea mays
  unsure (1)..(319): unsure at all n locations
acttagcacatttatttttatgagctaacaaatgaatgcgcacgagtggttggccacaaatcttgcgaaataaggtggcggcatggtcgtgatttatacgcttgatgcgacgaaagtttaatgacctcacttgtcatatgaatgttgctattctagccaacggaaggagttatttatgaccttcggatcaaggcctttgtccatatgcgaatctggatttagtatttaccaattaatactgtcaggtgctactgatgggggcgttccntcttccgaggatctgaacaacatgatttgaccatgattttcgagtggatta

SEQ ID NO: 56024 - DNA, 338 bp, Zea mays
  unsure (1)..(338): unsure at all n locations
tattntcggggtcgcgcccgggcctcagnatatctggccgtgcgccatgtgcgaacccctcattttcggtccagacgcaagggcgaacagacatgccgcccgtcgccttgagcctccgtgccgatttccctccgttacgtcatgcccttcacccaagacatacatattaccttcggcgtctttccacacgctaggacttagcttattttcggggccatgcccgaacctcggatttccgcccctgcgccatgggcgaacccctcgttttcggcccaaacgcaatgccgaacagacatgtcgacccgtcggcatactgcccttgacccaaagcatacatc

SEQ ID NO: 56025 - DNA, 403 bp, Zea mays
agctttcaagattgaatcaatatattagataaggttatatggattgcggagacagagacggagatagatgataaacaaatcaggtccgcctcagctagaaaactaggtctagatgtggtggtttaaattggagctcagtgttaacctatgacacctaggtattgccacacgttagagacatgttgacatatacgtcatcagtgacgtgatatcatgtaacctcgatgtcatatgccacggtagctacctctaaaatcttattatctccgttctcgaatatttgtcagtcgctagtctatttttgaactaaaacgtgataaatgaaaagaaacgtatagagttacattgcaatagtcataccataagtgtaaacatgcaactattattaaaaaagactcaaata

SEQ ID NO: 56026 - DNA, 342 bp, Zea mays
  unsure (1)..(342): unsure at all n locations
tagtgcctcatagagcatcaagtagttgcatttgcatgatgtactaacagcgcttcaaatttcgtgagttaaaagttctttcaaaagcaagtttgaagattgcaatgtgttggatgcgcggaccgtctgggccatgagggcggaccgtccgcgatccaccagaggggtccgaagtctaaccacttatgcagccactttgttcttttgcactgcggaccgtccgggcctttgggccggaccgtccgcagtcatgaccagagaaagctggtttcgggccagtccctgaattatagcgcggaccgtncggctgtgatgggcggaccgttcgcaagtgtaaacatg

SEQ ID NO: 56027 - DNA, 406 bp, Zea mays
gcttgtgtcagaatttatttattttgagtaatcgcgtgtgtagctaaaccaacctaaagtgaactaggtttgcttaaggtagcctttcaacactttagcaccaatgatgatatcttgtttacctttgtatgttttgtgtgtgatctattttggggttttccttgataaaggtgttacaaataaccaaaataacagaggtaggtaattaacattttaatctaccactatgttgtggacctaagctaagaacatatggccaagtgttgggaaaaaacttaagaagttggttaagcgaaataaagaaaatatgaaattttcctaagtcaattctacacctaattctaaaatttctcttgttcagtaatgacacactccgttttggaaggtaaatcaaatgctaaccatg

SEQ ID NO: 56028 - DNA, 462 bp, Zea mays
  unsure (1)..(462): unsure at all n locations
tgtgaaggttcttcatccncacatgttcttagcggcgatgccacagccagcccatgctagtcttagctattaagcatgcatctagaccggcctcctcttttgcaaaatcaactaagtaaagattgccgtctaatacacccttaaaagctagtgaaccatcacttcttctaaagacagacacatctacatttgtaaatagacagttataccccatgttgcataattgactaacagatagcagattataaccaagagactctactaaaaacacattagatatagagtgctcattagagattgcaattttacctagcccttttaccttgccttgattcccatcaccgaatataattgaatcttgggaatccttattcttgacgtaggaggtgaacatcttcttctcccccgtcatatggtntgtgcatccgctgtctataatccagcttgaacccccggatgcat

SEQ ID NO: 56029 - DNA, 413 bp, Zea mays
agcttgcaccctgatacattggtatgttttccattcttgaactatgtgggccagttgcataccgactccaattacccgaaacattgtctgcagtgcacaatgtgttccatgtatcccaattgaagaagtgccttcgggttcctgatcgaaccattgatgtaatggatgttaccttggaaccagacttaacatacttggaacatcctatttgagtcctggatcaaaaggacaggatcacccgaagaagaactctcaaattctataagatacaatggaaccaacatacggaagatgaagctacatgggaaacccatgacttcctacaaaagaatttccctggctttttagcttcatgtaatatgtgagatatgtataattatttgtaaagatgaaatagacctcataccaccccc

SEQ ID NO: 56030 - DNA, 437 bp, Zea mays
  unsure (1)..(437): unsure at all n locations
gggccaanataatctanataaaacctttagcaagcttctaatgtggggactcaatagggaattctgaaattctgaattctgaatttcagaccttgagccaaagaccaagcgtgttcaccttgatccctagctcaaatcctaatgaccccattgacaaaaacgtgtctaactaacctctctgtcacatgctagaatatggcattgggacgcgagcccttgacacgacaagactctggatttgcctcgggtttgagcagagagacagaccagatttccgggctccaaatctctaaaaccagtaggcaaaatcctatgacccccacacaagatcggtagcttgtagggagaagaggttntgtgcactgaccaaggcgagagcangctcngatgaatgaccacacacgccagcacttgggcagaacgaatgggcacacgtg

SEQ ID NO: 56031 - DNA, 417 bp, Zea mays
agcttcgcaagatgtcagatgaaaagacttatttcttcttgcggatgtgcatcgcctcctggaggctaaattcatcgagccggtggcttaccccacgtggctctccaatgttgcgatggtgcagaagaaaagcggaaaatggcgcatgtgcatagacttcaccagtctcaataagttctgcccaaaggataatttcccgttgccacggatcgacaaaatagtcgatagcgcggccggatgcgaggtcatgtccctcctcgactgcttctccggctatcaccagatatacatgaaggaggaagacaaggccagcaccagctttataacacccttcggcacttattgctttgtcagaatgccggagggtctcaagaatgccgggtccaccttctccagactcaccaaaacggtgctcga

SEQ ID NO: 56032 - DNA, 407 bp, Zea mays
  unsure (1)..(407): unsure at all n locations
actcagcttacttagaataagccctanaaacaaaacatatatgtgagtatattcgatagcaagaaaacctacaaacatagtctattttacaacaaaagtatatataccttcaagctattataagcaaggcaatctgcaagatcatcctttgacattgcagacaggccgagctcaagcttcgggaatcccatgtttctcatcatttcccggcatacggatatctctttattgttcagtaggcaacagagaaaatcatcttcattagtgccgatgtacaccaaggatccttgtggatactttagatccctggcatattgtctagcttcggcaatccgctcttttgacaattgcttccctgaagcatgtcgcacgataaactccagttctccaccangcgcttcgggagc

SEQ ID NO: 56033 - DNA, 411 bp, Zea mays
  unsure (1)..(411): unsure at all n locations
agcttctaaagggagagcacattntatgttttttatatgctcattttgagaaagacagggtttgtatctcatgccacgcacgaaagcaagttggagcccatcatccacacaaaaatatcatgatgactgacagaccgctcgagttactccacatggatctattcagcccgattgcttacataagcatcggcgggagtaagtactgccttgatattggggatgattattctcgcctcacttgggtgttctttttgcaggaaaaatcacacacccaagagaccttaaagggattcttaagacggggtcataacaagttcggattaaggatccaaaagataagaagcgatcatgggacggagttccagaattcgcaaagtgaacgctttcttgaggatgagggcatcaagcatg

SEQ ID NO: 56034 - DNA, 483 bp, Zea mays
  unsure (1)..(483): unsure at all n locations
ctcagcttctanaggggagagcacatttatgattaacaaaggggcattttgataattacatgatttgtagcgcatgccaagcagggaagcaagttggtactcatcatccacacaagaacataatgacgactgacaggccactggaactcctacacatggacctatttggcccgatagcttacataagtattggcgagagtaagtactggctaggtattggggatgattattctcgcttcacttgggtattctttntgcaggaaaaatctcatacccaagagaccttatagggattcttgagacgggctcaaaacgagttcggcttaaggatcaagaaaattagaagtgacaacgacacggagttcaagaactctcaaattgaaggctttcttgaggaggagggcatcaagcatgagttctcttctcatacaccccacaacaaaatggtgtagtggagaggaagaatagaactctatcggacat

SEQ ID NO: 56035 - DNA, 399 bp, Zea mays
  unsure (1)..(399): unsure at all n locations
acctgaggcatgcaagcttatcagatcacagtgcacaaaatctataatatgtttgatcacgagcgcggggccacaaagcgtgcaaaataactatgcggcatggccgtatntatacgcttgatgcgtggaaagttgaaagaccccacttgtgattgaatgttgctattctaacaaagggaaggtgttttttcggaccttcggcttaaaagccttcgtgcatgtcgcaatctaaatttattaacaaattaatattgcgaggggctactgttgggggccttctgcttccgaaggtcctcaaaaacatgatttaacaatgttcctggagtataacgcgtgaacacgtatcttcagacgcgtatcacaatgggagaagctcaaaaatacgaatgttgacacact

SEQ ID NO: 56036 - DNA, 468 bp, Zea mays
  unsure (1)..(468): unsure at all n locations
tgtgaagattcttcatcccaacatgggctagtcggcaatgctctatccaacccatattagtcttagcaattaagcaagtatcaagttcagctttgttaaaatcaactaattatagctgaccctctaatactccttaaaagctactgaatcatcacttcttctaaagacagtaacacctacatccgtaaaaagacagttgtaacccattntgcataattgagaaacggaaagcaaattgtaatctagagcatctacaagaaaaacattggaaatagaatggtcaggtgatatagcaattttaccaagtcctttgaccaaaccttgatttccatccccgaatgtgatagctctttggggatcttcgtttttctcgtaggatgagaacattctttntgtccctgtcatgtggtttgtgcatccgctatcaattatccaacttgagccgccgaatggcataaacctgcaaac

SEQ ID NO: 56037 - DNA, 409 bp, Zea mays
  unsure (1)..(409): unsure at all n locations
agctttagtgaacaaaccctccttaaccttgtatactggagtgtntattaattgtaaatagcgttactactaggttagtgtctccactatttttcttaaccctggtctaacaatatttctatttttccttctaatattaaaatatgggcagcttgcttatttaattcaaaactccagaaaataatacaagaactatggggcttattattttcgcctgatagttcatattttacaaagtgtacaaaaattggtttgacaatttttggatgattattcttcaagttatgcatttattaagttctctgcaatatttaaagaagaataaattcgaaaatggaaaagaaatacaggtttgcgccgcggccctgtattttctctccctctctctaaaaaacatcctcccctactg

SEQ ID NO: 56038 - DNA, 462 bp, Zea mays
  unsure (1)..(462): unsure at all n locations
ngagaaatatctagacacggtccgaagaatcgaagcttctttctaaagattttctgtcaaaaatatccctcgaggacaaaatgagcatgctgatttgctagctaagtcagcagcacaggggctgcccttaccttcggatgtgtttttcgaaacaataaaagcaccttcagtggaacttcttgaaagagcagtcctcaatatatctcctgtttatagtgaagactggagaactgagatcatctcttaccttcagggtaaattcctttcagatgacgaaacttataacaggaggatagaggcaagagctcatccatatgtcatgatagaaggggagttgtacaagcgtggagtttgtgctccattactcaagtgtntatctagagccgaacgcatagaattgatgaaagaaatacatgtangtctgtgtggatctcacattggatctangccgttacttggaaa

SEQ ID NO: 56039 - DNA, 389 bp, Zea mays
agcttgatgtggcaatcagttttctattcttctgcatcagatcaaccaagcatactatgtgcacgtagagaaggcagaagaggacatgttcggtttgatctggattcaggggattagagtggattaaatcccctcaatccatccgagcatctccaacaacgtgacctataaaaaaggtctatcatttaaaaatgagtatattttatataatttaaggctccaataaaacatcccgctccaacagtaaagtcacaaatctatattatagggcagctcactacggcgtagtgcatttgaggcaattgagaggatgtcctataattttttgaccaaattttatgaaatgagtcactgttagagtagtatttactgcgtagagcctcatattt

SEQ ID NO: 56040 - DNA, 291 bp, Zea mays
  unsure (1)..(291): unsure at all n locations
tgaaggaccgcttcggcagaagagcttccgaacataaagactngtccggtccacggagtcactttatccgaacgcgagttacttatcgcagaaggtgatgagtgaggtatccgtatcccggaggcgtaggagtccctcgactcggtcagccttggctgcttatgtgtactccgtcgtttccaggatccgcttttcgaagtagtcaaaaagcacgaaagaaattctgctaaaaagagatcttttttcgaggaaaaaattcgacgcagagggggtctccccccttttagcccc

SEQ ID NO: 56041 - DNA, 402 bp, Zea mays
  unsure (1)..(402): unsure at all n locations
agctaactcaggctacggnggaactatattttcgttccatccaggcttgccccggtaacaagtaatgatggctccccgcgtgcgtccatgacgacgacggttctcagccccctacggaagcaaggagacgtcagcaaggtcccagcagccccaacaactgtgcttctacagggctcaagcgctcctccgacggccacgacaccgcgtacacagggctctagcacctctccggtagccacgttggcatgtactcagggctctggcacctctctgccggacacgttagcgcatagctacacccccattgtacacctggaccctatccttgcatctataaaaggaaggtccacggccctcacgcgggaggggtggtcgcgcgggaggactggctgacgaaccggc

SEQ ID NO: 56042 - DNA, 467 bp, Zea mays
tgaggctatgtatagattacctcccactcaatgttgtgactatcaagaagtatcctttgctccggctaaagtgttttccaaaatagacctttgctccggctatcatcaaatcaagatacgagcaagtgatattccaaagactgccttctcaaccagatatgggctatatgagtatttggtgatgtcatttgtgtggcggaaccgcccgaattattccagcttaagtgcccaagtcgcacccttaagggcagcaacacacttaaacaggaataacccgtcagtccctcggatctagtccgataaagccacttaccaggatcgaataccactagctcactcgaaggtgaggcacagagaaatacaataaagcataataccacaaatttaaggagtaccattagtgattacattatcggagtttcagaaataataaccacaaatgtttaatgcagcagaaataactaaca

SEQ ID NO: 56043 - DNA, 89 bp, Zea mays
ttaagtcacctgctgctgcaacttgactttttacatatgattttttttgactctctttctgtgcttgcatatcagcctgaaaaattctt

SEQ ID NO: 56044 - DNA, 464 bp, Zea mays
  unsure (1)..(464): unsure at all n locations
ttaggcagatttatcaacagaattaaactntatgattgtataagaagttgtagacaatttcataagctttccagattgttaaagagcgcattcatatgaattatgaaagtccagttatgtttgttttactgtggctgtttttgtttgcctcacaaaaatgagcgggtttgttcactggtgggtttcatatagtaaatagccaaattgactgttccaacaatggatacatttgtagagggataaaagttcttactgccagcagaatttcataatttttggttgagtagtttggtagatattgaattttgaagttaactatgctgctgtctgaaacagattcagacatttatcttatcagatgttntaaaacttatagatggcagaantaattatccattgaataccgaagttatagaatattttgtgtagacactcatagagtanttgttaatataccactgtat

SEQ ID NO: 56045 - DNA, 279 bp, Zea mays
  unsure (1)..(279): unsure at all n locations
cgacccaagnacagagagcagccccgaaaaccacaactttaatgaggcaacagcaaaacgaggggaaacgaagatcccacaaacaaccacacgcaaacaaaacccaggaccccaaacaagaacaggcccagcgactaaacagaccccaaaaaaacagaacaggggggaacaactgccgaagccaaacaaaaaagcgaaaaacggccgacacccggacgacatcgcaagcacaaccaaaaacctctgaaaccaagaaaaaaacccaaagggaaaaaacag

SEQ ID NO: 56046 - DNA, 454 bp, Zea mays
  unsure (1)..(454): unsure at all n locations
ntnggatcacacccaattctctaatcaccaatgtgtctatctctcgatgcccccgtgcctttttttacaaggcccccttgtccaacgatgtcacgaggatgccgttacatgtgtgcgattgtgcgtgtaagcaaactcgcctgcaacggctcaagaaggttgagaccaactggttcatccatttattatgggagtaatacgtgagtttgtcgactttccgaaacccccgtccttcaaagatttttgttattgtagtggcatcccaaagttttgttgccgtagaaatcgagtgtaataaaattttatattccgtaataaatttaataatatctatttaatatgacaagcattgattagttnttgtataatttagataaacttaaaattaatatgaaggagcactatttttgaatcgcaattttcatgggacgaaggaacaaactgaacgagacta

SEQ ID NO: 56047 - DNA, 397 bp, Zea mays
agcttcggcattctgcattgtcgcctctattcttagtcttcatcttgaggggcaaaaccgaggctgaaggtagctttgatgagactttgtattatttagccgaaagtgttttttcttgatgaccttcggcggagaagaagacccccaacagatgtcctcatcggtcaaccccaatccaggaacctcccctcttagccacgtctgtgtgtctagtgtcgtcatatgtcatgccaggtgaccactccgagcccacatgcgctatgcgccatatattcgaacccctaacccacacacgttcgtgaaacactgagggtcggctctgataccacttgtaacaccccgtcgagtctaggacgggcggtacttactctaggcagcactctatgatcatatattg

SEQ ID NO: 56048 - DNA, 429 bp, Zea mays
  unsure (1)..(429): unsure at all n locations
tgagcaagactcacggcttcaccaggaagctctctgagggcttggatctaacggaggaggacgggagaggggctggccacggtggttgctctcgggcggcactggcgggtcgcggggaggtcgccggagttaatggctggctcgggcgagtccggcgcagtacggaggaggtaacggggaaggcagccaagcactatggcgggctttatagccgcggcgcgggcgtggtcacaggcggtcgcgggtgcgcggaggttcgcgcacgggcgtgctctgagcgcgcccccggatgccagctcgcgtcgaacacgtggaggcttgcttctgccatggttcaacggccgatttgagcgccatagcgtgcgtatcttggcaaggtcactgtgtacggtcgcttctctgctccnatcctatcttttactgtgagtt

SEQ ID NO: 56049 - DNA, 368 bp, Zea mays
agcttgccatcaaggaggagcttgttactaatcggagatgcgccaggagctcagcacgaaaggcaagcttgagtgcttgaccccatcagggagctcacatccgtagtggcaggggataatgctgtcggtgaaacaggtgggttagttgcacatgaaatgaggttttggctcactagcctcatgtgcaatatggcgaatcaattcactgtgattcccacatggagccaaatagccaatggaagaaaaggcatctgatggggatttgctagtttctcaaaggaatcagcggcaagaatctgtttcaaaagagcccttattcgtggataggggtggaggtggtcacccaagcatggcacatgagtcctgac

SEQ ID NO: 56050 - DNA, 377 bp, Zea mays
  unsure (1)..(377): unsure at all n locations
tatctcggcgtgctgccgcatttcggtttatggaagtatctgtatcactgccgtcctangatggcgtgggggcaacatcagttggtcggaggtgccagcttggagatgcgtcgtgggcggaagaccgagtatctcgagatacctcacaaagacagcattaaaggttggcgtctggagtggtttatagttgataattatggaaattctctcccttcccggtcaggaagacagccagacgttcgtaccccgagttggactgagtctcccatggatcaagaagtggccgaggcaggcgtgttgcttacttgaagtggattactgaaagagagaggtctgattgccgaagctgtggtcacagattttnngtttcaaaacat

SEQ ID NO: 56051 - DNA, 420 bp, Zea mays
tagaaaaatctggtataaaacggcggtaatagccagctagttctaggaaacttcgaacttgatgaacagtggttgggggtttccactccaagatatccttgaccttgctgggatctaccgcaatcccgctgctgataacacagtgtcccagaaattgaatttcttccagccaaaacgcgcacttactgaacttggcatataatttatgttctcttaagcgcgtcaacacgatccgtaaatgttgagcatgctccttttcattcttggaatatattaaaatatcatctatgaagaccaccacaaacttgtccaactcgggcataaataccgagttcatcaaataagtgaagtgggcatgagcatttgtcaatccgaaagacttaccaggtattcaataattataccggtagcaatgccgtt

SEQ ID NO: 56052 - DNA, 379 bp, Zea mays
agcttgaagctgggttaagtgctctgactaaagaggatctcgcagacagcctcgcgtacaacagcctgaaggtacgggaattaaacacttgagaaaaaaccccctatcttttttttttacgcaactcattccttttttcttatatgaattcttttttcatatagggcctgatcctaagcaacgcgttaagagcgcaaaagagcgccgaagatgaaagttatgaaattgcgtttaataatttacgctccgaagttatcaaactgagaaacgaagctttggaaaaagataaaattctacttacactggtagataaagtgaaaaaagacgaagctgcttcaaaggcccaggccgaagctcaaaaacgcgagattaaagatct

SEQ ID NO: 56053 - DNA, 432 bp, Zea mays
  unsure (1)..(432): unsure at all n locations
tcatgcaactgctgccgaanatgagaggtgaactgagtgcctctatctgatactatcttctttggaatgccatgcaagcacacaaaccgagccatgtatagttcggccaacactgcactgttgtaagtggtcttggctggtatgaaatgggccgcctttgtcaaacggtccactactacccagatagattcataaccagtacgagtgcgaggcaaaccgactatgaaatccattccgatctaatcccatttccactgaggaatctgcaacggttgcaacaaccctgcaggtctctgatgttctgctttaatcctctgacaactgtcacatacagccacatactctgctatnctccttttcattctgtaccaccagaatcttttatttaggtctttgtacatcttctcactaccagcgtgtatagaagtatgt

SEQ ID NO: 56054 - DNA, 417 bp, Zea mays
  unsure (1)..(417): unsure at all n locations
agcttgccctctacaagaattgtntcaaatgatatcactttaatgatattaaaataaaccatatgaatgataccacatgataggaactccccctaaatgagtgttctctttagaaagaagtttctcccccttatttagagatgaaaaaatactccccctgacagagatcctctacttaagaaaaagcatgtgaaaaaatagaggtgtaagacatggtttgaaaagactaacttcccttatgcataagtaacagaatatgagttaactacttatgcatttttagcaacatggaagcatatggtatgaaatatagtctaatcaaatattatagaagacatgttaatgatactgaatgtagtctcaaaagataccaattgaagatcaatggcgagcttgagagacatgagagttcttgga

SEQ ID NO: 56055 - DNA, 420 bp, Zea mays
  unsure (1)..(420): unsure at all n locations
agcttatgagtctgctagataggtattcattctatcatcatttttgnaagaagagagaggatgagccaaaaaccagcttcataacccctagtggaacatattgttatcttcggatgcctgaggggctcaagaatgctggaggaagcttcagcataatgacagcgaaggttcttcattctcagataggcacaaatgtgctaacttatgttgatgatatcatagtaaaaagcacgaagcaagaaaatcacattgctgatctgcaggagaccttcgctaatttcagacaagccggtctgaagctgaattcagaaaagtgtgtcttctaagtgaagaacgggaagttccttggttgcttagtttctacaaaagggattgaggcttatccaaataaaaattgagctattctttcgatggaaccac

SEQ ID NO: 56056 - DNA, 460 bp, Zea mays
ctgctgcatgcaaacttatagaatttctgagatgactaagggcttcgaaggaagaattcaccctatgcatgacaaatcaatccacagctccggtcataacgatgacaaaggaggccagtttcaaatgccacaacacaattcgcaatcttcaggacagcagcaaagctccttcatgccaccatctccaaagggccgaggcggtaggggcctttgaagaagatatggggatcatcccacaaaaatctactgcttattctatggtgaatacaaaggccacacgacaagaacgtgtcagattaccattcataagcaaatagagattgccgaagcataaacccatctaaatcagccgaagcaggtcttacatactgcttcgtgccactttccctacataccagagtatgtgggcaatcaacctggcacatttgttgtttctgaaaaccaattacaagcttcctgg

SEQ ID NO: 56057 - DNA, 323 bp, Zea mays
ctaagctttaagggagaacacgtgatacgttgactaacgtacaattctaataatatagaccctgtgcaacttgtcaggcgcgtaaacacgtgggaggaacgcatcacagcctgaatgtgatgaccacatcaagacccttggagctgctacatatggaccttttcggacccgtcgcctatctgagcataggaggaagttagtatgggctagttattgttgatgacctttcccgcttcacttgggtgttctttttgcacgataaagatgaaacccaaccgaacctcaagcgctttcttaggagaagctcaaatgagtttgagctc

SEQ ID NO: 56058 - DNA, 452 bp, Zea mays
  unsure (1)..(452): unsure at all n locations
agcttcaacactctttcaggatacttcggatattgntgngataaatggtaaatcttcttcacgaagcatgaaaagaagggaaggtgttnttttcccatagactcaaaaaccgtacgtgtgtaaagtttcatgcattgtaaagaattgagtaacaaaaatagatatatttcattccgggttacaaaatgttacactatattacatttcagaagttttctacaaaaatgtttaatcctctctcaaaacgacttctgcagcctcattcaggagccgatngacgacttcgtccataatatcttcggccatctttttaatttcgtcgtcccccttcggctgagggtccgaaggcgctttagtctgatctgaagcatgacacggctacattgctattacaaatcgcatacagatcttaaagcctaaagattacaacacgatgaaaactattattagta

SEQ ID NO: 56059 - DNA, 454 bp, Zea mays
  unsure (1)..(454): unsure at all n locations
agcttctaaagggagaacacgtgataggtcttaccaatgtacatttcgaaaaagatagaccttgtgcagctggtcaagcagggaaacaggtgggaggctctcatcacaccaaaaatgtgatgacaacatcaagacccttggagatgcttcatatggacctcttcggacccgtcgcctatctgagtataggaggaagtaagtatggtcttgttatagatgatgatatttcccgcttcacttgngtattctttttgcaggataaatctgaaacccaagggaccctcaagcgcttcctcaagagagctcaaaatgagtttgagctcaaagtgaagaagataaggagcgacaacgggtccgaattcaagaatcttcaagtggaggagttcctcgaggaggaggggatcaagcacgagttctccgctcctacacacctancaaaatggtgtgtagagag

SEQ ID NO: 56060 - DNA, 471 bp, Zea mays
gcttgcatatccagctattatgagacaaacccttttgttggagcaatatcataataattttggttgctatagcttctgtgcccgctctgggtcacgctgtcccgtgccaacctttcggaagagatggcccggtgaatggatgaatgaatggttctatgtgaagaacgatttgaaggcttgggaagatatcaaagatatcatcatgcgccctatctagcagcgcttcggacttcggaaaccaaaggtataaatggacgaatcagctgaataatgccagagggccttcagcgtattttgctcttttattgggaccaccgatttaatgcaagagcacattgccttcagagtgtggccacttgtagataactgcgaaatgcctaatgagaccgttaaagaaactgacgagggtggactaatcagactgaaatatacattcacgtatggagataatttgttgacccgatgatgatg

SEQ ID NO: 56061 - DNA, 386 bp, Zea mays
cctctaaaccctcgagtgcccaattggtaccttgagatatacaatttctgaagcattctttcattcttatactaagacttttttcatatagggtttaatattgagcaatgctttgagagcgcaaaagaatgacgaagacgagagctataatattgctttcaacaacctacgagcagatgtcatcaagttgatgaacgaagctttggaaaaagaataaattctgcttacactagtggataaaataaaggaagacgaagctacctctaaggctcaagctgaagcccataaacgcgaaattcaggatcttcagaaacaactggccaaagctaaagaagaacgcatactagaagaaacaaaacgagaacttagtgatcaatgggcaaatc

SEQ ID NO: 56062 - DNA, 234 bp, Zea mays
  unsure (1)..(234): unsure at all n locations
cctctcctacacatccactataaaatctccccccgccgcccctgtgctcccacacccacanaacccccccncccggaaaaccccgggaaaaaatttttgtgccaagaccaaggggccccgagacccggaccaagacacaaggcaccccgcgaaagccacaaagctgccgcggaaaatgggaaaagccaaaagagctcactggagaacaaagggccaatgcggcgggacaaccgg

SEQ ID NO: 56063 - DNA, 459 bp, Zea mays
ggatcttaagcacctccgctgcagcttgctaaagctttcattctgggcttggtgaagatatcggctaattggttgtgggtgctaacacaagcaatttcgatatcccccttttgttggtgatctctcaaaaagtgataccggatgtctatgtgcttagtgcggctttgttcaaagggattatccaccatgcggattgcactctcattatcacataggagagggactttgctcaacttgtagccatagtccctaagggtctgcctcatccagagtaattgtgtacaacaatgtcctgcagcaatgtactcgacttcggtggcggatagagctactgaattttgtttcttcgaagcccaagacaccagggatctccctagaaactgacaagtcgctgatgtgctcttcctatcaattttacattcggcataatcggcatcagaatacccgattagatcaaat

SEQ ID NO: 56064 - DNA, 344 bp, Zea mays
ctatgtaggatgctttgagcagttcattaccttctgcctctctggcagcttgctgacttccatgtatagcgatgggtccttgatccgaaggtatcttcatgcaaagataggcacgatgaagaattgcttctaaagcattgagggtgccacgaccaataattgcattgtaagggtattccatatcaacaatgtcaaacacaacttgctcacttctaatgttgttgatgaaccccaacgttactgacatggtgatcttgcccaatgctacaatctgtcttctttcgaagccacagagaggatgtgtaccatcatgaaacttatcttctggctcttgcatttgtctg

SEQ ID NO: 56065 - DNA, 450 bp, Zea mays
  unsure (1)..(450): unsure at all n locations
agcttctaaagggagaacacattatatgttttactaacgttcaattcgaaaaagatagaccttgtgcagcttgtcaagtaggtaaacaagtgggaggagcacatcacagtcagaatgtgatgaccacatcaagacccctggagctgctacatatggacctcttcggacccgtcgcctatctaagcataggaggaagtaagtatggtttagttattgttgatgatttttcccgcttcacttgggtattctttttgcaggataaatctgaaacccaagggaccctcaagcgcttcctaaggagagctcanaacgagtttgagctcaaggtgaaaaagataaggagcgacaatggatccgaattcaagaaccttcaagtggaggagtttcttgaggaggaagggatcaagcatgagttctccgcttcctacacacgacaacaaaatggtgtgg

SEQ ID NO: 56066 - DNA, 366 bp, Zea mays
agcgcctcccttggctttattattgtttggctgtgccttgcaacctttaagcgccgcctctaatcttttgatgatgaaggccatctcttcatcattaagtccggctgcctcaatttgtgccaccttactaagtagcgcctccttgctatttgttgccttgagagcaaggggttgcggttcgttgatcggaccattcaaagcgtcgtccacgtacctcgcctccttgatcattatccgcccgctaacgaatttttcaaggacttcttctggcgacattatggtgtacctgcgattctcacgaatattatttactaaatgaggatcaagaacggttaaggaccttaacatcagccggacgacgtcgtg

SEQ ID NO: 56067 - DNA, 437 bp, Zea mays
ctcgacccgggatccttaagccacctgcggcatgcaagcttgaagccaagtttcagaagctcttatctgatagactctttgataaatgttcagacaaagtgcgtggagttcaacactcgatgcattcaacagttgaagcaggtgttccatttggttggagccaggagtgaagagtttactccttcggctgaagacctgcctggagccttcgagcatattgaaggtgagattaatgatcttgacgaagttatagctgggcatggcgacttctgtgcactggtagcttctcagggcacaactgttgcctttttgaagtctggctgtgaacacgacaagattgttaatagacacaacttcatcctttcaccagcagacctagataatacttccagtctggctcgaagtattgcacatagatttataaagttagtgtggac

SEQ ID NO: 56068 - DNA, 363 bp, Zea mays
agcttgacttcgctatattctatcactctgtgttcaacggtgtcgtagagcgcgccaatgggaaaatcttcacaactgttaagaaaatgctcctctatgagaataaagcagatggaccgatttgtcaccggaggcagtctgggcgctaaacacaaccgagtgcatggcgactgggttcactcctttccgccttctatacggatcagaggccatgaccccacataaaataatgcatgggtccccgcgtacagttccgtcagccgtcctcgacgtggacgagccaacttcaaaagatctcattgacggagaccgggtctttcccctatatgccctatacaaataccaagcccagaccaaagcatg

SEQ ID NO: 56069 - DNA, 403 bp, Zea mays
aaatatttcctagcaccctgcttagaatggctcgaaacaatccaaataatgtgcactctaattcttgggaactattctaaaaggaggatcaattgatgacagcaaccttccggccccggccgaaacgaacgctaaacaaagcgcttgatgctataggctttgaatatcctgattatgagcgactccacaacggtgcccaaaggcacaacacgaaaagagtatctggcgcttttgccaaagacgacgaagatcaatcaaaaaagaagaaagataagtttgaatcataagtggtaacttccaagaaaagaaaagaatcatcctggaacaagatcaattgatgaagaatagaacacttctgtgacatcttctgatgctgaaatagaggaaattcttaaggtaatga

SEQ ID NO: 56070 - DNA, 452 bp, Zea mays
agcttcagcaacaggggctgccgcgctgcagccgctggaccccaaccaggagaccctctctcttcgggaagccgggagccagaagaggaaggccaccagtccaatgcctcatgaggacgacttggatcaagagatcagaaatatggagatgctccaccagcaggtccaaaggaagaaagaaaagatggccaggctagctaacttgcagaggcagatagacgaagcctctgaagaagttcgccatcttactcaagatgagcagaaccgaaggcctcagcacagagagcttcatcaggagggcttcttcaacgaggatgactggtatgagaatttccatcatggaaattttgcttttgatgatgcttctcctctgtcagcagaactgcaggctacaccttggccttcgtcttacaagccacctcaactcaccatgtacgacggacattcagatc

SEQ ID NO: 56071 - DNA, 327 bp, Zea mays
  unsure (1)..(327): unsure at all n locations
caacacaacaagcgttgaatgaattcacaattattgcagagcatattcagtccagagacctggttcaaggagttttggctttcaaagattttcctaatttaaaaaaatgggaaatgccgaagctaaagggggagaaaaaagaaggtgaacttgtgcgtttaccttactatttcaaagttaagaaatactttaaaacaccttgccaagagtggctggatacaattgaagtaatgtgcaatgaaatactcggcaactactcccaaanagaagatcaattgatgactgcggccttcagcacccgtccgaagcgaagactgaattcagtgc

SEQ ID NO: 56072 - DNA, 452 bp, Zea mays
  unsure (1)..(452): unsure at all n locations
tgcagcatgcaanctttaaaaaactgataaagatggtacgaaatattctaaaattatgtagaccacattctcttagaaccctaatggcctgtagtatttaataaaaaaaaggtcgcgattattagtgggagtaagagatcttagagtaattaaagtagataaaagtcttggttatagattattagaaaataattgataagttctaagatgcccaaaatttttatatgagggttatataatatttagaaaccttgggtagaggttgaattatttggaccttgtttgaacaccaaaccccaaaacacccccctgccctatgaactcctttaccgactccggaaaccctaagttcccggaactccgtgaaggcaagttgtattcaagacataactaataagtttatggtatctttgcatgctcatgagcatcccatgggatccattcttatacct

SEQ ID NO: 56073 - DNA, 344 bp, Zea mays
gaatcgcatagttgtgtctaaggatgatgaggtccgctaccaaattttggacgaagctcatcttagtagataattgatttcaccccgggagcactaacatgtatcaagatttaaagcaacattattggtggacaaagataagaatgagatcacgcgctatgtggcgaaatgtgacacttgttgacgtgtcacagccatacatatgaagaatgctggtccactgcaatctttgcccatcccaactggaaatgggatgacattagcatggacttcattgtgggaatacccaggacaacaaaagggttgattctatctgggttatagtgatcgcttacaaaatagcc

SEQ ID NO: 56074 - DNA, 452 bp, Zea mays
aacttctaatcaaaacatgactgcgcctatctattgtattattatattgaacgtggatgtgctgctacttcccactttccttgatgagcaacacgcacctgtattgattaatgccagaatgagatgaaacatctcagcaagcgaataattctgacgagatctttaaaccacaaattggattcatcaacattttaaaagagtcacaattaaaatcagaaatacttgtagatatggaactcagtagtcccactataaccaataccatctcatttcctcgaacaaccacaataggttctataacacttccgtgcgtcaataatacctgcaaatatcacttcaatgtatgcataggaatgcatgagtatgaactctatcttcatacctctgagaggaaaaaccaccatatctgcacatatcacttccatgaatgcatatgaatgcactgcatatgt

SEQ ID NO: 56075 - DNA, 388 bp, Zea mays
  unsure (1)..(388): unsure at all n locations
accatccaactaaactaaagatctattcactaaagaagagaagtgatagatgctttgtatgaaaactttctatccttcaggtggtgtagtattctatccttagcgggacgtaccataccataggttaaactcattgcattataaaatgttcaatagtgcatataactttgacatcaactatatgtgtgcactaattcaaaggaatttagcctatccttttgggtttcaagaatgatggttcattntcattcacatataaggatcatcatttgtacaccctcccatgtgttttaatgctctcttttctaagtgtttgaacaatgtactttcaagtgctttcaaaatggattcaaaaactacggatataagtcggttatttcaatcattg

SEQ ID NO: 56076 - DNA, 309 bp, Zea mays
ttcatcccaacaagggctattcggcgttttcataaccaacccatagtagtcctagcacgcaagcacgtatcgagttcagctctatgaagatcaatctaagcatagccgaccctctaaaactccctgaaagctactgaatcatcacttcttctaaagacaggaacacctatatccgcaaaaagacaggtgtgacccatcttgcataaatgagaaacagaaagcaaatgggaatctaaagaatctacaagagaaacattggagagagaatgggcaggagatatagcaattgtaccaaggcctttgaccaaa

SEQ ID NO: 56077 - DNA, 394 bp, Zea mays
agcttggtaattccaatagaatcgagtgcattgatagttattttacacatgaatacatgtatctaatgagctcattttctttcatctgaaagaattctattcattcaaaactacgcaatggttttgaacactgacattggatgtgccgtcatagagctcatgcaatttaagccagatctcactaccgtttttcaaagtgaatacttgattgaagatatctatgctatgatattcttactagaaaattttggctctaacacttaaatgaaatattttcttcacttgttgtgagcttatcgggatttttaagtggtttcatcatgtcacaagtgactctccaaacatctagatcaaccgcttttatgtaacaagccattctagcactataatatgg

SEQ ID NO: 56078 - DNA, 451 bp, Zea mays
  unsure (1)..(451): unsure at all n locations
ntaacctaacaagatagaagtttcacagtaagagccagcttattatttgaacaatgaatacgggagaccgagcccttatccatgttggtccggaggcctgacgcgtgaccaaataaatcaaggatgcatctgaccgcaatcagatccagaatgtgaggccctaagaaaaccacaacatcatcagcatagaaggaaacatgatgcctggcctgctgaacagcaataggttgtagcaaactcaaccaantggcctacttgattaaagaatttacagtatccatgactaggataaagagcattggagaaagaggatctccctgcctgagaccacgacgatgaataatgatgtccccaggctctccatcgactaaaatctgagtggatgaagtagacagtcataaacaaacgagatcccgctacgctgaccaaatccattttattaaacctcaaa

SEQ ID NO: 56079 - DNA, 375 bp, Zea mays
agcttgagctcggcctatctgtattgtcaattgatgatcttgcagatagccttgcttataatagacttgaatgtatatatacattctgtcgaaaatatactatgtttgtaagatcttttgctactcgtatgaactcacctatatgtttcgctagtagggcttaaatctaagtaaaactttaacggcttaaaaggaatcagaagacgagagctgcctgatagctcttgtgaattttccatcagaggttatcacactaaggaatgaagctcctgagaaagataaaataatgttttccttagtggacatgctaaatgctagcgaagtcaatcctattgctcaaaccgaaacccacgaagctgaagtcgactgttaaag

SEQ ID NO: 56080 - DNA, 432 bp, Zea mays
  unsure (1)..(432): unsure at all n locations
agcttcanagcctctccaagtgccacaattgttattagtgattaatagtgagtagcgacttgagagagtgttattcgtgtttcattcgttgctcttgttgctcgatattcaatcatgctttcttcacctccttctaaactctctagtgacttgtaaagctagcaagagacacctaagtgtgtggtggtccttgcgggatcttagtgatccttgagataaagaagaagcactcaaccggtctaagtgatcgattgagagagggaaagggttgaaaaagacccgaccttcgtggccttctaacagggagtatgttcatttgaaccgaacctcgagaaacaaatcattgtgttcatatgtgttgatcttcaccttacgatttgattcttcctctgccctctctctaagttctcttgctaataatcctttgagtta

SEQ ID NO: 56081 - DNA, 448 bp, Zea mays
agcttgtgaagattcttcattccaacatgtgttattcggcgatgccagagccagcctatgttagtcttagcaattaagcaagtgtcgagttcagctctattacaatctaccaagtatagctgaccctctaacattcccttaaatgctattgaatcatcacttcttctaaagacaggtacacctatatcagtgaatagacagttgtagcccattttgcataattgagacacagaaagcaaattgtaatctaaagaatctacaagaaaaacattggaaatagaatggtcaggagatatagcaattttacccaatcctttgaccaaaccttgttttccatccccgaatgtgattgctcggtggggatcatggattttctcgtaggaggagaacatcttcttctcccctgtcatgtggtttgtgcacccgctgtcgagtatccaacttgagc

SEQ ID NO: 56082 - DNA, 472 bp, Zea mays
agcacattatggtacccatcgcttgatgggttcttctatgttagtcaataaagatctacgaacccaaaagatctttgtgttagcacttggtaaactcattacctttctagcacaagttgcaattttgggttgcctagatacatgtgaaataattgacaagctagaagtgggatagttaccaatgggacaatccttacattgatgtcccttcttttggcatatgtagcacaggcgaacttcaagttttgaagatatcttctttccttggttcttgcttgcttcatggttagtcaatattttcttttctaacactatgcctttctgttttaaatatggacaagacttaattaaagtgtccttctttgagcatttgagacaaagtttatcatccttgttaataatcaagcccattttaatatatggacatgacctaatcgagtgtgcctctttaaagcattcactacacatctta

SEQ ID NO: 56083 - DNA, 287 bp, Zea mays
acatgtgcagcaggaaaggcagctggacttcatcatccacacacgaacatcatgacgacagacagggcgcttgagctactccacatggacctatacgcccccatcgcttacataaccatccgcgagagctagtactgtatacctattgtacaagataatactaccttcaaatgggtattctttttgctggaaaaaactcagaccacagagaccttgaagagattctcgacaccggcatgaaaagagttccgaccgccaatcaccaagattagaagcgaccaccgaac

SEQ ID NO: 56084 - DNA, 372 bp, Zea mays
  unsure (1)..(372): unsure at all n locations
agcttctatgcaccttgccaatggttggtaaatctccatcgaaaataactctgtttctatgcaaccaaaggcaccatgctcccaaaataatggcactgttgactccctttctcttgcttctgtgcacctgaatggtcactagtccccaccaatcagcaaaattagtatcttctggtcctggagttaaatggcccataccaaagggggagaggatgctatgccaaaactgcctggcgaagacacaaccagtcaacagatgctgaactgtttcttgctcttgttcacagaaagggcatgcttccggatggggaagacctcttttntgcagcctgtcagctgtccaacacttattctgcatggctaaccataaaa

SEQ ID NO: 56085 - DNA, 423 bp, Zea mays
  unsure (1)..(423): unsure at all n locations
cttaggttntctcaacttgggttaagttgtacccctttatccactatttacgggtaagtcctttaaccaggggtctatntgcaaaacactttaaacaacacaacttgtttgaaattattgcctagtgaatgcactctatgtgtgtcaaacatatgcaatgccaatgctatgatgccatgctcaagttttagttatattaacaccaagggtgttacatcttaacatgtgaccttttatatgactatggtgtaagaaacgactgccggnttatgaagcaacttttaatatctatggtagtttctcaaaattcaagagttaagatggttatttctttggatattccatgtggatcaccatgttgccttattaacctaacctacgaaagacatgttatctatcgaaggcctaccaacttaatccttg

SEQ ID NO: 56086 - DNA, 267 bp, Zea mays
ttaagttacctgcagcatgcagcttaccctaatatggataaaggtgttttattaaccccattgagacacctaatactttgggaaatagtttataatatccttaaaacaagagtgataaacctttttacccctaggataccagaaaccctaatgggaccctctaaataccttaaaaccaaccctaaggggttataggccaaaataattccattttgggcttaaggggcaaaaaccacttaataaggattttaagtcatttgggtcaca

SEQ ID NO: 56087 - DNA, 440 bp, Zea mays
agcttgcgcagaatatatacaccgcgttttttatcggcacacagacgctctcactttttgccgaagcccggcagcgcatcagctcagcggagaatctcctgatctgatcgcaactgaaaccgagcacgcacacgcggccgtcgttccggcgccatcggcccccaccccaggctcacctctctctctctgtctctctcttcgatctgtctgatatcctcgtcgtcccgtcacgccagctcggatccatcgccttcctctttcttcccgactgatagctacgctacgcacccctcgcatcgcatggggtgctggactcctcgcttcgaatctacggaacggaccggtgcgcgcctctggtcctggcagtcataagcggcggtctcggctgcggcgcacgtatatcatcattctttctatcttaccctaccccccactcacga

SEQ ID NO: 56088 - DNA, 401 bp, Zea mays
tcatcctcacatgtgctaatcggttatgtcttattcagcccatgctagtcttagcaattaagcatgcatctagaccggccccttcttttgcacaaataactaggtaaagtttgccgtattatacacccttaaaagctagtgaaccatcacttcttctaaagacagacacatctacatttgtaaataagcagttatatcccatattacataactgactaacagatatcaagttatatccaagagactctactaaaaacacattggagatagagtgctcattggagattgcaattttacctagcccttttaccttgccttgattcccatcaccgaatattattgaatcttgggaatccttattcttgacgtaggaggtaaacatcttcttctcctccgcatat

SEQ ID NO: 56089 - DNA, 451 bp, Zea mays
  unsure (1)..(451): unsure at all n locations
agcgtgcacgtcgtgcaaaggacgaaatggaggagaaccctgatgcttttcgcatgggaaaatggcctcattgcactcagtagtctaggtgcttctatgatgttatgtaataatgaacttcttattatggattccatattccatgaaaactcacttaatgttggtatgattatttagtctcgaacaatgttatgtggtaatgaacttcttattatggattcaagttgggcactaaaagcaattcatgaagaagacttatagcaattgatacagagaaccaacaaacacttaaagcaattaatacataagagttttctagtcgtgcacccacattccaaattgtgtggaaccttcntcacagtgtcctcccattgttgttgtatgttgtggcttcaatggaggaggtggtggaccaccattcttgctatgacaagggcagcaacaatatgga

SEQ ID NO: 56090 - DNA, 315 bp, Zea mays
atgactttatagaccataagggtctgagtcataattgtaatcttatgcacggcgatgaatgtgatctcttacaggctgtgtcctgtgcctataaatagtgaacaatactcctctactgttcacgcaatcctataactgctaacgcattactctggaattattgttctttgtcaaggcaaaggtataaatgtaaccaagcatcattttataatatctcaatttatattataaaatgagcaaatgatgttatttgttcttaatattctttaacgctctatattctatatctcattttgcattatttctacttctgat

SEQ ID NO: 56091 - DNA, 445 bp, Zea mays
  unsure (1)..(445): unsure at all n locations
gcttaatgccccctaaaaatagtctaacttttttatggtctttatctcccatggttcaggataccgagggctatattttatatcctgctggttatcccgaccacattattaggagaattcattctaggaaggctcactctggctctcatcatgcttttatgtataagagtgaggcatctatttctcaggcaatccactcatgttaaattgactaaaaagaaatctcctattgcatcaaatgaacctagtgtttcatttaaaacctttgatgcttcatatgtgcttactagcaatataggcaaatgtattgccaaatatgttgtgggcaaacacaaaggggtcaaagacttgtgtttgggtacccaaggtgccttgttttaatgtcanaagacccaagaccgtttggtacctataaacaaagcctaaacttgtattgtaagtttat

SEQ ID NO: 56092 - DNA, 399 bp, Zea mays
tgaccggcgcgaggttcaggcgcttgttctggaggggaatatatgtgttgtctaccgcaaactctgtgcgtgtggatgcaaagagcacaaagccgagcgctgatgaagagcggagtcatgtgtattctagataggaggcagaagctttcattttattttgtatctctggcataatctctacaggaagggcttttaggagcttaatacgtggcttctaggactctaatacgtgaacctgtgagaggataaggagtacatgatggctccaggagttcgcacacgtcagaataagaatagagggagatgacacgtataggataaaaaaatgggttttctaaattagtgcccttagttttagtggtgtgctcacatatacctttagccgtgttttaactcatt

SEQ ID NO: 56093 - DNA, 292 bp, Zea mays
  unsure (1)..(292): unsure at all n locations
cacagatatgcagcacgcctcagcttcgctctggaatccgacaaatggacaaacaacatatcagagtatgaaggcatcatccttcggctccgcaagctaagggccctcggagtcaccacacgtatcatcaaaacagactccaagatagttgccggtcangtcgagaaagactatgtcagcaaagaccccgccctcatgcaatacctcgcggctatcctgaagtctcgagagacaattcaagggaatcaccctgcagcatgtggatagggccaagaacgaggaggccgatgcc

SEQ ID NO: 56094 - DNA, 450 bp, Zea mays
agcttggcctgcgcagcggctgctgctgctgtgtcgctgtttggctgcctctgccaaacgccgcttattgcggccctcctgctgctctaagaaactgtcttgcccttgacctgcctgaaggggcgacgaggatcctcatcatcgcctgccactggcgccgacacattattcgtgcgcggcatcctgaactgatgtctgcgaatgagagagagtgactaagcacagagcgaaaaatccgatagattagtgaaggatgagatgactacctggaaagctcacacgagaggtgacaatccatgcaggacaggagacggcacacgggcaatcaaggtcactgaaatgacagaagaggtgagcacgtattagtcacatagtcataagtatatgaaatgtgaataaatacatacacagagaaatatggcgcagaaaacatgagaccagacgaccgat

SEQ ID NO: 56095 - DNA, 442 bp, Zea mays
  unsure (1)..(442): unsure at all n locations
agctnggcaacaccatttgacatcttanatataatttctgcgatcaagtatatttaattcattcctcaacatgcaaaagcgggtcttatcaagtggcttagtgaaaatatccactaattgatcttccgacctcactccttctaaaatgatatctcctttagcaacatgatctctaatgaagtgatgacggatatcaatgtgcttggtgcgagagtgttgtacaggattattagcaattttaacagcactctcattatcacacaacaaaggtaccttttctagaactacgccatagtctagaagagttngtttcatatataaaatntgtgtgcaacaagcacccacggcaatgtattccgcttcggcggttgacaaggcaacactattttgctttttggatgtccatgaaactagtgatctaccaagtagatggcatccccta

SEQ ID NO: 56096 - DNA, 327 bp, Zea mays
  unsure (1)..(327): unsure at all n locations
acctcagagtcacctgcggcatgcaagcttcactggctacgnacgattgtttatgattttggcgcatgcaacaaaagggtcacgctcgcctgccccggagtggacacgcacgccgccttgttgttggtttggcaccatccgtcagcatagcggcaaggcgcatttaatgcctgaagggcacatcacctgtcatcgggtatacaggcagcgcgtttcttcgtttatatgcagagacagcgtgtccagggacatactttaagctccgtccgctggcttacatcacggcaataagccacgtgacaacatctggtctcctcctgagtgggg

SEQ ID NO: 56097 - DNA, 435 bp, Zea mays
  unsure (1)..(435): unsure at all n locations
agcttcatactcggctgcgttgttataggcctgttataacaactggagagcatacttgaggtgctcgcctccaggtgcagtgaagagaattcctgctcctgctccctgcagtttcagcgagccatcaaaatacattcgccatacttctacggtttctggattatccggtacttgctggtctatccactctgatacgaaatcaaccagtgcttgagttttgatggctgtgcgaggtcggaactcgatatcatgggatcccaactcgcaagcccacttggctattcggccaatggcttccttgttgtgaagaatgtcccctattggaaaaccagtaactactatgactttgtggtncgcaaagtagtggcgcagcttgtgggcagttaaaagtactgcatataatagcttctgaacttgaggatacttttcttcgat

SEQ ID NO: 56098 - DNA, 341 bp, Zea mays
  unsure (1)..(341): unsure at all n locations
tgcttctgcaggagagcttccgaacgtgatgactcgttccgtctatggagtcgctttatccgagcgcaagttacttatcgcaaaaagggacgagtgaggtatccgtatcccggaggcgtaggagtccctcggctcggtcagccttggctgcttacgtgtacctcgtcgtttccaggatccgctttccaaagtagtcaagaagcacggaagaaatcctgctaaaaagaggtctcttttcgaggaaaaaattcgacgcagagggggtctccccccttttagcccncgagggagggtcgggctttgccgatgctacgccgaccccttcttgacaactaaacttt

SEQ ID NO: 56099 - DNA, 451 bp, Zea mays
  unsure (1)..(451): unsure at all n locations
cgggatccttaagtcacctgcggcatgcagcttatgaagatcttttcccaacttggtcttttgcgggccagagcaacccatgtagtcttggaattaagcatgtgtcagttcagctctatcaaaattactaagatagctgaccctctaacacacccttaaatgctattgaatcgtcacttcttctaaagacagtgacacctacatcagtaaaaagacaggtgtagcccatttgacacaattgggaaacagaaagcaagttgtaatctaatgaatcaacaagaaaaacattggaaatagtatggtcaggtgatatagcaattntacccaatcctttgaccaaacctcgatttccatccccgaatgtgatagctcgttggggatcttggtttttctcatatgaggagaacatccttttctccccggtcatgtggtntgtgcacccgctgtcgag

SEQ ID NO: 56100 - DNA, 409 bp, Zea mays
agctgtgaagggttttattccacatgttttatctgcgatgccacagccagcccatgctagtcttatcgattaagcatgcatctagaccgggcttctcttttatggaatcaactaaataaagtttgccgtctagtacacccttaaatgctagtgaaccatcacttcttctaaagacagacacatctacatttgtaaatagacaattatatcccatactacataaatgactgacagatagtaaattatatccaagagactcaactaaaaacacattatagatagagtgctcattggatattgcaatcttggctaaaacctttcaccttgccttggttcccatcaccgaatatgaatgaatcttgggaatccttattcttgacggaggaggtgaacatgttcttctcccccg

SEQ ID NO: 56101 - DNA, 175 bp, Zea mays
ctcaagccactgaggatgcagcttctaaagggaagcacatttacgactttatatgttcatttgagaaagacagatttgctgcgcatgcctatcatgaaagctagttcgcactcatcatccacactagaacatcatgactagtggcagggcattggagctcctaccaatggaacta

SEQ ID NO: 56102 - DNA, 216 bp, Zea mays
  unsure (1)..(216): unsure at all n locations
tactaagcttanagctaaaacttagcagatcacagtgcacaagagctatttaattatgtgagcaggagtggttggccagaaagcgtgcaaaataagtttgcggtatggacgtatttatacgcttgatgcgttgaaagttgaaagaccccacttgtcattgaatgttgctattctagcaaagggaaggtgatttttacgaccttgcgcatacagcct

SEQ ID NO: 56103 - DNA, 342 bp, Zea mays
ccagagccaacccatattagtcttagcaatcaagcaagtatcgagttcagctctattgaaatcaactaaatatagctgaccctctaatgctcccttgaatgctactgaatcatcacatcttctacagatagtaacacctatatctgaaaaagacagttgtcgcccattttacataattgagaaatagaaagcaaattgtaatctatagaatctacaagaaaaacattggaaatggaattgtcaggtgatatggcaatattaccaagtcctttgaccagatcttgattatcatcctcgaatgtgatagctctttacggttcatccgttttctcgtaggaggag

SEQ ID NO: 56104 - DNA, 271 bp, Zea mays
actgggaagaggaccactcacaaatatgatgctggaagatgctgaaacatataccgtgttagaatcctacccttaactctaaagttcaaaagatatttccaacaataatcacaatttaccttatgcgacacaagctggataaagtggggtatatatcatataacaagcattcgagcataacattacgcactgcaaaagcgattagtcttggcctcttgggaagggctccttccatcatatggagccaaaagactcgatgagaaactgacat

SEQ ID NO: 56105 - DNA, 228 bp, Zea mays
  unsure (1)..(228): unsure at all n locations
agcttgccaagccctctgacccgaccggacatgatcctgatgtccttatatctgacnctcaccggacctacggtcctacgctcggcgcgctctggacccgatctatccacgtgagtctccacccaattcctctcgctcatgtcttctctggcatcccgcggacacctctgacctaatttattgaaatgatctctaccggaccaggctcggtctcctctgcgacgacga

SEQ ID NO: 56106 - DNA, 443 bp, Zea mays
  unsure (1)..(443): unsure at all n locations
agcttgcctagcgatccgcgaaccatggctgtgtgtgacctatgctgngatgctcctccgatccggtaaccctacaagcttggaagacgcctctttgcgatttgttatgttgtttcccttccttttcactcgattttctctctcgtttcctttcttgcggaagggacgaaggggggccgtgcgggtgcggcggcggtgtgcggaccgggcccggtgtataccagaccagtacacgttgaacggagaatggtttcactcagaatgaagtcattctcgatggatactagcgggttaccctaccttgcgacggctcacaataataaccacataaagtatccatcaaaaagatctcaaagttgtttattaattgtcaaagatttttattgattgtctcttctctccacataatttttttttttgactaagcgagtcgacatcgtggt

SEQ ID NO: 56107 - DNA, 391 bp, Zea mays
  unsure (1)..(391): unsure at all n locations
gtccttcaagtttctcctgcacaagcgtcgcacttactgcagaatgcgaagctgccacatataatagtaatggagcccctggcgcaggtggagttaatgttgttagatcaatcacgtattgcttcagctcttcaaacgctttttgttaagctgggccccactgaaagacttcgactgactttaatatttcanagaatcggcaaattctttctgctgatctagatataaatctgttcaatgaagccaatcttcctgccaactgttgggcccccttcttcgtacttggcggatccattcgaagtatggctccgatcttgctnggattggcttcgatccccttcgatgaaactaggcaaccaacgaccttacncttctntactcaaaagacaca

SEQ ID NO: 56108 - DNA, 435 bp, Zea mays
agctacgtatatgcggccttttggacttattctgataggcaaagatacagtcattacctctaagatttcctccatgtcggtggcagaaagtggtgcaccagtatcttcttctatatcagatgccttctgcttcggagccgcaacctttcttttcttcgaagcatctgtcttcggctcacgcctcagctttctcttattcagtttttcttcatcatctttcaccaattcagcagcttctttattcaggacgctggcaactctctttctcttctgtcattcagcacctcggtccagtcgctcatagtcaggatactcaaagttcagagcatccatcacccggtttaaccttcgcttctgacgagtgtcgaaggctacagtcattagttgatcttcttttttagaataattgccaagaattatggtgcacataacttc

SEQ ID NO: 56109 - DNA, 227 bp, Zea mays
cccctggcgtacgtggagatatcgatgatatagcaacataactggttagctcttcaaggtcttgtgcaggagaggcccccattgaaagacttctggtgaattcagcacttcttacaatggtaaatttctctctgctgatctggatataaatctattgacagatgccaatcttactgtcaatctttgaacacccttttgagtacttggtggctctattctaagaatag

SEQ ID NO: 56110 - DNA, 396 bp, Zea mays
  unsure (1)..(396): unsure at all n locations
atctatgcgctttctaacaatttatggaatcttcctttctggcacattgccggtgcaattatagtacttttgcctaaacactttgccatgtgactgttttgtttatttccacaccgctcgatcgagcgagcgagcgagcttgttttttttttctctctacaaaagggaagagagctttccacacccacagcccatcatgcatggctttgttcgagctaactacttcctactttctagctccatggatccatggagcgttttgttgagggagagagctatctatagctaggggggctgtcatatcagctgtgccaactgctaagcaatacccaacatgacagacaggtgtgttntgcgcgtgctcgttgctaattaaactatgctggcgctgtctgt

SEQ ID NO: 56111 - DNA, 418 bp, Zea mays
accttaaaactcagcttctggcatgccctagaacattgtttcagatacggatctatattttatcagtcgattttggcagccgctgtttcctttaactaacactccactgagtatgagttcttcatatcaccccgatcggatggtcaaacacaccaaatcttgaggtgttttgttcatgcctaccctgagagatggttgcagtggctagaagtggcggaattttggtataatacgaattttcatactgtctggcagcattcaccttttgaggcactttatggttatcctcctcgatattttggcatacaagatatgtcagtggtaccagctgatgatcccaatacatggcaccaggatcgtaagttagtcatgaaactgattcaacaacatatgttgagagcatatgatagaatgaaat

SEQ ID NO: 56112 - DNA, 472 bp, Zea mays
  unsure (1)..(472): unsure at all n locations
cgatcctctaagtcacctgctgcatgcaagcttgatacagagccgaatgtgtctagcatttatatcttcngcgtaacagcaaagagtggaaccgacttaaagatgaaaaggctattcagacctctatagactactatagagttattatcaaatgtaaagggcatgaatgtaattttgaagggctgtgtcccgtgtctataaataggtgaacagtatccccgtactattcacgctgacttggcattcgctttttgcgtcgcgctcgtattgtcatttccttccgattgaaggtacacttgtagttcaataatatttttgtctatgctcaataataataaatgattgttcatgtgttcttctacattctttatatttcattcttcgtcattgcttgatgaatttatgaaggtatgtcctttataaccttctgtcgcaagtcattacgttctaagggaaataatgctttggagga

SEQ ID NO: 56113 - DNA, 331 bp, Zea mays
caccctgattatggggtataaaatatctcttgaaataacaacgcaaacttatggggtacccgccgttttctttctcccctattgtaagacaatcatagagaattaatttgtataaatatgtgtgttccatttcatatcgaagcttcggttttgtttgctaaaaatgactttggcgatgtctacatccggaagaagaaaacaactagcgcttttgcttttgagttatttgggcgtggtctaatataaataaatatacatctatattaaagccatgtatatatatacctacacctaaaaaaataagagaagagataagaaatacagaatggga

SEQ ID NO: 56114 - DNA, 422 bp, Zea mays
agcttgacttatccaggcctttgaagatttccttttaataactgcttctggagagatctggcgaacgagaatcatcgctgtctctaatacttcaaccacaaatctgctcaacgggaaccgaagtctatctttgaagaagctttggaagatcacaacttcgttgtcttcgcgagcaggaacggccctgtccacctcagccctcacaataaacatatctcgaaaataccttcctctcatattatcaagatgactgtgtttgatagttgatgactctaacactgcatgacttggtcgctagggccgatcttcatagccttcgcctccactctccacatgatagatggcgctatcatcagtgtcttcagacaatccttctagcatctttttagcaatattctctatatttgcctattctattgccc

SEQ ID NO: 56115 - DNA, 343 bp, Zea mays
ccgaggcaagagacaccaattgtctggtggtccttgcggcgacttgttgtccagattgattgagaagaggagctcactctgtccgagggaccgtttgagagaaggaaagggttgaaagagacccggtctttgtgaccacctcaaccgggagtaggtttgcaagaaccaaacctctgtaaaacaaatcatcgtgtctcgctctttatttgctcacgacttgttttgcgccctctctctcggactcgtttatatttctaacgctaactcggcttgtagttgtgcttaagtttaaaaatttaagagtcttcctattcacccccctctatgccactttcaattggat

SEQ ID NO: 56116 - DNA, 445 bp, Zea mays
  unsure (1)..(445): unsure at all n locations
agcttgtgaacagtacaatttcagaatggatatagcagcttcngcagatcagccgaagcccatgctcttatgtgatgacatagcagagcacaatgcgctgttgggctcccaattatcccaagaacaggagaaaaccttgataaggtttttgttcaacaacaaagatgtttttgcatggtcagccaatgatctctgcggagttaacagggatgttattgaacactcgctcaatgttgacccatccttcatacctataaagcagacgcttcggaaaatgtctgatgacaaggccgaaggagctcggaatgaagtcaaaagactcctcagtgcatgagttatcagagaagtatagtacccagaatggctagctaacactgttatggtaaaaaaggccaatgtgaaatggcgaatgtgtatcgactttaccgatctcaacaacgcctgt

SEQ ID NO: 56117 - DNA, 442 bp, Zea mays
  unsure (1)..(442): unsure at all n locations
agcttgccttcgcttcagtctatcatccgctttcctacggagtagtggagcgtgccaatgggaaaatcttcacaaccatcaagaagatgctcctcgacgagaaaaagggcagatggaccgacttgctaccggaggcagtctgggcgctgaacacaaccgagtgcagggcgaccgggttcactcctttccgccttctatacggatcagaggcaatgaccccgcaagaaataaaacacgggtctccgcgcacagctccgtcagccacccctgacgtggatgagccaacctccaaagatctcattgacggagaccgggtcttcgccctgcaggccttanacaaataccaagcccagaccanagcatggcgcgaccgcgcagtcatcccaaaggagttcagcgcggtggacctcgtactcatccgaacagctcggacggagtccaa

SEQ ID NO: 56118 - DNA, 476 bp, Zea mays
  unsure (1)..(476): unsure at all n locations
tctaagggagaacacattntaggactaacatatgttcattttgagaaagacgggtttgtggcgcatgctatgcangaaagcaagttggagcccatcatccacacaagaacatcatgacgactgacaggccgcttgagctactccacatggatctattcggcctgattgcttacataagcatcagcgggagtaagtattgtcttgtaatagtggatgattattctcgcttcacttgggtgttctttttgtaggaaaaatctcatacccaagaaaccttaaagggattcttgagacgagctcaaaacgagttcgccttaaggatcaagaaaattagaagcgacaacgggacggagttcaagaactctcaaaccgaaggcttccttgaggaggaggggcatcaagcatgagttctcttctccctacacgccacaacaaaatggtgtagtggagaggaagaatagaactctattagatat

SEQ ID NO: 56119 - DNA, 459 bp, Zea mays
  unsure (1)..(459): unsure at all n locations
agcttcgaanaatcactaatcctacatgagaatttctgaagtgtcaagacaaactgatatttgattgatcgtgtggctttcatgtggtacaatatgttctgctattgcattaaaaatagaaaacatataaccagtatgcgggttgcttgtgagtagtgacaaatcatgtcagcataaaccgtaacaaactaaaccaaggttttaaatagcaggctaagatatttagtggcctcctccagaagccaaaaaaaagcttcatcatgatataggtgaagctattttatttagcgttttaaaaaatggaaaggaagtttaacgaactcaggaacacatgtcaaaagctcaaggtgacatgtcaccatggacattaattcataaccattcaatcaaccagctataactcacttctataatcaacattcattatccattcaatcaaaaaataaactaacaattatt

SEQ ID NO: 56120 - DNA, 91 bp, Zea mays
accacttgtgaatggaagatgacaccggcggctgtttgagctcacctgtagacacgaagggaaaactggatacttaagcgcggggtccgtc

SEQ ID NO: 56121 - DNA, 448 bp, Zea mays
agcttgtgagaataataatatgtattacatgttttcatctttgttctaaaattcgggtcacacatagagtaaatggatctaagattatgtacttgtaaataacacttcgggaaatagtaatctattttcaaatgaagctaattcatgttataattcatgtcccactttgaattcattaccccttatgtagtattatgtctctctaagatgtgttccaatgctcgtacatgtttggtgtgatgttcatttgtactttccaaatgtattgaatgcatgctcgctttatttagacaacgagcatgccgagattcctgagtatgttgttggagacctccctgagcaacaacctggtgaaggcaagtgtcctctgacctattatgtcctacatactttataattcactgtctacattactgtattgaaaccaaggaatgactagtctgtattt

SEQ ID NO: 56122 - DNA, 349 bp, Zea mays
atctaaccactgagctcagctgtagaaacgagggggaacttgtacatcttttgggaaagattgagtcgcttggttaggactggacctgtcaacactttgactaggtgctttaaaaaatcgaaatacaggatcaatgactactccaacatggtcgtcagtccttgcaggcacaagcagactcttatgctggataactagcggttggtcaaaccgagatggcctacggctttgaagaggtgcgattgaaggtactagactacgattatatccgaacccaaaggtgaagtatggatgcactggatttagctatgagctttgccagcggattggtttgttgagtgcctgttct

SEQ ID NO: 56123 - DNA, 441 bp, Zea mays
ctgcaagctgggcttctaaaagagtgtcgtattcttatatatcatatgatctgaacatgtgtcatgccaccgcacataatactcattctcaggtcattggacacttggtgatgtgcatgttccactgtacaagcctatagccgatattgttggcaaaacgtatttaggcaagttgttgatcatgcatatcaaccatatcaatatgtttggatgtagatctggagctactataaaccattattatctgtaggaaaatatgatccttcctggtggtgctataaactttgaagaagcaatgtacatgggtcacacacctgcaccatctcacgtatccttcactttataatgactgagatacacttaagcgctattgataggcatcacagtcaatatgacctggtgatgacaactaaaagtctgttgttaagcattgcattattc

SEQ ID NO: 56124 - DNA, 440 bp, Zea mays
  unsure (1)..(440): unsure at all n locations
gcttctaaagagagaacacattntangacttatccatgtttattttgagaaaggcacgatttgtagcgcatgtcaagtaaggaagcaagttggaatccatcattcacacaaaaacatcatgacaacggataagccacttgaactactccacatggacctattcggcccgatcgcttacataagcatcggcgggagtaagtactatctagttattgtggatgattattctcgcttcacttgtgtattctttttgcaggaaatatctcaaacccaagataccctaaagagatccttaagactggctaaaaatgagtttggataaggatcaaaaagataagaagcgataatgggacggagttcaagaactctcaaattgaagtatttcttgaggaggaaggcatcaagcatcaattctcttcctcctacacaccttaacaaaa

SEQ ID NO: 56125 - DNA, 296 bp, Zea mays
tctggatggcggatctgatgccacgcgcattattttatccgcaaacgtatcccttatgggcgccggcttctcaatgctctaagctgtgacggtcaaactctatagactctccataatcgcgagtcatgtccgccaacaatcttctgcgagagactttacaatccccatcggactttatatcaccaccgatgaacgtctctttgcctatgcattaaaggccgcgtatggaccaaacaataatttcttgcactcgaaatcaaacatgtgcatctgaaagggctctgtatccacctgca

SEQ ID NO: 56126 - DNA, 462 bp, Zea mays
cctgcagctgcaagcttgtgagatgactattagtagggttgtttactgctattgtggggaaatcgcgatgttgtccgaaagatgccataattaacattttgaaaaatgtgtgtattacttggtctgattttcccccattcaatggggtttattcattgtcaaaagctgctgccacatggcctccctcacccctgctctttactaactgtgaattgttgctcaatgtgaactttaagtgtcaaggggactccatactaatacaatattctgggtttctgatggagtatattccgattttactctcctatatagggcctgtttggcactatcttacacatccatgttggatctacattcttttagacaaataaagtggcttaaactttttgtgtgtgattcaaactataaacaaaatgagtcatacatatatttgtcgaagctacaaatattcggctctcaaat

SEQ ID NO: 56127 - DNA, 448 bp, Zea mays
  unsure (1)..(448): unsure at all n locations
agctntatcaaatggacgtgtttagtgcctttctcaatggaccaatcaaggaagaggtctatgttgagcaacctcccggctntgaagatagtgagtaccctaaccatgtctataaactctctaaggcgctgtatgggctcaagcaagccccaagagcatggtatgaatgccttagagatatccttatcactaatggattcaaagtcggaaaggccgatcctacactcttcactaaaactcttgaaaatgacttgtttgtatgccaagtttatgttgatgatattatatttgggtctactaacgagtctacatgtgaagaatttagtatgatcatgacacagaaattcgagatgtctatgatgggggagttgaagtatttcttaggatttcaagtaaagcaactccaagagggcaccttcctaagccaaacaaagtatactcaagatat

SEQ ID NO: 56128 - DNA, 406 bp, Zea mays
agcttctaatagttacaatatatggcagttgttacatgaaggcaaatccaccttagttgaaatcaaatatttctaacgtgaaagcaaaagaacattctgatttataacttaaacgaaaacaaagatataactgtatttttagagtgtaccaattttcataaaacaacataaaaaaggtggagattgtcacgtaagcacgagtataataacccccaatcctcagttagccgattacccccacatgacctggtgtcgacttcatctgaatccctgaccgaatgcccaatgtttttcagctctaggacctacggcattggcgaaaccggtgctttcgaaggatagggatagggatgcctctcagagacggtaaacactcaaaagcttaaaaccttgctaaagttttgac

SEQ ID NO: 56129 - DNA, 337 bp, Zea mays
gtatccgagggtcttagtttatcaaagaaaaattatacagaattggagaaggtgttgtatgcttgtctgatggcctccacgaagcttccgcactattttcaagcatacaatataattgtcccttcttcacaaccattgaaggatattatgagaaatagagaagctactggaagagttggaaaatgggctgcggaactcaatgagttctgcattgattatgtgcatagatattcgattcaatcccaagtgttagcagactttattgctgactggacgccaggggctcatgaagaagaagcgagtaaagacgctgaagtttggacagtattctgcgatg

SEQ ID NO: 56130 - DNA, 400 bp, Zea mays
ggaacaataacattaaaggaacgtctatgagagcacctataggggaggggtgaatacgcgatcctgtcaaaatcaaacacttgaagccacaaaacttgattaggtgctagttcaatagagacaagtggctaaagatcgaactcttgtgaaacacagtggtcaccaagaaaacatgtacaagagacaccgagatttatcccgtggttcgaccaagtataacacttgtctacttcacgttgtggcgtcccactggacgagggtcgcacgcaacccctattaagtgatccaatgatcaacttgaataccaccgtgttatcctttcttacactatttcccattcacgaggaatctccacaaattggagcctctcactcttacacatgatgatcacaaaaaacac

SEQ ID NO: 56131 - DNA, 442 bp, Zea mays
agcttaccatgcgactgctaatgtgtcctttattctctgctgataaacaggaatgccacctatgattattacaacacaatgaatgctaaacaagcatattacctgtccatggaagttttacaggtgacacaacacttcttctctaacctcactattcaatatttgctaattgagaccttatgtaattggaattgctgttttctatgtttaaggaagggctctcacaaatgctattggcaatctagaaattaccggtgaatatgcagaagcattaaaacaacttggacaaaacctggaagatgtcgctagccaggtattgtttttttaagggagttggttcttcgtaccaaaactttgccacgtaccttcattattccagaccattattccagacacctaagaagaaacacattttatgatcaaatcccattttcagtcattt

SEQ ID NO: 56132 - DNA, 335 bp, Zea mays
  unsure (1)..(335): unsure at all n locations
ttcagttgcctagaaaatgctcctcgcttgaaaacaggcagatggaccgatttgataccggaggcagtctgtgcgctaaacacaactgagtgcaaggcaactgggttcactactattcaccttctatacggatcaggagccatgatcccaccagaaattaagcatgggtacacgtgtacagaatcgctaacgttcccgaggtggacgagccaccctcataagatctcattgacngagaccgggtcttcgcctacaggtcctacataaaaccaagtccagaccaagcatggcgcgaccacctgtcatactgagggagttcatggaaggggaccttg

SEQ ID NO: 56133 - DNA, 302 bp, Zea mays
  unsure (1)..(302): unsure at all n locations
agctttctcggctaagaccgagacaaggcctctttgtctggtgaaagnacgcgtaagcggcaaggccgaccgagccgaaggattcccacgcctctgggatacggatacctcactcgtcccttccgcgaaaagcaactctcgctcacacaaacattcctgttaccgacagagtccaaatgctcggaacaagaggaataaagacgcagcttctcgagcgcggcgagggcgtgttcttctggcctctgcggccgcagaaagcacacgctacaagatgatctgatcctgcaggctcgggtcttcac

SEQ ID NO: 56134 - DNA, 334 bp, Zea mays
tcacgagagagggaacgagtcctaggtctactgaggagtttattgttctgagtggagctcgatgcttgagtgtgtccgtctccatcgtccttgctgcccgtccctatcacccttgtgatggccctgggcatacccttttatagatacaaggggatggtccagctgtacatatgggggtgttgctatgtgctaatgtggcctgcggagaagtgcttgagccctgtaaaagcgtaactggcggtgcggtcctgggtcctgctgacgtttctttgccttcatagagagcctgaggactaatgacgtcatggatgcatgcggggaaccatcattacct

SEQ ID NO: 56135 - DNA, 443 bp, Zea mays
agcttcggaattacaaaccgacataaaagtataatgaccttttagtccataaatgtttgagtcgctgttgtaatcccttatgaggggcatgattgtaattcctcacaggctgtgtcctgtgcctataaatagtgaacagtattccttaactgttcacgcattcctggaatagtgatcgcaccattcgggaatcaaccttttgccaaggcagaggtattactgtacccaatgcttaaatatattaaatagatataacattaaagtaatgttgttcgtttataatttattcacctttgacgcttcatattttatattactttattcaatctattagaattcaattacgaagatttaacctttgtaatcatattgtctttaaccttcgtccaaagttcattaatccttaaaggaataatgcttcgttggacgaaaggcattaacat

SEQ ID NO: 56136 - DNA, 340 bp, Zea mays
  unsure (1)..(340): unsure at all n locations
ntggcatacatcattcctatacaggcggtaatattctattttgctaagactcctaaaccaaatccctagtaccaatatgttcagcaacaactcttaattccccacagcatctggacatgatgtccctggcgtcatgcggcactgaggcctagttaacccgaaggatatgtctagtgggctctgaactagcttctcctttttctcatcaaccctaacatataaacattcagatttccaaccaattggccatttggtgcggtagctaactaccggtgtcttcatgtctttgcggtaggcaaaattatagcacccacaattctcgtgcagaccatcttctcta

SEQ ID NO: 56137 - DNA, 393 bp, Zea mays
tatccgctaactgggtgcgggtgctaacataagccaattccatatccccttttgttgttgatcttctcaaaagcgatacccgatgtctatgggctcggttaagatatcacctaattggttgtgttcaacgggattattcgccatgtggattgcactctcattattacatatgagagggactttgctcaacttgtagccataatccctaaaggtttgcctcatccacagtaattgtgcacaacaatggcctacagcaatattctcgtcttcgacggtggatagagctactaaattttttttctttgaagcccaagacaccaggaatcttcctagaaactgacaagtctctgatgtgctcttcctgtcatatttacatcccgcataatcggcatc

SEQ ID NO: 56138 - DNA, 328 bp, Zea mays
  unsure (1)..(328): unsure at all n locations
tatgttatggaatgcctttgagacaatcctatttccctcgggccttctggcagctttctggcttccataaatagcgatgggttcttgatcccaatgtatctttatgtcaaaaaangcacgatgaagaactgcttctaatgcattgacggtgccacgaccaataatttcattgtgaaggtattccatgtcaacaatgtcaaacacaacttgctcagatctagtgttgttgatgaaccccacagtcactgacatggtgatcatgcccagtgctacaatctgtcttcctccgaagccacagaggggatgtgtaacactatgaatcttatct

SEQ ID NO: 56139 - DNA, 439 bp, Zea mays
agcttgcacatagtctcgatgatgtatgcctttatatagttcaagtcttctaaagctattactttttgtgaaaccgcattgaaaaagtaacacaagcgtgtgatgacaactttgacatgctctgttttgagggctcttaccgcaattgggaggaacaccgtcatcatcacatgacagtcatgagagttgtagccaaataaagacaagtccttcatcctgactagtctgctgatattggatgagaaaccggtgggcactttgaccccacgcaaacatttgcaaatctttgttctctcctcaactgacaagatgtagctagctggggggaggtaaggctttcctttgccactatccactggatgaagttctggtctgatttgaagatctactagatcattgcgtgaattaagtccgtcttttgtcttactcggcatgccca

SEQ ID NO: 56140 - DNA, 453 bp, Zea mays
  unsure (1)..(453): unsure at all n locations
agcttcagcttcttcaccagccagctctctttctttcttattccaaattcaaggtataaatctatttccaatgctccgggcttcgctggggatatcaaccaagtctgtcgaagatagactgaaggttggtttatttaccatttttccgtgcgtgcaaccagccttcatgaatgctacagccgtgccgcgagaagctagctatggcagaacctcccaagttattgggcccacatgcacctgcccttgtctcaaagacctcagacggctatgcaggtgcaccagataacttaacaggatctgtctgagtgccccaaggacctctgataaaccacttacaaccagaaccgcgggattaagtaaacacaaatcacacaccaacaatgttgcaacggaaatcttattaccaaatttagcatggtacatcaagttntacaatgtacatgactggagtga

SEQ ID NO: 56141 - DNA, 234 bp, Zea mays
taatcacggtattcaaaacccaaggcattcagcactcgatttaaacttcgcttccaacgggtatatgaggccgcagtcgtcaactgaacttcttttttggaggaattaccgagtatttcattgcacattaattcaattgcggccagccactcttggcaaggtgttttgaagtatttcttaaacctcgaatagtaaggtaaccgcacacaggtcccttcttttttctccctcttt

SEQ ID NO: 56142 - DNA, 445 bp, Zea mays
  unsure (1)..(445): unsure at all n locations
ccacctgcngcatgcaagcttgcccttctgctcatcggttagggatatttggaataacacctcgaatggcacatacaggtcacctttcttgttgctttggtataatggcatgccttcacctttgaacttcctgatctccttgggtttggtaatgccctatgaaatagggccaaaattgaagcggtctgttgcacatgataaaaatcatgttgatgggtggctgtctttttaccttggtgccaatttctaccagatggttatcaagatggttaatggtcttctcgaaaccaaccagagcttgcagctgcaatagcaaaatgtgcccataaaaaaggcacagtacaaaattccaattatttggtgatcagaggggacctacaggctacagggaatagagtcaatgcatctttcttggagaactcttacgcagaatcattgggcatgt

SEQ ID NO: 56143 - DNA, 466 bp, Zea mays
  unsure (1)..(466): unsure at all n locations
attaccgaactataaaactcagcttttcctttatatatttcatgagtatattaaaggaacgatgttttttttgtagtaactgagctaccttggtttgatccctcctagaaatcacagcaagtcattaacatctatgatcctagtcaataaatataaatggatacactgcgtataatttttacctaaggcatgcacttgtgctgacaaaaattgtagtgctccattcggattaagatgctaatccatcnttccgagaaatgcatggtctttcattctcatccaattgcatatgctacatttataaacatgtangcaccccaatttccctattctcctaaaacaattgtgaaagggaaatgagcctaattattttctataatcgattttggtgttgatgtccatcacaaccacgtggacaactagtgtgttagatgtcattatctcagtgcataacgtcaacataacc

SEQ ID NO: 56144 - DNA, 391 bp, Zea mays
  unsure (1)..(391): unsure at all n locations
agctttatcaaatggacgtgaaaagtgccttcttcaacggtctcaatcaagaagaggtctatgtngagcaacctcccggctctgaagatagtgagtaccctaactatgtatataaactctctaaggcgctttatgggctcaagcaagccccaagagcatggtatgaatgcctaagagattttcttatcactaatggcttcaaagtcggaaaagccgatcctacactctttactaaaacacttgcaaatgatttgtttgtatgccaaatttatgtcgatgatattatatttgggtctactaacgaatctacatgtgaagagtttagtaggatcatgacacaaaaanatcgagatgtctatgatgggggagttgaagtacttcttatgttttc

SEQ ID NO: 56145 - DNA, 432 bp, Zea mays
tctaaagggagagcacattatacgattaacaaatgttcattttgtttatacacgatttgtagcgcatgccaggcggcgaagcaagctggagttcatcatccacacaagaacatcatgacgaccgacaggccgcttgagctactccacatggatctattcggcccgattgcttacataagcatcggcgggagtaaatattgtcttgttattgtggatgactattctcgcttcacttgggtattctttttaaggaaaaatctcaaacccaagagaccttaacaggattcttgagacgggctcaaaatgagtttggcttaaggatcatgataataagaagcgacaaccggacggagttcaagaactctcgaatcgaacgctttcttgaggaggaaggcattaagcatgagttctccttctcctacactccacaac

SEQ ID NO: 56146 - DNA, 211 bp, Zea mays
tcacctctatcaaaatttacccagtatatctgacgctcctacactcgcttaaatgctattgtaacatcactatttctgtagacagtgacgccaatatcatttaaaagacaggcgtagcccatttgacattattgagatacagaaggcgatctgtatgtaaagaatcttccaaaaaaacactcgacatgaatgggtaagtgatatgctaatg

SEQ ID NO: 56147 - DNA, 443 bp, Zea mays
  unsure (1)..(443): unsure at all n locations
agcttcctccttgggtactctcttcgccctctttcgcctgacgtacctctccatcctcctcctccggagatcaacaagtggtaccagcaggcatacagggtgccttttatgacaacagatgacgtctaagaagaagaagaagcttattttgatgatcgtgagcagtttgtcccacctccgtatcacggggatccgggccaatcgtcctctcaccctccgccccaggatccttctggcagtgctcctcccccggatcagtctgggaagaacactttgcctctcacctggtgatcctctttgcgcgctacctctttgctcctcatcatcctcctcccaactggtgatccttggactggtctctctctctctttttggntcttgttgccaaaaagggggagaaggtttattatggcagtacccccntatgcagtaccctttatttt

SEQ ID NO: 56148 - DNA, 306 bp, Zea mays
ttctttggggtatcgtcctgagcaggcattgaacccacccggagaagatcgccgccattaccagcatgggacccatcaatgacttaacaggggtacagagagtcatgggatgcctcgcggacctgagccgctttatctcacgcctcggcgaaagaggtctgcctctgtaccgacttttaacgaaggccgagtgattttcttggacccctgaggccgacgaagccctccgtaacctgaatgtgctccattacaacgcgcctgtcttggtgcccctggcaaacagataagccctcttggtctacgtcg

SEQ ID NO: 56149 - DNA, 312 bp, Zea mays
caatagtgcgagccctgacactattgaagaaggagagacacctttagagttgagcgcccacccaaactctaaaaagaagtgtaatacgacagggatgagggcctacctggcagagagtttgagcatgtgcgaaatctaatattagggggagaggcccaggtaatttcgcaaaacttattcgtatacaaatcaacaattgtattttgtggctagaaacctatcatagccttcctgagaaacacattaattgaagagcccatattgtgtgataataacaacgaaccggtagacgacatatatacctactatgca

SEQ ID NO: 56150 - DNA, 417 bp, Zea mays
atcttggacgccccgccactatttttcgttttgattagaaaaagcgtgtttgggtgctaacttccgttagttactccggctcctcaacgagatcccgccaatatcggcagtccgaggcgagaacgttacgttccatacttccatccaggccataaaaggcgagcccaatggaccttggtgccaggttattttaatcgttctcttctctctcaaggatacactgcggtggcgaccaacaaatatgacgatagcactggagacgttacagttacagcagatccagcaaacactagcggagatcaaggaacgaacccccgacgtgaacatctcaaggttcgtcgccttcgttttgggcgattggatggaaacggaatacgcgacgtcggagcggaagaagggtgacgccggtcacggacg

SEQ ID NO: 56151 - DNA, 444 bp, Zea mays
  unsure (1)..(444): unsure at all n locations
agctnggattatanataatttgcccctctttatattaaatcaaagngcatgtctcctacaagtattcaacacttgtatgcacactttcagggggaggttactctataatctaacactgagactaatacctttttcgagtttatttcatgtgatagtctcattgtaaggaaaatgaagtccccggagaaagacaacaatcttccactgcaaaatctccaagaactttcatgtctcacaagtctgtcattggtcttcaattggtccgccattgactttcaattggtatctatgagactacatttaatattatttacatgtcttctccaatattttattagactatatttcatatcttgtacttcccatgttgctaaaatgcatatactgttgtcacacccggttttggaggcaaatcgaatgcgaaccatgtacgtgtcaggatca

SEQ ID NO: 56152 - DNA, 347 bp, Zea mays
ttacggttacttaactcgcgataagtattactcctttaacttctatatatggctaagacctttaaccacggttctatttgcaaaaacattataacaatacaacttgatcgacatatttgcctaacgaatgcactctatgtgtgtcaaacatatgcaatgtcaatgcttatgatgccatgctcaacgtttagttatagtaacaccagtggtgttacaaacggcgcgccgtcgcccgctccatcagcagcgatgacgacgacttctgctccggagggccaaacagcggcagcactgacctcatggcggatgctgctgccaagaggccaaccgccatgcccaaactcttg

SEQ ID NO: 56153 - DNA, 198 bp, Zea mays
acctgtatgggtataaagctatgcaggccttactgcacctgacttattgtcatactgagcgaacattgtatacggttcatttttaacatcagcattatgtgtattgtactcacacccactgtgatcactctttgaaagcgacacactggataaatctatgatcatagctctatggtccagaatgtacgcatatgaata

SEQ ID NO: 56154 - DNA, 443 bp, Zea mays
  unsure (1)..(443): unsure at all n locations
agcttaatgcccctaatatgatagtctaactttgttaanggcaaagntctcatggctcaggataacgagggttacatcttataccctgccggttatcccgagcacaaaattaggagaattcactctaggaagtctcactctggttctcatcatgcttttatgtataagagtgaggcatctagctctaggcaatcaacccatgttaaattgcctaaaaagaaatctcctattgcatcaaatgaacataacatttcatttaagacttttgatgcatcatatgttttaactaacaaatcaggcaaaatagttgccaaatatgttgggggcaaacacaaggggtcaaagacttgtgtttgggtacccaaggtgcttgtttctaatgtgaaaggacctaagaccgtttgggtacctaagaacaaggcctaaaattgttttgaggttta

SEQ ID NO: 56155 - DNA, 402 bp, Zea mays
ctcagctagaaatcttattccacatgggtagtccgggtgctctaccaacccacttaggcttagcaaccaagcacgtgtcgagtttagctctatcaaatataccaagtatagttgaccctctaacacttccttatatgctattgaatcatcatttcttctaaagacagtaacacctacatcagtaaatagacagctgtagcccatttgacataattgagaaacggaaagcaaattgtaatctaatgaatcaacaagaaaaacattgtaaatggaatggtcaggtgaaatagcaattttacccaaacctttgaccaaacctcgatttccatccccgaatgtgttcgctctttggggatcttcggttttctcatatgatgagaacatcttcttcttccctgtcat

SEQ ID NO: 56156 - DNA, 443 bp, Zea mays
  unsure (1)..(443): unsure at all n locations
tagcttatacctagtggtgttatgaatctncttctttttatgtngggacaacgcgcataagggtgaggaacgcgtcggagttatcacatgtttatatgtatatggaagaaaatatgatagagggcacaccaaataggagttagaccctaacataaatagcttcacgcttgcacagtgccagtctgatggctaaccctatcctagcacaaaataagatcagtagactctgagcgttgcttcgatgttagagagtgaataaacccaaccatgaaatatgtaaggaagttgtattgcataatagttatcatgtccatgaagatgacaatgggaggggtatttatacaaatacttaaataccctcgatctataaggctataatagcgttgccgctcaaggacaattcggccatatccatctttattagtcatcggaggcttatttgt

SEQ ID NO: 56157 - DNA, 314 bp, Zea mays
  unsure (1)..(314): unsure at all n locations
ttcactcgctgttaagaagaagctccttgtatgaaacaaaggcagatggtccgacttcgtacctgaggcagcttgggccctaaacacgactgagcgcacggcgacagggtctactccctttcggcctctatacggatcggaggccctgaacaccgaagaaataaagcatgggtccccccgaacagtatccgcagccgtccccgacgtggacgagccaacttcaaaggatctcattgacggagaacgagtcttcgccctacatgccctaaacanataccaagcccagaccacagcatggcgcgaccacacagtca

SEQ ID NO: 56158 - DNA, 457 bp, Zea mays
  unsure (1)..(457): unsure at all n locations
agctntatcaaatggacgtgaagagtgccttctctaatggaccaatcaaagaggaggtctatgttgagcaacctcccggctttgaagacagtgagtaccctaaccatgtttataggctctctaaggcgctttatgggctcaagcaagccccaagagcatggtatgaatgccttagagatttccttatttcaaatggcttcaaagtcggcaaagccgatcctactttattcactaaaactcttgacaatgatttgtttgtatgccaaatttatgttgatgatattatatttgggtctactaacgaatctacatgtaaagaatttagtaggatcatgacaaagaaattcgagatgtctatgatgggggagttgaagtattttctaggattccaagtcaagcaactccaagagggcaccttcatttgtaaactaagtatacacaagacatactaaccaag

SEQ ID NO: 56159 - DNA, 417 bp, Zea mays
  unsure (1)..(417): unsure at all n locations
accacattttaggactatctatatgtttattatgagaaagacatgacttgtatcgcatgccaagttgggaaacaggttggagttcatcatccacataagaacattatgatgacaaagaggttgcttgagttcttcacatggatctatttggcctgatcgctttcataagcttcggtgggagtaaatattgcttggttattgtggatgattattctcgcttcacttgggtatgtctttttgtaggaaaaatctcagacctgggaaactctgaagatattcttgggacaagctcagaatgagttcggattgaggatcatgaagattagatgcgataatgggacagggttcaagaactctcataatgaataatntcttgaggtggatgacatcaagcatgagttctcttcttcctacaca

SEQ ID NO: 56160 - DNA, 75 bp, Zea mays
ttgacctaattactgcctatacactctttaactcccctcccgccattcacagtgatacccaacgatcgaataact

SEQ ID NO: 56161 - DNA, 360 bp, Zea mays
actcacgcttcgcatcctgaataactcggctgcgacgctctttgctgttcgccaatagaaacctgacctgaagaccttcactactagcgttctggaggctgcatgtaatccacattgccctgcatggacttcctccaaaagttgcttaccagaggatgggagaatacacttcatgagaacccctgatgcaccccttctgtataatatctccacaatgagtgtgtaatgagccgactgtctggcaatgcgctctgctgagatcttgccgactggctcttcttcgttacttatgtacttaatgatcggcctcctccagtcatcagagtctgactcgggttgatctacgatggtgcactcttc

SEQ ID NO: 56162 - DNA, 237 bp, Zea mays
ttgctcccatcattcttacaagaacataatgacgaccgacatgccgcttgagctatctcacatggatttatttgacccgatcacttacataagcttcggtgggagtaagaattatcttgtaaatgtggatgattattctcgcttcacttgggtattctttttgcaggaaaaatcttcaacccaagaaaccttaaagggattctcgaaacgagctctaaatgagttcgggttaaagat

SEQ ID NO: 56163 - DNA, 533 bp, Zea mays
  unsure (1)..(533): unsure at all n locations
attgactcttctctctttctgccatatttcttatcccttctctnccccccggggccctttgatgatcatgcctaccataatataacttcttgggggaggcatcagctgagtctcctctcctattctctttcaacaaatggtggagtggagaggaagaatctaactctattggacatagacagaaccatgcttgatgaggacaagacaccggaccggatttggggcgaagcggacaacaccgcctgctacgccaataatcggttatagtttcaccgaatcctcaagaagacatcatatgaactcctaaccgggaaaaagcccaacatttcatattntagagtttttggtagcaaatgcttcattcttattacaagaggtagaagagtttactttgcttctataactgtagaaggtttctacttgttatgactatacaccacggatatacggtctttaacagtcactggactagtgaagctctgtgacgttgtgttgatgaactaacggtctcaagttagcacgttgatctaatg

SEQ ID NO: 56164 - DNA, 443 bp, Zea mays
  unsure (1)..(443): unsure at all n locations
atctatcacaacaanccaactttttcttgtttttggngccacactccggcggcgcaaaccactctaaactctcatgtgttcttgtgcctgatgatcgcttagcaagacatgctaaacgcgtaagccccttcctcatctaatgatgtaagggtggggcactccgccacccggcctgagaaacacgtttaaagatcctcgggcacttagacaaccacttatgaaacttgatttcttcctgtactatggcctatgccggtaccccgagaatggtgtacctgaaagtgcatatagcctctttgtacgtcttggtgatgtggataacaacactctaanataactaatcagtttgctaagcgttcatctcgaaagtataaaacactaccgtgatgaaaacatctcaaatacactgtatgatttgaaaatatttcatatacatgaattgc

SEQ ID NO: 56165 - DNA, 442 bp, Zea mays
  unsure (1)..(442): unsure at all n locations
ttaatgactgagctgcactcaaccctgcaggccttgagcttttttcttcccttgatttataaatcttgtggggttttactagatactacaagtggatttataacagactttttagaatctatatttagccccattacatttctcgcttttctagatatactggttttaatatgtatttgtgaatactatttaactaggttaataacaaaatctacgtctatagaaaaagtcaaaaggccttactatttggaatggagttgatgcattggagcttgctatcgngcttatgtactatagttacatgaatctagaaacatattaatatgtgtggttggtccccttacatgtaaaacaagtgattcatgaaattgaagggaagaactctgttttaatttgcatgaggctaccttggacgccagctttgatcaggtgagtattacat

SEQ ID NO: 56166 - DNA, 336 bp, Zea mays
taaaacccgtcatcgtgaaggactctaaccggacgcccgacagtgtaggccaatttatctctcatgctctacatatctaccgatacatgtggtctgcgctactttcaggctctatcataacaccggcaatggcggtatgtctgacgatgcgcgtcgccgcctacaagtatgcttacggtggtaccatgtggtgcattactacttggagcctgagacatccttgccctcgacaccgtgggtgggctcaattccacaacacacgcgtactgtgcacaatattagcacgacggcgtcgacaacaacagcgaaacgagttctcgaacgactctctatctc

SEQ ID NO: 56167 - DNA, 436 bp, Zea mays
  unsure (1)..(436): unsure at all n locations
agcttatgaagattcttcatcccaacatgttctantctgcgatgccagagccagcccatgttagtcttaacaattaagcaagtgtcgagttcaactctatcaaaattcactaagtatagctaaccctctaacactcccttaaatgctattgaatcatcacttcttctaaagacagtgacacctacatcagtgaataaacagttgtgacccatcttgcataattgagatacagaaagcaaatcgttatctaatgaatctacaaaaaaaacattggaaatagaatggccaggagatatagcaattttacccaaccctttgaccaaaccttgatttcatccccgaatgtgatagctcgttggggatcttggtctttctcgtaggaggagaacatcttcttcttccctgtcatgtgggttgtgcacccgctgtcgaatac

SEQ ID NO: 56168 - DNA, 429 bp, Zea mays
ctatacaacactcacgctcgaaaacttcctgagagcgctactgccaccattctcgtcttctcctcttcttaaggaggaagagatctctgctagaagacagatgatgtgctcgtattcagatgccgcttcacgaagcggatcggttatcctttcaggccagatgaagcgcttctagaccgctgactcatcagtctgacaacaaaaaaaggaattaagtacattaattggtagcacagccacgcgtatatcatcacaataaaaactctttatcttcaccatagtccagagttgttggtccagccagtccacaaaggtgagtacttgttccacgccggtgtacgtactactgtggattctgtccatgacatttctgatgaactccgcttttgttccacctctgctatgactacctagcacaacatacttgta

SEQ ID NO: 56169 - DNA, 405 bp, Zea mays
gagaatggcgcggtactggaagactccagacatgggtcgaaccagcttcatgctaaaagacgttggacatggtcgaaaggaagcatcttgactaaaaaacaaacatacatcgagcacgtaaaggaaatgtgagtgttgagaatattgtggaagtggaagacacccgataaagcccgatccagaatccccaagctaggatacgccggatagcgaatatggcggaagttaataacttgggaaaaaggagcattggagaaaaacttgtcgaggaagctgagacgacacaaaaactgatataaacgaagctggtgttgaaatgtgcacatggaaacctcatatcatattcaccaaaacagatctgaccatttaagagagcttgaggggaaaatatgtgtctcactaaac

SEQ ID NO: 56170 - DNA, 280 bp, Zea mays
  unsure (1)..(280): unsure at all n locations
agctnggacagttatctgcgacggctcctcttgaaccttcggcgcaggagcggntgttgtcctagttgcgccttctaaagtcagaacatgttatgcaacaaagcttgacttcagttgtacaaacaatattgctgaatacgaagcacttcgttggggcttcagaagttaaaggcaatgggaataagaagggccattcttaaagctaactctcaagtcatttctggtcatatagacaaaagtagtaagacgagagatccgaagcttggaaaatatctggata

SEQ ID NO: 56171 - DNA, 176 bp, Zea mays
caacacatgcgcagcgcggaaacaagctggagctcatcatccacaccagaacattatgaccaccgacggccgttgagcactcccatggatctatcccgcccgatgccacacaagcatcggccggagaaagtaatggctcgaagagcggatgaataatcacctccacttgggaattc

SEQ ID NO: 56172 - DNA, 452 bp, Zea mays
  unsure (1)..(452): unsure at all n locations
agctnnttgcatcaagtttcagaccttggcttctcacggcccatacgaagatatttagccttataattgcctcgggggtaagttgatggagatagacttctaatatnttcagtacctccacaacgaagctgctcaaaggaaatcgcagtccagctttcaaaaagcttcggtacactacgacctcattttcttcagggtgtgggcaagttttttccccttcgtcggccctcacaatggacaaatcccggaaatacctccctctcatgttgacaagatgattctctttgataggtgatttaccataaactgaatgacttggtcgccatggacgatcttcggagtcctcgccaccactgtccacatcatagctgtcgctgtcaccagtatcttcggacaaaccttccagaatctccttggtaatcttgtccgtgttggtcttcgacatcgctata

SEQ ID NO: 56173 - DNA, 309 bp, Zea mays
  unsure (1)..(309): unsure at all n locations
accattcatggacttgtgttatggcggtaaggctagcactgaattgaggtggaacccanaaatgcataatatgaaagaattcaaccctgcttcttatgcttgactcaacaaaaaggcacctaatacttgggtaagtgcttactttgcataaattcctaagtctgatatcctcttgaacaataactatgagggtttcaacaaatacattcttgacgctatagagttacctatcttgaacatgttggagagaaataacaacaactcatgactagattctataacatataaacagtacataaagactttgta

SEQ ID NO: 56174 - DNA, 389 bp, Zea mays
gagcatactctcggctttgaagacaatgagtatactaacacatgttataaaccctctaaggcgctctatgggctcatgcaagccccaagagcatgggatgaatgccttacagatttccttattgctaatggcgtcaaagactgaaatgccgatcctacactctttactaaaacctcttaaaatgacatggtcatatgccaaatttatagggatgatatcatattcgcgcctactaacgagactcaagttaagagttatgtcgacatgaacaaaagtcgagagtcttgtgggagagtgaagatttttaggattcatgtgagcaactcaaaacgctccttctaaccaaacaagatatccagaattctaacaagtttgatgaagatgccaac

SEQ ID NO: 56175 - DNA, 440 bp, Zea mays
  unsure (1)..(440): unsure at all n locations
gcttgtctcggcagactattctataattgtttcacncaatgggagtggagagatggcgagagtagcatgttccctccatggcaagaggctggacggtgatgtatctgtgctctcggttggcgtgaacccggtctggtcttaagaaccccggtgacgagttgacatatgcaagggttaaatgctacatatgtcatgtgattggagatccttagcttagtattaatctgattggatcgctgttacttctcggacatgaagacttggtcactgacttacacgtagcattccagtgaacaagaaggttgataaaaggatggctagtatacaccaagtgcttgaagtagggtagaaataactctagtgataggtaatgacttaactagctgataaaactggatttttaaggatccactattagaagcattttgcaacagagtctt

SEQ ID NO: 56176 - DNA, 337 bp, Zea mays
gcatttacattattgacaaaaccatcgtcgacttgtctccatttccacagcacaaacactttgcgaccataaagatgacatagtgcatggtaatcaccttgaaccttacgggtcaaagcattaactactacaatcagcctgtccggcgtgatattcgatctccgagtcatagaacttaaacaactcaagccatcattctctgtccgaaggttgagtccttctgagtgaatatatacttcaagctcttgcgatccgcgaagattctgcacctgttcccaatcatatactgcctccacatcattaaaggctgcactacggcgagtagtaccacatcatg

SEQ ID NO: 56177 - DNA, 386 bp, Zea mays
cagcagcaacttttcggggttgagtgggcttgtcttctgtttccatcttccttttggcacgatctcccgacatcacttcgagcggttaggctctaatgaaacaccggcctctgataccaattgaaaatcgcctagagggggtgaatagggcgaaactgaaatttacaaagttaatcacaactaccaggcgggttagcgttagaaatataatcgagtccaagagagagggtgccaaacaaatcgcaagcgaataaagagtgtgacacgcggatttgtcttaccgaagttcggtttttgaaacctactccccgttgaggtggtcacaaagactgggtctttttcaaccctctccctctctcaaaccgtcccctagaccgagtgagctt

SEQ ID NO: 56178 - DNA, 446 bp, Zea mays
  unsure (1)..(446): unsure at all n locations
agcttgntaaagaagctgattgtggggtaactttgttacaatctcattatgtggagtattgagtcgctttggttttattgactgtgatcctgcttcaacaccttatgaccctagcatgctattgagaaagaattatagaatagcaagggatcaattgacatactcccagatcattatctcgctcatgtaccttgcaagtgcaacaaggccagacatctcttatgttgtgagtaagctaagtcggtttgtgtcgaaaccaggagatgatcactggcgtgctcttgagagagtgttgcgatatttgaaaggtactatgacatacggtattcattatactggaaacccaaaagtgctggaaggctattgtgatgccaactggatttctgatgctgatgagctctatgccacaagcggatatgtgtttctgtttggaggagacgttgttt

SEQ ID NO: 56179 - DNA, 414 bp, Zea mays
  unsure (1)..(414): unsure at all n locations
ctataaatactcaacttgaaccatggtacgtatcatacgctcataatatgtctattgtatcaagcctaactaccggngcctaggcttcaccaaaatccaaaccttcgacttgtgaataccccttggccacgagtcgagctatgttccttgtcaccacaccatgctcgtcttgcttgttgcggaagacccacttggttcctacaacattatggttaggaccgggaactaaatgccatacctcgttcctagtgaagttgttgagctcctcttgcattgccatcacccaatccgaatcttgaagtgcttcctctaccctgtgtggctcaatagaggaaacaaaggagtaatgctcacaaaaatgtgcaacccgagatcgagtggttacccccttatgaatgtccccgaagatggtgt

SEQ ID NO: 56180 - DNA, 370 bp, Zea mays
  unsure (1)..(370): unsure at all n locations
agcttcngtgatggataatatatttggcagctttactttgcaaatagcagcaaatgcttgggtaacttcacacctactcgtctgtttatatagtgctgcaggtaagaaggcgaagcggcacggtttttacaccaggcgggcagtaacttgtactcgctgcgcagtggaccgcaaaaaccatacagtgactctgcaaggtgggaccgacacgatcttcggaaatgaatcggttctcggctacgaactcagggaaggtgtttttcggaccttctgcttcccgaagcttgagaggattatttcacggttcaagctcgttacgaaaaacaatctatcgccgcgaaaggggctactgttggggccatgcttcgtt

SEQ ID NO: 56181 - DNA, 477 bp, Zea mays
  unsure (1)..(477): unsure at all n locations
actatanaaactcaagctcttcttgtcgnctcaaccttgacatagaaccactcttgttctatcctgctgcccacttgcttcgggagctaattacagggaactttgtagacttccgatatgcaaagctatagcacccacaattatcgtgcaatccatcttctctagcctttgtttgataatgtagctcgcgaaccccggagaagctgtctgcaaatggtttcagtgcttggcttcggagtgcccaaatataaacaataagcctaacgatagcgttaggggtcagctgatgaaaatagataccgaacctcttcactacctctccaataatcccatgtagggggaaccttaatccagcctttataaaactcttaacaaaacaatctcatgcttctctggcttccgggtagtctcttctccccgaagcgcaacaacttcttatgattntcagtacaaaagcccgcttntaccatcttggac

SEQ ID NO: 56182 - DNA, 461 bp, Zea mays
ccccatgcttctagccattttctggcagacagattattctttgtaggctgggaggcagtataggaagtcatcttcgtctgtcccattgaacactagtgcccccttcggatatttcaattctctgtcatagtgattagcttcaaaaatctcttcttcggataatttctttcccgaagcgtgtcgcacaatataatcatatatttttgaaggtgcttcgggggcagcagtgtcggtttcttcaaccaaaattggctctgatatttttattttctcggctgcctctgcaacgttcgtttcttcggtttcgaaaggttataccttggttggctctgaaggcccagcttcagtttaaattggtgcttcgaagcttctgcgccaaaggcttcagtagacacttcagacgattcaacagttctctttggagtatgcttgaagattaatggtctccaaacatctataca

SEQ ID NO: 56183 - DNA, 437 bp, Zea mays
  unsure (1)..(437): unsure at all n locations
agcttctaagggggaacacattntaggagtttctaatgttcattttgagaaagacatgatgtgtagcgcatgccaagcaaggaagcaagttggttcccatcatccacacaagaacataatgacgaccgacaggccactggagctcctacacatggacctattcggcccgataacttacataagcatcggcgggagtaagtactgtctagttattgtggatgattattctcgcttcacttgggtgttctttttgcaggaaaaatctcatacccaagagaccttaaagggattctcgagacgggctcaaaatgagttcgacttaaggatcaagaaaattagaaacgactacgggacggagttcaagaactcacaaattgaaggctctcttgacgaggagggcatcaagcatgagttcttttctcctacaccccacaaca

SEQ ID NO: 56184 - DNA, 363 bp, Zea mays
ccatcgcttctgatgccgaacgacatgtgatgtatagcaaaaagcaccggatggagggatgaacgctggtttttcctcctctccttttgccaggctaatttgaggatacccggaattgcaatccaagagagacagcgcagaacattcatcggtggaaactaccacctgatctatccttaggagccacgaaggatcctttggacagtgtttgttgagatccatataaccgacacacatgcgccaatccactttattctttttgagacaagaacagggtgtggctaccactcgggatgtaacacctccctaataaatgcagccgcgatcaaacaaaccatttcagacgggatagtctctttttgt

SEQ ID NO: 56185 - DNA, 378 bp, Zea mays
  unsure (1)..(378): unsure at all n locations
agcttcgcatctctgaactaactcggctgcgtcgttttttgctgtcggccaatagaaccctgatctgaagaccttcccgactagtgttctggaggctgcatgtattccacattgccctgcatggacttcctccagaagttgcttcccagtggatgggagaatacacttcatgagaacccctgatgcgccccttctgtataatatctccccaatgagtgtgtagtgagccgactgtctggcaatgcgctctgctgagttcttgtcatctggctcttcttcgntctttatgtacttaatgatcggcctcctccagtcatcagagtctgactcgggttgatctacaatgttgcactcttctgtttggtctattgagatact

SEQ ID NO: 56186 - DNA, 392 bp, Zea mays
tctgtattacaaaccgacttaaagatagaatgaccttctattccataaatgtctgagtcaatgctgaagctttataaggggcatacttgtaattcctcaccagctgcgtcctgggcctataaatagtgaacagtattcctttactgatcacgctttttggaaattgcaaccgcatctttcgggaaccaaccttttgtcaagcaaaggtattattgtgttcaatgattcaaaatattaatggaaataatataattcgtctatgattcatctacccttgtataccctctgtcttatgttatcttatacaatttattgaaattttattaccaagacttgagcttcgtaaattatattctcatcaaccttcgtccaacgctcattatacttaaagg

SEQ ID NO: 56187 - DNA, 416 bp, Zea mays
ttcatcatcgccaaaatttgaagccctttacataccaactggccaacgatcaatgcgaggtctacatcatacgctttccgacagctacgttcgttttacccttaaaatgtgttcaagtcattcatatacctcgttttctttacatacataaataaagtctaaccgtcaaggaagggtcagtcttgcctcggtagagcccgaccctccctccggggctagaaggggggaaccccctctgcgtcaaatatttcctcggaaaaagtcttatgccacaatgtctttctcgcttttcgactgcttctatagcggggtcctaataacgaccagagtacacgtaagcggcattgccgaccgagtcgatggactcctacgcctcttggatacggaaaccttactcattaccttctgcgataata

SEQ ID NO: 56188 - DNA, 420 bp, Zea mays
  unsure (1)..(420): unsure at all n locations
agctttntggaaagacagaccaagcgcggactgttctggctcttgcggcgagaccgtacgcgacaccaaagtgtgcctctgacaggaacactgcatatacgcatgtcaacactgtggaccgtgctatggaaaagcaagcaccgtccgggaccaggcgcggaccgtccggactcaggcgcggaccgttcggtcggcacagaaccgaaaaacccgaaggtgacgggtttcggaaaatgaattatagcatcctcgtggaccatacggagtgcacgaccggaccgtccgtgactgcctttatctgacatctaatgacacatttaatgcattatagccggtgatatagtcgttactgctgaccagtgggatttcagcctttgatgtagaagggcagaccgtcctgaccaagagcgccgaccgttc

SEQ ID NO: 56189 - DNA, 439 bp, Zea mays
  unsure (1)..(439): unsure at all n locations
tctaaagggagatcatgtgttangactaaccgatgtctgtcttgagaataacagaccttgtgcagcatgtcatgcagggaaacaggcgggaagtactcatcatagtcaaaaatgtgatgacgacgtcaagaccactggaactctttcacatggatctcttctgtcctgttgcctatctcaacatagaaggaagtaagtatcgtcttgtaatatttgatgatttttcccgcttcacttgggtattttttttgcaggacataccataaacccaagggaccctaaagcgtttcttaaagagagctcaaaatgagtctgagctaaaggcgaagaagataaaaagcgacaatgggtccgagttctagaatctacaagctgaatagtttcttgaggaagaaagcattcagcacgagttcttctctcctatccaccacaacacaat

SEQ ID NO: 56190 - DNA, 384 bp, Zea mays
agcttatcacttgcgcctgtagccgtgcgacgtggctggaccgccggtgtcgccgtggtacttcggtgacctcatttatgccacaccgtagctctttactgcgtagtaataaccatggcacgcctaggcttgccatttcagaaccattgcaccagaggacgccacgactgagccgccagtgaccttccttctctccggctgccagcgcgccattccaaaattgggagccaccgcccttggacactataaattggtgccctagcctgctccgctaagtaattgtgcacacagtgaaccagccctcaccaccaatcatcccccacatctctccaatttgggatttcccccaattctgttctctacgccgccgtgaatgagctcatt

SEQ ID NO: 56191 - DNA, 440 bp, Zea mays
tcttcgatggcaagacggggatgaggatggctctgctagccggtctacggaggcagagggtttgggcggccacagactcgctgcgcacgggcaaacggcgacgagctaactccgacaaggtgtggagggtgcgcggaaaggtgtagtctaagcctgtgagggctttataagctcgggcgcgggccacggcgcgggtttggcttgggcgcggcgcggggcactcgagggcacgcgcgagcgtgctctggcgcgggcagaaagcgtcgaacacgtggcactgaagttctttcaatgttcaaacgcttccagagatcgcaaacgtgcgaatctcgccatgaatccggcgcagacctcctcctggcacctagggctatctcacatgtgtgagttcaagggatgatacgcgctatataaggagatagacgggcgccaaatctggt

SEQ ID NO: 56192 - DNA, 430 bp, Zea mays
  unsure (1)..(430): unsure at all n locations
agctntatcaaatggacgtgaaaagtgccttccacaatggaccaaacaaggaggaggtctatgttgagcaacctctcggctttgaagatagtgagtaccctaatcacgtatataaactctctaaagcgctttatgggctcaagcaagccccaagagcatggtatgaatgcctaagaaatttccttatcactaatggcttcaaagtcggaaaggccgatcctactttatttactaaaactcttgacaatgatttgtttgtatgccaaatttatgttgacgatattatatttgggtctactaacgaatctacatgtgaggaatttagtaggatcatgacacaaaaattctagatgtcgatgatgggtgtcggggaccataattaggggtaccccccagaactctaatcttagctggtacccccataacacaa

SEQ ID NO: 56193 - DNA, 428 bp, Zea mays
  unsure (1)..(428): unsure at all n locations
tctncaaggattgtagtggctttcttgcaaaatattgcgctactatgcctagtttgagccccttgatcatggcctcaatgacaactcattgggcactgtacgcgcctgagctctcagtcacaagaacctttggacgtacgcctataggtactcctcatggtcatgcatgcactggaacagggcttgggtagtgactggtttcgtctgaaaaccctggaagctagtgactagcatatcctttagcttctgccatgacataattgttctcgaccgaagagaagaatatcatgtttgagccacacttctgactaccatgacaaaggatttcaccatgacaacagtgttgcccccatatgaagatatggttgcttcgtagctcatcaggaactgcttcggatctgagtgtccatcataaatggggagttgag

SEQ ID NO: 56194 - DNA, 402 bp, Zea mays
  unsure (1)..(402): unsure at all n locations
agcttgttcttctcaatctcctcctgcctcttcatctctttcaacttcgccacatcagcccccgtaggctntgccttctccttcgggggctcggcctcataatcatcatcagcatcgagagcagcttttgccttgtgcaactggacaggtccttttgaaggagcttcaatcttggaagcattatctgcctgaggagcaggcacttccttgacttgttttgcaggcaattttacagggaacggctctggctctggagctggcgcctgtgactcgataaatatgggcttctcatcaagattcctcatccgaccatctcgagtcagctgtcggctgtttagggaggtgaggattctcttctcgtagtcctctctgaaggccttactttcacaccattggctcatg

SEQ ID NO: 56195 - DNA, 434 bp, Zea mays
  unsure (1)..(434): unsure at all n locations
taactaaagtcatctaacgggtcggctagctagagcaacgacacagcccgctagacagcatacacgtcggcttgcctattattatcaccattcgagacacaacatatataacaatcacttacaccatcaactcttacttaacatgagttggctaatgccatataagacttagcaaaccattttagacatcgtaactcaaaatatgggttggagtcgattaaacagtgtttcttaaccgtagctcaacttaaattggataacacacgagtcacctaaaacgccacattttaggagaccctacatgtcgagcatcaattttataacataagtgactcaacctctatcacgctcgtccgaatctattggctaacatttccgaaacaccctgtctatccttcacctttctaatcatattgcacgacatanaatatttc

SEQ ID NO: 56196 - DNA, 433 bp, Zea mays
  unsure (1)..(433): unsure at all n locations
tgtgaaggttcttcatccccacatgtgctaagcggcgatgccacagtcagcccatgctagtcttagctattaagcatgcatctagaccggcctcctcttttgcaaaatcaactaaataaagattgccgtctaatacacccttaaatgctagtgaaccatcacttcttctaaagacagacacatctacatttgtaaatagacagttataccccatgttgcataattgactaacagatagcaaattatatccaagagactctactaaaaacacattagagatagagtgctcattagaaattgcaattttacctaaccctcttaccttgccttgattcccatcaccgaatataattgaatcttgggaatctttattcttgacgtaggaggtgaacatcttcttctcccccgtcatatggtntgtgcatccgctatc

SEQ ID NO: 56197 - DNA, 366 bp, Zea mays
agcttgaagaagatgaggatgccatcttactctttggtgcagatgttgatcctatggcaatagaccttgccatgagaatcaccgaaatgatgttcctcaaaatgaaggaagatgaggcacagaacatgattgaggaataagaagatgatcgttggagaccaaacgacgaatccacctcttcacaaggttcgtctttcaaatccacttctcgtctgtgctttgtcgctaatgggagtgacagtgaaagcgaaagtgaggatgagtatgaacatgaaggtgatagtgaagatgaggatgatcttcacaaatccttcgctcaactaagcaagaaaaaccggatgagcttgctcaaactcatgataagag

SEQ ID NO: 56198 - DNA, 424 bp, Zea mays
aagcttgaaaaaatctggatacactatacaggtcggtagcttctttcgatagtcttccgccaagaatattccacgaggagaaaacgagtgtgctgatctgctatccaactctgtagcacaggagctccctctaccttctgaagtattttttgaaacaataaaagcacctctggctgaacttatggagagagcaatgcctgcaatttccccactacatattgcaaattggacgactgaatattatatcttccttcaaggaaattgtctctcggatgacgacacctataataacagaatggaagctatgacaataccgcatgtgataattcaacgtgaattatcttaacatggaggctgttctccactcgtctagtgctatccacagctgaagtattgaattaatgagagagatccatgccagtct

SEQ ID NO: 56199 - DNA, 438 bp, Zea mays
  unsure (1)..(438): unsure at all n locations
agcttattgatggtgtcagctaacactgattaattctgaacaaaaaacagtgtgaaatactacttaaacactgtttataataatgacaacatcggttatacataatactgacaccagtgaacatggagcctggcttaccccctcatcatattagcatatttaaggaaagggaaaggtttgtctttattaaaacgtagcaattttcccaaataaaaaaaatatccactgccacgagagggagggggatatggggttgctagacaaagcttataggattattagataatacttgtataaccaaatcactgatttgtcaggaaccatgccatacccatgtcaaggcttactagaggaagggcaaaaggtcatgattaataaacaacacttgcataattggttcacaaccttacatacatgtatcatatangatgatatatt

SEQ ID NO: 56200 - DNA, 387 bp, Zea mays
agcttgaagccatggtaagtagcatatgctaataatatacgaattgactcaagcctagctatgggtgcataggtttcaccgaaatccaaacctttgacttgggagtatcccttggccacaagtcgggctttgttccttgtcaccacaccatgctcatcttgcttgttgcggaagacccatttggttcctacaacattttgattaggacgtggaactaaatgccatacctcattcctagtgaagttgttgagctcctcttgcatcgccaccacccaatctgaatcttgtagtgcttcctctaccttgtgtggctcaatagaagaaacaaaagagtaatactcacaaaaatgtgcaacacgagatctagtggttacccccttatgaatg

SEQ ID NO: 56201 - DNA, 447 bp, Zea mays
  unsure (1)..(447): unsure at all n locations
cgtgacaaatanacctctcaagcttgatgcctctgtgacctcagcataggcggtggtatttatttctgaaacaatgtttagattttcgggacacctatcagcattatcacagacctgagatctaacttcactagctcatagttctttgatttctgtgagcaaaggagcatccagattaagtatgcattagtggcacacccaagaactaatgggcaggtggaaagagccaacagaatgatacttggagcactcatgaagaaggtgtttgacaagagcgaaaagcttacaggaaaatggatcagagaactaccgtacgtggtctggagcctgcgaacacagtcaaactgggctttacatggaaacaccccattcttcatggtatatggatcagaggcaatactatcactctatttgatctttggagcgcctacgctaacattcaaaaca

SEQ ID NO: 56202 - DNA, 370 bp, Zea mays
catggcctgttgcatgtagggggctggacatgatccgacctttcaagaaagctcacagaggctatactcacatgttgattgccattgacaagttcacaaaatggatagaatataagcccattgcctctttgacctcagccaaggcaggggaattcatacaagacataatattcaggtttgggataccaaataacatcattaccgacctgggatccaacttcaccagctctgaattctttgacttctacgagcaacggagcagccaaattaagtatgcatcagtaccgcatcctaaagccaatggccaactataatgagccagcgggatgatactagaagcactcatgaagaaagtatctgacaagagtga

SEQ ID NO: 56203 - DNA, 334 bp, Zea mays
  unsure (1)..(334): unsure at all n locations
agctngctacaggccttcttctttttctctcttgcaggaaccttgctggaacactaccccacttaaaatgaatgagggtagaactcttgaatcttggggatttgaactccttgaagtacctcataacaagggtgttacaaggccttcttctgttgttgctgcttgaacagtctgcagagagatgactgacacagggttgattctgggacaaccttcttcttatcttctcttgaaagggaaataagcttacaccttttcctaattgattttggtggttgaattgcccaacacaaataattggactaactagttngctctagaatataagttttac

SEQ ID NO: 56204 - DNA, 410 bp, Zea mays
  unsure (1)..(410): unsure at all n locations
tgacaccaaaacaagtgatccaagaatatataccttctacatattagccataacaatccaaagatatgtgtttttaatacctaaatcatgtagtcatttgggtctagcccaacaatagtaatatatgtacaacaaattctctcttataatatggcaaacatccaagcagataatgggcctacgtccactaagacaacccatttttttgaatgtggttaacttaatgttgctttgttcctccatttcttcatgtgggaactcaagatcttcatcagttgagtcagagttatcttctgcaatccttttcccagctacaatgtctacctttagcttatagctaatagccttgtcaactttgatctatgaacaacatgatactcattatctgcatgtactgancagctattcat

SEQ ID NO: 56205 - DNA, 360 bp, Zea mays
agcttcgacataatgactgccaaagttatcagctctcagattggcatgaatgttttgacgtatgtcgatgacatcatagtgaaaagcacgaagcaagaaaatcatgttaccgatttacaagaaacatttgctaatttcataagagttggtctcaagctgaatccagaaaaatgtgtcttcagagtgaagaagggaaaatttcttggttgtttggtatcaacaaaggggatcgaagccaatccaagtaagatagaagctatactttgaatggagcccccgaagtcatgaaaaggtgctcagaggttgacaggaaggctggcatcattgaatagaatttatttcagatcagcagagagaaac

SEQ ID NO: 56206 - DNA, 423 bp, Zea mays
ttaaagaaaataaaagctaaatccccagagccgaaggtgactgatgaggaagaagagactccctcaacacctccaattgctgaagtggcagaaattttaaaggtaatgactgaatctctacctatcaagctgctaagccctctgggactggaactgacgaaactttttcagaagaaagaagaaccttcggctacaaagaaggcagatgggctgaagaagcgaagaattggtactgtaatgcaagccattgaaaagacgccaccatcggcctcggcgtctaagatagcacctactgtaagcgccgaggccgctgccaaagcaaacataccgtctgaagctgcagttgccgccgaagctgtcaacttatagagcacactatctggaattgatagattgctattggatatgcctacagaagaaaca

SEQ ID NO: 56207 - DNA, 379 bp, Zea mays
agcttcagatgggcagtctccagcaaccttttcagcccgggacggtgctccatttcgggagtcttgagttcatgttctcgacgatagctacgacattatactccttcccccgccgcgcgacagcgacaatggcggccgacaacccgcctgccggcggcgaaatcgacgacgtctttcccgtgtggtggaagaacaacattcgagctcgccccgtcccctcctccgccgacggaggaggaggcggggcaaccaatgccaagcaggaggcggcacctcgtcggctatcgagcgagtcgacggcgccggcgccccaacggggggcacgtcaggcatcgacctcgcgtctgagacgaagacgagcaccgtcttcccgcaacac

SEQ ID NO: 56208 - DNA, 444 bp, Zea mays
  unsure (1)..(444): unsure at all n locations
ctcagcttctaaaggagaacacattntaggattaacaaatgttcattttgagaaatacaggatttgtagcgcatgccaggcggtgaagcaagttggagtccatcatccacacaagaacatcatgacgaccgacagaccgcttgagctactccacatggatcttttcggcccgattgcttacataagcatcggcgggagtaagtattgtcttgtaatagtggatgattattctcgcttcacttgggtattctttttacaggaaaaatctcaaacccaagagactttaaagggattcttgagacgggctcaaaatgagttcggcttaaggatcaagaaaataagaagcgacaacgggacggagttcaagaactctcaaattgaaggctctcttgaggaggaaggcatcaagcatgagttctcctcttcctacacgccacaacaaaa

SEQ ID NO: 56209 - DNA, 441 bp, Zea mays
  unsure (1)..(441): unsure at all n locations
agcttgcccaaaaagttttattatttctggagctacaaaattaattctaagattctaaaaggctaggttntggcatcttaaaatgctaaataattccaggcttgggataaaaatcttggaactatttttattaaatactagatgattttagaagtctaataaaattggtctcatatttttaccatttttctagaattctcttcaattttccaagtctgacagaaaagaaaaaaggaaaagctatgaatagtattgggctcaattcggcccaaatcagcccgggaacggaggaaacacgctcgcgcgtgcccgcgctagtggttttgcgtggaggccccggccttttgaataaccgataaggaatccgtagcactattcatgtgtctctctgacattcgcgcanaacccctcgcacttctatctcttcacaactcaagtccc

SEQ ID NO: 56210 - DNA, 437 bp, Zea mays
tggcatacaactagcaatctcattgcctctgcagtacttttctcaagtgctcttcatgctcttgctcattctgtgaatatacaaggatatcatcaatgaacaccactatgaacttgttgaggtagtccatgaacacactgttcatcaaatacatgaaataagctggcgcattcgtcaaaccgaatgacatgaccgtaaactcatatagtccatacttggtgataaaggttgtcttctgtatattcgaaggccggattctaagctgatggtaacctgtcctcagatctatctttgagaacacaccgactcctctcaactgatcaactaagtcttcaattctgggcagggggtacttattcttgacagtgacttcattcaacgatctataatcgatgcacatccttttcgttccatacttcttcttcacaaatagcact

SEQ ID NO: 56211 - DNA, 360 bp, Zea mays
  unsure (1)..(360): unsure at all n locations
tcaagcttggctaaaagacgctgnttcaccatgtctggttaaaaaatgtccaaggaaaagaaggttgttgcggagatgaagttgtttgaagagacaaagctgtttgaggagaagaagcctgtgggtccttatgttgctggatttgttgagtcgatggcgaagacaaacacagagaagatcacttaagagatactggaaggtttatctaaagatactggtgacagcgatagctatgatgtggaaagaggggatgaggattctgaagatcggccctggcgaccaagccattctatcttcggaaaatcaaccattaaatagagtcatcttgagaacatgagaggaaggtacttttcggacatg

SEQ ID NO: 56212 - DNA, 414 bp, Zea mays
tgacgcaaaagcaaatgcccagtcagcgtgaacagtacgagagcattgttcatctatttataggcacgggacacaacccatgtaaaattacacccatgccctttacatttgctaataactctataatagtccatcagggtctaaatagccttttcccttttaagtcggttcccttttctgttatcacaccgaagctcccgtgcacatagcttcggctctgcgccatccttcgtattctttgtgcttcttcacactgtagttttgaccaaagtccgaaggtacctattcatgtatcatactccagaaacattgttaaatcatatttttgaggaccttcggaagccaaaggcccccaacagtagcccctcgcaatattaatttgttagaatgataaattcagattgcgatatggac

SEQ ID NO: 56213 - DNA, 344 bp, Zea mays
agcttgtgaagggttttcatccccacatgtgctaaacggcgatgccacagccagcccatgcttgtcttagcaattaagcatgcatctagaccagcctcctcttttgcaaaaacaactaaataaaggttgtcgtctagtacacccttaaaagctaatgaaccatcacttcttctaaagacagacacatctacaagtgtgaataaacacgtatatcccatattacaaagttgactcacagacaacaagttatatcccagcgactcaactaagaacacattataaatagagtgctcggatgaaatagcaattttttctaaccctttcaccttggcctggttcccatc

SEQ ID NO: 56214 - DNA, 435 bp, Zea mays
gcttgtgaagccaatcacaagtctattgaagaatgatactaaattcaattgtttcttataatgcaatgaagcctttgagaaattgaagatattattaaccactgctccggtattggctcaaccgaacattaataagccctttgatgtgtattgtgacgcatcatgcactggtctcggatgtgtattaatgcaagcaagccgagtaatagcgtatgcttcaaggcagttgcgccggcatgaggagcattatccgactcatgatctggagctagctgcagaggtccatgccctgaagatctggcgtcattatctgttgggtaatatctgtcacatttatacagatcataacagcttgaagtatatcttcacccagtgagagttgaacatgagacaaaggtgatggcttgagcttattaacgactatgaattggagat

SEQ ID NO: 56215 - DNA, 375 bp, Zea mays
cttgccaaatatgacgcataattataccttttgagtcttctcgcgctgataagtcattcttcacataaaaccattctgtcatccaatccccgggccatctcttccgaaagggtggtacgggacagcttgccccggaccgagaaacgaagctgtagcagccaaagttggtatgggactgttccttgccccaaggcttttgttcatataataattcatgaacattacagaagcttcttgcgtcaggcttcagaccttggctccttccggcccacacgaagatatttagccttataattgcctcgggagtaagttgatgaagatagacttctaagaatttcaacacctccacgacgaagctgctcaaggggaatcgca

SEQ ID NO: 56216 - DNA, 424 bp, Zea mays
tatctcaacctgagaggaaagcttatcctaatgggtgatgtgttactctgagctttgccaagcgtgatattcatatgtttcttgcagaattatacgtgtcgatcatatggactagactagcgctttatattcatatgatccttgcagcattatacgtgttgatcatatagactagaccagtgtttccgctgcgatgaattacttggcttctatagtgaaatagaaagtcatgtggttaatggtgctttaagaatgctttaaattgatatcttaatttaagctggtctcttaatggagaataatggtaggttgatatccctgcgatatatccactaatttgaatggtgtctaactctgattatgtgcatttgtgtgttatagcataatggtttgattcttgacataatgcatcctaataagtgct

SEQ ID NO: 56217 - DNA, 412 bp, Zea mays
agcttgactgaaatggaagacgatcatgacgaaagatgaaacgatcacgaagctatgtgcagaggagctttggcatggcagtagaaaggggaaaccgacttaaagatgaaaagccaaatcaaccctcgaagaattactatagagttattgataaaagtaaagggcattaatgtaatttcatacgggctgcgtcccgtgcctataaatagatgaacagtattcctgtactgttcacgctgacttggcattggcatcacgcttgtacccttactttccttcaagacgaaggtacatttgtaatttgtcatcgtttatataagaaaaatggatagaaataaattaataataatggttaaagtaattatgttatttcccgtattttatacataaatcttttcttatcttttattat

SEQ ID NO: 56218 - DNA, 417 bp, Zea mays
tcagcaaaatgactgccatggttcttcactctcaaataggcagaaatgtgctgacttatgtcgatgacatcatagtgaaaagcacaaaacaagaaaatcatgttgccaatttgcaagagacgtttgccaatttcagacaagctggtctcaagttgaatccagaaaaatgtgttttcggagtgaagaagggcaagtttcttggctgcctagtatcaacaaaggatatcgaagctaatccaagcaagatcgaagctatccttcggatggaaccaccaaattcaaagaagggggctcaacggttggcaggaaggctgtcattgttgaatagatttatatcaagatcaacagagaggaatttaccattctttgaaatactaaagtcagccgaagtctttcagtggggtccggctcaacaga

SEQ ID NO: 56219 - DNA, 383 bp, Zea mays
agcttgtgaaggttcttcatccccacatgtgctaagcggcgatgccacagccagcccatgctagtcttaacaattaagcatgcatctagaccggcctcttcttttgcaaaatcaactaagtagagcttgccgtctaatacacccttaaaagctagtgaaccatcacttcttctaaagacagacacatctacatttgtaaatagacagttatatcccatatgacataattgactaacagatagcaaattatatccaagactctccactaaaaacacattatagatagaatgctcattggagattgcaattttacctaacccttttaccttgccttgattcccatcaccgaatataattgaatcttgggaagtcttattcttgac

SEQ ID NO: 56220 - DNA, 327 bp, Zea mays
  unsure (1)..(327): unsure at all n locations
ttgcatatgtgaagtgagacctcaagaaaaggatgatgatgtatgaaccttgtggttgaccaatgaggtttttgatgtgggcgcaaaggtggtgtgtgatacccaattttcaaaaggaagagaaattgaagattattttgtttccttgttttctcttccgggtcctgtgctacangggtttggaacttttaggaagcattcaccagtaaaacagtagaattcttgctggactagtgccctgngatcgggaacggacgtgagagcnaatttgggccgtggatctcaatccggcggtggggagcccattaattctccccccttaagcct

SEQ ID NO: 56221 - DNA, 68 bp, Zea mays
agctaagactagcatgggctggctgtggtatcttcttttaacacatgtggggatgaagaaccttcaca

SEQ ID NO: 56222 - DNA, 360 bp, Zea mays
  unsure (1)..(360): unsure at all n locations
agcttaatgcccncaagaaattatctaactttggttagggtaaggctcccatggctcatgataacgagggttacattttatatcctgctggttatcccgagcacaagattagaagaattcatgctaggaaaccttataatgtttcgcatcatgcttttatgtataaaaatgaggcttctagctctatgcaatcaacccatgttaaattgcctaaaaagaaatctcttattgcatcaaatgaacctaatgtttcatttaagacttttgatgcttcttatgtgcttactaacaaatcacgcaaagtagttgccaaatatgttgggggcaaacacaacggatcaaagactggtgttgggtacc

SEQ ID NO: 56223 - DNA, 405 bp, Zea mays
  unsure (1)..(405): unsure at all n locations
cgcacggcggcgggtctgcgagtcgaggcaaagttctcgttctatcgatgaaggcctgcgggaggtttcaatttgttactgccgggacccacggctcctcaaccgattccacgatttgcgtcacggacccacggtcgagtttgtccgagcggcgcggcgaatataagggaggggtagagctgacgtgcgggacccacgtggaggtaagaccgcatttgcgtactgcgcgtggtgggtggctgacagcatgggcccgcgtgtcatctatgggcgaagggagtggggagtctgactgggtggccatcttgtcaattgcgagcgcgcaaggccggtattgggtcgcacaaataaagctagaggtgcgacctctgtgcatcgagcccaagaccacgtcntccatttttc

SEQ ID NO: 56224 - DNA, 437 bp, Zea mays
gcatgcaagctttgctgatcaaactttctgactctatattgtagcttattcagagcactttaactttgttatttggctctcatcacgaaattggggttctccaaatcttttttaccagactttcccttcttgtacaaaaattggctattaaaggttatttatgggttgcgaaatcttctcaccctgaggtgcctgacatgattaaggcatgattcttaagatgaaaaagacttaattaaacctttgctcctaacttttgaagtcctttactcaatttggttcacatgtgataatggttgtgaattaactctgagaagaaaccctatgtgacacttgggtgtcacatatatcagccatgctcacggtcaaagcaactcggaccctcccagagtaattatggattacccttatctgtctatccttgcattggggattat

SEQ ID NO: 56225 - DNA, 423 bp, Zea mays
cgggaactatgcccatatccaatctacctgagccacaaatatatgcgcatggcagatgccccgttccaatcgaccatgaccagcacccaacataagacttccctagttatttagccaaaggcgtcccataccacctcatggtagcactgttttactgggtggtcactccatgttccaattaaatcatatgatcttgtttaatcaacgaagcattcaccgatacaatgattacaataacctaatctttggaacaataatatcataaacaggagtgactgcataaagctaaagttgtaacaatatcatagctactacagttgagtacaatacccacggttgaacaaggaataatgtcgggaaaagtaagtgtatttgaataggaacccatctattatggctgcatgaatgaaacttagtatcatg

SEQ ID NO: 56226 - DNA, 362 bp, Zea mays
  unsure (1)..(362): unsure at all n locations
agcttggacagtgttctgcgacggtttctgtggaaccttcngggcaggtgcagctgctattttagttgcaccttccaaagtcagaacatgctatgcagtgaaacttgatttcagctgcacaaataatattgctgaatacgaagctttgcttttggggcttcggatgttaaaggcaatgggaataagaagggcggtttctaaaaccgattcccaagatatttctggtcatattgacaagagttgtaaagcaagagacccgaagcatgagaaatacttggatacagttcgaaggcttgaagcttcattcgaagggttctctgtcaagaatattccacgaggagaanatgagcacgctgatctgc

SEQ ID NO: 56227 - DNA, 368 bp, Zea mays
tcggcatgacaacagaaaagaggaaccgacttaaagataatttttcaattagacctcgaagaattactatggaattattgataaatgtaaagggcattaatgtaattctacacgggctgcgccccgtgcctataaatagatgaacagtactcccgtactgttcacgctaacttggcattcgcttttcgcatcacgcctgtacctttactttccgtcaattcgaaagtacatttataatttgttattaaggataagataatgcgaataaaaaaaagttgatgataatatctgcattatcatttgtatttcatatacgcattcttcttaatcatctgtcgagcctacgaaggtctctttcttcataacct

SEQ ID NO: 56228 - DNA, 385 bp, Zea mays
agcttgtgaaggttcttcatccccacatgtgctaagcggcgatgccacagccaccccatgctagtcttagcaattaagcatgcatctagaccggcctcctcttttggaaaatcaactaaataaagtttgtcatctaatacacccttaaaagctaatgaaccatcacttcttctaaagacagacacatctacgtttgtgaataaacagttatatcccatattacataattgacttacagacaacaagttatatccaagcgactcaactaagaacacattagaaatagagtgctcggatgaaatagcaatttttcctaaccctttaaccttgccttggttcccatcaccgaatatgattgaatcttatggatccttgttcttgacgt

SEQ ID NO: 56229 - DNA, 428 bp, Zea mays
ttacattgctttcctattggaaaccaatgccatctttaatgccagaacgtctcccactatagagcatgcttctagcaaatttaaacttttccttttcaatttcatgctcattaattttagtagtcaattgagctatatgaacattttgctgtttaataaaagcacggcgatcatgaatatgttctacattaacatctctacatctagtacaaatggaaatatgttcaactgtatatgtaaagggtctgccagatttaaattcttcttcttagcatttaaaaatgcattcttatctctaagacaggaaatagaatcatctgcaacatctaaatctctaaccttaaaattaaactagcattttcagtcttacgctataaattgattcattcagtctatcaatcttcacatctaaactaacattttctttt

SEQ ID NO: 56230 - DNA, 375 bp, Zea mays
gagagcacattttgtgacttaccaatgttcattttgagaaagacaggatttgtagcgcatgctcagcaaggaagcaagttggtgttcatcattcacacaagaacatcatgacgattgatatgccactggaactactccacatggacctattcggcccgatagcttacataagcattcgcgggagtaagtattgtctacttattgtggatgattattctcgcttcacttgggtattctttttacaggataaatctcaaacccaaaaaaccttgaaaggattcttgagatggtctcataatgagctcggcttgaggatcaacataattataagcaaccaccggacaaaagtttaagaatcacaaattggacgctttc

SEQ ID NO: 56231 - DNA, 415 bp, Zea mays
agcttgtaactcgatcgagttcaaatactaatgaacaaatagcttatattatgtgtttgggctcaatttcacacagcaggaagcaaagagaagaggtgggcatacctggtggatgctcgtcgctgttgaaagttgacctgtgcacctggcctatgcggcggcggaggcctacggtcgtccacccacccgttgacacgagagagagagagagagcgcacggcacgggggtggcggcggtcgcccacttgacgcaccggcccgagagacatagagagagagagcacgcgggatgaatgtgagcgaagaaaatggcgcacgcactgctggccttctgggtttgaggttgtgtatacagattatgctatttctagaggtgtacccacttatacatataggtttttctatatgactagtt

SEQ ID NO: 56232 - DNA, 447 bp, Zea mays
agcttgcattcttctatttcaagagttccttctgtgctttttcaaaagaatggcctatatgtcatgtgacattgtcaatttaagttagagaagatactaaaatttgaacacttatgtttcaaattttacctgatgtgcattccgacttggatttgcctatgatcttaatacctgagttagtaccaatccagtgaatgtgtttctcgacagggaaacaagtgctagctctcaaatatgaatattgtagtgttaggcatggaatggttatgagcatgctactatatgattttaatgaggagtcctggtttcatggatggatatcatttgtaataatacagagcactgttagatttgcactacattgcacaagcgaaactcaagttgagccttatcagtacataatccacttttgtgctggtctttttgccaaaaagaacattattttat

SEQ ID NO: 56233 - DNA, 369 bp, Zea mays
  unsure (1)..(369): unsure at all n locations
actcaactttggagcgcgccgagcagatgtccaagacctcggcaactactccattgtctatcctcgagagcgcggagaccaggctcaccacgaggcgagggcggtcccgtggagacccggctgacactcacgaggggcgacctcgacaagatccactttctgcatgacggcaggccgcgcagacacgcggagacccgtatgcgcaccgtacggagcgcaaaggacggagagcaccacacacgagacggagcggcggccgggaatccctgctacacatgaacaccatcggccgcccggacggcagggatcgaacgaatggnagacatgctaccttgaagtggaggctggcaagctgcaaatctccacggc

SEQ ID NO: 56234 - DNA, 386 bp, Zea mays
agcttagtgcctcatagagcatctagtggttgcatttgcatgaggactaacatcgcttcaaatttcatgggataaaaatcttttcaaaagcatgtttgaaaattaccaagtcttggataggcggaccgtccaggccatgtgggcggaccgtccgcgatcctccaataagggtctgaagtgtgttcacttcggacaggtcctgttcatttgtactgcggaccgtccgggccttggggtcggaccgtccgcagtcctgaccagagaaggttgctctcggcatagtccctgaattattgtgcgaacagtccggccttgtagggcggaccgttcgcaggtgccaaatttgtgttgggcacgaactgtgtcggttttgtggtttgtactat

SEQ ID NO: 56235 - DNA, 412 bp, Zea mays
tgtgaaggatcttcatcctcacatgtgctaaacggcgatgtctcagcctgctcatgcaagtcttagcaactaagcatgcatctagaccggcctcctcttttgcaaaatcaactaaataaagcttgtccgttagtacacccttaaaagctaatgaaccatcacttcttctaaagatagacacaactacatttgtgaataaacaggtatatcccatattacagagttgactcacagacaacaagttatatccaagcgactcaactaataacacattagagacagagtgctcggatgaaataggcaattttcctaaccctttcaacttgccttaattcccatcaccgaatattattgaatcttggagatccttgttcttgacgtaagaagagaacatactctattaccccgtcat

SEQ ID NO: 56236 - DNA, 212 bp, Zea mays
agcttggtcactcctgtagtggtgttatatttaggagggtgtatttgtttggctttgcctttcttgttatacaaaggcctaccaacggccagccacctcttggtttaatttctcattcttcattgcaatctcattccaacatgtttctataaccacattcttagcaagaacctaattgcacggggttgaatcattaattaaatcaaagccag

SEQ ID NO: 56237 - DNA, 450 bp, Zea mays
ctataaaactcaactttataggcagctgactcaaagtttgctgctaatctactctataactcgttatagtcctaaaactcctggaagtcctccatcatgatgtgatggggacaacctggtatttggtgttttaagcaagggtgagtacacataaacgtactcatcaaatgtcccgtttggctgaagtggactatctatatgtggggtgaagctcatagcagttgcttttagttgggcaagtatttttttactactatatagccaaagcttatcaataaccccaagttatttaccccaaaattactccctctcaaaggaaataccagaattcatcattataaccattgtcataaagtcatcatcataaatgtatccagaatatctctaatcaaaagagctcccaaggctgctcataactgtgagcacgactgatataccaatttctaaccc

SEQ ID NO: 56238 - DNA, 413 bp, Zea mays
  unsure (1)..(413): unsure at all n locations
agcttatggggtcactggccgcccttatcctcttcatctcaagactggctgagagggcgctacctttcttcaagctattatggaggtccggcccattctcttggactgaggaagcagaacgagcctttcaagagttgaaccagcaccttgtgtccctaccaatactggtagctccagagccaggggagctgttgtacttatacattgcagcggctacagaggcggtaagcatgatgctggtcgccgaaaggacggcacaacatcccagggaagtcagaaagttcccctaggagaaggtggtggtccgaccaccgcgatggtgatggaaggtcaagagtttgatggctcangaccaaccgcangggtccgaaccatccataagccagtctactacgtcagcgaagtccttcatg

SEQ ID NO: 56239 - DNA, 387 bp, Zea mays
  unsure (1)..(387): unsure at all n locations
tgatttngggttttatttgagctattttgggtaagttctctcaacatttcttggtgctcattaaatatactttaatttttataattggctcaagtcaaaattttaaacttttcatcccctttttcttattttcttgaattttgctcatggggctcacttagggttttttaattagggttgcacattcttatcctttaaaggactcaattgttttggtcatgatacttttaagtatatacttggtgacttcttttttacttaagttattttgatgctcatgcttactttggttcacataaaataatgattcttggtttggcattngagagaaaccctangtgacactggggtgtcacaaccttccccccttataggaatctcgtcccg

SEQ ID NO: 56240 - DNA, 382 bp, Zea mays
  unsure (1)..(382): unsure at all n locations
agcttatgaagatatttcatcccaacatgggctantcggcggtgccagagccaacccatgttagtcttagcaattaaacatgtgtcgagctcagctctatcaaaatctactaagtatagctgaccctctaacacacccttaaatgctattgaatcatcacttcttctaaagacagtgacacttatatcagtaaaaagacaggtgtagcccatttgacataattgggagacagaaagcaagttgtaatctaatgaatctacaagaaaaacattggaaatagaatggtcaggtgatatagcaattttacccaaacctttgaccaaaccttgatttccatccccgaatgtgatagctcgttggggatcttggtttttctcatatg

SEQ ID NO: 56241 - DNA, 422 bp, Zea mays
  unsure (1)..(422): unsure at all n locations
tatatatatatcttntacataccttattatgacatgtaattttattgtcatcttccatcccatcgccagcattatttttattcaactcttcttcctggtacaaaataacatgttactatgcataatttatgttacaaatagtataacactaaaacatctgcaatattattaccttgtcttcctcattatcactaacatttgttgactcattacatccaatatctggctccaatcggcttagaacgacatcgagctcatccaacacatccattgccttatcgtaccctgcttttgacatacacgcctggcgaactactttcattgttttcgttaacaacatcttctgtctgtatgatttagtaactccattcttccccctaaagctcttatcaattctttcaaacggaacatcttttcttgat

SEQ ID NO: 56242 - DNA, 369 bp, Zea mays
aataactcaaataaattctcatatcagcccttgaactatgaacccttagagaaattcagatttctgaatttcagacctctttccaaagatcatctgcgttctctggtttttgaaactcaaagccaggagatccaaatatcaaagtagtgccaaattcccttgaacacatcctggaaaagtttgaactccaaccaaattcatttgacacggttttggcgcagtttgacctcgggaccaggcattctgacactggcaccttggtgacgctacaactccctgtccctagcctaaaaccgcgcgacgtccatacacaaaagacaaagcttggtcaggtgaacaaatccttcacagcgatcttgccaaaatcac

SEQ ID NO: 56243 - DNA, 323 bp, Zea mays
gtggtttccacgtcttgcaagaagcgactgcaaaatgtctttctctactctaatatatatccctcagctatcgagcctttaaggcgcgctctgtttcgatcataagctttaagagtacgtagatatctctcaattggatacatccatctatatcacacgggttcaccaactatagcctcttcagcttgatgaattgacacatgaatcattatatcaaaaaaggctggggggaaaatcatctcaagccgacaaaggggttcaagaatcaaggtgctcaactgctctaaatattcagcactcaactcctctgaacatattgcatt

SEQ ID NO: 56244 - DNA, 312 bp, Zea mays
gcttgggcctcgcttctatggtccctatcaaagtttggaggaaattggtacagtatcttacaggcttgccctgccatctcacgcccgcattcataatgtggttcgtgtctctttactaaagaaatatactggggctcccccggctgcaatagttcctctacccccaatattacatggcagagtccttgctcagcctaagaaggtcactaaggcacacaaaaaccgaggcgtgtgggaactgctcgtgcaatggctaagacaatcagcagctgatgcaacgtgggttcaactggaggactttcttcgctgttt

SEQ ID NO: 56245 - DNA, 432 bp, Zea mays
  unsure (1)..(432): unsure at all n locations
tgcgcaattttatcaaatcaacaacatttacctacacagcggctacagaccattcctgtaacatggccgtttgcatgttgggggctggacatgatcggacctttcaagaaagctcagagaggctatactcacatgttgattgccattgacaagttcacaaaatggatagaatataagcccattgcctctttgacctcagccaaggcagtggaattcatacaagacataatattcaggtttgggataccaaataacatcattaccgacctgngatccaacttcaccagctctgaattctttgacttctacgagcagcggagcagccagattaagtatgcatcagtagcgcatccaagagccaatggccaagtagaaagagccagcgggatgatactagaagcactcatgaagaaagtatttgacaagagtgaa

SEQ ID NO: 56246 - DNA, 337 bp, Zea mays
agctttaaactctctgacaataaaatcactttatctaggttcaacaaagatgcattaaagcatgaatgaattcttgagaagctaaactagatatgaagcagggataatacatggacatgctttctcttcctttcatacaagatatgccaagaatgtgtttaaaaggaagatttaagtacaagtttaaatgaaaggagataggtttacctttttgtacctttacatagagacgctctcttcaatgtgctttgtccttagtcttagatgcttaaaacctattcttaatgacaatatatggaaatattttgcactagagaaaagtctacaactagtgatc

SEQ ID NO: 56247 - DNA, 374 bp, Zea mays
tatgaagattcttcattccaacatgggctattcggtggtgtctgagccaacccatgttagtcttagcaatcaagcaagtgtcgagttcagctctatcaaaatctaccaagtatagctgaccctctaacactcccttgaatgctattgaatcgtcacttcttctaaagacagtaacacctatatcggtgaatagacagttgtagcccatttgacataattgtgaaacggaaagcaaattgtaatctaatgaatcaaccagaaaaacattggaaatagtatggtcaggtgatatagcaattttacccaatcctttgaccaaaccttgattttcatccccgaatgtgatagcttcgtggggatcttggttcttctca

SEQ ID NO: 56248 - DNA, 330 bp, Zea mays
  unsure (1)..(330): unsure at all n locations
agcnttgagattggattcgaccatgatccattaattgtgtgactatgggtgctatagcaagattgtagctggatcatatggctatagctttgatacatatggattaagtagttactacatgaaattcaaagatcctggcacctgaaatccctctgttagacaccctgatggtgatcgccatggtacagtactaaaaaagatcttcaagttcatcgctcgtcgtcaccggtgatctaacgcccaaattctcgccggccactgtgattcgtgctatcgcaagtggataactgagaggagtaaagatcttagcgctcagattgngtcgggctc

SEQ ID NO: 56249 - DNA, 426 bp, Zea mays
tcatggggtgctaaggagtctacccgcgctaggaattgaataaaggctcaccgtggagctcggtctacgctcgtcggcagtcgggtgaagtccggtgaccttgatctggtgtctccggcgaggcaaagctcgattcctcgctctgggagcttcaccgaggcatgttgagtctttctcgtgggtcggacggtgctgggaaaggctcggttggccggtctaccgtggtgggttctcacgcggccgctggcacgccgtgtgcagggcaaacgccggtgatcttgcgctccgacgaggtcgagagcgagcggagtgtacggctgaagtcttggctggctttataggcgtgggcgcgggcaatggcacgggcttggcttggcgcgacgcggggcgcgcgaggtctggcgctgggcgtgctctggcgagttc

SEQ ID NO: 56250 - DNA, 455 bp, Zea mays
tgcggcatgcaagcttaaggacatgttggttaccagcttccaaggctttcatatgaagccggtcacagctcaggctctgttccaatgcacgcaagaccacaaagaataccttcaggcatatgtacgaaggttcttgcgattgatggcacaaccgcctacagtgcccattgagattgtcattgaggccatgatcaagggtcttcgcccaggacctactacccaatatttcgccaggaagcccccacaaactctagagaagctgcttcagaagatggatgagtacatccgggctgacaacgactttcgccaaaaaagggaggaagcttacagattctcggaaatgaccaggggctttggaggaagaatccacccgaggcacatcaagtcaatccataattccattcatagtgacgacaaaggaagtcagcctcagaggtcacaatacacctcacaat

SEQ ID NO: 56251 - DNA, 423 bp, Zea mays
ttattccagtgcacccaagatcacgaagaatatcttcaggcgtatgtccgaaggttcttacgcctgagggcacaagcgcctacattgcccaatgaaattgtcattgaggccatgattaaggggcttctgccaggaccttcagcccaatactttgtcaggaagccccctcagactctggagaaactgcttcagaagatggatgaatacatccgcgctgacaatgactttcgacagagaagggaggaagcttacaggttcttcgaaatagccaggggcttcggagggagaattcatcctaaacatgtcagatcaattcattccactcagaatgatgatatgggaagccagcagcagaggccgcaatattccttccaggctccggggcagcagcagaactatcctctggccctagcttcaatggga

SEQ ID NO: 56252 - DNA, 135 bp, Zea mays
ggccgaacccgtggcccttaatgtgcgtaaggtttcattatctctaacaagaatcgtgattgaatggtttgccactgtacctcctaattccatttcatcatggggggatctataacaaaggattcatgaacattt

SEQ ID NO: 56253 - DNA, 350 bp, Zea mays
gtggtgtctgaagtccttactgtaagacaatgacaggaagctttgcgactcaatggatctgccgccacattggcttttcctgggtgataatggatttctaaatcataaactttaatcaactcaagccatcttctctgtctcatgttcatctctaactgggtaaagacatattttatacttttatcatctgtatatgaatgacaagtatttcccagcacataatgacaccatatcttgagggcatgaacaactgcagctaattccaaatcatgagttggataatgctcctcatgccggcgtaattgtattgaagcataagctatgactcggacctcttgcattaagacaca

SEQ ID NO: 56254 - DNA, 440 bp, Zea mays
  unsure (1)..(440): unsure at all n locations
agcttctcatagcacaccacacacatgttttcttaattacctttngtatatttggattgcaactttattattaattcaggagattggagaaaaactatcataaattggtgccagattggaatacccatcgttgaacaaagaacgtgttcaggatgtaagaaaactatggcaagatccagccattcacgtgaaattccatttactttgattttttttaaaaaatgtataaacttttaaacataaagnttgatcatttagaaattcatttgtaggaaacttattcacgtgggagtattctgcaagtcccagactgtgcacagtacttcatggaaaatatggacacattatctgtagagaatatgtacccacaaaggtacacatatattctcattctatttttaggagaagatttacatatgcgtgttacaatgtcacatatt

SEQ ID NO: 56255 - DNA, 453 bp, Zea mays
  unsure (1)..(453): unsure at all n locations
gacactatanacaactcatgcttctaaagggagaacacgtggtaggtctgtctaacgtgcaattttaaaaatatagaccttgcgcagcttgtcaaacaggtaaacaagtgggaggagcgcatcacagcaagaatgtgatgaccacttcaagacctctagagctgctgcacatggacctcttcggacccgtcgcctatctaagcataggaggaagtaagtatggtctagttattgttgatgacttttcccgcttcacttgggtgttctttttgcaggataagtctgaaacccaagggaccctcaagcgcttcctcatgagagctcaaaatgagtttgaactcaaggtgaagaagataaggagcgacaacgggttcgagttcaagaaccttcaagtggaggagttccttgaggaggaggggatcaagcacgagttctccgctccctacacaccac

SEQ ID NO: 56256 - DNA, 441 bp, Zea mays
  unsure (1)..(441): unsure at all n locations
tactcctccctgtgaagggtcgctcatcatcgccaagattttgaagcccggaacatacaagctggccaacgatcaaggcgaggtctacagcaacgcttggaacatccaacagctacgtcgcttctacccttaagatgtttcaagtcgttcatatacttcattttctttatatgtgtaaataaagtctaaccgtcaaggaaggatcagccttgcctcggcaaagcccgaccctccctcgggggctaaaaggggggaaccccctcttcgtcaaaattntcgtcagaaaagtcttttgccagaacgtctttcgcgcttttcgactgcttcgatagcagggtcctaaaaacgacgagagtacacgtaagcggcaaggccgaccgagccgagggactcctacgcctccgggatacggatacctcactcatcaccttccgcgaaaag

SEQ ID NO: 56257 - DNA, 310 bp, Zea mays
  unsure (1)..(310): unsure at all n locations
agctntatcaaatggacgtgaaaagtgcctttctcaatggaccaatcaaggaagagttctgtgttgagaaaccttccggctttgaagatagtgagtaccctaatcatgtctataaactctaaaaggcgctttatgggctaaagcaagccccaagagcatggtatgaatgcctgcgagattttcttatcactaatggcattaaagtcggtaaagtcgatcctactctctttactaaaactattgcaaaagatttgtttgtatgccacatctatggtgatgatatcataattgggtctactaacaaatctac

SEQ ID NO: 56258 - DNA, 427 bp, Zea mays
  unsure (1)..(427): unsure at all n locations
tgctttattgagaacaacatataaagcgtctaaagtggtggtggttctaaatttgcaggagtatttatttagaaatattctctcaccacctttttcaatgtatgtttgatccagcttttttgtgagtggctttcatgagaatctgactgtggggaaattttggctgtggagaaaatctaagtatcatagaaattatgtacagagaaggatgaagatatctataaagtttaaaaatctaaaaataatagattcttactattataatgatttgattgactatgtgtttatgttgcttttttgtggntcttatccaaccgatttttatagaaaccggccgaaaaactaaacgttttacggtttacgatagttnttggtggccataaaccgaataaaaaaactgaaacaaacgttacgtcaatctcatcgt

SEQ ID NO: 56259 - DNA, 420 bp, Zea mays
cgtcccgggatccttaagtcacctgacgcatgcaagctttatcaaatggacgtgaaaagtgcctttctcaatgaaccaatcaaggaagaggtctatgttgagcaacctcccggctttgaagacagtgagcaccctaactatgtttataaactctctaaggcgctttatgggctcaagcaagccccaagagcatggtatgaatgcctaagagattttcttatcactaatggcttcaaagttggaaaaggcgatcctactttatttactaaaactcttgacaatgatttgtttgtatgccaaatttatgttgatgacattatatttgggtctactaacgagtctacatgtgaggaatttagtaggatcatgacacagaaattctagatgtcgatgatgggggagttgaagtacttcttggga

SEQ ID NO: 56260 - DNA, 318 bp, Zea mays
tctaaagggagaacacgtgataggtttgactaacatacaattcgttaaaaatagaccttgtgcagctggtcaggcaggtaaacaggtgggaggagcgcatcacagcaagaatgtgatgaccacatcaagacccctggagctgctacatatggacctcttcggacccgtcgcctatctaagcataggaggaagtaagtatggtttagttgttgttgatgacttttcccgcttcacttgggtgttctttttgcaagataagtctgaaacccaagggaccctcaagcgcttcctcaggagagctcaaaatgagtttgagct

SEQ ID NO: 56261 - DNA, 361 bp, Zea mays
agcttgaagccatggtaagtagcatatgctatttatatgtgaattgactcaagcctagctacgggtgcataggtttcaccgaaatccaaacctttgacttgtgaataacccttggccacaagtcgggctttgttccttgtcaccacaccatgctcaatttgtttgttgcggaagacccacttggttcctacaacattttggttaggacgtggaataagatgccatacctcattcctcgtgaagttgttgagatcctcttgcattgccaacacccaatccgaatcccttaatgcgtcttccaccctgtatggctcaatagaagacacacaggaataatgttcaccaaaatgagcaacacgag

SEQ ID NO: 56262 - DNA, 423 bp, Zea mays
taagcgaaacagtcatgaaatgttactaagaatgttcctattacattcacacccctgaaataccaaaaaccctaattaggaccctcgaaaaccctatacctaaaccctagaggggtaagtgccaaattagtgcacttttggactaaagtgttaaaactatgatgttaaggcatataaagccatttggttcacaatcatgaagatttgcaagctaaaccatgaatattggacctatttgcaaaaagaccccatgggtgttctaaggctaagtctgaaaaattcagtgatatggtctcaactctggagctctgtaactttcaaatactaaggtttttgccctatgtcaccacaataatattgtagacctatgacaggagaataaccttgcttaagagtgtaagcatacgttgcatgaaaaatatg

SEQ ID NO: 56263 - DNA, 298 bp, Zea mays
  unsure (1)..(298): unsure at all n locations
aacttcngctatggtgaaacattttggcagttcaactatgcaatagcagtaaatgttgtggtgactatacacctacccgtctgtttatatattgctacacgtgggcaagtgaatcgtcaagccggtcgcacccattgaacagatacccgcactctctgaacggtggaccatagtgcccaagaagctgaatcgccagatcgtgcgtacccgttgcatggtgggaccatccttccctcggaatattttaatatgttctcaacaacaaactcacggaaagtgtttttttgacgttctgcat

SEQ ID NO: 56264 - DNA, 421 bp, Zea mays
  unsure (1)..(421): unsure at all n locations
tcttgaggagaagactgttggatttgttgagtcattagcttattctaataccgagaagattactaaagaaattttggagggcttgtctgaagatactgatgatagtgacagctatgatgtggagagtggaggcaaagactctgaagatcggccctggcgaccaagtcatgcagtctttgggaaatcaactatcaaacagagtcatcttgataatatgagaagaaggtattttcgagatatgtctattgtgagggctgatgtagacagggttgatcctgctcctgaagaaaacaaagttgtgatcttccgaagcttcttcaaagctgggcttctgctcctggtgagcaagtttgtggttgaagttctgaagacataccagaatnttcttcaccagatcactcctgaagcagttattataatg

SEQ ID NO: 56265 - DNA, 396 bp, Zea mays
agcttgagtcagtcattctacaaagaattattgacgcacaaagaaatgatgagggaatgaagcacattcttgagaaaatagaatctggtgaagccatctgcttcagaaaagatgagccaggtggtgtatggttcaaccaccgcatagttgtgcctaagaacaatgagatccgccagcaaattctagatgaagcacatcttagtcgctattctattcatctcggaagcactaagatgtatcatgatctaaaacaacattatttgtggacaaagatgaagattgaaattgcacgctatgtggcaagatgtgacacttgtatacgtgtcaaggccatacacatgaaagctgttggtccattacaatcgttacctatttcaactttgaaatgggaggata

SEQ ID NO: 56266 - DNA, 324 bp, Zea mays
tgaaatgaactttgatgcagctacatattgtcatgtttcttgtgtgtagtagtaatcaaattgattttatttactactcttttggtttgtagtatcacatctgatagtaaaaataatagcattaatggttacttctttgattgtcgtgttacaaataataagcaatattaaatcaaaggggcctacagtgccctggtcgctcagggccttgggaaaatatagagccggccctgggcccacacaatgcatgtgcaacttttctcaaattctcaaaccagacggaagactttaagaaaggcgcaccgcaccagcgtagaatgatcg

SEQ ID NO: 56267 - DNA, 342 bp, Zea mays
  unsure (1)..(342): unsure at all n locations
agcttcagctccgaaagccccagctgntgagagcacaacagctaccgaagccataccttcggaagctacagctaccgaagctgccatagccgaagatattcatttataaagcacgattgctgatattgataagatactactaaacatggccgcagaagaaggtgtcgcagccaccgaagagactatggccccagagcccaagaaggagaaaggaatagctgaagacacttcgtaagatgaagtttataaatttcaaaacttagttggtcaagagctgacaaaggctgaaaaaaaagagcttacagaatatgccatatcttgcggatatcagccgggagcact

SEQ ID NO: 56268 - DNA, 428 bp, Zea mays
  unsure (1)..(428): unsure at all n locations
tcttgatagctggactacgatntcccctatagcagctntgttgtagaggtactgaagatatttgaaatctaccttcaccagcttacccccgaagcaatcataaggatgaataacttcgtgtgggccgtgagaagccaaggcttggagcctgatgcgaaaagcttctgcaacatacatgagttgttgtacgaaacaaaaccctgtggtaaagaacagtatcacaacaattttggctgctacagcttcggctcccggtctgggtcaagctgccccgcgccgaccttttgaaagaggtggcctggcgattggatgacggagtggttttacgtgaaaaatgacttgaaatcacgagaagatataaagaagatcattatgcgccccatctggcaacgcttctgcctgcggaggccgaaggtggagatgaatga

SEQ ID NO: 56269 - DNA, 453 bp, Zea mays
agcttgaagctggcctctgtgccatgacgaatgacgatcttgctgatagccttgcatataatagtctgaaggtacaaaaattgtgtatttggaagcttatgaattttgaattattcgtttcttcttatattaacccattcattcttttcatatagggtttaatacttagcaacgccttatgggcgcaaaagaatgctgaagacgagagttgcactattgctctcaacaaccttcgaaaggaggttatcaaactaagaaacaaagctttggaaaaagacaaaattctacttacattggtggacaaagtaaagggggatgaagctaacttcaaggctcaatctgaaatccaagggaatgagattaaaatcttaaaaacaactggcccagcccaaatgaaatgcgctattgccgacactgaccgagatgccagtgattactgaaaaaaatattttg

SEQ ID NO: 56270 - DNA, 437 bp, Zea mays
  unsure (1)..(437): unsure at all n locations
cttttnttcaaatcttcaacttcggccttgtgagcttcagcttgtgcactaagtttggtttccntagtcttcagcctgtccactaaggaaaacaacatcttatctttctcgagaagcttattccttaatgaaatgacttctgtccaaagatttccaagagctatctgacagctctcgtcttctgcttccttttgtgcctttaaagccttacttaaaatcaagccctaataataaaaatatctgagaacataacgatagcaagaaaagctacaaatatagtttatcttataagacaaaaatatatctacctttcggctattgtaagcaaggctgtctgcaaggtcattcttcgacattatagacaggccgagttcaagcttcagatacaccataattctcatcatttcttgacacaacggaatctctttattgtctgg

SEQ ID NO: 56271 - DNA, 448 bp, Zea mays
agcttcagaaaacgaagccttcgcgttccataacttatgtggagaacatctaacaaaagctgaaatagaagagcttaaagagtatgcccaatcctgtggatacaaacctgtggcactcctcttcggaggcgttgatgacgagaaattagagtgtattcatgaccaaacaggggccaaagttatcagtactctgtccaagagtattggattcctgaagctagaaacagacatcagccgctaccgacgacaacatgtcgttggtagcttattttactccaacttcaaggcgaatgactcgtcccttaacctttattgcttctaataaaaacatgtctgacgaaagttgtgtttgtgtaaaagtatgtatcgagccaaaccttgcaaatgcagcaagatcttgaagattaaaagcatgaaattataatcggagatttggaaaacaaaataa

SEQ ID NO: 56272 - DNA, 407 bp, Zea mays
aagcttgtgacaatatagccctattgatgaatgacaagcaacgtttattgcctttgtccaataagaatccgatatattgcattccgctaacattaacctagccatatcaatgagagtcctattctttctttcaacaataccattttgttccggggtatatttggaagagaattcatgtttaataccatttgtcgtacaataatcatcaattattgcatttttgaaatccgacccgctatcacttctaactttcttgatatcaaaatcaaattgattttgagccaatatagcagatgacttgaatgtccgaaacacattagatttatctcgaataaaataaacccaagtcaatcttgaataattattcacaatctcaagacaataaaaataccaccaatactcacaaa

SEQ ID NO: 56273 - DNA, 315 bp, Zea mays
agcttgtcaaggacatccaggcacccatcgcttgatgggtccgttgaggatatgcgacgaggatctatgaacccaacaagcctttggggtaacactatgtgaaaccacttcctctttagcacaaccagccattatgggttggctctttctatgagaatcaatagtcaaggtaggagcggaaatgctacccgagggacaatctctgtcaaggtgtccctttattcggcatgtgttcaaaagcgcttttgaacattagaggattatcttttttcatgttagttgcctgctacattgctagcaaaaaccttcttttct

SEQ ID NO: 56274 - DNA, 373 bp, Zea mays
  unsure (1)..(373): unsure at all n locations
tctgtagcgagcacgcgttattagatggaacaaagcgctggtgcaaagacatgaccatgaccaccttggctgctacagcatcatttctcaggcccgcgccagctgtcccgtaccaacctttctgaaaaaactgtccggctgttggatgacacactggttttatctgagaatgcttatatcgcggaagaatctaggtatatttgcgactatttggcaagcttcnggcttcggacgccgaacgagagaaatgatcgaaacccgccgaacagtgccacacagccttcggcgatgtctgatcttgtataggctcaagggggcttattacaaggacctactcccttctcggtgtggccagttgctgagaaatgggaaa

SEQ ID NO: 56275 - DNA, 360 bp, Zea mays
agcttctgaagtatctactgaagcctttgttattgaatctttgaagcaacaatctgtaactgaagttggaccttcatagcccaccaaggtaaaacatttggaagctgaagaggcaaaattgacagaggcaactttggaaactgaaaaaacaaaaataacagagccatattttgtcgaggaaaatgacactatcgttcccgaagcatttttcagaatgcgcgattatattatacgacatgcttccggaaagaaattatctgaagaagagatctttgaagctaaccactatgcccgagaactgaagtatccgaaaggggccgtagtgttcaatgggacagacgaagatgacttcttgtattg

SEQ ID NO: 56276 - DNA, 437 bp, Zea mays
tgcagatgaagatatgatgctgaactccatggatgctagtctagtgatacccccgaccatcttcctgtggatggatgtccatgtttcgttgtactttgatgaataaaggttaagacattatgtctgttcaaagtgtaatatgttaatataatcgttatttatgcttttatgcattgtccttttgatatattacacttgtgatgtcaatatatgtgtggaaatagatcctggcacacatatgctaggcaccgggctctgcccttgggaaacgggtgtgacagttgcacttgctcgaccgatgtgataagcacaagcatgattgtgtcgctttgtctgatggtatacatcttttccttcaacccagacttcacaccttcgttaccccatttatttgtccataattcagacttcacacccttattaccccatttatttgt

SEQ ID NO: 56277 - DNA, 438 bp, Zea mays
  unsure (1)..(438): unsure at all n locations
cttctgcttcttattgctgcgactgcattcttgatcatatggctgataattggcatcccaagaagcatatttgctggattggtatatggttttctagcacccataatggctacattngatgctatagcagaaggcaaagaaaagccatttgttcattgctttgtggtaagtatttctttgtatgagacgcttatgtttatctctgcggctatttaatttgttagcatatcttttagaggtggcttaacttggtattctgaagtgtacgatggaacatggagtactatcactggaagctgtacagtagtcatggacgtgaaagatttgcttttccactcctatctttcacttatggatgaccctcgtcttcagaaacctcctgacggggagccatatgaaataaagctgcatcttgttgcatacaatatgtgttacttt

SEQ ID NO: 56278 - DNA, 403 bp, Zea mays
  unsure (1)..(403): unsure at all n locations
taatgcccctaagaaattgtctaattttgtcaatggtaatgcttccatggttcaggatagagaggggtacattctatatcctgatatctatcctgagcacaaaattaggaaatccatgctagaaaacctcacactatttctcatcattttttatgtataggaatgaggcctctagttctaggcataccactaatgttaaaatgcctaaaaagaaaatttctaatgcatcaaatgaacataatatttcatttaagacttttgatgcttcctatgtgctaacaaacaaatcaggcaaagtagttgccaaatatgttgggggcaaacacaagagtccaaagacttgtgtttacgtacccaaggtgctttntctaatgttaaaggacccaagaccgtatgggtacct

SEQ ID NO: 56279 - DNA, 309 bp, Zea mays
agcttcttcggacggtccgaagacctctggctgacgctccggcgacactcaggacccacaacgaccacgtacattcaaaccacgacgaccagagataggtacgtggaaaacaaatacatttaaagcagctggtcggttggtcagatccggcccaactttcgatcaattgttgtccaaatatgtgaaaaaagggccggccccagtgaccggctgtcggcgtttcgagaccggggggtccctgagccgacgagtgagtgtgccgcgtgccccatcccaaatgggtcgagcgcgtgggcgaacgcgaatggg

SEQ ID NO: 56280 - DNA, 434 bp, Zea mays
  unsure (1)..(434): unsure at all n locations
cttggcttcctcgctgatccactggataactccatcggggtcttcctgaatgaatctctacttagaggaatatgccccaaccttaacaaagntgttctttaatttcctggtgcattataaggatatttcataacatctttctttcgaagcacgaatctcatcgacattcctttgcgctcttgacctttcgatctctcatatctcatgcttcaccgctacaactttcaaattttcggttgcttcaacaaccttcctagttagctcttctacttcagctttgtgagcttcggcttgggcggcaagcttgtcctcatcagctattagtctatctactaaggagtattttgtctttttcaagagcttcgtttcttagcatgataacttctgaacgcagattcccaagagctatgtgacagctctcatcctctgcattc

SEQ ID NO: 56281 - DNA, 368 bp, Zea mays
  unsure (1)..(368): unsure at all n locations
cagctttatcatatgttcatatggtcagatcactttagctatttagtgtctaattgggctgttctttttctacgggtgcgccttttgcatgagctccctaatttaacagtttctgaaacactcttaccttttgtgtatggcggaatgtaaaaataagacaaacagtatttctacacgatatctactcattttctttttcgatgatatccgaatggaacgccaaacctatcttttctccttttgtcgcaacaaaactgaattgtattaatggagataccggcttaatatggaccaatccctaatatttctaactgacatggatctacatattcatccatagntacacctgacaaagcgcattctattca

SEQ ID NO: 56282 - DNA, 355 bp, Zea mays
atatcctggtattcagtgcaatgaaatgattgctgaccactgctctatgcaacttgtctcaaagcctgaacaatttgatgtcatggtatgtatccaaaactctgggcatttatctgaggatactatataactcggaacttcactcttttgttcaaacaaaccttggattacacttctctgttatacatcgagctcatatctcatctggattatacaacattggaacatcaaatgatcgcttgtattgagtcgcacactattggttccagtgctataattatacaactattgaaaagttatcattataacgaccgtttaagctcgctggaatgacagctactgggctctacaaatg

SEQ ID NO: 56283 - DNA, 380 bp, Zea mays
  unsure (1)..(380): unsure at all n locations
agctctatggtaagaagaagatatgcaaatgttgatctcctactcacattgaattaaatgggcagcaaaaagtgggaaaatgcaatgaaaacaatgaattccaattcagagtactgagcaggttatcaaactgttgcaaattattcacaatactgagcactctaagcgtccccattcacaccatcgcagtaacgcaaaggaactaagggaatgtcaatatcatatcagacccttgctttnggcttgaccatctctagcgcgagtccagcctctagtgatccctcacccgcacgggcgcacgtgacgcacattttgctgaacacccccaaatataggttgggaaattaactgcaccccccaccttaatggattgatatcgt

SEQ ID NO: 56284 - DNA, 430 bp, Zea mays
tcagatgaggaatagtgtgcgggtctgaattatagtcatttttcttagctttggagctgtatggcgtcttatctatggagtggtgagcatgagatctttataacaaaacgggagagcatctatatatgaacgaagtcccttaagtaagatgggtttgatcccacacaaaaaggaaacggaaagctgtctgaaagtcatacgtggaatttgtgcacttagagtatatttgagctaactgaaattattgcttcagtgaaatgtgcctcactttggattagtataaatgaaaatctgtgcagatccatcttataagattacatcaaaggtaaagaccaatattctgtgagttagtttgatgtgccaaggtagctctgcttgtgtggagaaatttgagaaatagagggatggatctgcttctgcagtagactga

SEQ ID NO: 56285 - DNA, 364 bp, Zea mays
agcttagaagcactttcgtttcttagtccctccgacatgaactttcctcacgcgggtaagcgttataacgaagattatgctctgataccaatttgaagttgcctaaagggggggtgaataagcaagttaaaactttttcaacaaaaactagaagcaaactgggttaaactgaattgatctcgaaattcacccactttactttggaaatgagatgttctaaatgatccacagggttcaaagtagtagatctgagaatggcacttctcaaaatccacacaccaaaaagatataaacaaatcttccaagccatggtgagagaacgaagaacactaacaaacacaatgagcaagaacacaagagacac

SEQ ID NO: 56286 - DNA, 364 bp, Zea mays
taagcgacctccacattcttataagcattcatcctgccttattgttgcacacaaattcattgatgattgaactcacatgataacacgattaaacatgccgcatgaattgacaaggtactgctgtgacttgaaatacctatggtttgctacaagagacaatgagacattgaaacctcacgacatggcaaccctggactctggcctttttaaataaaacatgtgcactgttatatatggcccaacctatgttaagcgcaatacggccaaagctgtacaagtggggcccaaagcccaatacctaatacataagctctattcatgtacgtatacttattcacagatacaaataaagaacacctctatc

SEQ ID NO: 56287 - DNA, 363 bp, Zea mays
  unsure (1)..(363): unsure at all n locations
agcttgtgtggaatattgtggcctctgntgttgacttcctctgacatcactctgggtggagtggattgacctgacatgccttgggtggatccttccttcgaagcccctggtcatctcagaaaacctgtaaggttcctcccttctttggcgaaagtcattgttggcccggaagtattcatccatcttttgaagcaacttctccaaagtctgtggaggcttcctagcaaaatactaagcagtaggtcttggacgaagccccttaatcatggcctcaataacaatntcattgggcactgtgggcgcttgtgctcttatgcgcaagaaccttngacatatgctnggagaattcctcatgatcttgcg

SEQ ID NO: 56288 - DNA, 429 bp, Zea mays
  unsure (1)..(429): unsure at all n locations
tcactgaaaaagaaaaagaaaagggtgaaacagtgatgggccgtttttggcccgggacagcccaacgaaacaggaatccgggtcgcgcgcccacgcgcgcccgcgctctcaagtaattttgcagaaaggcccccgacgatctaaagaatgtgctaagaatcctcggctactattcaacgtctcgctgacagcttacataaagatccctggactttcttttcttctccaacccgctccctgaccgcggtgcgcacacagattgtctccgacgtggttcgtaccggccatggccggcaacggcggctacgaccaactaccggggaggcattagcgactaacagggacctcggaacacccaacaatntggcacgaacaccttgagaacggcttgtccatgtgcacggcggaaaccgtgatcatgggcaaacg

SEQ ID NO: 56289 - DNA, 445 bp, Zea mays
  unsure (1)..(445): unsure at all n locations
agcttgtggaanaaatatattttccttgtggcagacatcaaaactattacttgaaatataatgagtgtcctttattacacagaaaataaaactgaaatgaagaaaactgctatcaaaataggatatttgtcaatagatgtgcttcgactctggcacagtgctattgactgtgcgagcttcagattgttctctgaaatccctttggtgtggagcatattggctcccttctggctgttggccttgttgcaacggtggtggaggcggacgctgttgccaagaaacttgaggttgactcgccgaagcaacataaactgcagggtggttgcctacatattctgggatgtaaggcgaatgatacgaagctgtgtgcatgacctgcttccgctgagcctgatgtgctgcagcctccggtatattcttttgcttctggatgagaacatggcac

SEQ ID NO: 56290 - DNA, 432 bp, Zea mays
tgacttgtggccaaagggtattcataagtcgaaggttcggatttcggtgaaacctatgcacccgtagctaggcttgagtcaattcgtatattacttgcctatgctacttaccatggctttaagctctatcaaatggacgtgaaaagtgccttcctcaatggaccaatcaaggaggaggtctaagttgagcaaccttccggctttgaagatagtgagtaccctaatcatgtatataaactctctaaggcgctttatgggcttaagcaagccccaagagcatggtatgaatgcctaagagatttccttatcactaatggcttcatagtcaaaaaagtcgatcctactctctttactaaaacaattgcaaatgatttgtttggatgccaaatttatgttgatgatatcatatttgggtctactaacaaatatact

SEQ ID NO: 56291 - DNA, 373 bp, Zea mays
gcttctcatgtggggactgaataggaaattcttgaatttaaaattctgaatgtcagaccttgagccaaagatcaagcgtgttcaccttgatccctaactcaaatcctaatgaccccattaacaaaaacgtgcctaactaaaccatctgtcgcctgccaaaagatggcattgggacgcatgcctctgacacgtcaaaccagagattttctccctgtgtgcggcagtgagacaaaccagatttcttccctctctatctcctaatccagtcaaccaaacctgctagcctccacacataaacgacaaggacctgagaggaagagatctctcaacgggattatggccaaaatctccaagatttggagccaatccgcgc

SEQ ID NO: 56292 - DNA, 408 bp, Zea mays
ccttcaggctatcccatgccaagaatgtcaaggtatgttcctgtatttatgtaatattaaagaggattgaataaaccatgttaaggctcacgagatgagtttcatacttcattgttcagtattatcttgtttaatattgttttattcacatcttctctaaaagacctttgtctttaatttaagacttcaaagaagtaataacttaaggacgaaggtctagatttcttaacttgtgtttccttgtttttgatgtcatatagcaattgaaaacaagatcacaacaaaagccttgcaggtccaaattgggtgatggcatgcacgatgagctcaacaacttcaatagaaatgaatcctgtggcttggtgccgcatccaaagcacaatgttgtgggaaccacatgggtgttct

SEQ ID NO: 56293 - DNA, 425 bp, Zea mays
agcttctgctcaatcgcgggaaaaggaaccaacttaaatggaataaagctatccaatccttatagatttgtccataagccaatagtaaatgtaaagggcatggctgtaatttctcatacgatgtgtcctgcgcctataaatagatgaacagcatctctgtactattcacgctgacttgtactcgcttttacgtcacacttgtactttcttgccttctatcaaaccgaaggtacttttgtaattcagtattgttcctgcctttccatgattatataattaagaatgaataatatgatatgattgtttatgttggttcctataagccatatgtgtcttctcttatttaacatatactgcaatgatgaaggtatgtccttcatgacctctgtctgaagatcattatatcctaaaggaaataatgcttc

SEQ ID NO: 56294 - DNA, 389 bp, Zea mays
  unsure (1)..(389): unsure at all n locations
tgcccagtcacctacggggcctagctgttcgtcacagtattattttcgacccgcaaggtcccactcncacgtgatcgagcagtagcaactcgcaagtcgcagccatcaccagttcaccaatcaccactgtcggaatattttaactcgaccccgccctacctcttgccgtcgaccacaagttcacaacccacaaaatgcacgggaggacccagggcgccgccgtcggcgacatgacccagcgccttctccttgccctctcgctcatcgcatcagcgaccgccgtgcccgctgtcatccgcacggtcccggacgaccccaccgcgggctcctctggcgcggcagacgccgcggacgcgctcttctgtgacagctggaggctgtcggtggag

SEQ ID NO: 56295 - DNA, 364 bp, Zea mays
agcttgtgaaggttcttcatccccacatgcgctaagctgcgatgccacagccagcccatgctagtcttaacaattaagcatgcatctagaccggcctcctattttgcaaaatcaactaagtaaagtttgtcgtctaatacacctttaaaagctagtgaaccatcacttcttctaaagacagacacatctacatttgtgaatagacaattatatcccatattgcataattgactaacagataacaaattatatccaagagactcaactaaaaacacattagatatagagtgctcatttgatattgcaattttgcctaagccttttaccttgccttgattcccatcaccgaatataattgaatctt

SEQ ID NO: 56296 - DNA, 394 bp, Zea mays
tgcacaacaatgccatctaactaggtccatacctttataattgcagctctctagctgactgaacatacacagctcacacgagttacaaaataatgctatttctgatgataagcaacttgcatggctattgactaatatgcatctaatggggtcatccctctctcatataatacacaatgataacttggacctcgtgtagccccaattaacaagttcggtgtcctaaatctacactttttacaagttagaaacctatacggctctgtcatgcaaatttagatatcttctttccacttttatcgaactgaggacatatatacacaatgttgtacgcttatggtattaaattctaataaattcatctcgtcttttattcttcatcatattgctcacc

SEQ ID NO: 56297 - DNA, 404 bp, Zea mays
  unsure (1)..(404): unsure at all n locations
agcttgagcgccagtgaccttcttccacttctgccgtcatcacatattcatggaattggacgccaccgccctcagagcctataaattgctgctatcgtccgctctgctatgtagttgtgcaaccagtgaagcaactcgtgcctcaaatcctcccctagaactccccaatttgggatttccccaaatccctcaagaacaccgagcagtttgacctcaccgtggccagcgcgtctcaggtccgctcataccctcttccctcccgctttaagcgtcttgtgtgcccctgatactccccacccaactcgattgaactaaactattttagatcaccgggaacgcggntgaatatccgtcttacccgctgtcaccgtggacagagcacgttagatcaccgttcgtgaaat

SEQ ID NO: 56298 - DNA, 427 bp, Zea mays
aaactaagcttacatacgtccgtagaggctatcccgacggtcccgaggtgttgggattgtttaagctggccggtctacggcgtgcgtggcttgcgcggccgctcgcacctcgctcacggggcgaactcctgagaacttgaacctgtgctgggtcaatggcatgtgggggtgaccagtgaagccaggaatgcttttatatgcgccggcatagcctggaccctagggtggcccgcacgatgctgcacaaatggcggaacgccgaaggcgtgctctggcgcaacacaacgcgtccaacacgagggcgtttgcttctggctctgttcaaccgccttgcaagatcacaaacactcgaatcttgcaaaggtcctgtgcaatctcttcttggacctaggctatcactatgccggagtcccagggagatatccct

SEQ ID NO: 56299 - DNA, 368 bp, Zea mays
agcttctaaagggagagcatattttgggactaacaaatgttcatttcgagaaagacaggatttgtattgcatgttcagcaagaaagcaagttggtgttcatcatccacacaagaacatcatgacgactgacaggccactctagttactccacatggacctattcggcccgatcgcttacataagcatcgacaggagtaagtactgtctagttattgtggatgattattctcgcttcacttgggtgttctttttacaggaaaaatctcatacccaaaaaacattaaagggattcttgagacggactcaaaatgagttcggcttaaggatcaaaaagattataagcgacaatgggacggagttcaagaac

SEQ ID NO: 56300 - DNA, 433 bp, Zea mays
  unsure (1)..(433): unsure at all n locations
tntaaagggagagcacnatttatgactaacaaatgttcattttgagaaagacagggtttgtagcgcattccaagcaagaaagcaagttggcgctcatcatccacacaaaaacataatgacgattgacaggccgctcgagctactccacatggatctattcgacccgatcgcttacataagcatcagcgggagtaagtactatattgttattgaggatgattattctagcttcacttgggtattctttttgcaggaaaaatctcaaacccaagagaccttaaaaggattcttaagacgagctcataacgagtttggattaaggataaaaaagataagaagcgataatgggacggagttcaagaattcacatattgaaggctttcttgacgaggaggagggcatcaagcatgagttatcttctccctacacacca

SEQ ID NO: 56301 - DNA, 448 bp, Zea mays
agcttctcttggatggctttggcatatgatgcttgcacatgttggaatgagcacactcaagaaggtattaaagaaagatatggttagaggattaaaggatgtggtgtttgaaaaagacaagccatgcagtgcatgtcaagctggaaagcaagttgctaatacacatcccactaaagctttcatgtcaacatcaaggccactggaactacttcatatggatttatttggacctacaaattatgtcagtgccggtggcaacctctactgtctagtgattgttgatgacttctcaagatacacttgggtgttctttctccatgacaaatctgaagatgcatctatattcaagaagtttgccaagaaagcacaaaatgaatttgattgcaagattaagaagaatataagtgacaatggtgaagaatttgacacaccaacattcatgagttct

SEQ ID NO: 56302 - DNA, 424 bp, Zea mays
  unsure (1)..(424): unsure at all n locations
tgttctcttctttaggctacaagaggcctgcagtcattctatctatgtacatatttaaggtagattgtttggactctatttttgctaacattatatgttattttttaaattcttagattcttcttctttttgatagcaaccaggtattggtggtgaggtcgtgccgcaccaggataatacattcctttacacggaacctcgtacatgcacagggttgtggcttgcacttgaagatgcaacaatcaacaatggttgcctgtgggcaattccaggatcacataaaagtatttttaacacaattactttatgcctaagaacgtcttgaaaggcaagactgtctaagtttaatttttaacttttgtgttttgtattagagggtttggtgagacttatggtcagagatgaaaatggtacacattntgat

SEQ ID NO: 56303 - DNA, 338 bp, Zea mays
agctttgacaataactttaaaaggactttcttctgaagttgcaaagagaatgacattcgaagagcagttaattggaacaacctggaaaaaaaggatctacaacacccaaacacaccttcttggacccctctaaaagacccctacccaaatctcgggacgagattcctttaagtggggaaggctgtaacaccccaggtgttaccaaggccctgactccctacttgcactcatgacatgatatctcatgtggtttagtggaggagagggagccccaaaaccatggaaaccatgtattaactaagaatgtttatgacacaagcattacccaagcatttatg

SEQ ID NO: 56304 - DNA, 213 bp, Zea mays
ccccttcatgaagcttcggtaataccaaccgacctaaagatagaacgaccttttagtccataaaggtctgacacaatggtgtacacttttatgaagggcataactgtaattcctcacaggctgagtcctgtgcctataaataaagaacagcattcctttactagtcacacttttttcggtaattgcaatcgcatttcatcgaaaccaaccttt

SEQ ID NO: 56305 - DNA, 228 bp, Zea mays
gcgtggagcgcgcctaaggcaagattttcacagcgatcaagaaaatgattctcttcgacaagaaaggaatatgggccgacctgctacctgaaacactttatggactgaacaccaacgagtgtcgtgcaaacggagtcactctctttcttctgctataaagattagaggccatgacccccgcaagaaatcaaacatgggttcccgcggacaagcgctctctcagtaccc

SEQ ID NO: 56306 - DNA, 413 bp, Zea mays
ctattaattcttaagctctcacgaacaaaacctttatcaagaagatcttgcacttgctctttgttttccttagtttcttcaggattggctcgatatggtggacggttaggaagtgcatcccctggaataagatcgaattgatgctcaatccctccaattagaggtaatctaacccgtgtatcttgcggaaacacgtcttcaaagttctggaaaagatcagccacaacactatgaagagatgttatgttgttaggagaaatcacaacatctttgttcataagtacaaagagcacttgatatgggttgttcctcacttctctcagctcaaattttcgggctagcataactagatgtcctccctcttcctttcctttatctcttgaaattggcttgaagcactccctcatcgaatt

SEQ ID NO: 56307 - DNA, 391 bp, Zea mays
  unsure (1)..(391): unsure at all n locations
agctttcattcttcttcttcacaaatagtgctggacatccccaacgcgaagtgcttgggcgaatgaatcccttatccagtaattcttgcaactgcttcttcaattccgccaactcaacgggtggcattcggtagggcctcttggaaattggggccgttcccggttgcaactcgatggcgaattcaatatcccggtctggtggcattcctggcaattcatcaaggaagacatctgcatactcacataccactgggatcttcttcaggggtaactccgtcatagagaaagtacatgactgagaagaaccctgactatgcagaatcaaagtgaaattcccgcataaaggagaattaacttncacggtacgactggctacatcaagcacaacttg

SEQ ID NO: 56308 - DNA, 416 bp, Zea mays
tggcaaaagcactacataaattttataatcaccaagaagggattctatgttgaactgaatcaaacaattcagttttcgaaatctgttctgttagaggacagaacacatttaccactttgtagaattcataactcttaaactatcaggcctatggttatgaaattttaacacaagccagatcagaaaagcatctacaactttctaataacgatcgtgaacagatggaaacattatcttaagctaacaattcaaactctgaaatctgtatagaatttggacagattcagttactgaatttgtaaaaagcataactcctaaacgatcagacttatgccggtcaaattgtaacacaagtaagataatagaggtatctacaactttcttgtgaccaccaataacctatttcaacattaact

SEQ ID NO: 56309 - DNA, 320 bp, Zea mays
cagctttatgtgggtagggtcaatcaattgcttttatctgatcaaggcattattactagtagagagcccagttttaacatttacccaagttggtaacccaaaagtactatttccaaatagaaaaaataccagaaaccataattataatcatatatcacaatagaaatcggcattatcatcatcatcatcttgtaacaaaggagccctaattcaatgcgtctctaatcaatggagcttccttgcccatttataaccgcgagcacaactgatatatcagtttcataacactatgtagagggtgcgaactttacccacaagct

SEQ ID NO: 56310 - DNA, 359 bp, Zea mays
  unsure (1)..(359): unsure at all n locations
agctttatcaaatggacgtgaagagtgcctttctcaatggaccaaacaaggaggaagtctatgttgagcaacctcccgactctgaagatagtgagtaccctaaccatgtctataaactctctaaggcgctntatgggctcaagcaagccctaagagcatggtatgaatgcctaagagattttcttattgctaatggctttagaaacgaaaaagccgatcctacactctttactaaaaccatagcaaatgatttgtttgtatgccaaatctatgttgatgatatcatatttgggtctactaacaaatctacatgtgaagagttattangataatggtacacaaattcgagatgtctatga

SEQ ID NO: 56311 - DNA, 420 bp, Zea mays
  unsure (1)..(420): unsure at all n locations
tctatagggagaacacgtgatacgtctaattaatgttactcttctanaaagataaaccttgtgcatcttggtcagcttcaaaaccagtgggaagctctcatcatgccaaaaaagtgaagataacatcaagacccctggagttacttcatatggacctctttggacccgttgcctatctaagcatatgaggaagtaagtatggtctctgtatatttgatgaatnttcccgctttacttgggtattctctatgcaggataaatctgaaacccaagggaccctcaagcgctctctaaagagagctcaaaacgagtttgagctcaggtgaagaagataagagcgatatgggtccgagttcaaaacctttagtggaggagtatttgaggaggaaggattatacaccagttctctgtccctacaca

SEQ ID NO: 56312 - DNA, 445 bp, Zea mays
  unsure (1)..(445): unsure at all n locations
catgcaagcttgaaacttgaatgtagatcaatttacatttggtggctgcagaagctcttgcattattgatatggactatgactacagcttgtcgttctgcccttgaaagctatattttctgctactcccagttttttagtttgtagaagcagtactgaaggccctactggtatgtattataaagaatatttggcaacaaaaactggtatgaccctactgatggataaacagaatgtggtaacatgcccaaatctggtatgttttttggagcattgtaacagtgtgatttaattccatgccatccttgttccaactaatttgattgcttctctcaaatgcttaactgcagcacaagtcaaccagtgatgtaactgtataatcatgcacaaactaatttcttggtagatactctataagctattcaactagctgtccagtantactc

SEQ ID NO: 56313 - DNA, 383 bp, Zea mays
tctcctatccagaataatctatggtattccagacagacgatttatgatatttgtagatgaacttatgcacctgtgaaatgatcaattaagcaaactggttagtccaaaaggtttgggatggtcgtcaaacaccaaaatcgattataggaaatgttgagactatatccctttcagcgcctatagcatgagtctatgaaaaatcatgtgttaacccctgtgatctatagtcaattgcacaatagcccccaaaacttgtaaaccttgtagcttttgcataaagactccaatttaagtgattcaaattgcatactgttcatggtaatgctgtctgcttattaaaagtgtgttctctcactgtgttaatggcttcattcaaatgaata

SEQ ID NO: 56314 - DNA, 392 bp, Zea mays
  unsure (1)..(392): unsure at all n locations
gcatgcaagcttgaagccatggtaaggagcatatgccattattatattaatngactcacgcccagcgaccggggcatatgattcaccgaaatccctacacctcgacattgtgaatatactctggccacaagtcgggctttggtccttgtcaccacaccatgccacgactgcatgtagcggaaaacccacctgggtcctacacaattttgattaagacatggaaccaaatgccatacctcatttcttgtgaagatgctgagctcctcttgcatcgccaccactcaatccgagatttgaagagcttcctctaccccgtgtggctcaatagaggaaaccaaagaggaatgcccacacaaatgtgcaacacgagatactagggtgacccccttatg

SEQ ID NO: 56315 - DNA, 331 bp, Zea mays
gcatttgcaatctcaccaattgtataagaaacgaagacctatggttaagatctataccctcactacttaggttgctagagcttccgcgctcgctatggaacaagctgccccgcgcacacgatacgcatgagaaggcccggcgaaaggatgagggaacggacttatgtaaataatgacttgaacgagcgagaggataataagggtgtcatcatgtgccccatttggcagcgcttttgacttcggaaaccggagatagagatggatgaagcagccgacgaatgccaacgggctcttcgcgtaattcgtacgattatcgagtcgagggataaac

SEQ ID NO: 56316 - DNA, 237 bp, Zea mays
cacgtagatcttcaaaggcaatgggcggtgtaaatatcaaaactttgaccttgaagaatccaccccttagtagattcttggatacactacatgccctgatcaagatggatatagaattcccctttttttcgtttaaagaaatgagcactccaattcttgatgcatacctttagggggagctccccttcttatatcttgatcatatccagactaacactttctcttattaatctcata

SEQ ID NO: 56317 - DNA, 378 bp, Zea mays
acctgaggcacgccagcttcggccccatctatgttatggaatgcttttgaatctgtccagattccttcagcctttctggcagcttcctgacttccatgaatagcaataggcccttgatccgaaggtatcttcatgcaaagatatgctgggtgaagaattgcttcaaaagcattaagtgtcccacgaccaatgattgcatttgtggggtatttcatgtcaacaatatcgaacacaacttcctcagtccttgtattgttcacaaatccgaaggtcactggcattgtgatcttgccaagcgctacaatctgccttcctccaaagccacaaaaagggtgtgtagcatcatgaatcttatcctctggctctcgcatctgtctg

SEQ ID NO: 56318 - DNA, 432 bp, Zea mays
tgtcacgcataagctggaggctacccgcctcactatcaaggtcttggttgatgaccacgtcatcatgaaggccatgtgcgacaaggccatggataacgctgttcgcgcccggtggatcctgatgaagagacctgacgtcgtggtgcctgatgacattgtcggcgatgtcgtggccgtgcctgatgctgcaagccgtccatcttcttcttgtggtcctgcaaacgatgctttctgcaagaatactccagcgcaatgatttacctaaaaaacacttgtttattgagtcaacaccttctatagaaaagtgtaatgtgagttccgtatgtgtgcaacagttatgttcgaactgattgttccggcggcagcgtgctcaaaaacattcctgacactgtaagcgagatatttcttctttccaagtactcccgatttgag

SEQ ID NO: 56319 - DNA, 309 bp, Zea mays
agctctacctagttgattttgcaatagaagatgcccgtctatatgcatgcttaacggctacaacttgcatgggctggctgtggcatcatcgcttatcacatgtggggatgaaaaacctcccaagctttaaaaggagaacatgtgataggtttaaccaatgttcatttctaaaaagatagaccttgtgcaccttgtcaagcacggaaacaagtgggaggctctcatcacaccaaaaatgtgatgacaacattcagacccctggagctgctacatatggacctcttctgacccgtcgcctatctgagcata

SEQ ID NO: 56320 - DNA, 381 bp, Zea mays
tcgtctataaagacggtgtgttgacaaaaccatataatattttatggtttatatatgactcaaccgcccttacatgggtaaactattgtaataaaactagttagcaataatattttagactttgtgtcttaataatcacgttcccagatcaatgggatcgaggaacagaaacgtggtacgcgatacgctatataaactatgatttaacactacggaaacatgattgttcccacgttctcggaacggaacgaacattcctggaacgaggaatgtggccgaattcttagttcccggtttctaagctttgtattgacaattatgaaggtaagaatctcccccctgatctgtactatttatgggcatggaaccaatatctagttg

SEQ ID NO: 56321 - DNA, 420 bp, Zea mays
tgagggtctcggcgtatatgatgttgaggcagctgcccccgtccatcaagaccttggtgagcctgacgtcgccgacaacggggtcgacgacgagcgggtatttccccgggctcggcacatggtcggggtggtcggcccggtcgaaagtgatgggcttgtcggaccagtctatgtagactggcgccgccaccttcaccgagcagacctcccggcgctcttgcttgtggtgccgagccgaggtattcgccgcatgccctccatagatcatgaagcagtcgcggacctcggggaacccccctgctgggtgatcttcgttcttgtcgtcgtcgtgggccctgccaccctcggcgggtggcccggccctgtggaaatgacgctgaagcataacgcacttctcgagggtgtgcttgacgggcccct

SEQ ID NO: 56322 - DNA, 328 bp, Zea mays
agcttccacctgtgagaattattttctatctgcagtaagtgagcagtaagtgaggttgaatggaagcacgaatttaataaaacacaaaagcacttaatacaaaacatagagaacatgctactacaaaatcatggagaaaaataaagtaacatttcaacccaaatgtccagatgtaaatttgttacccaaaaatcttttttagtagtttcatagttagcttcttaaaccttaaaagcttggcaaaaagaaaaaaccaagcgacataggggaaaaccatgggagaggagtgggagatttacaaagtgcttatgtcgtcctcggctggatc

SEQ ID NO: 56323 - DNA, 433 bp, Zea mays
tgaactctatttacatttcattcgaaacttggaatttaaaaacctgatttgaaactaggattgaaatatgaaatcagaaaataaaaagaaaaagtagaaaaccctgtactgggccaaatctactcggtccacctcaccttcccctcggcgcggcccaccagtaaaaccattgcgctcggccctggatgaggtcgctcccgcgcacactgacaacacggggcccaccttatcagccggacgggtggctgcatgccggactcgcgcacggacactaccgcgctcacccgtgtttctctccctctgttgctgactggtaggccccctcggcagatagatcttcttccccatcgagcgcacctcaagaggaatcctaactaaatccgatttccacgccgcgtgagtcggatctgccaccaaccccatcattatccgg

SEQ ID NO: 56324 - DNA, 348 bp, Zea mays
atgaatctgcggtaatatccagccagtccaaggaaacttcggacctgatgaacagtagtcgggggtttccactccaaaatgtccttgactttgctgggatctaccgcaattcccctggcagacggtacatgtcccagaaattgaatttccttcaagccaaacgcgcatttgctgaacttggcatataactgatgttctctcaagcgcgttaacacgatccgtaaatgttgggcatgctcctcttcattcttggaatatattaaaatatcgtctatgaagaccaccgcaaacttgtccaactcgggcatgaataccgagttcatcacatacgtgaagtgggcacgagca

SEQ ID NO: 56325 - DNA, 407 bp, Zea mays
ctgctgcaacaaatgagaggtgaactgagtgcctctatctgatactatcttctttgggacaccatgcatgcacacgatccgagacatgtatagtttcgggcaacactgcactgttgtaaggggtcttgactggtatgaaacgggccggctttgtcaaacgggccactactacccagatagagtcatatccactacgagtgcgatgccaaccgactataaagtccattccgaactcatcctatttccactgaggaatctgcaacggctgcaacaaacctgcacgtctctggttttccgctttaatcctctgacaactggcgcatacaactacatactctgctattttccttttcataccgtaccaccaaaatcttttctttagggcttggtacatctttctactacta

SEQ ID NO: 56326 - DNA, 244 bp, Zea mays
tttatgagatcaagctcaaaaatgtgagcaggaccttcccccgagtgcaccgcgattaaggacgttgaaaaaaaaagtttcttagtggctccctgaccctcagctgaacaggaagcgctctcatcaactccgcaatcttacaagagggaaagatacaccttcttcaaatggctcaggtggacccgcattatgtaagcctttaatgaatgccggcacacagaggagagagaaaaaatctcacaaa

SEQ ID NO: 56327 - DNA, 380 bp, Zea mays
tacggaccttagaatctaagcttcagtgatttgaagtcccatgttgaattatacccacgtttaaattcttcatctcctggcacaacgtaatgtcagaagtcctcgtagttagacagtggcacgaggccttgcgactgagtgcatctgccactacatttgctttgcccgggtgataatggatctccagttcataatctctaataagcttaagccatcttctttgtctcatgttgaggtcagtctgggtaaagatatatttcaaacttttgtggtctatgttaatatgacagacatttcccaatatataatgacgccatatctttagagcatgaatcactgcagctagctccagatcatgaataggataatgcttctcatgc

SEQ ID NO: 56328 - DNA, 316 bp, Zea mays
agcttctgaaaccccatacttctggtcatcttccggcagacagataattctttgttgtctgggaggcggtataagaagtcatcttcgtctgtgccattgaatactaaagccccctttggatacttcaattctcaggcataatgattagcttcaaaaatctcttcttcagataatctttttcccgaagcatgtcgtacaatataatcaaaggctaataaggatgcttctggggcagcagtgtcagtttcttcaaccaaagatggctctactatttttatttttttggcttccaagggttttaccttggaaggctctg

SEQ ID NO: 56329 - DNA, 428 bp, Zea mays
tctttgaagcacacaactccttgatgacagaatcctttgtttttagtagcttaccaagtcgagacaattcagtctgggacgccctcagttcatcccgatgatggtccaggtctaacatggtgaagtgatgactcctatctagaatagtcaaggaattgctggcatcgcgatataatctgtccagattgtcgcgagaagcaaggagcgttcgtctctcctactgcgagcaagaatagcactaagcattgaagcaaagaaagcatagcagaagcagtcaagaaagtttacctcataagccatcttctccgagtcaatgtgagcattcaaagaagaattcaaggtgcgagcaaagtccaagaaggcagagacttggctcaagtcagcctggctctgggtatacttctactcagcatcggagcagcgctgag

SEQ ID NO: 56330 - DNA, 273 bp, Zea mays
atgtctaacctcaaaatctttttggaaaccttgtccaaaaatctcattaaattctcttctgctcaacatagaaactatctgggttgaagacatatcttttcacctaaatctaataaacctctaccgctatgaatcatgttgtggccctatcatccaaatctctggatctttaatgatattgcccttttatctggttatctgctataacccggtctcaaagtatcgatggtgaattaacctcaatctctcatttctgatcattctcataccccc

SEQ ID NO: 56331 - DNA, 381 bp, Zea mays
tgtttggagattttattaaactattttggccaagctaccattatctttcttgtagtttatttagtatatttcaatgtttataattggcctaagccatgattttatatttttcatgggcttttacccctttttctttatctctacttagatagcttgattagggttggtgttagggtttcaacatttttccctttttgaaaatcttatttgtttggaacatgatgctttatatatacacttaatagatattttcttcttaagttaatttgatgcttcatgctcaatttggctcacatgaaatgttgattcttgggttagcactgagagaaaccctatgtgacactggggtgtcacacatgttttattgtgattctctgtgtg

SEQ ID NO: 56332 - DNA, 200 bp, Zea mays
ctgcagcttgcgagaaggaacgattccttttcttggagctagggggggaagaagtttttctgaatgcttttgtgatgtcggtgaccgctacggcgttataagcttttttggaaggcctggcatctctttctaaggtcaggaggtacccactggcctatggggtgagctatccctaagtggatgatgaaaatcctgaccct

SEQ ID NO: 56333 - DNA, 369 bp, Zea mays
tatagaaaccaagcctccgtctagggcaataactcggcggtgtcatgtttgtacctactggcaagctgttttaaacgggaaaggactatgaagaatgccctaagaagaaaccccattgacctcctggtattctaccggctcgcccattatcctccttgatccacaataccagttttttttttaaccctcttatcttatcttactttgttcactgaccgtcttagatggtggtcttaatgatgtcgcgatctaaggggtaatcctcactattaattataagctctacacgttaatctaactcgaaattttttatccataaaatatctactaacctatttacattctattaaattatctggcttcatcttg

SEQ ID NO: 56334 - DNA, 443 bp, Zea mays
cagcagagttcttatctgccgccagcgccatagggcaaaggcgccaggggcttctggggaaggtttggagaccacccaaaaaaaatatattgcctattctgtggtgaagacaagggccatactactaggatgtgccatgttaccatccagaagcagaaggaaatagcggaagcagcagcgcaacagagtcagccgaagcaggtcatgcatactgcttcgtatcactcaccttatattccacaatatgtaggcaaccaccctgcagcttctgttgcttcggcgagccaaccccaagcatcttggcagcaaccttcaccgtcaccgccgacccagcgaggacaacagccagaagggagtcagcacaatcatcttcagagggatttcagagaggcgttcgaagctcgcacagtcaacagcactgtgccagagtcacagcacattta

SEQ ID NO: 56335 - DNA, 433 bp, Zea mays
tgccttcgccttagtatatcacccgcagtccaacggagttgtggaacgagccaatggaaaaattttcacaactgtcaaaaagatgcttctcgacgaaaaaaagggcaagtgggccgattttctacctgaggcggtctgggcgctaaacacgacagagtgcatggcgaccgggtttacccctttctgccttctatatggatcggaggccatgaccccacaagaaataaaacatgggtcccagcgaacagttccgtcagccgttcctgacgtggacgagcccacttcgaaggatctcatcgatggagaccgagtcttcgctctataggctctaaacaaataccaagcccagacaaaagcatggcgcgaccacgcagtcatcccgagagaattcagcgaagggggcctcgtactcgtccgaacagcacggacagag

SEQ ID NO: 56336 - DNA, 329 bp, Zea mays
tgctggactttggatggagccaatgagctgggcagccttggtttatctgggtcttttaaggctgagttattttgacgcaatataatattccttttatgtgagtgttttggcccgacctagctgggtatttctcgtaacactttttctttctcttttcttatttaaatagatgtgcagttctctcgcatgcttgagaaaaatatccttttagggctagtttggaaaccctatttttccaagggtttttcgttttcccaagggaaattagttcattttcccttgggaaattggaaatcccatgggaaaataagggctagtttatctcttcc

SEQ ID NO: 56337 - DNA, 427 bp, Zea mays
  unsure (1)..(427): unsure at all n locations
cgcttgacaatgaggagatggcgctcggcattaagagcttccgccaaatcctcaaacaaaggagggggaaagactacaagtcccgcttcaagaaggtttgctacaaatgtggtaagcccggtcattntattgctgaatgtcctatatcaagtgacagtgaccgaggcaacgacaagaaggggagaagaaaggagaaaaagaagtactactagaagaagggcggcgatgcccatgtttgtcgggagtgggattccgacgaaagctcaagcgactccttctacgacgaggacgccggcaacatctgcgtcaccaagggactttcttttcccaacgtcggccacaagtgcctcatggcaaaggatggcanactgaagaacgttaaatctaacttctccactaaatatgagtcttctattgatgataatgg

SEQ ID NO: 56338 - DNA, 438 bp, Zea mays
tcggccttcggaggccgaaggttgaaatgaatgaagctgcctaagaatgccatagggccttcggcgcagtctgctctttcattggaacgagagacttagtacaagagcatattgccttcagggtatggccgcttgcggagaaatgggagatgccacaagaaaccttaaaagaagccgacgaaggtggacttatcatgttgaagtacacttttaaatttggagataaattcgttgagccagatgatgactggttaaaaagtattgaaaatctaagtgatgaactgcttggggcttactcgaaggccgaagacactgcaatgtcagcagccttcggaggccgaaaaaagaagaggttgaatcgggtatttgatgcaatcgggtttgtctaccctgactattgctatcccattcgaaggcagaaaaggaaaaatacaacct

SEQ ID NO: 56339 - DNA, 295 bp, Zea mays
gcttatctatttgcctctgaaggtagctagacaagttatcttctccttctttcattgcacctggtgatgaagcatctccatgttttggatttcctggtccaagtcgtcctccggaggcgttggactggtggccttcctcttctggcttcgggcctccctaagagaaaggacgtcctgattggggtccaaccgctgcagagtggtagtccctgtcgctgaagcttttttcggcggcatgacgaaggtgatgcttgccgaaggtgttcaaagctcaagaaatagaagtgagttcacc

SEQ ID NO: 56340 - DNA, 437 bp, Zea mays
tcggttccatctatgttatggattgcttttgagtctgtccaatttccttcggcccttctggcagcttcctgacttccatgaatagcaatgggcccttgttccgaaggtatcttcatgcaaagataagctggatgaagaattgcttcgaaggcattgagagtaccacgaccaatgattgcattgtaagggtattccatgtcaacaatatcaaacacaacttgttcagtccttgtgttgttgataaatccaaaggttactggcattgagattttgccgagtgctacaatctgccttcctccgaagccgcaaaggggatgtgtggcatcaagaatcttatcttcgggctcttgcatctgtctgaaggccttagcaaatattatatctgctgcactgcctgtatcaaccaaaacattgtggaccagaaatcctttgataac

SEQ ID NO: 56341 - DNA, 384 bp, Zea mays
  unsure (1)..(384): unsure at all n locations
agcttgtgaacagtataagttcaaatgagagatagctgcttcgactgatcagccgaagtccatgcttctatgtgaagacatatcagagcagaaggtgttgctggggtcccaattatctgaagagcaggagaaaaccttgataaggtttttattctataacaaagatgtttntgcatggtcagccaacgatctctatggtgtcaacagggacgtcattgaacattcactcaatgtcgatccatccttcagacctataaagcanaagcttcacaaatgtctgatgataaagccgaaggtgctcggaatgaagtaaaaagacttctcagtgctagtgtcattagagaagtaaatacccagaatggctagcccacactgttatggtga

SEQ ID NO: 56342 - DNA, 358 bp, Zea mays
tctaaatatgtcgaggtgacacatgatgagggtgaattggtagttacgaaggtcgcagctaagcaacttcgtcggttgcccatcattcctcggctttcaaggcttttcctcaacaaggaaatagctctgcatatgacgtggccaaagaatggtgtacgtttcgtcactgatccagacataatggtccatccgccggacggtgatgcgtggaaggcatttgacgagtttgatcccgaatttgcaaacgaccctatgagtgtactgcttggtctatcgacggacggattcacacctttcaataccagtgcaagcccttactcgtgttggcctgtcttcattgtgccatataatcttcctc

SEQ ID NO: 56343 - DNA, 410 bp, Zea mays
  unsure (1)..(410): unsure at all n locations
agcttgtgaagattcttcatcccaacatgggctattcggcgatgccagagccaacccatattagtcttagcaattaagcaagtgtcgagttcagctctattgaaatcaactaagtatagctgaccctccaacactcccttaaatgctactgaatcatcacttcttctaaagacagtaacacctatatcagtaaatagacagttgtagcccattttgcataattgagaaacagaaagcaaattgtaatctaaggaatctacaagaaaaacattggaaatagaatggttaggtgatatagcaattttaccaagtcctttgaccaaaccttgatttccatccccgaatgtgatagctctttggggatcattatttntctcgtaagaggagaacatccttttcttctcagtcat

SEQ ID NO: 56344 - DNA, 254 bp, Zea mays
  unsure (1)..(254): unsure at all n locations
ntcttcggtggcatgacgaattgtaatgctcgccatctagtattttctacaagacctaccgcgagtaggcgcaaatgatggggaacttcgcctcaaatgccacgatcccttaacacagtatcatactcaatgttaaactgttaacacccttatacctccgaggaactagtttcctattgctatacatatcttacgacaaacgtgttaaatgacaagcctccatcatcgcttcataccatcaatatcatgagatc

SEQ ID NO: 56345 - DNA, 350 bp, Zea mays
agcttgtgaagattcttcatcccaacatgggctattctgtggtgccacagccaacccatgttagtcttagcaattaagcatgtgtcaagttcagctctatcaaaatctaccaagtatagctgaccctctaacacacccttaaatgctattgaatcatcacttcttctaaagacagtaacacctacatcagtaaatagacagttgtatcccatttgacataattgagaaacagaaagcaaattgtaatctaaagaatctacaagaaaaacattggaaatggaatggtcaggtgatataacaattttacccaatcctttgaccaaaccttgatttccatccccgaatgtgat

SEQ ID NO: 56346 - DNA, 406 bp, Zea mays
tgtgacatcaacatcaaaaggaatcgaaaaatggcgttgagcggcagcactgcattgttgtctctataatcgccttgaattgtatcaacggagattgcgagcagcagttatcttgaacaggcaggacctggccctagaatgcagcctgttgcatgtcgtgactttctttctattgttcgtcagctagtagctttgtatttaggtaggatcctgagataatacatattatttctggtcgatatttattagttgcattgaactgtattctgggttgctcatcacttatatgttaaattggaggaaaattgatgctatgagcttcaggtgaatctgtttcgtgcctgttttctttcacccttctgatatcagtgtgtggcctgcaatttgtgtcttgactgactgtctc

SEQ ID NO: 56347 - DNA, 361 bp, Zea mays
agcttgccaagccctcggacccgaccggactttaccggaggcccgagatcaacctcaccggacttcggtcttccgccgccgcgcgtggaccgagctatccagggagtctccgcccgattcctttcgctcatgtcttctctggcatcccgtggacctccctgacctatttgattgaactatctcgccgcgaccaggccggtctcctcgccgccgacgagcatccccgcctgcgcgcgtggaccgaccgactccggccatcttcgacggtgtttcgcacaccgttgtgatccccgcgacctccccttcaccctcgggcactttaacggaacagtctcgccgccgggtagcccctccgcccttt

SEQ ID NO: 56348 - DNA, 431 bp, Zea mays
tcgcgagagagggaacgggtcctaagtctcctgagaagtcatagtgttgcggagtggagctcgatgcttgagtgagtccgtctccgtcgtccttggtgcccgtgccctcctcctcctgagaaggccctgggcatcccattttatagatacaagcggatggtccagctgtacatatggggggtgttgctatgtgctaacgtggccagaggagaagtgctcgagccctgtggaagcgtaactggcggagcggtcctaggtcctgctgacgcttctttgccttcgtagagagcttgaggactattgacgtcatggacgcacgcggagaaccatcattacctgttgccggagtaatctagatgtgactccagtcttgttccttcgtagcctgaggcggctagctagaggtagggtaatgatgtatctcctgtagc

SEQ ID NO: 56349 - DNA, 338 bp, Zea mays
  unsure (1)..(338): unsure at all n locations
cccaattccttctgccggtgtggcagcttcttgactttcatgaataaccataagccctcggtcctaagggattcttatgcatagaaatgctggatgaaaaattgcttccaacgtgttgaatgtttcccaccaatgaatgcattgtagggatataccatgtccacaatatcanacacaacctgtgcagttcttgtgttggagacaaattccaaagtcactggcattgtgattttgccacggctgaatttcctttctcgaaacacagagaggtgtgaacatcgggttttatctctggtttgcatctgctgaagccttagaatatatatcgtgactgctgt

SEQ ID NO: 56350 - DNA, 445 bp, Zea mays
acacttgaatactaacttcatctttcttcttcacaaacaggactggacatccccattgtttatacttgagcgaataaatcccttatccagcatctcctgcaattgcttcttcaattctgccaactcagcgggtggcatacggtaaggcctcttggaaattggtgtcgttcccggttgcaactcgatggcaaattcaatatcccggtctggtggcattcttggcaattcatcacgaaagacatctgcatactcatagaccactggaatcttcttcagaggtaactccgtcatatagaaagcacatgactgagtataactctgacttggcagaattaacgtgaagttcccacaaaacgaggaattgatttccacgatgccgctggctacatcaagcactacttggtgcaaggtcatccattagcttccagaataatgtccacatttt

SEQ ID NO: 56351 - DNA, 425 bp, Zea mays
taacgcaaaacttgaggctgaagtccaaaaaagttctgatttgaaaaaatcattgacaagccttcagaataaatgtctggagttcagcaatcgatgcgttcaacggctgaagcatgtgttctattttgttggagccagcagcgagaaatttactccttcggctgaagacctgccaggtgccttcgagcatatcgaaggtgaaattgatgactgaaagggaattaggcttacacctagttcctaattaattttggtggttgaattgcccaacacaaacaattggactaactaagtttgcccaagtttatagattacacaggtgtaaaaggttcacactcagccaataaaaagaccaagttttggattcaacaaaggagcatagtgggaaccgaaggccctctagtctgagagcaccggactgtccg

SEQ ID NO: 56352 - DNA, 379 bp, Zea mays
tctccgaaggcatgacggtgttggggatggctctgctggtctgtctacagtggcagaagggttgagcggccgcgggctcgctgtgcacgggcaacggcgacgagctaacttctgtgaggtgtggagggtgtgccgaaaggtgtaatcgaaacctgggaaggatttataagctcgggctcgggccacggtgcgggtttggctttggcgccgcgcggggcgtgcgatggcgcgcgcgaacgtgctctggcgcgggcagaaggcgtcgaacacgtggcagtgagtttcttcccatgttcaaacgccttcagagatcgcaaacgtgcgaatctcgccatgaatccggcgcagaccttcttctggccctaaggctatttcacat

SEQ ID NO: 56353 - DNA, 455 bp, Zea mays
  unsure (1)..(455): unsure at all n locations
agctntatcaaatgggcgtgaagagtgccttttctaatggatcaatcaaagaagaggtctatgttgagcaacctcccggctctgaagatagtgagtaccctaaccatgtttataaactctctaaagcgctttatgggctcaagcaagccccaagagcatggtatgaatgccttagagattttctcatcactaatggattcaaagtcggaaaagccgatcctacactcttcactaaaactcttgaaaatgacttgtttgtatgccaaatttatgttgatgatattatatttgggtctactaacgagtctacatgtgaagaatntagtaggatcatgacacaaaaattcgagatgtctatgatggggagttgaagtatttcttaagatttcaagtgaagcaacttcaagagggcacctttctaagccaaacgaagtatacccaagatattctaaagc

SEQ ID NO: 56354 - DNA, 478 bp, Zea mays
  unsure (1)..(478): unsure at all n locations
nggaggcgtcaattggttgtctactcggtgtagactccttcttcttctcctccgtcgccttaaatgccaccggttgtgcttcggacgtggagggatcatcaagctcgttgatcttctttgagcccttgatcatacattcaaagctcacaaaattcccgataacttcctcgggggtcatggatgtatatctaggattaccacgaattaattgaacttgagtggggttaaggaagatgagtgatctaagaataaccttaaccacctcgtggtcatcccatttcttgctcccgaggttgcgcacttggttcaccaaggatttgagccgagtgtacatatcttgtggctcctcccctcggcgaagaccgaagcgaccgagctccccctcgatcgtttcccgctaggtaatcttggtgagttcaccaccctcgtgcgcggtctagagcaagtcacaaatctnctttgattcttaaccctgcac

SEQ ID NO: 56355 - DNA, 457 bp, Zea mays
  unsure (1)..(457): unsure at all n locations
agcttagcaacttcaacactctntnttggtttttgctcgaagactcaattgtcttcaagacgtctagtacatttaccattcttttcctttttggggtcactgatggccccttctggttttttgctgtttcaatatttactgcacgactcaaaacttttaatgttttttccttactcggctccttcgcttcttccatattttctgaggatggtgcttcagccatctctgcagtttctggcagcaaggttggctgttcagcttctgtggccgaataaacttctccggtgaactcatgcaccgaagctggttcaatataacgcggccgatgcgtaagaacctttatctttttccttttctgttctggctcgctaggagcagctagcagcttctctttagcagagattgtgttcattctttctgcctccaatgggatccagtaatcaggcagacaacccat

SEQ ID NO: 56356 - DNA, 474 bp, Zea mays
  unsure (1)..(474): unsure at all n locations
tgtgaagattcttcatcccaacatgggctaattggcgatgctagagccaacccatattagtcttagcaattaagcaagtatcgagttcagctctattgaaatcaactaagtatagctgaccctctaatactcccttaaatgctactgaattatcacttcttctaaagacagtaacacctatatccgtaaaaagacagttgtagctcattttacataattgagaaacagaaagcaagttgtaatctaaagaatctacaagaaaaacattggaaatagagtggtcaggagatattngaaatttaccaagtcctttcaccaaaccttgatttccatccncgaatgtgatagctctttggggatcttcgntnttctcgtaggaagagaacatccttttctcccatgtcatgtggttggtgcacccgctatcaattatccaacttgagccgccggatgcattaacctacaaaacaagtt

SEQ ID NO: 56357 - DNA, 413 bp, Zea mays
  unsure (1)..(413): unsure at all n locations
agctctgcatcaaaatcaacatcgcgtgctttatactttctgatcntcggaagagatcattatttaatttagcaacttcagcttgggcttccagcaatgaaccctacattgtctgaaggagaaagtctctcttttctagagaggctccttgatctttaatttcttttccagccctcgatataatctcatcctctgtatcctccatatcttgctgcatcatcagcgctntagctaatagcatactctgtacgaaatagccttcattagaaattgtttgtttcataaccaagaaataaaagatgaggaacaaagctttaccttaaacgtggaatacaataagctgccaacgatatgctcgcgncagtagctgctgatgtcagcttcaaccttcgaacaccaacactctttgacag

SEQ ID NO: 56358 - DNA, 420 bp, Zea mays
  unsure (1)..(420): unsure at all n locations
tcagcttcatttatgttatggatagcctttgaatccgtcctactccctttacaccagctggcagcttcttgactcccatgaacagcaatgggccctngatccgaatgtatcttcatgcataagtatgctggatggagtattgccttcgaaagcattaaatgtccctcgaccaacgattgcattgtatggatactccatgtcaacaatgtcaaagacaacttgctcagttcttgtgttgtggatgtaaccgaaggtaactaacattcgtattttgcctagtgccacaatatgtctgtctcctaagccacacagagggtgtggtgcatcatgaatctttgactctggttccagcatctgtctgaaagcctttgcaagatgatgtctgctgcactgtctgtggtaaccaacacattatggacc

SEQ ID NO: 56359 - DNA, 457 bp, Zea mays
  unsure (1)..(457): unsure at all n locations
tcaagcttgggaatccaacactcttcgacaggtttgttatatattttgcaccagcacgatcgtggatgcatcccaggatttcttcgtcgaccccaccaaatagtatcgacccaggctggtaaccacacgagatcacaaattcccttaactctgatttgtcctcctcaaagagttgttggccgcccaggtgtcgtaggtcgaaattcattccctctaaagaggtttcatcaatctcttttcccttgtctgaaatggttgtgaccgcctcctattccacagccacatctgatatcagcctgtcgatctctgacagagtggttgcaagtntttcaccttcgactgtagaagtggcttcggcattagtagggttggcagctttgcttaacgaagttgaaggagggtttgtcaatcgcttgaatatgttacaatgaccgttcttttggcccgtctttccttt

SEQ ID NO: 56360 - DNA, 449 bp, Zea mays
  unsure (1)..(449): unsure at all n locations
atgatatttataaaccttatgtgaagttagacatgatttgtgtctatgttgatacctaaacctcaaaaccctaatattctaagtagtgcctgccctatgaactaaaatactgacttcaaaaaccctagtttcctgttgtaccgtgaaggaaaattgtattcaagacctaatatgatgtacctttattcttgttgcattttcataagcattacatgagcattcatggttatttatgatatatatagagaacgaagaagaagtagtggttgaagaagaagaagttgcaccaccaccacctgaagacccacctgccgggaactgctnttattntgatatttgtggagcagaacccgactcttctataacacaaggcaagccctgtgcatttgccacctccttgctttntaaaatctttctcacttgcttgatgcattacgtgataggagttg

SEQ ID NO: 56361 - DNA, 469 bp, Zea mays
  unsure (1)..(469): unsure at all n locations
agcctttgcatcctcgagcatgctagcgtatgttttgtttgttatgaanctacngcgagtctcccagagaacaatacgtgtctgtacgctcagcaacaataatagggtgctggtggtttgacgtctaaaatcgaagaaatatcttcattctctcttcctccaccaagcaatatctaatttactccacgattcttatttttgcacaccaactaatcctatagttaaatcttaagactatggcacaactcgatttgaatttaaactaccaaagttttgaatagttagtatttgtctaaattttaaatccaaacatacgctagtctgagttaatgtggcacgagccacaaaaacctaacataatttcttgcgttacgatttagacgaaaaacagatagaccggattaaaacgaaatttaggctacacataataaattttcatagctactgaaacagaataattatgaatact

SEQ ID NO: 56362 - DNA, 207 bp, Zea mays
  unsure (1)..(207): unsure at all n locations
atttgcattttntattttctncccccggttgtctgtcctatcaatactttttaatactaccagtcacagtctctagggcctgctatcagggggacctgaaaataaaaaagatcaccaactaagaccacaattttcttactagctggggatggaagatacttaaggcaaatgagcacttgtaggtgaagggaactgagcagagggggg

SEQ ID NO: 56363 - DNA, 205 bp, Zea mays
  unsure (1)..(205): unsure at all n locations
atcaactcagcatgcggcgtaaaagggaaacaattnagactttcatttgtcatcctgagaaagacagagtgtgtatcgcacgccaagcaagacagcaagttggtgcccatcatccacacaagaacatcatgactaccgacacggcgctcgagctactccacatggatctattcggcccgagcgcttacataaacatcggcgggag

SEQ ID NO: 56364 - DNA, 421 bp, Zea mays
  unsure (1)..(421): unsure at all n locations
tagatactcaagcttcaatcgatcaccgcccacagagactccatctgtgctgtgcgtctacaccgactgccatggcaccggcaccaacaactccatctatgcagcggtgcgaggtggaatagcgccaaagctanggccagcgtggttcgacgggtgctctatggatgggctctatactagggggtggctgatgcatgggcagtggggcgacatggattcgccagggggacgccagcagagccggctgctcctcatgcggacgagggggtgagcagatcggaaaacgatgaatgacgatggcaggatctcggattctgtggcaaacagacgggactctggacgccatatgtggaagctgcaagcggtgttaactgttggcggagcgctgaaaccctgctggcgctggaagcggctggacact

SEQ ID NO: 56365 - DNA, 459 bp, Zea mays
catgcaagcttcagtgattagcaattccatgtcgtatttttcccagggtcaacttctccatttcttggcatgacgcgatgccagaagccttcatggcaacacaatgacagaaagccttacgacttaatgcatctgccactacattagctttgcctgtgtgatagcgaatctctaattcataatccttgatcagctcaagccatctctcttgtctcatattaaacgctgactgggtaaagatgtacttcaaacttctgtggtctgtataaatgtgatacacattcccagcagataatgacgccatatttctagagcatgaaccaccgcatcttactctaggtcatgagctggataatgctcctcatgccggcgtaactgccttgaagcataatctattactcggacttcttgcattataacacagcctagaccactgcctgatgcgttacaatacacaat

SEQ ID NO: 56366 - DNA, 455 bp, Zea mays
agcttcctaagattctgtctgatcataattttcttattattgagtctgaaaaacagtgtaagagatcacattcgtgcttcatttttgagattggttggttatctcatccaaattttaaaaaatagttgaagatatttggaacaaaccatgccgagctaaaagtgcattggataaaatccagcaaaaactgaagttatgcaagcaatttcttaaaggatgggattggaacttaaaaggggaaagaaggaaaaagagagatcagattattcatgatctgaataggctggaaatggatgaagagggcggttctcttaatattcaacagcttgaagcaagatgttatcttatgaaagaagaatttctgatgattgatgaagatgaattggtttggaagcagagggcccatgaaaactggcttatgcatggggatggaaataatgaatatttccatcgca

SEQ ID NO: 56367 - DNA, 443 bp, Zea mays
  unsure (1)..(443): unsure at all n locations
ctataaaactcagcttctaagggagaacacgcgataagttggactaacgtgcaattcgaaaaagatagactntgtgcagcttgtcaagcaggttaacaagtgggaggagcacatcacagcaagaatgtgatgaccacttcaagacctctggagttgctgcatatggacctcttcggacccgtcgcctatctgagcataggaggaagtaagtatggtctagttattgttgatgacttttcccgcttcacttgggtgttctttntgcaggataagtctgaaacccaagggaccctcaagcgcttcctaaggaaagctcaaaatgagtttgagctcaaggtgaagaagataagaagcgataatgggtccgagttcaagaaccttcaagtggaggagttccttgaggaggaggggatcaagcacgagttctccgcttcctacacacc

SEQ ID NO: 56368 - DNA, 457 bp, Zea mays
  unsure (1)..(457): unsure at all n locations
agcttatgaagattcttcatttcaacttgtgtttttcggcggngccagacccaacccatgttagtcttagcaattaagcaagtgtccagttcacttctatcaaagtctaccaagtatagctgaccctctaacactcccttaaatgctattttatcatcacttcttctaaagacagcgacacctacatcagtaaatagacagttgtagcccatttgacataattgagatacgaaaagcgtattgtaatctaaagaatctacaagaaaaacattggaaatggaatggtcaggggatatagctattttacccaaacctttgaccaaaccttgggttccattcccgaatgtgatagctccgtggggatctcggttttctcgtaagaagaaacatcctcttctcccaagcatgtgggttgcgcacccgctatctatgatcttacttgagcccccacatgcat

SEQ ID NO: 56369 - DNA, 458 bp, Zea mays
  unsure (1)..(458): unsure at all n locations
tgttgtctntctccggggacttcattttccttacaatgagactactacatganatagacttgaaaacagatattagtctcaaagacttagattatagagtaatctccccctgaaagtgtgcatacaagttttgaatacttgtaggagacatgcactttgatttgatatcaagaggggcagattatctataatccgagctttggcacatataagttaaatgataccaattgtaggatataagctnttgatgcattagtgtcatttacttagggatgttaaataagctatgtgacgtgcttaattaaacattttaaaccatgtaggtttgctcaagaatatgaattgagaacgagttaccctaccatgtgatttacctagtatgcatgcattgttaatctaaagtaagtaccaaatgaaatactaggcatgaaaggtaaaactagatacatgaacataga

SEQ ID NO: 56370 - DNA, 389 bp, Zea mays
  unsure (1)..(389): unsure at all n locations
atctctcaacatagactctctatggaggaacgcaacacaagagatgacattatttgcacaagcnntagagatcttattgagcaacccttctttatgtggaaggcaggtgagtagctaaaaataaagaaacctcataagatggaccaaatcgctctgnagccccgaacaccntacactattgaatgacatatactcagatatgcatggttatgtaatgaaggccaaagggctaatttaagccatattatggcgagtgtctaatatggaagaaccaaactcaaagtaagtagagagagataatacatcacatagtcttcgaatattgatcatattcatatgataagagtcatctctcttccgatcggacccttatttcataatcaacaact

SEQ ID NO: 56371 - DNA, 481 bp, Zea mays
tataaacatcatctattcacattggcatcattacattacatatattttcatgactagtactaataataccttgctagggtctgtgatgtatcgtccgtttattctcataaactcgcaagcattgaacccatgtaggaccgatccttgtggtagcttgtggcactacatacataacatgagagaccggttatttaattgcagcattgtgtatgatatgtatccataaattcacatacttaccggccagtgatgatggatgtctagtagaacacattctttggtctcgtcgtactttccacctttaaacttatagaacctaaatgctctgtgatctcaagtagaatctccatgttattttaaaattctcaatgatataagtatgcatgcatgcatagacttactgctctaatatactaagggaatttgcataggtagaagggcatagttcaggagtcagcaccacacctttcaacctagataa

SEQ ID NO: 56372 - DNA, 318 bp, Zea mays
agcacatcacagcaggatgtgatgacacattaagacccctggagctgctacatatggacctcttacgacccgtcgcccatctaagcatatgagcgaagaagtatgggctagatatagctgatgactttccccgcttcactagggagaccttttacaagataagtctgagacccaacggaccctcaagcgcttcctcatgagagctcaatatgaagttgagctcaaggtgaagaagattatgagcgacaacgggtccgatgtcaagaaccttcaagtggaggagttcatcgaggaggaaaggaacaagcatgagatctc

SEQ ID NO: 56373 - DNA, 434 bp, Zea mays
  unsure (1)..(434): unsure at all n locations
acactactgtttttaccaaatgtgcttacaatggtgattgtttgtcttggtattcaaaatgatatccataacggatatgatgaatctgtgatagaatctaaaatttcagatcattaatgaccatcagttatgaattgtcatttccaactaagtatggctggagtcaagaagttttgcacgctcctgacttgtgatgaactgcatgtactgcatgtacaagttcccctatggttttagtacgtgggaatccatgaaagatttcccatgcgtacattaagatgttcccaatcttaccaccgcagcgtacatgtatgggcacacagaatactgtggatctatatgagaattcattctccgtcgatcattaagtttcagaatctcttcatgagaatctnattacggcccgtacgcttgcttgaatcatgagcttttcc

SEQ ID NO: 56374 - DNA, 482 bp, Zea mays
  unsure (1)..(482): unsure at all n locations
ctcagcttctaagggagaacacgtaatatgtctaaccaatgtaactttcgttttatatagaccttgtgcagcttgtcaagcaggtaaacaagtgggaggagcacatcacagcaagaatgtgatgaccacatcaagacctttggagctgctacacatggacctcttcggacccggcgcctatctaagtataggaagaagtaagtatggtcttgttatagttgatgacttttcccgcttcacttgggtattctttttgcaggataaatctgaaacccaagggaccctcaagcgcttcctaagaagagctcanaacgagtttgagctcaaggtgaaaaagataaggagcgacaatgggtccgaattcaagaaccttcaagtggaggtgtaccttgaggangaagggatcaagcacgagttcttcgctccctacacaccacaacaaaatggtgtggtagagaggaagaacatgacgcttatagaca

SEQ ID NO: 56375 - DNA, 466 bp, Zea mays
  unsure (1)..(466): unsure at all n locations
agctntcagttgtttcaagaaggtgaaagttcttctgaaactgagtcaggtggcagactcaaggcatttcgtagtgacagaggtggtgagtttaattctattgacttcaaggagtactgtgatgagcatggcattaagcatttcactaccacgccatatacgccacagcagaacggcgttgtcgagagaagaaaccgcactgtggcggaaatggcgaggtgtttactgaaaagcaagaatgttccaggggatgtttgtggcgaagcagtcacaactgctgtgtatctgctgaatcgagctccaacgaatagcctacaagggaggacaccttatgaagcatggcataacataaaacccaaagtacatcatctacgcacatttgtgtgtgtagcttatgtcaagaaaatacgccctggtgttttgaagctggcagacagatcaacaccaatggtgtctattgggtatg

SEQ ID NO: 56376 - DNA, 453 bp, Zea mays
  unsure (1)..(453): unsure at all n locations
tgacacttanaaactcaagcttggacatcctttccatgtgatttctgctcagtttgatgtctaccctagtctacttgggcatatgccagtcaatatgtggaagaagtgtgtcaataatatgcttcttgtgcttgatatacttgagcagtatcctaacattgtagtagacatctcatttgagcctgatgagaaggaaactcaaaagggtgtatactatgatggaacgatacatgttgtcagtgatctggttgcattccttgagaggctggactctgaatntttcaagaccttacagtgcacagatccgtacacaaaagattatgttcagaggcttagagaggaacccctgtttttggttgttgcacaaaatgtccaaggttatcttgagagggtggggaacctcatatctgctgtcaatgttgcgctgcgttgtgttgaactggttactacaaa

SEQ ID NO: 56377 - DNA, 390 bp, Zea mays
  unsure (1)..(390): unsure at all n locations
agcnttttgcagatagccttcctcagctcctatattccagcattaggcgtgtatcttgtggccccatctctgatggcatttatcccagcctggatccaagcaacaaaggaagatattcaacctaacttcctacagctgctactaatgttagcaaacattgctctgggctctgccctgagattcagagttgctatgatccaaacgaaaatattgctacatgaaccggcgaaacaaagtcgtcgtgaaggtatttgcaattaaactggctagcactcttacctaacacagctgttcgttcctagtgttttccccctctctctccccgagcacccctcccttcgcaaaccaaccagttaagaagggcgctctcaattctcacctcggcgatca

SEQ ID NO: 56378 - DNA, 473 bp, Zea mays
  unsure (1)..(473): unsure at all n locations
tggtagtgcacccataggacccactaactaggatcttttattctttgattcacgcaacangacctgcaggacttataccgggaagccaatccatgtgtccggaccacctggatcacaactccaaatactatggcacccgtcgtagagtagtggagcatgtangcttagggtacgggaccaggctaagtggctacacagctccggaccaccccaggggacgtgtgtccgtcctctagaaccgaaccctangttgccggacccataggactatagttccaaatactgcggtacccatcatagacgggtggagcgtgcangcttagggtacggaaccaagctaaacggctacacagctccggaccaccctatgaganaagtacttgttctctagaactggcccccangcttgtcggaccctcctaccgagggatcccacactgcaagcctggctactcaattcngatgtcattata

SEQ ID NO: 56379 - DNA, 378 bp, Zea mays
  unsure (1)..(378): unsure at all n locations
ctaagtccttcagcaaatgttgagacaataataaaccatattgggccagcggtgactccgaaaagaaagaggatggtcaatgtgttagatgttttggaaacaattaagtcctcaagcacaactccgaagaagactgttgcaatttccgaagcaaaaactgaaatttctgatactaaggctcccaagccaggaactgaagctgaagctgggccctcagagcctacaaaggtaaaatccttggaaaccgaggaagataaaataacggagccaattcttgttgaagaaatcagtgttgttgcccccgaagcatccnccaaagtccttgattatattgttcgtcatgcttcggggaaaaaattatcaganaaagagaagcaa

SEQ ID NO: 56380 - DNA, 425 bp, Zea mays
  unsure (1)..(425): unsure at all n locations
agcttgttagaaataatcataaagcgtcactttggttgaactcaagtgggatccaaaccctaagagtgcaagaaaccctaattggaaccctagaaaaccctaaacctaaaccctaaggggctaagtgcaaaattagtgctcctttggactaaagtgcaaaaaccatgataataaagtgtcttaagtcatatggttcacaaataagtaggtttgcaagttaaaccttgagttttggactaatttgcaaaagagccacacttgaaccctattgactaagtctgaaattagtgtaattagctcaactgtggagccttatatctgccaaattataaggtttttgccctaagtcaccatatcaatttggtagatctatcatangagaataactttgatatagacatcctcttcggttgtacaacaaaaat

SEQ ID NO: 56381 - DNA, 459 bp, Zea mays
tgaggctgtgtatagattaccgccctcttaatgcggtaactatcaagaacaagtatcctttgcctcgtattgatgttctttttgaccaattggttggggccaaggtattttccaagatagactttcgctctggctaccatcagatcaagatacgagcaagtgatattccgaagacgacattctcgaccagatatgggctatatgaattcttggtgatgtcattcgggctgacaaaggcaccagcatatttcatgtatctgatgaattctgttttcatgccggaattggacaagttcgtagtggttttcattgatgacattttggtgtactcaaagaacgaagaagaacatgtcgggcatttgcatgtagtacttcaacgtctatgagagcaccacctttatgccaagttatccaagtgtgaattttggctgaaagaaatcaaattcttgggtcacacta

SEQ ID NO: 56382 - DNA, 474 bp, Zea mays
  unsure (1)..(474): unsure at all n locations
tgggaagattcttcattccaacatgtgctagtcggcgatgttatatccagcccatgttagncttagcaattaagcaagtgtcgagttcagctctatcaaaatctactaagtatagctgaccctctaacactcccttaaacgctactgaatcatctcttcttctaaagacagttacacctatatccgtaaaaagacagttgtagcccattttgcataattgagaaacagaaagcaaattgtaatctaaagaatctacaagaaaaacattggaaatggaatggtcaggagatatagcaatctcacccaagcctttgaccaacccttgatttccatccncgaatgtgatagctcattgngggtcttggtttttctcgtaggaggagaacatcntcttctnccctgtcatatgggttgtgcacccgctatcgataatcaacttgagcccccgatgataaacctacaaacaaattagtc

SEQ ID NO: 56383 - DNA, 470 bp, Zea mays
  unsure (1)..(470): unsure at all n locations
agctngccatcgatccatccgctgtttccatttatactctaaccgaaggcattctcagatacaaaggtcgtatttgggtgggagacgacacaaccattcagtcccgcattgtgtcagcattgcattcttcaccggtagggggtcactccggggttccagtaacttacagccgtgtcaagggattattcgcatggaccaatatgaagtccttcgtcaagaactttgtgcaacaatgtcaaatctgcttgcaggctaagcccgacagagctgcttaccccggcaagttgcaacccctaccagtaccgtcttctgcgtggcacaccgtgtcaatggactttgttgaaggccttcctcggtctggatcctccgactagtatttagtggtcgtggacaaagttacaaagtttggtcacttcattccactttcacacgcttacacctgcagcttcagtgccaagcttgttatgaat

SEQ ID NO: 56384 - DNA, 443 bp, Zea mays
  unsure (1)..(443): unsure at all n locations
ttcgctggtctgatctctgacttctgcactgtgcattnttactattcatgcaatcgaacgtttggcgtattcgatcgttgctccgttggctcaccagacactgtccgatgctagtcgctctggtatattcgaagcctcgaaggaccgagagtagtcgaccgaagaagaaataaatgagagccaacaaattttctcgaattcaagagataaatattggctcgctttccgaaccgatgccccggcgatcacatgcaccaaaaaaaaaaatccacaccaactgcacacgtcaactgatggctactggaagtaaaatgaacagcgcggtactggatcctccgtattcatattaaacctatggtacaaagaagtcaacccaacgactttcagccccagcagtcttgagaggaaatctcgaanacctaacgagcgatgtcaaatattat

SEQ ID NO: 56385 - DNA, 440 bp, Zea mays
agcttctaaagggagaacacactttttgactttctaatgtccatttcgagaaagacatgatttgttgtgcatgccaagcacggaagctagttggtgctcatcatctacataagaacatcatgacgactgacacgccactggagctcctacacatggacctattcggcccgattgcctacataagcatcggcgggagtaagtactgtctagatattgtggatgattattctcgcttcacttgggtattctttttgcaagaaaaatctaatacccaagagacctttaagggattcttgagacaggctcaaaacgagttctgcttaaagatcaagaaaattataagcgacaaccggacggatttaagaactctcaaattgaaagcttccttgaagaggacggcatcaagcatgagttctcttctctctacaccccacaacaaa

SEQ ID NO: 56386 - DNA, 432 bp, Zea mays
  unsure (1)..(432): unsure at all n locations
ctttctgaagagaagaacctgtgttttnttatagtaacgccgtagactactacagaaaaaatcagcccagagattttagaaggtttgtgtgaagatactaatgacagcgacagttatgatgtggacagtggtggtgaagactcctaagatcgcccctggcgaccaagccattcaatttttggcgagtcatgtatcaaagaaaatcatcttgttaacatgaggggaagatacttccttgatttatccattgcgagagttgactaacgagagaaaacttgtccgacccctgaagaaaatgaatcctgatgtttcgaagccatttgaaagctggactacgattttccctgaacagctctgtcgtagaagtgctgtaaatgtctgaagtctatcttcatgaacgtaccccctgagcaattataagggtgaatatct

SEQ ID NO: 56387 - DNA, 437 bp, Zea mays
  unsure (1)..(437): unsure at all n locations
ctgctcgcgagggctttgatctcatagaaatgtattttctttgcgccaagatttacatgttcgcaacctatcttctccaaaatggctcgcactcccctcacgccagagaaggcgcatacgtctccacagccatttaaaatttcctcgaaggcatcggcttccctactgatccattcaactgggccctcaggatcgcctcttacgaaagtgtcctcgctggagtatgcgcacaacttggcgaagctaggctttatttgtccccacattctatggatttttcataatatccttcttttgaagaccgaagctctacaactggttgttcccgnaaccttttcagtagttgctggcgtctnggtcagctctcgcgatagcacatcttaatttngcttcatccacactgttccgaagatcctagattcgcacttttgggcttc

SEQ ID NO: 56388 - DNA, 380 bp, Zea mays
tatgaagaattttcattccaacatgtgttagacgacagctttctttcctacccatattagtattagcgagtaaacatgcatctagatcggcattctctttagtgaaatcaactaaataaagctttgcatctaaaacaccctttaacgctaatgaaccatcacttcttctaaagatagatacatcaatatttgtaaataaacaattatatcccatatgacataatagacttatagacagttagttataaccaagcgattctactaagaacacattagaaattgaattctcggtagtgatggctggtttactcatacccttgaacttgccttgattcccatcacgaaatatgatcgtgtcatgggaatccttgttcttgaca

SEQ ID NO: 56389 - DNA, 362 bp, Zea mays
agcttggtgccaatggagaagcaaaaatccttttagtcttggctgtcaaactgcttgccgttgtcaactgttagttcggacggtacgccgaagcggcaaacaatgttttgccaaaagaacctttgggcagtttttgatgttattgtggaaacagcccttgcctcgatccatttggcgaagtactcgacagcgacgaaagcgaacttaaggtttccctgagcggtgggcaggggcccgacaatgtccaggccccagcgctggagaggccatgtgtgggcgatcagctttgtatactgcgaggggctacctgaccgaagagaaaacttctggcaagcttccaagaccttgtgatccgatttgcg

SEQ ID NO: 56390 - DNA, 437 bp, Zea mays
  unsure (1)..(437): unsure at all n locations
ctataaaactcagctggatacatagtacatacaactttcacgaaacagtgtcaatttttttatcagagcatctatatatgatatcatgacatctttcaagattctctgactttgtttgtgttttataccattttaaaacaactgaatcgcaagttcacgatcatgtttcgtgaacatggcgttcaaaaaaagcaaataaaatttgtcgagtgtcaggataatacactccgcaaagaagtagctttgctgagtgtctgactgaaacactccgcaaaggtaacagtcgtctgctaccgtcggttgttgacggcgctttgtcgagtactagtttttgtcgagagttgcaaagcgtctttgtcgagagccggtttataccgagtgttctgcgctcagcanagactattcatcaagtgcgttcttttgccgatgtgacgctc

SEQ ID NO: 56391 - DNA, 414 bp, Zea mays
  unsure (1)..(414): unsure at all n locations
agcttcatatcaaaattcttcttttttcttgttcgaagctntctgactttaggagaagttcaccgtttaatctgtgcaatttggcttgcgctactgctaacgatccctccgttgtttgaagaacaaaatctttcttttcaagagcagcttcatgttctttgattttattttccaatccttcaattataatctcatttttattatcttcgagatcctattgcatcctcaaggttttacttagtagtagactctgaaaaaaataaccttcatcagaaatcaccttcatcccaaaacaataaaaagttgaggaaaaagctctaccttaaaattagaatagaataagctaccggtgatatgctgtcgccggtacctgctgaagtcggattcaagcttcggaaagccaacactattcgt

SEQ ID NO: 56392 - DNA, 432 bp, Zea mays
ttgatactaagctgtgatcaggtgctgcttgaatgtgcgcggcgtgaacctttcgttgtggccttccgtgacgagctccggcagcgggtgcagcagcacgcagtccggtggcggctcacagaagacgacccaggagatgcgcacggcctcccgattgacgaggccgctgtggaggacgctggtgtagcggtcgttgctgaggatctccagggcgttccccacgtggacgatgatggtgcccggctcgtggcgcgccgtcacccaacgggtgccgtggagcacctgcagaaccggcacgccgttgtggaggatgaaggacaaggcgctgacgtccgtgtgggcctccacgccgacggccagctactgctgcgggcacctcgggttagtagtgatcttgagctgcacgaggaggtcgtcgtcagctactgctct

SEQ ID NO: 56393 - DNA, 428 bp, Zea mays
  unsure (1)..(428): unsure at all n locations
aaccaacactcgttgatagtgttcttatatccttcgctctagctcgatctggaatacatcctaagctntcttcgttaattccgccgaagagcattgctcctagctggtagccacaggatatagcatactcctgcagctcctctttctcagccttagataattcttgaccaattatattttgaaaattgaatcctttttcctccgaaatatcttcggcgatttccttccctttttcaggcactgtggccagggtttctttggcagcggcagtaacttcttccgcggccatatccaagagcattttatcaatatcagataatgtgctctttacataggtttttctgcagttgtagcttcggtagtagcacctttcgcaggagcagcttcgacagaagcagaacctcggagctggtgttgttttgacctga

SEQ ID NO: 56394 - DNA, 477 bp, Zea mays
  unsure (1)..(477): unsure at all n locations
tanagccatggtaagtagcataggcaagtaatatgcgtattgactcaagcctagctatgggtgcataagtttcatcaaagtccaaaccttcgacttgtgaataacctttggctacaagtcgggctttgtttcttgtcaccacaccatgctcatcttgcttgttgcggaatacccatttggtacctacaacattttgattaggacgttggaactaaattcatacctcattcctcgtgaagttgttgagctcctcttgcatagtgtgaaacattatgaggtttcttagcatgaatctntcctaattatgttcgggatagtttgtacgatataaaatgtaaccctcactatcttgaaccatgggagccttgcccttcacaaagttagacaatttgtaagggcataagcttgacgttgtcccctgtagaaaccaatgcctcttaatgccaggcgctccattataagcatgctacagcaatt

SEQ ID NO: 56395 - DNA, 449 bp, Zea mays
  unsure (1)..(449): unsure at all n locations
agcttatactatatttcaccttttgtatgctttatatattattactatatagcgtatcgttccttagcttatggctcatgattgaatatcctcgtaacttaaaattgtgtcattagctcatcttttctaaaatattgtttcaccttctttatctaaaaacatacttaagatgaaatatgttcacacatcaaatttgtgaatagtactggtaactcaccagtgtatcattacctcgatagaacattatttcttttgattgtttttgtaatgtcgatagaacatgcaacattcaacctctaatgcactaacataacattcttggatgacttcagttctacttgctcatgtagtcatgtgtttctgacagaagtccatttctcttatccattgagatctaatgtggagaatttaaatggccttgaccttacaatngagtgtggaaaagtcac

SEQ ID NO: 56396 - DNA, 439 bp, Zea mays
  unsure (1)..(439): unsure at all n locations
ngacaatgaggagatggctcttatcattaagaactttcgacaaatcctcaaacaaaggaaggggaaggactacaagcctcgttccaaagaggtgtgttataggtgtggtaagtccggtcactttattgcaaaatgtccatatacaagtgacagtgatagggacaacgacaagaaagggaagaagaagatggagaagagttattacaaaaagaagggtagcgaggcgcacatgggacgagaatgggactccgacgagagctccaccgactcctcctccgatgaggacgccaccaacatcgccatcaacaagggacttctcttcgccaacgtcggacacaagtgcctcatggctatggagagcaagaagaagaagtacactctagagatacccctaaatatactacatctgatgatgtgggtagatctagtgatgataatg

SEQ ID NO: 56397 - DNA, 448 bp, Zea mays
  unsure (1)..(448): unsure at all n locations
agctttgaatgtgtctaggaatggatagctatttcttgtattgaatgtatatgagtggagcgctcggatgttgcgaatggacgtggntgtggttgtatttatagccaccaaccacttactcaatgtggctccttttctgtcaaccgcgggcagtcctcgctcctgatccggacggtccgcccctgtacatcaccgactggaatctcaacggtcaccagtaacggctatatcaacgactacaagtgcattaaatgtgtcgtcagatatcagacagtgcagtctcggatggtctacttgtgcaccctgaacggtccgcgaggacgctaaaaattcattttaccgaacccgtcaccttcaggtttttctggatatttcaacggtcggacagtctgcgcctgaagccggacagtccgtgcttggtccgaacgggcatgagtttctttggaca

SEQ ID NO: 56398 - DNA, 429 bp, Zea mays
  unsure (1)..(429): unsure at all n locations
cttgatactctcttgatagctattattatatgaaaactccgctnagggcaaacattcatcccanttttgtgagaagtccaaaacacatgctcgcagcatatcttcgagtatttgattgaccctctcagtctgtccacttgtttggggatgataggtcgaactgtggagcaatttggtacccaggggtttatgaagttcttcccagaatttggatacgaactgaggtccacgatctgacactatagtcttcggaataccatgcaaactgagaatacgcggcatatataatgctgcataagtggccactgtatactttgtcctaacaggcaaaaagtgggcaatctttgtaagtcgatcaacaatcacccagatagagtcatatccctttgcggtcctgggcaatcccacaatgaagtccatacttatgtc

SEQ ID NO: 56399 - DNA, 338 bp, Zea mays
agcttagtcaaactgtgaccaaaattaggtctgttttataatggcctgaaaccaaacattgttgcctaactatcaatggatgctaaatgttctattatatggagcaaactcatttttctctactaggctatacccgtgctaacgctacagactttgggaggggagaggatgatccatcactggcgtgagggacgggaggggccacatactctatgcagacggctaggcatgggcctgtgatggatgagacgacaacaatgatccaaataacgttgaccattatattttatcgactaagagagatgatgattattcaacgatctaaacctgtggttttg

SEQ ID NO: 56400 - DNA, 418 bp, Zea mays
ggacctataaaactaagctgtcttagctcgcttcttcttatccagatttattatatcctgaatagccgtccaataagctcacgagctctgaagtaattggtgcgtccataaaagaatatattcttggcaatgggaattcatccttctgacatgccttattgagatctatgaaaacaatgcacattcttcatttttcattagctttattcaccatcacagtatggccacgcatatgggattgtgggggcttcgctctgaagcctcaaaaacatgatgtaacaatgtttcttggagataatacatgagcaggaaccttctgacttgagtcaaatcacagtatgaaaaacatagggaaacaacgatggacagagccaagctggtgcagggactttgcttatgcaggaaaaagaaccgctta

SEQ ID NO: 56401 - DNA, 454 bp, Zea mays
agcttcaaaaggagaacacgtgatgagttttgctcacgtgcaattccaaaaagatagaccttgcgttgcttgtctagcaggtgaaccagtgggaggagcacatcacagcaagaatgtgatgaccacttcaagacctttggagctgctgcatatggacctctttggacccgtcgcctatctgagcataggaggaagtaagtatggtctagttattgttgatgacttttcccgcttcacttgggtgttcttttagcacgataagtctgaaacccaagggaccctcaagcgcttcctcaagagagctcaaaatgagtttgagctcaaagtgaaaaagataaggagcgacaactggttctaattcaagaatcttcaagtggaggaggttcttgaagaagaggggatcaaacacgagttcttcgctctctacacaccacagcaaaatggtgtcgtatag

SEQ ID NO: 56402 - DNA, 389 bp, Zea mays
  unsure (1)..(389): unsure at all n locations
gacatatagaaactctagctggacagagtccgctcgaactaatattacgagaaactctttctcagtgcagcangacaccagaaggtgcaacccagacggcgctggctgaatgtagaattattgcatagcacattggcactagggatttggtgcacgaatttctggctttcaaaatatatccaactatgaaggaatgggctatgccgaaacttaatggagagacaaaagaaggggagcttgtccgactaccctatcattataaattcaacaaatactttaaggcaccctgcctagaatggcttgaaacaatcgaaataatgagtactgacattctcggaaagtactctctacaagaggaccaattgatgacagtagccctctgcacccgg

SEQ ID NO: 56403 - DNA, 377 bp, Zea mays
agctagtaaccatctgacgactgtttatattatggcaactgcctccatcaatgatcacttttactacttcgtcttgcacttcggctcacaggcgaaaaagatggtgcgggcggaccaaataagctgctttggtttgaacactccagatttgagtaaccactgtagtggcaccatgctcaaattcacatgccgtatgttcttcagatacagtaatggcatcttcatcctctgctttagcttactcggcactagcgtgatgtatatgtctccatcatcaggcacaaggatcacacgattatttggacattcctttatgacaagaacacaagctgcacactggaagcactgagtatcactactgttggtggcagaacccg

SEQ ID NO: 56404 - DNA, 349 bp, Zea mays
ttatatggcaggaagtgcacgactccactatttttgatcttctagcgaaagacagttctttgggcctgaaattattccagaagcagaagagctaagtcgtgtgatatgggagaacttgataaccgcgctatcaacatataaaagctatgcagatacctgcacaaggcgatgtgcgaatgaggagggcgatcatgtgtatctaaaggagtcaccgatctggcgcatgaggagatataaagtctaagggaagatgtaccctcgctttattggacccttgttgatcctaaagcgagcggcggaaagggcctatctactggaattacccgaccatctggcggatgtacatgat

SEQ ID NO: 56405 - DNA, 391 bp, Zea mays
cagcttaatgcccataagaaattgttttactttgtttaaggccaaccccccaaggttcaggataacgagggccatatcctatatcctgctggacatcccgaacacaagatgacgacaagtcattctaggaagactcactctggctctcaacatgcttttatgaataagagcgaggcctccaggtctaggcaatcctgagacggaacctcccaagaaagtaagcccacctacaagtgcccttgttcaacagacatcacacaaccctgtagatgttcctaaatcactcgacaagatcgcgatcttctttcctcaccctaccaagaaagtgccacccgtcttgcagacattacataacatcgtagatatagaaaagcggaagcgagcacataaa

SEQ ID NO: 56406 - DNA, 287 bp, Zea mays
tggcattcagacagcgatgaagactgataacgcctggccctgagttgaggatctatgcacataatcaatgctgtaatcgttgagttccgcaacccactgtctaatacttccagtagccactctgttcatcatgagatccatcagaggctgagatgaaggaaccataatatggaatgcttgaaaataatgcctaagctatctggaagccactaatacaacatacaacaccggcctcaatactatataattagtcctagaaagcctagaactctcatagacaaaagaca

SEQ ID NO: 56407 - DNA, 396 bp, Zea mays
  unsure (1)..(396): unsure at all n locations
agcttggcgtcattatctataggggaatatatgccatntgtatacggatcacaaaagtctaaagtatttctttacctagtcaaaactaaacatgaggcaaagaaagtggctcgagctgatcaaagattatgacttggaaattcattatcacctaggaaaagctaatgtggtggcagatgctttaagtcgcaaggcttcttgtcattgtcttacagtaagaacacctgacaccactttatgctaagaaatggaaaagttgaatctggggataatacaacaaggaactttggcgcaattaaagcttgagtcagttcttctacaaagaattattgatgctcaaagatcaaataagggtatgaagtatattcatgagaaaatggaggccgacaaagcaaa

SEQ ID NO: 56408 - DNA, 429 bp, Zea mays
  unsure (1)..(429): unsure at all n locations
ngtgcaagcttcacagcctcccaggggagctatccgatggcttgtatcgagtggaggagggtgggaaaggtgttggccacagcggttgccctcgggcggctctggcgggtcgcggagaggtcgccggatctatgggcgagctcgggggagttaggcgtggtacggaggaggcaacagggaatgcagccgggcactatgacgggctttatggccgtggcgcgggcgtggtcactggcggccgctggcgcgcggtggttcgcgcacgggcgtgctctgagcgcgcccccgagtgtcagcccgcgtcgaacacgtgggagctcgcttctgccatggttcaacggcggatntgagcaccttatcgtgcgtatcttggcacaaccactgtgtatggtctcttccctgctccatatcctacctttttgctgtgag

SEQ ID NO: 56409 - DNA, 464 bp, Zea mays
  unsure (1)..(464): unsure at all n locations
agctagtgatttatccaatttaaaacaagttttatctcttaacatagattttctatggataaactcaacacaagagatgacattagtagcacaagcactagtttcttatttagcaaccctttatatgtggaaggcaagcgagttgctaaaatagagaaacatcataatatggactaaatttcccttgagccctcatgcacaatatattttgaatgacatggataatatgcatggttgttcaatgaagtctaaagggctgacttaatccatattatggtgagtgtctaatatagaagaatcaaatccaaattaactagagagagtacatcacatagttgtggatttgtgaccatatgataatattcattcatcttccaattagacctttatttcataatcaacaactgatgtgtatccttaagtgcttcttcttccttagtggctacanaagtcacaaaagatat

SEQ ID NO: 56410 - DNA, 394 bp, Zea mays
actaagcttaaaacacgaagctggcgatagttctataggacagcatgacagctgatagcgagatcatctaggtcgccagccgccattacttgctgcagatttggcggagagttgaggaaatccaagcatgcatccttcagtccattgcaccggtgcttgtcagcaagctcaagcatatctgccaccgtatccgtgtcgatgtatgagcacatcatgtactcacagatcagtcgaagcctcgggatgtcatatctatctgcagccacaagcaggtcctgccacatatactcttcttcttcttcctcctcctcttcaatgtccggcacatgatcggtgtacatgaaaccgagcaacagcctgaataccttggcgtccatgtcatggatgtgcacca

SEQ ID NO: 56411 - DNA, 409 bp, Zea mays
agcttgaaatgtgtcttcctccatcatttttttatattcaagtacacctaatcatacatgtcgtggatcagataaaaatattagggccactatatctacatcatatgtttcagttggagcgatacctgggagtattaaaaggttatgtgcgaaatcgcgctcacccagagggttcaatcatggagggatacactacagaagaagtgattgagagctgtatagattacatcagtgacggaacaatgataggtgtgcctgtacctaaacatgagggttaactatgtgggagagggagaatgggcaagaaaacttttcgcgttgaggattacaagctagttcattatgctcatggtagtgtactacaacatttcactatagccgagccctacatacaggaacaccctggatg

SEQ ID NO: 56412 - DNA, 431 bp, Zea mays
tctaaagggagaacacgtgatatggttgactaacgtgcatttttttatatatagaccttgcgcagcttgtcaagcaggttaacaagtgggaggagcacatcacaccaagaacgtgatgaccacttcaagacccctggagctgctgcatatggacctcttcggacctgtcgcctatctgagcatatgagggagtaagtatggtctaactattgtagatgagttttcccgcttcacttgggtgttctttttgcaggataaatccgaaacccaaaggactctcaaacgctttctcaggagagctcaaaatgagtttgagctcaaagtgaaatagataagaagcgacaacgggtccgagttcaagaaccttcaagtggaggagtgtcttgaagatgaaaggatcaagcacgagttctccgctccctacacaccac

SEQ ID NO: 56413 - DNA, 450 bp, Zea mays
agcctggatgaagagtcatcatcaccatcttttttctaacttgcatctgaatcccattccactagataggctttgacatccttcttcttgtgatataatctcttcttcttcttgtcctctccatccttcttcttcttcttcttacttgggcaattcattgcaatatgacccagctccctgcactcaaaacactttctatcattgaagacatttcttcttgaaaattgtcctcattttggttgacccttcttcttcatgaacttgttaaatctctttacaataggagccaattctccatcactatcgcttccactctcttcattctcactttcttcctattcaatagtcttggatgttttggcttttaaagctatagatccactttttactttcttagccaaacttataacctctgaatgagaattttgaatattcttgcgcagtattctc

SEQ ID NO: 56414 - DNA, 386 bp, Zea mays
aatactcactggaggtgacaacctgtagcaagacggaccttctttttgtgcatgatcccacagggccctttatcagaattttttaaagtaaattggtttactcactaagcagttgaccccactaattagagtgtttgatggacctttttataacgagcttcaagaagatggttttcggatcctctgtaccaagcgctccaattataattttgccggcttaactcattataaaaaaacaaactcatcccgtagggactacttcagaagctaaagtaaaagttcagcttcgaccgtgggccgtcttcagcaatctggaacaaagttcacaagaggaagcctaattgcagaattttcacttctgctcttatgctttacctaacggtgtt

SEQ ID NO: 56415 - DNA, 434 bp, Zea mays
  unsure (1)..(434): unsure at all n locations
agcttctaagggagaacacgtgataagtttaaccaatgttcatttcgaaaaagatagaccttgtgcagcttgtcaagcagggaaacaggtgggaggctctcatcacaccaaaaatgtgatgacaacatcaagacccctggagctgctacatatggacctcttcggacccgtcgcctatctgagcataggaggaagtaagtatggtttagttattggtgatgacttttcccgcttcacttgggtattctttttacaggataagtctgaaacccaaaggaccctcaagcgcttcctcaagagagctcaaaatgagtttgagctcaaggtgaagaagataaggagcgacaacgggtccgagttcaagaaccttcaagtggaggagctccttgaggaggaacgcatcaagcacnagttctncgttccctacacaccac

SEQ ID NO: 56416 - DNA, 313 bp, Zea mays
ctgggaagctattcgaaggctcggatctatctgatgtgggcgggaatggtctagccaccgcgggcgccctctggcggctctggcgggtcgcggggaggtcaccggagctgcgggcgagctccggagggttatgcgcggtgtatatgaagcaaccgggaatatggccgcgcaccaaggtgggctttatagccggctgtgggcatggtaccagcgtgggcactggggcgaccaaaggcgcacgcgggggtgcacacgccggcgtgctctgtctgcgttcctagtggttgcccacgtctaacacgtggagtgttac

SEQ ID NO: 56417 - DNA, 185 bp, Zea mays
ccggacctcaagcaccgcagcatgcaagcttggactcaacatgaaagaggaccatttatcatatatcttcggatgaactccgagagaatgtgctgaactgggatacaggcgcgagcagcgacagagacagggcttgaaccccgttagagccagctcggaacagggtaaacctaaacacagaaaac

SEQ ID NO: 56418 - DNA, 437 bp, Zea mays
  unsure (1)..(437): unsure at all n locations
atccttaagtcacctgcagcatgcaagcttgacacaccattcgacatcttaaattttatttctgcgatcaagtatatttaattcattcatcaacatgcaaaagcgggttttatcaagtggcttagtgaaaatatccgctaattgatcttccgacctcactccttctaaaatgatatctccttttgcaacatgatctctaaggaagtgatgacggatatcaatgtgcttggtgcgagagtgttgtacagggttattagcaattttaacaacactctcattgtcacataacaaaggtaccttttctagaactacgccatagtctacaagagtntgtttcataaataaaatttgtgtgcaacaagcacctgcgacaatgtattccgctttcgcagttgacaaggcaacattggttcgccttttggatgtccatgatacta

SEQ ID NO: 56419 - DNA, 424 bp, Zea mays
  unsure (1)..(424): unsure at all n locations
agcttggaaaaatctggtctgaatcggctgttatatccagctagtccaaagaaacttctgacttgatgtacagaggttgggggtttccactccaaaatatccttgactttgctgggatccaccgcaatccccttggtagataatacatgtcctagaaattggatttcttccagccagaatgcgcacttactgaacttagcatataatttgtgttctcttaagcgcgtcaacacgatccgtaaatgtcgagcatgctcctcttcattcttggagtatattaagatatcgtcaatgaataccaccacaaacttatccagctcgagcatgaataccgagttcataatataggtgaagtgggcacgagcantttgtaatccgaaggacataaccaagtattcaaataatccataccgcgtagcgaatg

SEQ ID NO: 56420 - DNA, 446 bp, Zea mays
  unsure (1)..(446): unsure at all n locations
tggaggcgtcgattggntgtctacttggtgtagacttcttctttctttcctccgtcgccttgaatgcgacgggttgagcttcggatgtggtgggatcatcaagctcgttgatcttcctcgagccttcgatcatgcactcaaaacttacaaaattcccgataacttcctcgggggtcattntagtatatctaggattaccacgaattaattgaacttgagtggggttaaggaaaatgagggatcttagaataaccttaaccatttcgtggtcgtcccactatttgctcccgaggttgcgcacttggttcaccaaggtcttgagccggntgtacatgtgttgtggctcttcccctttgcgaagccggaaccgaccgagctccccctcgatcagtttccgctggttgatctttgtgagctcatctccctcgtgtgccggtttgagcaca

SEQ ID NO: 56421 - DNA, 365 bp, Zea mays
agcttgagtctgagccctgaggtcaggcgtttcttattcttcttcttccggagctgagcccgagtccgagccctacggttgggcgaagcggattctcctatggcgcctggggccgggcttggctgctgtcaacctcactctgtcatgtggcacagcaatcggagcggcgcaggcgatgctgtcctctattcaggctggtcagcggagcggcgaagtgactacgatcacttcggctctgtcaactggaggacgcgcgtcaagataaaggtgtcaagccacctttgcattaaatgcccctgctatttggtccgttggcgtggcgatttggccaaagttgcttcttggtgaagactgggcctcgggtg

SEQ ID NO: 56422 - DNA, 474 bp, Zea mays
  unsure (1)..(474): unsure at all n locations
agcttcatactcggctgcgttgttagaggctggtaatagcagctggagagcatacttgaggtgctcgcctccaggtgcagtgaagagaattcctgctcctgctccctgcagcttcagcgagccatcaaaatacattcgccatacttctgcggtttctggattatccggtacttgctgttctgtccactctgatacgaaatcaaccagtgcttgagttttgatggctgtgcgaggtcggaactcgatatcatgggatcccaactcgcaagcccacttggctattcggccaatggcttccttgttgtgaagaatgtcccctattggaaaaccagtaactactatgactttgtggtcgtcaaagtagtggcgcagcttgcgggcagttaggagtactgcgtataatagcttctgaacctgaggatactttntcttcgatgggcctagaacctcactgatgaagtaaacaggatgttg

SEQ ID NO: 56423 - DNA, 452 bp, Zea mays
  unsure (1)..(452): unsure at all n locations
taagagactnntttcacggatcaagctcgttacgaaaaactatctatcaccgcgaaaggggctactgttgggtctatgcttcgtcgccgaaagtcttctatgaagaagcggctttctgctgaagctgtttatataatatggccgaaggttccttttcacgaagcttcgggtattacctaccgacttaaagatagaatgaccttttagtccataaaggtctgagtcaatgttgtaaactttcacaaggggcatacttgtaattgctcacaggctgcgttctgtgcctataaatagagaacagcattcctttactgttcacggattctagaaattgcagtcgcatctttctggaatcaacctttgcgcaggcagaggtattattgtattaaatgagtccatctactgaacaaatattatatagatcgtctatgattcgtctatgactcatttag

SEQ ID NO: 56424 - DNA, 373 bp, Zea mays
  unsure (1)..(373): unsure at all n locations
agctntgacaacttaagcctgtgtttaatatatgtttcccttgcggcagacaacaaaacttattacttgaaatttaaaaagtgtcctttactacacaaaaaaaataaaactgaatggaaaagactgctgtcgaggtaggatatttgtcaatagatatgcttcgactctggcacagtgctattgactgtgcgagcttcggattgttctctgaagtccctttgatgtggagcatattggcccccttctggctgttgtccttgttgcancggtggtggaggcggatgctgttgccacgaagcttgaggttgactcgccgaagcaatataaaccgcaaggtggttgctacctattcttggatgtaaagcgaatggta

SEQ ID NO: 56425 - DNA, 311 bp, Zea mays
gggctagaggactcccatgggatgggtgccataacatgtagcacttgttttttcacttatcgcctacttttgcttgccgtgagcattcctttgtaagaaaagtgagaacggatgtgtatcaatccgtgttgggcgacgatgactcaccgatgaatcacatatttgcctatattggggcccaaacagttctatctgaaggatgtaagttggaaaatggaatggcttcgcgtagtgattatttgattaactacttgtgcggaacactggatacattcggtacaagggagacctgtgcctgctcgtctaattct

SEQ ID NO: 56426 - DNA, 445 bp, Zea mays
  unsure (1)..(445): unsure at all n locations
agcnntttcaacaagagattcctattctctatttttctgaatccgcagcgggttttctcgaactagtggaactttggaaaggactctcagtggatccctagccattcaccttggaagtgtctaagtgtctagcaaaccctggcttatcgggaaacacgtactgtgggtaaagacacacaacctctgcagagtgtaaaactgatatgtcagccgtgctcacggtcaagagggactcaagactctcgcatgattaacttatggaactaaacttaatctgtcatttgcattgcattgtgggttctattattaactttgatctcttatttacttgggatggtatctacttatacctaggaattgctaataaaactttgaccaactctaaaagcaatgctcagcttcaaccattcctcttggtaagccttacacgtcacatgaaccctca

SEQ ID NO: 56427 - DNA, 429 bp, Zea mays
tacaacattgactcagaccttcatggactaaatagtcattctatctttaagtcggggtacactgtcgaagcttcatggaaaggaaccttcggccgtctcatgcaaacagcctcagccgaaagctgcttctcccttgaagaccttcggcgacgaagcatagacccaacagtagcccctttcgcggtgctagatcgtttttcgtaacgagcttgatccgcgaaaaagtctcttaagcttctgggagccgaagggtccaaaaacaccttccctgagctcgttgccgagaaacgatttaatttcccagcacgtagcgggcccaccttgcagaagttactggttgtgcttgccgtccaccgcgcagcgagcgcaagcgggtgtgcgcctggtgtaaaaactttgcgcttcgccttcttacctgcagcactatat

SEQ ID NO: 56428 - DNA, 468 bp, Zea mays
  unsure (1)..(468): unsure at all n locations
agcttatgaagaatcttcatcccaacatggttctttcgacngngccagaaccaacccatgttagtcttagcaatcaagcatgtgtcgagctcaactctatcaaaatctactaagtatagctgaccctctaacacacctttaaatgctattgaatcatcacttcttctaaagacagtgacaccaatatcagtaaaaagacagttgtagcccatttgacataattgagaaacagaaagcaagttgtaatctaaggaatcaacaagaaaaacattggaaatagaatggtcaggagatatagcaattttaccaaatcctttgaccaaaccttgatttccatccccgaatgtgatagctcgttgggaatcttggtttttctcatatgaggagaacatccttttctcccctgtcatgtggtttgtgcacccgctgtcgagtattcaacttgagccctcggatgcatatacctac

SEQ ID NO: 56429 - DNA, 363 bp, Zea mays
  unsure (1)..(363): unsure at all n locations
catgctagtcttagctattaagcatgcatctagaccggcctcttcttttgcaaaatcaactaaataaagtttgccggctaatacacccttaaaagctaatgaaccatcgcttcttctaaagacagacacatctacanttgtaaatagacagttatatcccatatgacataattgactaacagatagtaaattatatccaagactctctactaanaatacattagagatagaatgctcattagaaattggcaatttacctaatccttttaccttgccttgattcccatcaccgaatataattgaatcttggngaatcttattcttgacgtaggaagtgaacatcttcttctcccccgcatatgg

SEQ ID NO: 56430 - DNA, 402 bp, Zea mays
agcttggtgaagagtctcgagggaggtctttataattgtacgtgcaaacggtgcctttatgggtgagagtgggttttctgttcggggatgtttgctgtttattgctctgtcgttcttgggtgtggcctcaggggcatcattagagaaggttcctttgcatttcttctcggcgagggttgccttcgtagcatcacccagtgatgtgctggctctgattgtctctttcttgagggccatcgtgggtttgttctttcgtagcacaaacggaggacgccaaatgttggttccttcctgacacgtggacaggtgggcccaacacttgagaggcataaggattatggtgcacaacgaggcagtatgtagggactgtatcgtcttggtatgcgtgttccatccgtgtac

SEQ ID NO: 56431 - DNA, 444 bp, Zea mays
  unsure (1)..(444): unsure at all n locations
ntctccgcgaccaaatccgctccccgcgagaacgttttacttccttctggatatccactgcgngctaagcatgaatcacgacgaccggcgcgaatccgggcgcaaggtcaccggtgacgaggcatactgaatcctaagatctttctgtggcactgtaccatcagaaccccattcagtcagtctgacaaggtcattagcagggcattaatctctgatttctatgtagcaacttgttaatttctctgtaacaaagatttagccctatagtccagctacaatcttgctatagtagtcaggctcaaatactcactcccaaagttgaccccatgtcactgtcagtaaaagttcagactctcaggtgactgacagccagacctttgagtcatctaactccaacttttgacaacacttatgccttatgtcttaaacaaagntatactcctt

SEQ ID NO: 56432 - DNA, 390 bp, Zea mays
  unsure (1)..(390): unsure at all n locations
agcttgagaagattcttgatcccaacatggtttattctgcggngccacagccaacccataggagtcttagcaattaagcatgtgtcgagttcagctctatcaaaatctactaagtatagctgaccctctaacacacccttaaatgctattgcatcatcactttttctaaagacagtaacacctacatcactaaagagacaggcgcagcccattgggcataaatgagatacagaaagcaaatcgtaatctagagaatctacaagaaaaacattggaaatggaatgtgcaggggatatagcaatgttactcaatcctctgaccaaaccttgatttccaatcccgaatgtaatagctacgtggggatcttaggttctctcataagaggagaac

SEQ ID NO: 56433 - DNA, 425 bp, Zea mays
  unsure (1)..(425): unsure at all n locations
ttntcaccatgatatcaccgctatcttgagatggctgggtttgttctttccttttaggtgcgtcaagctcattcttagcctctcactttcttgcttgagctcttgacatgtatcatcttttgttcctagaaatactatctcaaaggaggaattacttgttgaccagccacaagccttaacacatgggaatataggttcaaattgaatacatgtgcatgagtgaggttgctgagaatttaagttttctattacaacctcatgagcagggcttaacatgatatgatcatccataatattgtatgagagcatagaagcatatcatcgttgtcttgagaggctatatcttcaatttttagcccttctaaatggtctttacgcaaagcatttctatttactaattgagcgacacacaatatcgagttatc

SEQ ID NO: 56434 - DNA, 173 bp, Zea mays
agcttatgaagattcttcatcccaacatgggttagtcgacggtgccagaaccaacccatgttagtcttagcaatcaagcatgtgtcgagctcagctctatcaaaatctactaaggatagctgaccctctaacacacctttgaaagcttttgaatcatcacttcttccaaagac

SEQ ID NO: 56435 - DNA, 236 bp, Zea mays
aacaaagcgcggccaagaactgatctcacgagagaaaatctggggttcctaaacaatgggtaagaccaacaccagagaaatcacccaagagatcctacaacgcttatccgaagatactgatgacagcgacagatatgacgtggacagcggcggcgaagactccgaagatcgcccatggcgaccaagccatgcggctttcggcaatcaagcatcaaacaaatcatcctgccatcaga

SEQ ID NO: 56436 - DNA, 422 bp, Zea mays
  unsure (1)..(422): unsure at all n locations
agcttctanagggagagcacattgtaagacttacttatgttcatcttgagaaagacagggtttgtagcgcatgtcaagcatgaaagcaagttggcgctcatcatccacacaagaacataatgacgactgacaggccgctcgagttactccacatggatatattcggcccgatcgcttacataagcatcggcaggagtaggtactgtcccgttattgcggatgattattctcgcttcacttgggtattctttttacaggaaaaatcacaaacccaagaaactttgaagggattcttgagacgggctcaaaattgagtcggattaaagatcaatacgataagaaacgataacgggctcaaatagaacgctgtcttgggactagtgattaagcatgattctcttctcctacacacctaacaaaat

SEQ ID NO: 56437 - DNA, 354 bp, Zea mays
  unsure (1)..(354): unsure at all n locations
ccacgcatctatatagaatgtctttttctttnttatcgcctcagctaaagagactttgatattttcaatagacaaattaaatcctggctagatagcaacatttacatgcgtgcatgcagcattttcaagtatggaagtagcccctcgagcattctacttgcgcaatagtcaccatgggtcgataggacttcgtccaaagcttcaacttctccttcggcattgcagataacccgcactcaagcttcgatatcctatgtgtctcatcataacccaacatacatcaagttccctattgtctggaaggaaaaagagatagtcatcctcgatgtggccaccgcaaacaagtgagcctat

SEQ ID NO: 56438 - DNA, 353 bp, Zea mays
cttcacacctacccgtctgtttatatagtgccgcacgtgggaaggtgaatcatcaaggtctctcgcaccgaataaacagtcacctgcccccgctgaacggtgggccacacggttcgagaaggtgaatcgctggggcgcgcgtaactgctgcaagatggggccatctcgcgcgcggattatttttttcgtttctcgccaacgagctcacggaaggtgtttttcggatcttcggcatcccgaagcctagaagactctttcacggatcatagctcgtacgaaatacgatctatcaccgtaatgggctactgttggtgatgcttctatccaagatcctaacaagagacaacttcggc

SEQ ID NO: 56439 - DNA, 359 bp, Zea mays
caagcttggaaggggagagagggcactcattttcattatacatcacatccgagcctgcatacgtgaacactcatttacacatacataggatcattatcttcataccatacagatataaacagttgcttcagcgctaaaaatgcaggttcgaaagcagaatcatgcctcattgtgtacgaaacaaaaggaaactgcctatcgccgtcggctcaaaaggacaaagtttcgtgcacatcgaaccactgtacacactgatggaaaggtaaaaatatattacaagggatggacaaaaattacagaggtgaatctaattcttaaactaccatatactctacaaaggttaatacaagagcccctaa

SEQ ID NO: 56440 - DNA, 384 bp, Zea mays
  unsure (1)..(384): unsure at all n locations
agcttgnncaccgacaagaccgtcagtgttattactgaccgacctccggctctctggctttaatgtctggttctcgcccctcgagtggggacgagaactaaagccttccagtggcagcgtccgccctgggaccattgctgttgtgagaggtcgcggagaacccccggaggtcgcctgccccgaagctttccgatgaggaggttgttcatacccgcgggagtggaaccggagtttcgttgtaatggcgccttgagtgccggcgtctgttcattgtggctgtctgggcctgaacatctaggtatttgagcgcactaccgtgttttgtcctcatttcgagcactatgacttcgcctgtctgctagctggaccgcttaaccaagtgtg

SEQ ID NO: 56441 - DNA, 256 bp, Zea mays
ctaatctctctaaggcgctctatacgctcaacctaacgccaagagcatagtacgtatgctttagagagtgacttctcactaatggattcaaagtcagaaaggccgatcctacactctatactaaaactctcgacagtgacttgttggaatgccaaacaaacactgaggatattatatgtgagggtactaacgagtctacatgtgaagaatttactatgactatgactcataactctagagatgtacatgatggggg

SEQ ID NO: 56442 - DNA, 461 bp, Zea mays
agcttagcatagctattaataagtttgttcttatttaattagcaattgctaagtgttagtacataccaataagatctcacaatgtataataaattctacaatgcaatgcaaatgataagttaagtgtgattccataagttaaaaatgtgagagtcccgagtcgctcttgaccgtgagcactgctgatataccagttttacactctgcagagattgtaccctttacccacaagtcatgttactcatttgccaaaggattgtgacttgccattcatctctaccaaggagacgatgtgggatagcactaatagatctttacaaagtgtcactattatgaatataaccctacaaatgtaggcataggcggtatatgaatcccttgtctgataagctatcacaacagttcgaccctataacctgcctatacttgcacaactgcttccacttgcttcttttgagaaa

SEQ ID NO: 56443 - DNA, 444 bp, Zea mays
  unsure (1)..(444): unsure at all n locations
cttaaatactcagcttctatgggaaaccatttcggactaattatgttcattttgtgaaagacagggtntggtgcgcatgtcaagcatggaagcaagttggtacccatcatccacacaagaacatcatgacgaccgacaggccgctcgaactactccacatggatctattcgggccgatcgcttacataagcatcggcgggagtaagtattgtcttgtaattgtggatgattattctcgcttcacttgggtgttctttctgcacgaaaaatcacaaacccaagaaactttaaaaggattcttgagacgggctcacaatgagttacgattaaggatcaagacaataagaagtgacaacgggacggagttcaagaactcacatatagagtgctttcttgaggacaaggcatcaagcatgagttctcttctcctacacaccctcacaa

SEQ ID NO: 56444 - DNA, 445 bp, Zea mays
  unsure (1)..(445): unsure at all n locations
tgcttggagtaagagaatccancaaatatgctactttgttgtgttaaacaacaatctaacaatagtagcatatttcatgagaaacttattctcaagcgagagactatatgaaattactgagataagagccatagttctcagcaaaatcaagatataagaagagactcccccttaagatatacatggatgatttacttttaagacaaataaggagaagcattatatatctcgatcaaggctcattaaattntgcaataacaacttaagcctactaatctcataatgaaaagtatctagaatactcacaaccacaccattgattgtttccgtaaagtaagtggtggtggtcttgatgttctcttctttcacttgagaaggctccctttgcagtggcttctattccttctcaacttaatgaaaatactcacacagaatgttagtaata

SEQ ID NO: 56445 - DNA, 443 bp, Zea mays
agcttgtctgtcggaatcaaacgaagctctattttttacctgcttcgtcagaaaaaactttcggaagaagaaagtattaaatctccacacattcataattaaatggccagagtgcgttccaccgccagggttgagcgtgaggggggcgaaactgaagcttccgagaccgttcccatctccgaagccatgcaacgatcggggctggtgacttcggaaaagacccctagtgatgatgcagaacaagcaatcgctgaagcagaataagatattgaggaaactgatcccgaagatgattatcgcattgccatgccaagcaagcccagccacttggacttcgggaaatctactgtttcgaaggctgatctgtccaagatggtaaagtcaggctttcttactgaacatcacaaaaagctattacgcttctggggagaagagactacccc

SEQ ID NO: 56446 - DNA, 469 bp, Zea mays
aactcagcttaagagctctagatctcttgatctgaatttcctttggaaattctttagcacaagaaatgtaatatttgtaactggtatgagagccgaattgttaatgtttgtaaatgccttgtaatactatttacctttcgcttatatatcatctgctttgctgtggacgaaaccgacacttgtaggttttgagccgaagacgaaaaacaccttcgcttcatttcgttcacatcgaagcacctttcgtataccaccgaagttccttcgaaacaaagcaccttcgtataaaacgaagtttcctttgaaacgaagcaccttcgtataaaatgaagcgttttctattgaaggcaagaatccccacttttcctgtaatgctcatgcttatgtatgatattaacctacaatgcctatgtatggtgatgaatcaaaagagatgagaaatcgaaaaaaaaaaaaaaaaaaaaaaaaa

SEQ ID NO: 56447 - DNA, 279 bp, Zea mays
caggcagaaagtaccggacttaaacacttgagaaaaaacgccctatctcttgtgtgacgcaacgacaggctttgttcgcatatgaaaacgggtttcacatagggcctgatcctaagcaacggcggaagagcgcaaaagagcggccaagaggaaagtgatgaaatggcgctcaatgaatttacgctccaaagttatcaaactgagaaacgaagctttggaaaaagagaaaatactactcacacgggtagataaagggaaaaaagacgaagctgcttcgga

SEQ ID NO: 56448 - DNA, 295 bp, Zea mays
  unsure (1)..(295): unsure at all n locations
gactttagtctttcgccgccgcgcgtggaccgagctatccagcgagtctccgcccaatggggtgcgctcatggtttctctagcaccccgtgatactccctgacccatctaattgaactatctcgccgagggcaggccggtctcctcgccaccgacgagcatccgcgcctgcacgcgtgaaccgaccgactncggccatctccgacggcgtgccgcacaccgatgtgatccccgagacctcctcttcgtcctcgaccacttcaccggagcaatctcgccgccgggtagcccctccg

SEQ ID NO: 56449 - DNA, 460 bp, Zea mays
  unsure (1)..(460): unsure at all n locations
gctatgggcttctccaggtggagcgagtattcttgttntagagatcacccttcaatagttcaagtaaagatattggtaaagttgtctgatcagagcgagactactagaaggatctgatggttgaattcaaaatttaactagtagcccattacatcttcagaaaggttgaaacactcatgtaagaaaactatatttaacatgtatgaataattttccaatgatagtacaagaaaactgaaatgacaagttttgcagatagcccttccaataatatttttattacatcatctatcaaattctaaccttaacaagacaagcctggcacggttcatatacactcattagtttagtgctatgtatgttgtctntcttctctcaccattctttgatggttattctgatcaacgagttctcaattgctagactttaatngatggacacaaaaggaaagcaactgatg

SEQ ID NO: 56450 - DNA, 427 bp, Zea mays
tatcttctctcctcgctatcgcaatctttgcagcttcggttgtgtctccctcaccaatgggcaatggccagtgacttgccatcgtgctcgtactacctgcggatacacctgcaatgcaagaggattagagaacacatgcgcatgcagtttatgtcgtcgcatcactagcatgtacgggagacgggataaatggagaggttcacgtacattgaataaataatccagtgtgtgtgcgtggtcaatgcgagtgtaaatgggcaggtatcttttagcatccaaccacggtggcgcgagagagaccggaccggaccgggaggaggcaacgctgtcaccgcatgcgcatccagccgtcgtcgagggtgtgggcaataatcccagtcgatcgtggtgcatcccgtagccaagcatcaagctcacaccccggaat

SEQ ID NO: 56451 - DNA, 390 bp, Zea mays
agtctcgcacctctgaactaactcggctgtattattctttgttgttggccaatagaatcctgacctgaagactttcccgactagtgttctggaggctgcatgtattccacattgcccagcatggacctcctccagaagttgcttactactggacgggagaatgcacttcatgaggacgcctgatgcaccccttgtgcataatgtctccccaatgagtgtatagcgagccgactgtctggcaatgcgctctgccgagttcttagccgctggctcttcttcattctttatatacttgatgattggccttctccagtcatcagacgctgactcgggttgatctataatgttgcactcttctgtttgaccattgagatactcggctgcagtatt

SEQ ID NO: 56452 - DNA, 477 bp, Zea mays
  unsure (1)..(477): unsure at all n locations
tgagaggagtttntcacggttcaagctcgttacgaaaaactatctatctccgcgaaaggggctactgttgggcccatgcttcgttgcgccgaaggtcttgcgtgaagaagcagcttctgctgaaatcgtccccaggaaatggccgaaggttcctttttatagagcttcggcgttgcaaaccgacataaagatagaatgacctttttatccatagaggtctaagataatgttgtaaacttttgtaaagggcataattgtaattcgtcacaggctgcgtcctgtgtctataaatagatgaacagtacccccgtactgttcacgctgacttggcatttgcttttgcgtcacgcttgtaccttttaccttctctcangaccgaaggtacatnttgtaattgaaatcatttctatttctccatgttaataaaatagaaatgaatctattgtgatgcttatattatatctcatgctttatatg

SEQ ID NO: 56453 - DNA, 448 bp, Zea mays
  unsure (1)..(448): unsure at all n locations
agcttccttgtgcgcagcttcggtgctggtttaaccttcgtttcgatcctgctttccatattgtgtacagcttcatcccgagtccgaaggttcctgtacatatattatgcttgggaaacattgttaatcatgttttgaggaccttcagaggacgaaggtccccaatagtagcccctcgcagtattaatttaacgaattcagactgcgacatggacgaaggccataagccgaaagtccgaaaaaacaccttccctttactagaatagcaacaatcgatgacaggtggggccctccaagttgtagcgtgctatgcgtataaatatgaactcataccgacatcatttgatacactgtttctgatgtctgcattatttctctcaaactnttagctgtagcttagtaactctcgccaaattttaagctttgtgagtttcggttaaagtatgtt

SEQ ID NO: 56454 - DNA, 457 bp, Zea mays
  unsure (1)..(457): unsure at all n locations
tgccttcgcctcatataccacccgcagtccaacggagttgttgaacgcgcaaatggcaaaattttcacagctgtcaagatgctcctcaacgagaaaaagggcaagtgggccgatttattacctgaagcggtctgggcactaaacacgactgagtgcagggcgactgggttcacccctttccaccttctatatggatcggaggccatgaccccgcaagaaataaaacatgggtccccgcggacagtctcgtcagctgtccccgacgtggacgaacccactntgaaggacctcatcgatggagaccgcgtcttcgccctacaggctctaaataaataccaagcccaaacaaaagcatggcgtgaccatgcagtcatcccgagggaattcagcgaaggagaccttgtactcgtncggacagctcggacagagtccaggggcaagctggagcccaagtggg

SEQ ID NO: 56455 - DNA, 388 bp, Zea mays
agcttgtaacctctactacagagcaccccggttcttgataatataagcctcatcctccctcttgtgtttcatcttgcatcaatccatctgggcagggacatgcaacataaaattcactagtcggttaagggtccccgcgggtccaaaacaccgacatgactgacaatttattctaatttaattgtgtcggggaccataattaggggtaccctcaagactcctaattctcagctggtaacccccatcagcataaagctgctaaagcctgatgggtgcgattaagtcagggatcagtccattcgagcgacttgatcacgcctcgcccgagcctagcctcggacaaaggcagccgaccccggaggattttcgtctcgcccgaggcccccct

SEQ ID NO: 56456 - DNA, 460 bp, Zea mays
  unsure (1)..(460): unsure at all n locations
tgaagacatccacaatgcgaattaaggcatcataacatgttattgttgcaggagctgcccttgtagtttctgaattgaatnttcctatatggtaaactaaagaaacaaaacgatgattgtgggaaacccttaccctagattagggttgggtgttatattaatagacttgggatagttgggccaggcccattacaagggggcgagagggtaaatacacagggaagcccctaaaccctaacgggtattctaacactccccgcagtcgcaactctatcctgtacagatgttgagactggaccgaaagtctaaaaatacacccgacggtaaccccttggtgaagatgtcggtgaactacagcgtgcggcgacgcggagaacccgaacgtcaccagcatcgacacactcgcggacgaagtgcaggtcgatcttcacatacttcgtgcgctgattgttcacgtgat

SEQ ID NO: 56457 - DNA, 308 bp, Zea mays
ttgtgttagaggctaaaccaacatcactactccagaaatttacatcctatagtcccgcgtccttcagaacaatcatgtcatcaggaaagttccgcctcggcattgatacccggcactccataagccacttttctaataaaaaagtgtgccccacgcgaatgaaacctaaatccctcttttgattcatggcacacaatatgatggtgctccacaaacttcttgctaatgaacgcatgcgaagcaccagaatcaacaagaataattcgcaggcgactggccaccggaaacggacccatcttaccggctct

SEQ ID NO: 56458 - DNA, 438 bp, Zea mays
agctttggacttagagaataaatcagtagcttgtatgtggggcgccgtaaatgtagccctacctcaacacactctcccatttgtatactaagaaataggtgcgaggagcgaaaagtttacgtgcgcatgagaagatgtgttttcaccttctcactatctagtggactctgaacacacttacatttatgccgaagtacttgttttttgcattttcattaactagacatggaaggtgttttttggaccttcgatggaaggcatccctattatgttttgtggcctgagctcgttatcaaaacgaccttattacgcaagggactactgatgggggatagccttcgtccgtgaatgtctacaagttactgacttcgtcatgaaaagcaagtttcatgtaaattgtttcacctttggtaggaggccgaagctaacaatctggcg

SEQ ID NO: 56459 - DNA, 466 bp, Zea mays
tctgcttagtaggttccacctgctgagtaccgggatccctatttacttgctcgtctactcgcagcaacacaaacaaacatattattggagaaattaacatcacaccaaacagaagaatataatgcatgataataatctacgcatcgtaacgagatcctatgttcgagaaccacaaaatttggagttacgggtataaagctatgatattctgaaagattaagtgtttactataaaacaaatgaggtaccagattttaaccataggtttcatagtaatacaaggttactagatgataaaaaatattgatatgagattaatacaactggaatgggtcaattgtgagttataacaagggagctatagatttatgaactgttaaggtttaatatccatgatagaagtcatttgctaattgggttattaaacccagatactgttggaacgcagtaccaattctgatagtaca

SEQ ID NO: 56460 - DNA, 381 bp, Zea mays
catgcaagctagtgaagccaatcacaagtttattgtttattgatattaaatcttgttggacttcaagatataatgaatcttctgagcacctcaaattcttattgaccactgctccagtgttatctcaaccgaacattgaaaagcccttagatgtgtattgggacgcatccaacagaggtctaagctgtgttctaatgcaagagggacgagtgatatcctacgcttcaaggcacttactccagcatgatgagcattatacaactgatgacctgaaattagctgctgtggttcatgccctgaaaatatggtctcattatctgctcgagaatatctgtcatatctatacagatcataaaagcttgtagtacatcttaccagtca

SEQ ID NO: 56461 - DNA, 377 bp, Zea mays
  unsure (1)..(377): unsure at all n locations
ngaggacccgntgcctatcaacagaaggagccactcattatgtcatctcgtcacgatgtgtnccatgtatctcaactgccgaaaagtgttcgtatacccacttgaacgctacccgaaccggacattgacatagaaccagacttgtcctaccaagagtaccccgtcaaggtattggatcacaatgagagatcaactcgggcaagatcagccagaatgaataatgatcagtggagtcaccattcatcggaggaagctacatgggagactgaggattctctacggctccactttcccgactttctgcccataggagtcggcaccgtaccccaaaaccccacccccacctgccctgtgaactcaattataagaaaaactta

SEQ ID NO: 56462 - DNA, 350 bp, Zea mays
  unsure (1)..(350): unsure at all n locations
agctantaaaaggagaacaagcgatatgtcttactaatgngcatttcaaaaaagatagacgcggtgcagcttggtaagcaagcaaacaagtgggaagctctcatcacaccaaaaatgtgatgaccgcatcaagacctttggagatgcttcatatggacctcttcccacccgccgcctatctaagtacaggaggaagaaaggatggtcttgctataggtgaagacgtttcccgctgtacttgggtattctttttgcaggataaatctgaaacccaagggaccctcaagcgctttctaaggagagcataaaacgagcttgagctccaggtgaacaagataaagagcgacaac

SEQ ID NO: 56463 - DNA, 339 bp, Zea mays
caggccgcagaggaagaaagagtgaattaaccttcgcggtcggtctcgccctccgaggtatcgtgctcgtctgcgctgaagtctgaatccccggaccccgcgccgatgtttagccacttgcgcagcaccaccctgttccacagctgcgacacgcaattccaatccgcgccgcagcacaacaccatctcgggccacctctgcatcacaagatccttcgtctcgcgcaaaacagagacaagaacagcgaaaaggatcagaaatttgatcctagaaacagctggttgaagaacttatgcgaagaagctcccggcattagacaactaccagcatctgcattcc

SEQ ID NO: 56464 - DNA, 451 bp, Zea mays
agctttaacaagtccatgcagaaatggctacttctcaatgacgaggactccgtcatcaaacgcagatgggaagccagggtcgggacctactcctacggcaagtaccaaaccaagaagggctccgcaactctcccctagctaggaaggacccttcaaggtgacgggaatacgctgacctaggggtgactatcttgctacaactgaaggagtacctcttcctgaccactggagcatctctgtaagttctatccataggagcaagtctgaggggacaaatttttctcccttttgtaactaggtaacacatacatgtacgccagcccggtgaggtccaccctcataagcccgacctataggtctgcacccatgcatgacaggttataaagaaaaaggttaccctctaagatgtgcctctatgataggtttatcctactgctccatggtcttacct

SEQ ID NO: 56465 - DNA, 491 bp, Zea mays
  unsure (1)..(491): unsure at all n locations
tgcctagcagtagcagctgtaattgtaagtagagtcagccctatgactgaaccttgtgttattctcatatggaaatcaaaccccataccatttaaatatatgatatctgttggcgttgactggacgtcaatcactgcgatgagaatcggcggcagtgctctctgcagaggcgtagacggtccgtggccaggggccggacggtccgcgacctggcgtagaggctagggttctgcctgacgagctggatggtctgcgcgtgtgcaggggcggcagatttcgccgctgacgcctatatctcgcctccgggagggaccccgtcgggaaaagagattctaggctntgtcttgggatcggcagaccacccaagacgcctctaatcgacctagagcgacctagagtcagagagaggtgaagatttatggagaggaatcttagtacctgtctacttctatgggcanaatgtgaagaacgagatatatatggattgattg

SEQ ID NO: 56466 - DNA, 459 bp, Zea mays
gtgcaagctgagacattattgcttaatggacatgttttgtccgaaagacacacttgacgtcatcatatacatgcacctaagaaccatataaagccttcgatgtccatacaatctctgtaatggaccacactcgttcctttgaaacaattcaaagaacttaaccaattcagatcagatttaagataagagggacttaaaatctcatttccgatgatactcatcaagtatccatcttatgggaaaaacatgaccaatagaattgtgcataacttttcatttcatcccaacaatgggatgaccaattcaatcttacgcagcatggtgagtatcatcacttgaaaaggtataacatatgcaacactttgtatgggaggatgtatgtaaaatacaatccatatgaagatgtttcgagatacacatgcaatatccattactatcactttgtgttgccacatgata

SEQ ID NO: 56467 - DNA, 473 bp, Zea mays
  unsure (1)..(473): unsure at all n locations
tctatatggagacgaagctatatctccagaagaaccgaatctgggtatcatgaaatggtgcttccgctaaagatgaagacaattaaaaaaattcaaaggacacgataaataggatcaaactctaggaaattaatcacattaataagtatgaagctgaaacaacaatgtggcgagacagaaaggtaaagttgaaaaacataaagccagaccacttcatgctctgaaggatagccaatcctaatatagcaggaaaaattaaagtcaaatgggaaggtcccttcttggttgtatcttcgaataggccaagatcctacaagctaaaggatatggatggaaacgaagttccaagatcctagaatgctaatgagctttgtagatattatgtataatcttcatatatntttccctttgctctttntccaacattgatgttgngacccttatgggatttcaagacgaaaggttttttaatg

SEQ ID NO: 56468 - DNA, 305 bp, Zea mays
gacacaccatactaagctgaagaccctttggcacaagagcttcgaacgtgaatattgtttgtttaccgaaacgctctatccgaacgcgagttacttatcacagaatgtgatgaatgaagtatccagatcccggaagcgtaagagtccctcggctcggacagccttggctgctaacgcgcactacgtcgattccaggatccgccttgcgaatcatacaacaaacaccaaagaaatactgctaaacagagagcttctttcgagggagaaattcgaccatagggggtctccccctttaacccccaagg

SEQ ID NO: 56469 - DNA, 440 bp, Zea mays
  unsure (1)..(440): unsure at all n locations
agctagtgaagattcttcatcccaacatggttctttctacggtgccatagccaacccatgttagtcttagcaattaagcaagtgtcgagttcaactctatcaaaatctaccaagtatagctgaccctctaacactcccttaaatgctattgaatcatcacttcttctaaagacagtgacacctacattaaggaatagacagttgtagcccatttgacataattgagatacggaaagcaaattgtagtctaatgaatctacaacaaaaacattggaaatagaatggtcaggagatatagcacatttacccaatcctttgaccaaaccttgatttccatccccgaatgtgatagctcgttggggatcttcgagttttctcataagaggagaacattatcttcttccctgtcatgtgggtntgtgcacccgctgcccatgatc

SEQ ID NO: 56470 - DNA, 496 bp, Zea mays
  unsure (1)..(496): unsure at all n locations
acggacctaaaaactaagctaaaggatactattcaactaaagtaagaagaagttgataagtggttcttgtatgaaaacttcctctccttcagatgttttagtattctatccttagtgggatgtaccatattataggttaaatttccttgcaatataaaatgttcaatagtgcatataactttgacatcaactatatgtgtgcactatattaaaggaattaaatctatccttttgggtttcaagaatgattattcattttccatccacatataaggattatcatttgtgaaaccctcccttgtgtttctaatgctctcttttctaagagtttcaataaggtctttccaagggctttcaagatggattcaaaatctacggatataagagtcttggttctttcaatcattgagttncaatgggtctcatatcaagtatgatcgaaccaagcaaagatgaataaagntcaagatcacttggttggatgaaatcataaaga

SEQ ID NO: 56471 - DNA, 469 bp, Zea mays
agctagagtcagtcctcttgcaaaggatatttgatgcccaaaaggataatgagggcatgaaacacattcgtgagaagttaagggctggaaaggccaaatgcttcaaagaagatgaacaaggcattgtatgtgttaataaccgcatagtggtgccaaagaatgaagagctccgtcagcaaattcttgatgaagcacatcttagccgctattctattcatcccggaagcactaagatgtaccaagacctgaagcaacattactggtggacaaagatgaagatcgaaattgcacgctatgtggcgagatgtgacacctgcagacatgtcaaagccatacatttgaaagctgccgacccattacagtcattaccaataccgacatggaaatggaaagacatcactatggacttcattgtgggattgccaggactgcaaaggcgatgactctatctgggtgaatattgatcgac

SEQ ID NO: 56472 - DNA, 443 bp, Zea mays
  unsure (1)..(443): unsure at all n locations
ntcatgtcaacatcaaggccactggaactacttcatatggatttatttggacctacaaattatgtaagtgccagtggcaacctctactgtctagtgattgttgatgacttctcaagatacacttgggtgttctttctccacgacaaatctgaagttgcatctatattcaagaagtttgccaagaaagcacaaaatgaatttgattgcaagatcaagaagattagaagtgataatggcaaagaatttgacaacaccaacattcatgagtactgtgatgaaattgggatcaagcatgaaatatctgcaacatacacacctcaacaaaatggagttgttgaaaggaaaaacaggaccttgatcacacttgcaagaacaatgattgatgagtataacacaccanagagggtttgggccgaagctgtcaacactgcatgttatgcatc

SEQ ID NO: 56473 - DNA, 383 bp, Zea mays
agcttgcattgcatgtataaatatcttgtattgtatataaggcttgtctaacctagttgagataaccgccaacaaagcgagtgaaaaagcttaactcggatcaaacttgacaagtcttagttttaagctttagcacttgaattcttactttttatgcaattgttggttcttgaaatatgcatgaggtactgcacttagggggagtattcaaaactcaaatcactcatgaaaacccctagtgcaaggccaaaatgcaaatttcaccatttgtctattttctctaaaaattatctagcctatggcaaaatatttttaaaattatgagaaaatatatgagggtgcccatacctgtcccaacaagtgttattttgtgtgtataaaat

SEQ ID NO: 56474 - DNA, 446 bp, Zea mays
ggacctataaaactcagcttaaactaaagctacaatctagtgccaatttctttaatcgagtgagcaggagcagatggcaagagagcgtgccaaatgagtttgcggtatgaccgtatttatatgcccagtgcgttggaaattgaaaggccccgcttgtcagtgaatgttgctattctagcaaagggaaggtgttttttcggaccttcggcgtaaagccttcgtccatgtcgcaatataaatttattatcttaaacaaattaatattgcgaggggctactgttgggggccttcggcttacgaaggtcctcaaaaacaggatttaacagtatttctggagtataatgtgtgaacaggtatcttcggactcaagtcggaatcgcagcagatcagaataatacgaagattgatacagcgccgaaagtgtgagtaggaaagcttcggcgtgg

SEQ ID NO: 56475 - DNA, 419 bp, Zea mays
  unsure (1)..(419): unsure at all n locations
agctntctataaaggccttgttcaccccttttggatgaatattttgcgagttatgagcaaaaccgttgactgctgtgctgctgtccaaaaaaatctgcatgtggtaaattgattgtttggtgttattcttgtttggctcgacagaattagttaattttttattattgaagactggttgaatatagtggttatagtaatccgtgctatgctttagtagtatgatattctttgttaatgaccgattaaataccttagataaatatttattagtgcagaataatttatcttcatgtggggtagtaataatgtgtttcaaattttggtcggttatctgattgtatgtattggatancactagttatttgcttgcataggtaaatnttatggaaacccaatacggttaattaaataattcatat

SEQ ID NO: 56476 - DNA, 466 bp, Zea mays
  unsure (1)..(466): unsure at all n locations
ggcatgaagtattgatataatgaatatataaaatctatgttctaagcaaattttattttgtaggatgagcataacaccatgactggatgtgaacatgcgttaacattaataacagctgttaaccaggtatcatattaaaaaaatattgttcatttgtatataatgaaaatatatatttatgctgcatggaaatgttgatgtatttgggttgggctatataggaggacaacatgagaattccacctgaggttggtgatacaagttctccgtgtcacgtagcacaggaacaaatggaacatattgttgcatcctcagaagctaaaaatgtgagcattgataaatgaatttactgactggtataaagataatttatgtaaatatgtgtatactaaataataacttcttttattatacagaggttgaattntaatgtggatgttataaatctgagtatgccggatcgtgc

SEQ ID NO: 56477 - DNA, 459 bp, Zea mays
tcaagcttgatgagctaatatggagctaatatttattcaattctttatttgacaccggtgaaaattttgatatatttcttggccctgaaaatactatctttcctattcgatattccatgggaatttgctttttcttatatgatactatcattagatctgccctctaataatgggggtgtcatataaaaatatgagtttacccaataactatctaaataggtatttatgtataaataattgtcataatcactcacaaggttttatatgcaaactattattagaataccaactatgtttattgtaagtattcatgaataaacaaacgattattcataggggttaaccgtccttttgcatggaagttaacgtggtacgagccaaaattggggtgtgcataatggaatcaaatgacatttgctgtaatacgaagattatactgagacctataatgattactac

SEQ ID NO: 56478 - DNA, 478 bp, Zea mays
  unsure (1)..(478): unsure at all n locations
tctaaagggagagcacattntatgattaacaaatgttcattttgagaaagacaggatttgtagcgcatgccacgcanggaagcaagttggagtccatcatccacacaagaacatcatgaccaccgacaggccgcttgagctactccacatggatctattcggcccgattgcttacataagcatcggcgggagtaagtattgtcttgtaatagtggatgattattctcgcttcacttgggtattctttttacaggaaaaatctcaaacccaagagaccttaaaaggattcttgagacgggctcaaaatgagttcggattaaggatcaagaaaataagaagcgacaatgggacggagttcaagaactctcaaatcgaaggctttcttgaggaggagggcatcaagcatgagttctcttctccctacacacctcaacanaatggtgtagtggagaggaagaatcgaaccctatttgacatg

SEQ ID NO: 56479 - DNA, 339 bp, Zea mays
  unsure (1)..(339): unsure at all n locations
agcttgagtgatgctcttaggtcattaacattctttattaacacatggtctccaatggtcttatgttctccttaaatatccaccacatgtgatcacacttcttagtaccaaggtgtgctctaaccatggtaacaccggaggtgttacatgacccagcccccaatggtggtgtcgaggatgacccacccccgaaaggagccgagcttggctccttttcagctgcctccatggatgatcacgtcggatcaccactggttcaatctgaggagcccatggtgacgaatttaccttctgctctcgtcngtccggtcaccttacaagctagtgacccagatgctg

SEQ ID NO: 56480 - DNA, 411 bp, Zea mays
acggaccataaaactaagctgccatttttcaagcacacatttaccgctcagtgttgttaccattcctataacatggccatttgcatgctgggagctagacatgatcggacccttcaagaaagctcagggaggctatactcatgtgttggttgccattgacaaattcacaaagtggatagagtataatactattgcctctctaacctcagccaaggcgagggagttcatacaagacataatattcatgtttgggataccaaatagcatcataactgacctaagatccaacttcaccagctctgaattcttcgatttctatgaacaatggagcatccagattaagtacgcatcagtagcgcatccaagagccaatggccaagtggaaagggccaacagaatgatactggaagt

SEQ ID NO: 56481 - DNA, 403 bp, Zea mays
  unsure (1)..(403): unsure at all n locations
agcttcttganagctggactacgatttcccttgagcagctntgtcgtagaagtattgaaaacatttgaaatctatcttcaccaacttatcctcgaagcaatcataaggatgaatatcttcgtgtgggccgtgagaagccaaggtctggaacctgatgcgaaaagtttctgcaacatacacgaattgttgtacgagacaaaaccctgtggtaaggagcagtatcacaataatttcggctgctacagcttcgtctctcggtctgggtcaagctgccccgtgccaacctttcggaagagatggcccggtgactggatgacaaaatagttttatgtgaagaatgacctgaaaacacgggaagatattaaaggtataattatgcgccctatttggaacgcttcggcta

SEQ ID NO: 56482 - DNA, 371 bp, Zea mays
  unsure (1)..(371): unsure at all n locations
ggcacggacggagggcagtctcgcctgccaacttgccgatgagctgcaagcgaggctcgacgccctgcgcagccgcgtggacaaagcggagaccttgatgcgtgcggaggtcgagcggacgcatgcgcagttcgtggacgtgtaccangagctgggtgcgcggaccgctgccttcgaggcgcccagccaagaagcgggcctctgcttcattgaatggatgaaggaagagctgggggtgctcccaacgatcgtgacgggtctcatgtcatttgcctccctcgtcacctgcgagggggccgtgaatgctttgtcccgcgaggggtgtaggcatttcgaggtcttcgaccagtcggatgaaaactttgaacgtg

SEQ ID NO: 56483 - DNA, 308 bp, Zea mays
agctcttaagcacaacaacctcctttttctttgtgtctggaactaccttcttaccgagcagaacagaacagttcagtcggctctttctccaacaatatgccaactattgtcatcacaaccaaatacctttggtggtagagaaggagtcttccgaactcaatgtgactacggtctcggtgggctcaaaaaagcggtgctctcctcactttcattgtcaccttcaccttccggcatagacttttcagctctggcaggagcatttttggtagtagctgcatccgacacaccagacatgaagctctcatcac

SEQ ID NO: 56484 - DNA, 372 bp, Zea mays
  unsure (1)..(372): unsure at all n locations
tgcctcggccgaggggtcttntgtatcttcaatagattatttagcttccgcttgggccagaatcttcacatgttcgcatcctgccttctctaagatagccgcaattcccctggcacctgagaaggcgcagacatcttcgcggccactcaaaacttcctcaaaggcttcggcttcgtcattgatccattcgattggaccttcgggatcgcctagtacgaagttgtcctcatttgagtatgcgccaatattggtgaagctggtttttatcttttgtacacatgctacagatttttcataggaactttctttcgaagaacgaagctccataactggtttttcccagtaacttttctagtagtcactggcgtctcg

SEQ ID NO: 56485 - DNA, 361 bp, Zea mays
  unsure (1)..(361): unsure at all n locations
acactatannaaacncaagccaacccataacgaggcacgaggccagacaaaaggtcctcttttaacacacccacatagacacggtcctcaagcgactcagacagagacactacaccacagactatacttctcgcgcnagatgaatcgcgcacggcatcgactgtatcatgtacaatccccaaaattggggacctggcaaaggtagcatacctccgacgttgaacccagcacggccatgatagagccaccaaaaacaaatagttcggaaaacacacgactnaacagaagcatgaaatcatgtaaaaccaaaacatacctgctagtaaaacaaaacaagagcaaagcaaaacaattcacaaac

SEQ ID NO: 56486 - DNA, 472 bp, Zea mays
agcttaacgaagaatatagtcttgtgtgtctttacccataggtgtgaggtaaatcgaaatgctatattacttaacctatgtgaagccatgtaaagtccgtcaacaagagtcaggaccaaccaagaaaagacatactacatgttctctgacgacgtagactatcttgtaaaaggtctcgcgtaatcgatcgattgtgatatacgtgtgcatcacatgcatccatacgcatcatacatctctctgatgaagcatcatgtattctcatactgcatccatacatcatataggatcgtagaagtaccggttgctattgtcgaggagctgccatgaattctcgtggaagatggtgaacctcaagctgaagctcaggagtgtcctgatcaccggcccagttcctttgagaaaggcgagccctgacatctaacgttccatatgtacaatatgttaatgtatgcactggctacctatattg

SEQ ID NO: 56487 - DNA, 482 bp, Zea mays
  unsure (1)..(482): unsure at all n locations
tctaagctttagaagaaggatgggctctaacaaatcctctacctaatttaccatgtatatcaactattttacctagatttattcatgaaagtttacatttagcctttctttgggagaatcttactttttaacttatggtgcacaattagtccacttgttttgagaacaaggaggttcatcatgaaccaattgttcacaatatccgaaattgtttggaagttaactactaactacaatgaaaccgttttttatgaaacaattattattttgacaccacttgcaatacagaagacaaaactcatgaaacttgataaatgtgatcctcacatttgaaccatagtagtgcagtgcagtaccacaggaataagttcattcattatctgcaaagtcattccttatagntgtcaatgaactatcatgtgaagacagaataatgacctntgtgattctcacatctgcgaatgctggttatttatgtgtct

SEQ ID NO: 56488 - DNA, 293 bp, Zea mays
tcgaacgggcataaattatctcgtaaatgtgctgccctattataagcaaactccaagtgtggcaaacattcctcccaatccttcaaggtcttctttaccaatggtcgcagcaacattgacaatgtacgaatcaccacttcagtttggccatcaatcatggggtggcatgtggcgaagaacaaaacgttagtctcaagctttgccacaatgttttcaaaaatacttacaaacttacatcacgggcagatacgatggtccggtcactccatgtatctcaccactctctgaaaaca

SEQ ID NO: 56489 - DNA, 205 bp, Zea mays
cttgtcaagcccggaaacatgtgggaagctcccatcatgccaataatgtgtcgacaacattaacacccccggagttacttcatatggacctattcagatccatcggctatcctaacttatgatgatgtaagtatggtcatgctatacttgaagaattttcccgctccacttgcgcattctttttgcatgataaatttgaaaccca

SEQ ID NO: 56490 - DNA, 375 bp, Zea mays
tagcctgaactaacattagtagttccggtttcttcttttgttggtcgcttattctaggcaactttaaagcaaaagcctcctcctcacgcttttagtcttctgcgatgaagcaaatatttttgatgaacgctattctgtacagagtatgctactaagcaaagcactgacgatgccgcatgatcctgaggataaaaagaatgagattattattcaaggcctataatataaaatcaaagatcatgaagcctctctaaagaaaaaggacttccatcttcaaccaatggagggtccattgtgagaagcccaaaccgaagttgctagattaaatgatgaactcctccataaatcagaaagcttctaagaagaaagcaagat

SEQ ID NO: 56491 - DNA, 375 bp, Zea mays
tatccacgcgtcagaggaaaaagtgcatgacgacaccactgttattctgttgcaagcggttacacgtcttatggctatgaaagcaaagtataacttctcgaataactgctataacgatataatcaaactgactattgatctcatcccactcaaccataagatgccgaaagacttataccagtctaaaaagatcgtgtcccgtcttgggatgaagattaagaagaatgatgtgtgcgaagacaattgcatgttcgtctggaaggaatatgaagcgagcacccattgatagatatgcgggaaatcaagatatgcggatgtacataaagaagatggatcatgctttgtcacacgtgcaccatttgcatttgaatgtgc

SEQ ID NO: 56492 - DNA, 378 bp, Zea mays
agcttgtgtgtctcaaggtacctgttcttcttctcatggaggacctcgctgacatagtagaccgacttctgtatggtccggacccctacagttgtgcccacgtcctcaaagtctgtggtggtcggaccaccaccttctcctaggggaactttctgactccccttgggatgttgcaccatccttttgacaaccagcaccatgctcactgtctctgtaaccgctgcaatatataaatacagcggctcccctggctctggaactaccagtattggtagggacacatggtgctgcttcaactcttggaaggctcactctgccttctcggtccaaaagaatggtcctgacttctataaaagcttcgagaaggagagcgccctc

SEQ ID NO: 56493 - DNA, 336 bp, Zea mays
taatgcgcctataacatagtcttatattgtttatgtgtttgctcccatgggtcacgataacgagggttacattttataccctgtcgataatcccgaacacacaattaggaaaattcattctaggaagtctcactctggctcttatcatgcttttatgtataaaaatgagggatctagttctagtcaatccactcatgctaaattgcctaaaatgaaatcttctattgcatcaaatgagcataacatttcatttaagacttttgatgcatcatatgttgtaactaactaatcagacaaagtaattgtcaaatatgttggggccaaacacaatggctc

SEQ ID NO: 56494 - DNA, 360 bp, Zea mays
  unsure (1)..(360): unsure at all n locations
agctntcgtttttagtctaataacctcagtttttattgttgcaaacgcaatattatagcgcgtgtcttcagcattcttttgcgctgtgtaagaattgctaaatattaaaccctataatgaaaagaatagtctaagaataaaagaataattcagaaactattaatgtccaaatatacaatttttatacctttagactatcatgtgcgaggctatctgcaagatcgtgctttgtcataacgcagaggccagcttgaagcttttggaaccccatacttctagccatctgtcggcagacatataattctttgttggctgtgatgcagtataagaagtcattttcgttcgcgccattgaatacta

SEQ ID NO: 56495 - DNA, 205 bp, Zea mays
caacccagcagaagcagatctagacgggccccccttcgaaaaaaaccaaaaaagaaagccgggtgagacacccgtcaacaccagtgaaccatcacttcttcgaaagacagacacatccatactagtaaacagacaggtaaggcccataccgcgcaactgactaacaaacagttaataatatcctagtgactctactaaaaacaca

SEQ ID NO: 56496 - DNA, 461 bp, Zea mays
  unsure (1)..(461): unsure at all n locations
agctttgtaaatcccatatttntggccatcttccggctaacggttatttccttgttgtctgggagacagtataggaaatcatcttcatctatgccattatacactaaggtccccttcagatatttcagttcccgggcgtagtgtttggcttccatgatttcttcttcagataacttttttcccgaagcatgacgaataataaagtcaaaatcatcggacggtgcttcaggaataggagatttagctttttcgagcgcatccttttctagagccatgccagtatttggagattcttgctcagctctctcagttgcaacaggctctgcctccatgggcgctgagggctcagctttggtttcagcacgagccgccacgacttcggcaaccttttttgcaggagtaagagtcaatgcccttggttgtctccatgacagcgttcagcacgcttgccattcttcttc

SEQ ID NO: 56497 - DNA, 479 bp, Zea mays
  unsure (1)..(479): unsure at all n locations
tctcagcttagctncaaggcaccagctgttgagagcacaatagctactttaagctgcaccttcngaagctacagccgccgaagctgccacggccaaagatgtagatttagaacacacaatttctaatattgataagatacttctagacatggccgcagaagaagctgccgcagccactgaagaagctatggccccagagcctgataaggagaaggaaatagccgaagacactttgaaagaagaaattttcaactttcaaaacttagttggacaggagttgacgaaggctgagaaagaagagttaaaagaatatgccatatcttgcggatatcaaccggnggcactagtcttcggtggcgttgacgatgaanagttaggctgtgtccgagatcaaaccggagcgaaggttattggtactctatcanagagtatttggttcccgaagctcaagacgacattagccgcttcaacgacacaca

SEQ ID NO: 56498 - DNA, 359 bp, Zea mays
  unsure (1)..(359): unsure at all n locations
agctagttatnagtgacagtgaaccaccatatttgacgatgatgacaggataatttggatgacaaattcggtcgctgatgggagcgctatagtggttggtgaaaatacttacattcaagcaaacccatcaacctcaagttatccaatccttgaagaagtgcttctaccgcaagatatgccaaccattgtggaaaatgagcacgaagaggttgctagtgaagaatccattgaacaagatgaaagtgatgatcaaattcagagacagtctctagtgcctcaccctcgagtgcaccatggcattcagagagatcatcttgtggacaacatcctgggtaacattcggagaggggtgacaactc

SEQ ID NO: 56499 - DNA, 482 bp, Zea mays
tactcagcttctaagggagacacatttgggactaaaaatgttattttgagatagacaggatatgtaccgcatgtcaggcagggaagcaagttggtgttcatcatctacataagaacatcatgacgaccgacagaccactcgagctcctacacatagacctattctggccgatagcttacataagcatccgcgggaagaagtactgtctagttattgtggatgactattctcgcttcacttgggtgttctttttgtaggaaaaatctcatacccaagagaccttaaaggtattcttgagaccagctcaaaatgagttcggcttgaggatcaagaaaataagaagcgacaacgggacggagttcaagaactctcaaattgaaggcttccttgaggaggacggcatcaagcatgagttctcttctccctacaccccacaccacaatggagtagcggagaagaataatccgactctattggacatg

SEQ ID NO: 56500 - DNA, 416 bp, Zea mays
agcttctaaagggagaacacatcttgggacttacaaatgttcattctaagaaagacagggttcgtagcgcatgtcacgtagggaagcaagttggtgttcatcatccacacaagaacatcatgacgactgacagaccactcgagctcctacacatggacctattcggcccgatagcttacataagcatcggtgggagtaagtactgcctagttattgtggatgattattctcgcttcacttgggtgttcttttcgcaggaaaaatctcatacccaagagaccttaaagggattctcgagacgggctcataactagttccgctcaagaatcaagaaaataagaggcgacaaccggacggagttaaagaactcacaaattgaatgcctccttgaggaggagggcatcaagcatgagttt

SEQ ID NO: 56501 - DNA, 418 bp, Zea mays
  unsure (1)..(418): unsure at all n locations
ggacattgtctccctgtnggaagccaatgccatccttaatgtcttgcatctcccattatagagcatgcttctaacaaatttaatattttcattttcaatttcatgctcattgattgtagcagtaagttgagctatgtgatcatttcgttgtttaattaacgctaggtgatcatggatagcatcaacattaacatctctacatctagtgcaaatagaaatatgttcaacagtagaggtagagggtttgcaagatcctaattgtggtggaactacccgaattattccaacttaagtgcctaagtcccgccttagaggctagaccacacttaaatgggaataaccccgcaatccctctgatctagtccgacgaggccactgacaggatcaagtaccatattctcacttgattgtgagtcac

SEQ ID NO: 56502 - DNA, 450 bp, Zea mays
  unsure (1)..(450): unsure at all n locations
agctntatcaaatggacgtgaaaagtgcctttctcaacggaccgatcaaagaagaggtctatgttgagcaacctcccggctttgaagatagtgagtatcctaaccatgtctataagctctctaaggcgctttatgggctcaagcaagccccaagagcatggtatgaatgccttagagatttccttattgctaatggcttcaaagtcggcaaggccgatcctaccttgttcactaaaactcttgcaaatgatttgtttgtatgccaaatttatgttgatgatattatatttgggtctactaacgaatctacatgtgaggaatttagtaggatcatgacacaaaagttcgagatgtctataatgggggaagtgaagtatgttctatgattccaagtaaagcaactccaagagggcaccttcctaaggcaaacgaagtacactcaagatattc

SEQ ID NO: 56503 - DNA, 362 bp, Zea mays
tgtgaagattcttcattccaacatgggctagtcggtggtgtcagagccaacccatgttagtcttagcaattaagcatgtgtcgagttcagctctatcaaaatctactaagtatagctgaccctctaacacacccttaaatgctattgaatcatcacttcttctaaagacagtgacacctacatcagtaaagagacagttgtagcccattttgcataattgagatacagaaagcaaactgtaatctaatgaatctacaagaaaaacattggaaatagaatggtcaggagatatagcaattttacccaatcctttgaccaaaccttgatttccatcccccaatgtgatagctcgttggggatct

SEQ ID NO: 56504 - DNA, 352 bp, Zea mays
ctgcagctagtctattctatttactgtttattttgtgatgctgaaagaaggcgtcaacattcactaatgaagctaatttccgtactttgtaatgttaatatggtggtgcgggcctggactacattttctcaccatgaggccatggctgatgttggagttgctgctgggctttctctggaccttggccttgcatctcacacagagagtgctcattccattaacatattgctgtgatccactctttgcctatgctatgtgatccactcctggattagaggtgagcgtttcatgacactgaaatcttgtgccacttgatgcaacatctgctaaattaaatcagtttgctattact

SEQ ID NO: 56505 - DNA, 446 bp, Zea mays
  unsure (1)..(446): unsure at all n locations
ntttcatcatctcttacttcatttccttggctcaattantttcttaataacnagctnaactccgctgatgctttccagacatcattgttttcacaaccacgaaacatatcatgaaggagtatgtccattattatgcgagagtcatgactcttcaacccagaaaagttgcccgtgttcaaattcacagaacttctatagcccgcggcgtaaccatctgggaactttaagtttttcaaccatggcatcaaatgtttcttcctgttaggcttaatacttaaaggagcacgttgcttcttctgaatctctcctatcttcatagatggccttctacagattaacgccaaggctttccttgccttaaggttcgctattgttttgtcagtgatattcatgccagtgttgataatgctttcacacatatttcgcttctggtgcatgacatcaat

SEQ ID NO: 56506 - DNA, 438 bp, Zea mays
  unsure (1)..(438): unsure at all n locations
agcttgttcaaacgaagaggcataaagtttatgacttattattcacgcttctcaaattagtattacttctacctgtggcaacagtaggtgttgagagggcattttctgcgatgacattcatcaaaagtaagttgagaaataagatgggtgatagccttttggatgactgtctactcacatatattgagcgagatgttttctttcaactggatgaagaagatgtaatcaagacttttttaccatcagaaaccgcaggccaaagaaaaacaagtaatcttctagtacatactcccatgagtaagtgaaatttatgcatatattgaactaaattaatatattatcatgattataaaaatattatattgggaccaattatatatattngtaactatttagttagggcaaatttattatttctatatggtaccaccaaattat

SEQ ID NO: 56507 - DNA, 359 bp, Zea mays
ctcccaatcggcgcttgaacaggggcagaggcaacgggaacacgtgttcgaccgcggctgacacccctggtatacgcccgttcgcgcaccgcgcctttccagtgcacgcccgcgcgcactcgccggtccacgaccgcccgtgcaccgcgccgcgcctataaagccttcccaggcgcgccccacttcgccccgcactcaccctctccggccagccactttcccttagctccggcgagcttatttccgcccgccattgccgccagagcttcggccaccgtggccagcccaccccagccatcctcaagccaagccagtgcttcggctagcttcgccagtagcccgtgaagcttggcaagccc

SEQ ID NO: 56508 - DNA, 432 bp, Zea mays
agctggacatcgctccgccgtaggaaaccaatgccattcttaatgcagggcgccccccatgacagagcatacttctagcaaactgaaacttcacatgcacaagtgcatgctcattaactaacgcagtgaagtcagccatgtgatcaatcagttgtttaatcatagcaatgtgatcatcaatagctcctacattaatatctctacatctagtgcagatagaaacacgatcaacagaggatgcaaagggctggcaaacataaaaaccctccagcctagcccctaatcgatcactctcagcactaagataggcaatagaatcattggaaacgctaacaaccttagtgaagtactcacatttgcctacgtcctgagcataagcattcttaaatttaacatgtgttctattttcaatagtaaggaagtactctcgac

SEQ ID NO: 56509 - DNA, 364 bp, Zea mays
ctcattccaccttggtctatttggtgattccatatccacccatggtagtcttaacaattaaacaagtggtcagctcagctttattaaaatcaactaagtataggtgaccctttaacactcccttaaatgctactgaatcatcacttcttctaaagacagtaacaccctatatttcgtaaaatagaacagttggaaccccattttgcataattgagaaacaaaaagcatattgtaatctaaagaatctacaagaaaaacattggaaatggaatggcacgtgatataccaatttacccaatcctttgaccaaaccttgatttccatccccgaatgcgatagctctttggggaatcttggttttctc

SEQ ID NO: 56510 - DNA, 368 bp, Zea mays
cgaccacgttttttctttcttctgcgccacctgaccaccaacgccgcaccagcgagcgccggccgccccaaagcgcaccggcaggtcctcactcccgttctcgccacgaaagcgaggacataggacggaatgttgcatcctagctgagcgacaacagatcgccttccccggcatggctggagggcgcctcctccgcagagctaggggatggtttcctaccccacaagctggaagaagaggtgcgccgctgactcatgcgagagggagagctccggctcacctcgccctctgccccaggcaggatgatgaattcttgaactgatggcgggcagaggtcgatcccgactgcttcccccacataaactggg

SEQ ID NO: 56511 - DNA, 315 bp, Zea mays
  unsure (1)..(315): unsure at all n locations
gatacttaagncacctgcggcatgcaagcttgaagctggcctctgcgctgtatattattttctgaatgtatgtagaatgtataattggaaatttgtgatttctggatcattcttttattcttatagtaattctttcttcatataggtgttaatactgagcaatgctttcacactcaaaacaatgccgaagacgagagctataatattgctttcacaacctacgaacagaggttattaagctgacgaacgatactttggaaaaagataaaattctgcttacattggtggataaaataaaggaagatgaagctacct

SEQ ID NO: 56512 - DNA, 427 bp, Zea mays
  unsure (1)..(427): unsure at all n locations
agctntagtgattagagagagngatttgtctttttcattttagctcttgcgcttggatcgcttcttttctttctcattcgttcttgtgtccaaaactcatttgtaaccgaggcaagagacaccaattgtgtggtggtccttgcggggaagttttgttcctggttgatttgagaagagaagctcactcggtccgaaggaccgtttgagagagggaaagggttgaaatagacccggcctttgtggccttctcaacggggagtaggtttgcaagaaccgaacctcggtaaaacaaatcatcgtgtcccactctttatttgctcacgatttgttttgcgccctctctctcggactcatttctatttctaacgctaacccggcttgtagttgtgattaactttgtaaatttcagattcgccctattcacccc

SEQ ID NO: 56513 - DNA, 200 bp, Zea mays
cgagcttggtccgaactctttcattcctgagtattggggatacccctgagtaggcatcgaggaaagacagggttttgctcccaccaggggaatccactatttgatctatgccaggcacagggtatggaaccttctgacatgctctgtttagaccagtgtattctacacacatacgccattttcccccttttttttttaca

SEQ ID NO: 56514 - DNA, 230 bp, Zea mays
agctcgtgaagattcttcattctaacgtgggctagtcggcgatgccagagccaacccatattagtcttagcaatgaaacaagtatcgagttcagctctattagaatcaactaagtatagccgaccctcgagtactcccttagacgctactggatcatcacttcttttaaagatagtcacacctatatccgtaaaaagacagttgaacccattttacataattgagaaact

SEQ ID NO: 56515 - DNA, 415 bp, Zea mays
agcttaccacacttgaagcatgagcgtttctcctttgtcttggtcttgcttgggtgccccttgcggccttttagtaccgtcttgaatctcttgatgatgagagccatctcttcatcattaagtccggccgcctcaatttgtgccaccttgctaggtagcgtttccttgcttcttgttgccttgagagcaagaggttgaggctcattgattggaccgtttagagcgtcgtcgacgtatctcgcctccttgatcatcatccgcccgcttacgaattttccgagtacctcctcgggcgtcatcatcgtgtacctaggattctcacgaatattgtttacgagatgaggatcaagaacggtgaaggaccttatcattatgcgaacgaagtcgtggtccgtccatcgagtgcttccgtagc

SEQ ID NO: 56516 - DNA, 307 bp, Zea mays
tgcaagctaggtcattctatcgctaactgtcccgtctttgattgtgaccagtatcacgggagcaagagggacaagatgaagtattacaagaaggccaacggcgaggcacatatcggaaaggagtgggattcggattgctcctcctccgactccgacaatgaaggactcgccgccactgccttcaacaagacatccctctctctcaacgagtgtcacacattgccttatggcaaggcgataagaaagtatgtaatcacaaccatgtcacttatgattcttccagagataatgagtctagtgatgatga

SEQ ID NO: 56517 - DNA, 158 bp, Zea mays
tacatccaaaggggatgcttttaatacatatacctagaaccactcccccatacataaatcttaaatcaatgtaacatctactctgtacaatccaggaagctgataaactgaccctggtctgcctaatgctacattgctgctattgggtcctaatctcc

SEQ ID NO: 56518 - DNA, 318 bp, Zea mays
agcatatgacattaccgagggttatcaacttttatttatacatacatgccagccagatatgaaacattacttctggctaggccaacttcttcacttgagtaaccggaatccgctttacctgtttgccttctttgagattatctcaattgaaaagccatctgggtctaaacagaaattggcagggaattccaacacaattttgtaattattcaaacaagtttggttgctctttctcttcccttcctgcttgataattactgaattgtgttaagcctcgtgctattttatctttgttcaaatatgcatgggcttcattta

SEQ ID NO: 56519 - DNA, 365 bp, Zea mays
ctaaccatggcaagcacattatcgcatgtgataatctatgcatatccacttcatttgctctcttgtatggagtactgcttgttacctaaattgaatggatggatgtatgtatgcttgcaatcgcatatagaacgatccggtcgaagagcccgaggaactcgcaggagaaacccctgagcagcagtcggtaggaggaggcaaatgtcccttgacctatctctgtcctattcattctttaattcacctcccgctttacacatttatgcctaaggattgactagcttttgatgaccatggccttgattacctatttgggttggaatataaatgcataactctatgctatcgctcaaactctaataatg

SEQ ID NO: 56520 - DNA, 402 bp, Zea mays
  unsure (1)..(402): unsure at all n locations
agcttggcttggcttanagttagcttgcatttcatacattgataaatattattatattaacaataattaaatatataaatgtggaataaaatatcacccttcaatattatgaataacctatattatgaaatatcataaatgtatcataaaaaccaagaaacaaccatattattatctatagaattataatatttattattattttatagaataattaaaacaatatagctcgcgagcctgaacaagccgcggcttaaagtttttttccagccctagacctagacaaaacagagggtgacaataataataattaacaaaacttggcagttcgacgaacggacacgacaaccgaccgacgcaacgactgaaccactgaacgaactgagctactgaagaagcagt

SEQ ID NO: 56521 - DNA, 355 bp, Zea mays
cagcttgccaatactcgtcaaagcatttacatttgccatcacagcaactacagaccataccagtaacttggcctttcgcatgctggggactggatatgattggacctttcaaaagagctcaagggggatatacccatatattgggggcgattgataaattcactaaatggatagaggtcaagcccattgcttctttaacctctgccaaggctgtggaattcatacaagacataatattcagatttgggataccgaacagcatcatcaccgacttagggttcaacttcaccagttcagaattcttcgacttctgcgagcaaaagagcattcaaatcaagtacgcatctgtagcaca

SEQ ID NO: 56522 - DNA, 423 bp, Zea mays
  unsure (1)..(423): unsure at all n locations
agctntaacaagtaaaaatgatgtacattgtttcgactactaaacganagctaagccaccgtaagctaagtaaaagctcatattctcgtggctaataagagatgcatgatccaaaaacaaagtatatattgtcctaattcaagtagcagtttgtgccttctaaatgtaaaatggaacattatgcaataaagcataccttcctatacgcaaaaccagtagggaaccatcctttcttagttctgcaataaactgcaattgcagatgtcacaacaaactggacatatccagttaggattcttcttaacctctaacacactctcgccatacctgcatccactatacagggtcaatccagaaactactaactgtcaagagaanagaaaacagagttcaattcacatttacatgcatattcatctcatc

SEQ ID NO: 56523 - DNA, 113 bp, Zea mays
  unsure (1)..(113): unsure at all n locations
gttggatcaagctcatcnttagcctctcattatcttctttgagctttgatatgtatcatcatttgttccttcaaattttagctcanaagaaaattgcttgtcgacggacaaca

SEQ ID NO: 56524 - DNA, 335 bp, Zea mays
acacttgtatacgtgttctaacgtgcgatacgaaaaagaactaccttgcgcaacatgtcgagcacgttaacaggtgggaggagcacatcacagcaagaatgtgatgaccacttcaagacccctggagttactacatatggacctgttcggacccgtcgcctatctgagcatacgaggaagtaagtatggtttagttattggtgatgattgttcccgcttcactcgggtattctttttgcaggataagtctgaaacccaagggaccctcaagcgcttcctcacgagagctcataacgattttgaactcaaggtgagaaagataaggagcgacaacg

SEQ ID NO: 56525 - DNA, 415 bp, Zea mays
  unsure (1)..(415): unsure at all n locations
agctngccctcaactataattgaatcaaatgatatcactagaaggggtttaaattaagccatgaatgataccagttgtaggagtccttataagattactccccctaaatgagtattctcctttagaaagaagttttctccccctttagagatgaagaaatactccccctgacagagatcctctacttagggaaaaagcatgtgaaaattagaggagcaagacatgatttgaaaagactatcttcccttatgcataggtaacagaatatgagttaactacttatgcatttttagcaacatggaagcatatgatatgaattatagtctaatcaaatattggagaagacatgtaaatggtactaaatgtagtctcaaaagataccaattgaaagtcaatggcgagcttgagagacatg

SEQ ID NO: 56526 - DNA, 348 bp, Zea mays
agcttcgtcatcaggatgtgaacaatgggttccataatggtcgaatgttgcctttggtgtccatgaaatgactgggatgcaagtgacatgtgcaacacgtctcgcagggaaaaatactacaatacccatattaggctttgtaaatcatgtgtataagacttaagaatataaatgtaatttcatataaagttgtacgtcgccctatccctacaacaggtacagtgcccatgcaagggatgttttctaataattcacgtgctctcgttgtactgaacatcattgtactgaacaactattcattcgaagatacctaagctaaatcaccttctgacatcctgcgtgtgtcac

SEQ ID NO: 56527 - DNA, 385 bp, Zea mays
agcttctaaagggagagcacattttaggattaaccaatgttcattttgagaaagacagggtatgtagcgcatgtcaagcaggaaagcaagttggtgttcatcatccacacaagaacatcatgacgactgacaggccactggagctactccacatggatctattcggcccgatagcttacataagcatcagcaggagtaagtattgtctagttattgtggatgattattctcgcttcacttgggtgttctttttgcaggaaaaatctcaaacccaagagaccttaaagggattcttgagacgagctcaaaatgagttcagcttatggatcaaaaagattagaagcgacaacaagacggagttcaagaactcacaaatagaccggtt

SEQ ID NO: 56528 - DNA, 431 bp, Zea mays
  unsure (1)..(431): unsure at all n locations
agcttgnncttggctcatcttcttccttcatttcaatttggcgatagcccgagtagcagtccaatagactcatgagttccgaagaagctgctgcatctacaagggagtctattcttggtaaagggaactcgtccttcggacatgccttgttgagatctatgaaatcaatacacattctccattttccattagccttcttcaccataacagtgttggctagccattctggatatgttacttctctaataacgccagcactcagaagtctctttacttcattccgagcaccttcggctttatcctcagacattttctgaagtctatgcttccttggcctgaaagatggatccacattgagtgaatgttcaatgacatctctgttaacatcacagagatcattagttgtccaagcgaagacatctttgttattg

SEQ ID NO: 56529 - DNA, 421 bp, Zea mays
agcttgagccgaggcattgcctcaccagagatgtggtattaccctctccggacttcggtcacccgccgccgcgcgtgaaccgagctaaccagtaaatcatctttcaattcctcgcactcacgtttttcccagcacccagagaagctctctgaaccgttcaattgacctcgcatgccctggttaggctggactccttaccaccgacgagcatctccgcctgcgcacgtggactggccgactttgaccatccccgacggcgacccgcacatcgccgtgatcctcaaaacctcccctacatgctcgatcaccttaccggagcaacctcgccgcttgtaagcccctccgcctttttcctcgcgacactgtccattaggaaggaccggggttcgattctaaaacctacggggttttggaaaccgaa

SEQ ID NO: 56530 - DNA, 330 bp, Zea mays
gcatgcaagcttctagagggagaccacgcgatctgtttatctcatgtgaaacccgaagaagacataccaatgagcagcgatgcaagcatgaaaaccggtgggaggagcacatcacaacacaaatgtgatgaccacatgcaggcccctggagctgtttcatatggacctcttcggacccgtcgcctatctaagcttaaggggaagctagtatggcttagtgatcggggacgacttttcgcgcttctcttgagtattctcttggcacgattagtctgagacccaatgaacccttaaactcttccttaggagagccctaaactagtttgagct

SEQ ID NO: 56531 - DNA, 419 bp, Zea mays
  unsure (1)..(419): unsure at all n locations
agcttgcagatctacttctcgttcaaaagtttgaaagtgattatctttttcgatgaagtttaattaagattgagcaaaatctgactaaaacttctcaccagttttctaggaatacaaaagtttggacgaatctggaaaatagaaacaagtgcaaactaatccaagctacacactacgggactgactaatataatccgctggtataataaaatctggcactggctacttcctgttcttgtctacaaaggcctgatcgatgtgacactgctgctgctaccatccttcgaaaaggcatgtgttttagcaactagtacaaggaacgaacttttctttttctgttctgctggggaaaacaaagaacaagaggggaanaaatagaaactatctacttccttaaaacttgaccccttttgaagctc

SEQ ID NO: 56532 - DNA, 422 bp, Zea mays
  unsure (1)..(422): unsure at all n locations
agcttcgcacctctgaactaactcgtctgtatcactcctcgntgntggccaataaaatcctgacctgaagactttcccgactagtgttctggatgctgcatgtattccacactgcccagcatggacctcctccagaagtcgctttccagtagatgggagaatgcacttcatgaggacgcctgacgcaccccttctgtacaatgtctccccaatgagtgtgtaatgagccgactgtctggcaatgcgctcggctgaattcttggcattcgggccctcttcattctttatatactaggagaatggccttcttcaatcattagagactaactcgggttgatctataatattacactcttctgtttgatccattgagatgctccgctgtagtatttcttgcacaaagactccaggtgggacctgag

SEQ ID NO: 56533 - DNA, 412 bp, Zea mays
  unsure (1)..(412): unsure at all n locations
agcttatgcacgcgatactttcaaatttgattcttccattatataggcnaggaatcaacttatacttaataatctgctaataaaatattgacccactttaaaataaatgctcatctttaaccattcttcttggaaagccttaacacttacatgagctcccacctttggtgagatcatgcacattattccccacaatcttgtttaccgaaaaatgtatgtgaactcacccttgctggactcatatccccctatgtcaaggataagtaccacaagatgaggcgcatgaaagatgttgagatgagttatgagtggttcagggagccctcttccaagctaacattggttggtggatcgatcgctcttattgatgtaaatatntaattatctcggacagaactttgtcatctaataa

SEQ ID NO: 56534 - DNA, 329 bp, Zea mays
  unsure (1)..(329): unsure at all n locations
agcttctaatggagaggattcctactttattttatagtccatgtgctgcacattgcttggagggcataggaaacttgaaggaattcaagaaaccaattgcgtgtgcaaggcgtgtgataactttcatatacaaacatgggtggggttgatcttgtgtggcccgctgccactcattttgcttctttgtttctcacatggaaagcttatacaagcacaaagatgctttgaagtctttatttttacaagtggtgtttggaccgagaacaggatggtaaggactagagctagattggatgtgtataacattgtcttctcacancatttagaat

SEQ ID NO: 56535 - DNA, 319 bp, Zea mays
agcttctaaaggagaacacgtgataggtttgtcttactccaagtcgtataagatagaccttgcgtagcttgtcaagcacgttaacaggtgggaggagcgcatcacaacaagaatgtgatgaccactttaagacccctggagatgctgcatatggacctcttccgacccgtcgcctatctaagcatatggggaagtaagtatgggctacttattggtgatgactttttccgcttcacgtgggggttctttttgccgggataagttgaaacccattggaacctcatgcgctttctaaggagagctcaaaatgagtttgggc

SEQ ID NO: 56536 - DNA, 320 bp, Zea mays
  unsure (1)..(320): unsure at all n locations
agcttttcttgtgtcattccgatagaagcgttagaattcgagggcgaattctttttaagaggggtagaatgtgatacccggttcgcaaagaagagaaggtgggggttgtttttttttgtttttttccctcatccagntggtgttttggggatttgcgaatttgcgaataacatttccaactagggcagtagatttttttggtttgacatttgcgttgcggtcgggagctgtcgcgtgggttagttgggccgcaattggtgtttcggcccattaggcctcccaaaccctatgccgcaccctcctatctactntccccttaa

SEQ ID NO: 56537 - DNA, 430 bp, Zea mays
agcttctaaagggagaacacgtaacaggtctatcatatgttactttcgaaaaagatagacctcgtgcagcttgtcaagcagggaaataagtgggaagctctcatcatgccaaaaatgtgatgacaacatcaagacccctggagttacttcatatggacctcttcggacccatcgcctatgtaagcataggaggaagtaagtatggtcttgttatagttgatgatttttcccgcttcacttgggtattctttttgcaagataaatctgaaacccaagggaccctcaagcgcttcctaaggagagctcaaaacgagtttgaactcaaggtgaagaagataatgagcgacaatgggtccgaattcaagaaccttcaagtggaggagtatcttgaggaggaaggaatcaagcatgagttctctgtccttacaca

SEQ ID NO: 56538 - DNA, 431 bp, Zea mays
  unsure (1)..(431): unsure at all n locations
gcttcagagcaagatactgaagccgaagcttgtgctcttaagcccgtaaagaaaagacccttggaaagtgagacggataaaataacaaaaccaactnttattgaagaaaccggtgttattgcccccgaagcattcaaaggtcgtgaatatattggtcgtcatgcttcggggaaaaaattatcagaataagaagaacaagaggcccagcactatgcctaaaaactgaaatatccaaagggggcgttaatattcaatggcagtggagaagaagacttcttgtactgtctccccgacaacaaggaaatttctgtctgtcgggagataagcagaagcttcggattcccaactttagaagacggactttcggtgctgtcaaagaacgatctggctgacagcctagcttataacagtttaaaggtacgatatatgaa

SEQ ID NO: 56539 - DNA, 414 bp, Zea mays
cggttgaacaagataatgttgacttataatcgaggggagctagaatccatttaaaggcaaatggacatttaaaggcaaaagatgctttgggctgcccaactttggtggcacatttatgaagcttccaaagaacttgatcgcatgataagagaagaagttgaacaaatataagagtagtgaggtttgaacacaaaaacctttgatgagcaagtccatgccagttttatctatgacaacgcgtctccactctcatgttatatacaagtgtcatcatggctagctttgtacaaagcacatcaacttcccattcatgaaggcaaatttgttccaaaacaatttcttatgagctacgaaacaacaatagttttctttaaagggaatacctgaagggaaatagggtcaaaccttttctct

SEQ ID NO: 56540 - DNA, 408 bp, Zea mays
  unsure (1)..(408): unsure at all n locations
tgtcttattgctgagacatgatattttttaatactaaataaaaatatataaccttgcatcatgcagaagatttgagtgttcatttaaatgttgaattgaaatctggatttaggaatagaanataagaaaaagattaacctgcgtcgtgcgccaaatttcttattcgacaagaagcaatttcacgtcgggccatctctctccttcccttttcttttttttctccgcgtatcgatgacacgtgggccctacgagtcatgcaaactcgccacttcaccgaatcatgcgtgctttgtgctctggcgccgataggtggggccgggttgtctgccgttcggccaggactcccacattcccatgttgcgtcccggggcgcatagcaccgcaggtgagcctagccttatggcatgt

SEQ ID NO: 56541 - DNA, 422 bp, Zea mays
agctagctcgtacggttcgagatatgcgtgttgcataggtggctcctaacattcaagaacttgatcagaaagcagcagcagcagctgctgctgctcgaaaggccctcacgtctgtacagactttaccaaaaggagttgaggttttggatccattgggccttgcgtaactatctatatcatcaagcttttgatcagcacatgcattatttaccatttcaagaacatcttgttaagaaaatacactccttgtctagttgtcgtgcgctattctcacctattagtccctcatttagcataagttgcatcttttttcttccattttattactttccctctacaggagattcctcaccattcatgttcttcagcatcatgctgtatgctggtctagcatctcttattcattgcttattatttctgtg

SEQ ID NO: 56542 - DNA, 423 bp, Zea mays
agcttccatctataccgtctcagactgttgttaaccagctgtaagtcttcgatgaagttttccgaattctccgttttgattaccacatcatctacgtaggcctccacacgcttgccccagtgatcggctaagcacgtttggatggctctctgataagtcgcttccagcgttttgaggccgaacggcatggaggtataacagaaagcaccaaacggagtgatgaacgttgttttttcctcatcttccttcgccaaactaatctggtggtatccggaatagcaatccaagagagacagcacagaacatccagcggtggagtccaccacctgatctatccttaagagcccgaagggatccttcggacagtgtttgttgagatcagtatagtcgacgcacatgcaccaatccactttattctttttg

SEQ ID NO: 56543 - DNA, 427 bp, Zea mays
agctttaccaaatggacgtaaaaagtgcctttcttaatggaccgatcaaggaagaggtctatgttgagcaacctcctggctttgaagatagtgagtaccctaaccatgtttatgaaagggaaatgtgcccttgggccatttctaagtattttggtgatttaatgaccaacacaagtgcctaagtgttaaatggtggacaaagtacacatcaagtataaaggtatgtctctcagacttagtacattgttttagagactaatgtattgtgtctaagtgctggaaacaggaaaaatcaagttgaaattaaagatggctttgttcagccatagtcagctctgtctgggtgcaccggactgttcggtggtgcaccggacagtgttcggtgcgccaggcttgctcaggcgaagttgatgctctccggaagtga

SEQ ID NO: 56544 - DNA, 405 bp, Zea mays
agctttgggcacgcatctgaagattatttcatcttatcacccacagacagatggtcaaactgagagaagcaaccagatccttgaagacatgttgagggcttgtgctttgcaagacaagtaagttgggacaaaaggctaccttttgtagaattcttctacaacaacagttatcaggctagtttgaagatgtcactgtttcaagcactctatgggaggaattgtcgaactccgttgcattacgaccaacctgactaaagggaggtggtgggtccagatattttgctagaagccgaaaagaatattagaatgggtcgagagaatttaaaatatcgtttcccagcagcgaaattaagctgacaccataaaaaaatatttgagtttcgaagggggagattttgttacctg

SEQ ID NO: 56545 - DNA, 432 bp, Zea mays
agtcttggccccacctgcaggctcgtatccttctctgaggcgggtccgggggccactgtcagtaccctggaacatgggtaccccttactacagtatgaagccgatttttttgcattttggccctttctcggaaaaaaaattcacgtttggaccctagaaaattttaatgtcatttttggaccctttgcttggcgccgtagcctatggcgccgaggtaacacagctcggcgccatatgctatggcgccgaggtacgtgctgcgctggcacaaacggacgtcgtggcgtcgacgtggcactgagctcgacgccatagatcttagcgctgagcttagttctatatacaaagcccgtctagcttagtcggtaaaatacaaggctcttaaccttgtagtcgtgggttcgagcctcacggtgggcgtttttaatactt

SEQ ID NO: 56546 - DNA, 344 bp, Zea mays
agatctcattatcctatcattgcaaaactagaagcagcgtgaagaatctacagtgaactcgagcgaaacatccaagaacatgaacgcatgctaagtgacaccatcacagatgctgatctatcaccattggtagtcttgtcttaatttaaaaaaaaaatatgttcctttaatttcatacaaccattgattactttgcctgtgctttgaggtggtttttattttttgggggggttgttttgggtttttagctaactttttagtttctgctccatattggcgtcttgacttggtttttaaacctttctaattttttaatataatgaaatggagttctcatgcctatt

SEQ ID NO: 56547 - DNA, 330 bp, Zea mays
agcttgaacatgatagcatgttatcgccaaatccatattctagaagaagagagaggaaaactgcttttaaacacatcaaggccactaccagatttgaatgatgccttttgatcttggaaatgcaccaacaagctttccaatgtgccatgaactctgttctcacaccttttctaaggagatttgctatggttttcatcgatgacattcttgtgtacaaccctgcactaaaacagcaagttgagcacttaaaacagtcttcaacaaacttaaggaacactaattcatccctaagatgaagaagtgtgtgcttgaccaacaacaactacccta

SEQ ID NO: 56548 - DNA, 354 bp, Zea mays
acaccgcagcatgcaacttctcaagctgaggggcctcctgtttaattttgaacagtccgcctggccgaagcccctggacatgggctcaatgacaactttattgggccaccggtggagcctgtgctctcaaacgccaagaaccttcggacataccaccggaaaggatttcttggtgaaccttgggcgcacatggaacaagagcctggagccaaaaaccgggattccgcttgaaacctcttggagagctagataaacaagagaggccttcagcttctgccaagaagtgaacggtcctgggcgaaaggaggaaaaccaggttgagccacaattctgacagccataacaaaagaattg

SEQ ID NO: 56549 - DNA, 276 bp, Zea mays
accccaccaacgagttcgtcgggcccttctcgcaagtcctgggcaactccagtgacctcgggacccctgtagcctgcacccgccccagctctggtgactacaccggcgtgggcaggagcagcgccacccgcaggcgtcaacccttggcgtttgatctcaaacgtccgatctcgatctagcggtccgaatctccggatactgtaataccctaagtgggaatcaggatttttcccttcacacccacatttgggaacattatcacatgtgaatttaatt

SEQ ID NO: 56550 - DNA, 380 bp, Zea mays
tgagggctcaagaatgctggacgaagcttcaccataatgattgcctaagatcctcactcccaaattggcagaaatgtgctgacatatgttgatgatatcacagtaaagagcaccaaacaaggaaaccatgttgctgaattgcaagaaacatttgccaacttcagacgggctggtcttaagctaaatccagaaaaatacgcctttggagagaagaagggcatgtttcttagctgttcggtatcaacaaagggtattaaagctaacccaagcaaaatcgaagctatccttcggatggaatcgcccaaatcaagacagggggctcataggttagcaagaagactggcatcattgaacagatttatctcaagatcagcagagag

SEQ ID NO: 56551 - DNA, 392 bp, Zea mays
  unsure (1)..(392): unsure at all n locations
agcttgcctatggcctctcatgaatttggtttcaataatntaaaatgtgctttattctagtggtgaaaattgggacgccacacctatcaggcctagattgtcaatataacccattagtattagggttaattatgttgaagtgcataagtggattggttaccttctcccaccagcttaaacttttgggttgaactggttagtgcgtccactctaacaaattataaatagagatcacttgcttagggatcaagtaaatctttctatataatgagagaaaatgtatcaatctaatcaagcaagaattaagaagaanaactctttcttcttgctctgcttgtggcaaagcataaattcggnctgcccccttttccctaaccggcaccataacaaat

SEQ ID NO: 56552 - DNA, 367 bp, Zea mays
agcttctaaagggagaacacattttaggatttacaaatgttcattctgagaaagacagggtttgtagcgcatgccatgcgggaaagcaagttggaacccaacatccacacaagaacatcatgacgaccgacaggccgcttgagctactccacatggatctattcggcccgattgcttacataagcatcggcgggagtaagtattgtcttggtattgtggatgattattctcgcttcacttgggtgttctttttacaggaaaaatctcaaacccaagagaccttaaagggattcttgagacgggctcaaaatgaattcggcttaaggatcaagaaaataaaagcgaccacgggaccgagttcaagaac

SEQ ID NO: 56553 - DNA, 414 bp, Zea mays
catgcaatcttgtgcaagccatgactttcaatacagtttctgacaagaccaagcgaactatgtattttgttaaaatccgatgattaatgaaatatatggttcatgactgctacacttgtgctcgttcgctcgagtcttttttttatttatttcttttgttctcgcgaacaaaatggcacgcccggtgggacatgattctcctcccatctttgctgcgctacagtggtcgtcatacaatttctcttctaggcctagctattcaatagcaatggctgatgcttgtcatcagaactcttgtcaccagaactctaagagttcagcgacaacaaatatttatgttgcatgcacatggtaacatgtactaacagcttgcatgataaactctgcacctgagtcacataaaataaatgattt

SEQ ID NO: 56554 - DNA, 418 bp, Zea mays
  unsure (1)..(418): unsure at all n locations
agcttactgctgcttggaaaatatcanattctatggccaaatggatggaattcatagctcgatgacatacttgaaggatgtagcattccagctatataaacacttgcactacagtttgaacataatgttagaagcagctacagcatcaagccaactatgactgcatatttcaagggttgcatctgtttcaaaccatgaatgttgataataccatatgtcaatacaaccaccaaatatagaacattccagaatagaggtacaatatccagcataaatactaccatcaaacacgaatgtatgatctgtagaatagaggtacaactagataattttgtccataagcagtcaagctactctagcttataactagagatgaaggaacctganactccactcatggcaaagcacacagatagat

SEQ ID NO: 56555 - DNA, 391 bp, Zea mays
agcttggttgccgagtgctgtggctctggcacctcgttatagaggctagctttgccgaatgtctactatagcactcggcaaaaaacctgacaagggacccgctggtggatcctttgctgagtgcaggtcggtaaacactcagcaaagggggtaacttctttgtccgagtgtattaagagacattcggcaatggtaacttcttcgctgagtgtcacctagaacactcggaaaggcgccgtctctgtcactcggcaccgtgacagacgcttttctttaccgagtaccaactgacactcaacaaagtctttaccgagtgcccgataaaaagtactcggcaaagaagccgttggtgatgtacttgtcgccaagctctctttgctgagtggcacac

SEQ ID NO: 56556 - DNA, 305 bp, Zea mays
  unsure (1)..(305): unsure at all n locations
ataatctatgctcctcccggcgggtatgcttataccctgagtccgaaggtactcggccataagccatacttggaaaacgatgttaaattacgcttttgaggacctttggaagaccaagggccccaacactgttcgtttagcataaagcatcgggcaacaccgatcaaatcgaagnttggtgcgtcacgccggaaaactgcgcggaccgggcatgggccaccgcgtcggacttccgcgccgccctgttgggtcggacgggggatggaatggaatatttcaccattcgatccaagacggggggccta

SEQ ID NO: 56557 - DNA, 369 bp, Zea mays
ctattcgaagtacggaatgtgattactagcctcctgggactaataactgtatcacatttgagtcccaaaggatcgggacgcttcagatacataagattttggaacccaaatgcaagacttacccttcttggattatggtcccacatttaagcaacaattctatcattcttaaataaagcacataagaagcatcataagtgcgataaagttgtaagatcagtgaggtgactaaagggggtgaatggaaaccactaaattcttgactagcgagtacgtgactctgatcccaaaggtcaactggaagccctttagggacacaaagcaccaaacagagtgcggacaatccaatgcgtgaagcaccaaacccca

SEQ ID NO: 56558 - DNA, 359 bp, Zea mays
  unsure (1)..(359): unsure at all n locations
aaataagccgggaaaaattatttttcttgtggcaaacaacgaaactattacatgaaattttaaaaagtgtcctttattacacagaaaattaaaactgaatgaaaaacactgctatcaagataggatatttgtcaatagaagtgcttcaactccgggacaatgttgttgactgtgcgagcttcggactgttctgagaagtccctttggggtggaacatattggctcccttctggctgttggccttgttgcanccgaggtggaggccgaggctgttgccaggaagcttgaagttgactcgacgaaacaacagaaactgcaagggggttgcctacatattttaggaaggactacgaatgata

SEQ ID NO: 56559 - DNA, 411 bp, Zea mays
agctttggatcattggtcttcggtttcgtctttctatatataacacagcgttataatataaactcaagttcaaggagaaggtaagcactatgtatgagtttattaccggcttgaggtgacttcgagcttcgtcaccagctaagctttgcccacccttccgtcagatttgtgttatgaatctatttcctatgcttccggccagactaaggatatcagttagatctactggtgataagctgaagttaggtctattgacgatcttaccatgcgtgcaaccagctttcatgaaagcaacaactgtgctccgagaagctagaagagcacagaagtcaccatgcccaactataacttcgtaaagtgcatcaacttcgccctcaatatgttcgaacgtgccttgcaagtcttcaactg

SEQ ID NO: 56560 - DNA, 427 bp, Zea mays
  unsure (1)..(427): unsure at all n locations
agcttaagaaaagtactacaattctcctataattattaagggctgattntcagtttagcttagccaaacaatccaattttcgaaacctgtacagaatttggacagattctgaaactggacttggaaaaatcataactcctaaactactgaacttatggtcatgaaatttttacacaagcaagataaagaagtggtctacaacttttctatataaaatttctacagaaaacatggtttactcaattgaactagctgcataactaaaactggtcatgcagccccaacagcaagccttacacatgttcttaacacttaaaattatctagtactttattttaaattaaaactaagaacacctacttcatttccctatacattttcataattcccccagcattatccacattatttatcataacaaaaaaat

SEQ ID NO: 56561 - DNA, 324 bp, Zea mays
  unsure (1)..(324): unsure at all n locations
agcttctaaagggagaacacgtgatattgtttacttacgngcctttcgaaaaagatagaccttgtgcagcttgtcaagcaagtaaaccagtgggaggagcacatcacagcaagaacgtgatgaccacttcaagacccctggagctgctgcatatggacctcttcggacctgtcgcctatctgagcataagagggagtaaatatggtttagttattggtgatgactttttccgcttcacttgggtgttctttttgcaggataaaactgaaacctaagggaaccttaagcgcttactcacgagagcttaaaatgagtttgagctct

SEQ ID NO: 56562 - DNA, 292 bp, Zea mays
agcttgtggcgccctctagctttttgtcgcatgcaaataccaagtatcccacctggaagcctcaaggtcgaacccttctggcatgggaacgttgcagagactgctgataccgcgccgagtgtaatagggccacgtcccgagcctcttccagctggtcaaatgaatcttctcggctggtctggatgcttccgtcgtcgtacacctttgttctcggggaacccgtatctaaatccgtgggtaagatagcctcgaccccatagactaaaaagaatggcgagaaacccgtggaccg

SEQ ID NO: 56563 - DNA, 415 bp, Zea mays
  unsure (1)..(415): unsure at all n locations
agcttgntcaacaccgattgagatggtttggacatgtggaaagaagcaggggaaggctgaaattgacatggaaaacagctatccacgtgtctgatccttgacttgtgggggtttcaactctagactaacccaacttgattggtactaaaaggctttgttattgttgttgactgtatgccaatttcatagccccaacagcattaaaaacagtcagacgtgattttagaaagaatttgaaaatgttgtgcacaaaagaaaaggaattttgctccaaaatgccctatgttttctcagaagcatcgatgaattagggtatatgagaggaggtacagatacaaaccataacagggaccttatgcaaaggtgcactaaatggagtgatcccattagttctctgtactgtatcaacagaaat

SEQ ID NO: 56564 - DNA, 429 bp, Zea mays
agcttccttttgctatggcaagctggtcatgtatatgtgtaatgtccaaccaaggcattattacactattagcttgtctgtcatgttataaaggatgtaaactaaatcatggcctacacaactagtgtggcttatgaatcgacacttagccaatcataactacattgtaagcataatttaaatgatcaataaattaaaattcacactcacaatctcatttactagatagagtaattcacattcacaattaaaattcacgctcacactcacaattagaatccataactacattgtaagtattcctacgcagtttgttcttatgtttggtataatgttatttttatgtactccttgtctatttgtatgtattgctacgagtagcagcgaggtcaggagaaacccgaagaaccaacttgtgaaatacttgga

SEQ ID NO: 56565 - DNA, 400 bp, Zea mays
agcttaagctaaggcaggcagctagatgcattttatattatgtcgagcattggcatttatttatcgaaaactataactttggttactcctgcaattcggccttgagtggatctttcatcacaactggcaagaacagaaccgaacaaaacagagaacgtattctaattccaagccacaaggcaacaatgcaagatcacctaaaatcttttgagaaagaacatccagtcccggaagtttgcatcacaaatactgatgcttgttcatgaagaccacttttgtcgcttttttgcaatatcgccagcagttcctttattcacccttctgagaaaagggtgaagaaaaattaatctccgtttaacgcatctggtcatacagaactaaataaaagttaaagccttgc

SEQ ID NO: 56566 - DNA, 375 bp, Zea mays
caatggcgctagccggagtgcaggacacctgcccgcgcacgtggacacgtgagagtctctacgccattatccgataccctgcacacataaccgctacgtcatcgcgcggagctcatcgtgcagttgaagtgaactaaatcgccgcggaaaaactggaacacccgacgccgaagagtacacacgcctacgcgcggggaccgacagaagacgggcaaccctaccgtcgagccgcacctggttgagaccagaaagacctcacgaagccaacctcacacgacgccggacctctttcgccgacaggaagctgagccgcccgttcaccttatcgagggtactcgttacataacgggaaggacctaggaggagaaggagaac

SEQ ID NO: 56567 - DNA, 427 bp, Zea mays
cagcatgcaagcttgtgaaggttcttcatacccacatgtgctaagcggcgatgccacagccagcccatgcgagtcttagccattaagcatgcatctagaccggcctcttcttttgcaaaaacaactaaataaagtttgccgtctaatacacccttaaaagctagtgaaccatcacttcttctaaagacagacacatctatatgtgtaaacagacagttatatcccatattgcataattgactaacagatagtaaattatatcctagtgactctactaaaaacacattagagatagagtgctcattagaaattgcaattttacctaaccctgttaccttgccttgattcccatcacagaatatgattgaaatctgggaatccttattcttgacgtaggaggtgaacatcttcttctcccccgtcatat

SEQ ID NO: 56568 - DNA, 379 bp, Zea mays
ctctcttgttagctattattggatgacaactccgcttatgtggagcacgcatcccatttctgtgggaattcagaacacatgctccactattttaaaatttgactactctctcaatctgcccactattttgaagatgataggccgaactgtggagcaacttagtacccaaggatttgtgaagatcttcccaaaatttggatacaaattgagggccacgatctgacactattgtctttggaaccccatgctcacttaaaatatgggcaatatataattgagcataaacatcaactggataatctgtcctgacgggcagaaaatgagcgattttcgtgagccgatcaataataacccaaatagagtgcaatccttttgccgt

SEQ ID NO: 56569 - DNA, 425 bp, Zea mays
agctttatagatggtatttaaacttccaaattcgacatgagatgtatccgtggtggcaaaaacgagctaaatatgtttatggtgatggtggatctccgggtgaccaaaacgtggtaaaactcaaaactctaaaggaataaactatgaccaacaactcgacacaaccgatgcaacaaaaaactaaacaagccctaactaagtagtagtagtaaaagcttaatggtttataagattgcggtaaaactaatctactattggtgggccttttctggactataggagataagaaaacatcgaagaagagtaaatctctcaccgatgaaccttgctctggtaaccaactgatgtgcacccattgggtgaattcccggtctttcgatgagagggtgtggaacaactcaattggtggcggagacgacattgat

SEQ ID NO: 56570 - DNA, 433 bp, Zea mays
tagcttgtcgtctaatacacccttaaacgctagtgaattttcacttcttctaaagacagacacatctacatttgtaaaaagacaattatatcccatattgcatagttgactaacagatagcaaattgtaaccaagagactcaactaaaaacacatttgaaatagagtgctcattataaattgcaattttacctaacccttttaccttgccttgattcccatcaccgaatataattgaatcttgggaatccttactcttgacgtaggaggtgaacatcttcttcttccccgtcatatggtttgtgcatccgctgtcgataatccagcttgaacccccggatgcataaacctgcaaggcaaatttaggcttgggacttacgtacccaactcttgttgggtcctacaaggttagtcacaattgttttagggaccca

SEQ ID NO: 56571 - DNA, 299 bp, Zea mays
  unsure (1)..(299): unsure at all n locations
agcttgctacatgccttcttctttttctccataacaggaactttactggaacactaccccacttaaaaagaatgagggtggaactcttgaatctttgggatttgaactccttgaagtacctcataacaagggtgttaccgggccttcttctgctgtngctgcttgacccagctggcggaagatgactcggacatggtttgattttggagaaccttcttcttatcttctcttcactatcttcttttctcttctcacttttcacttttcactattcactgcctctttctttctctttgctc

SEQ ID NO: 56572 - DNA, 364 bp, Zea mays
gctatagagttttctatagctcatatgggtgtttatatatccgcttagacaagatacattcataggagtctgcgaaattgggggaccaaatgtgaatgaactaatcataagctatgaacttcttaaagtttctgtccaaattaaaaacagatttaatacagggtttctggaaaaacagcatacaccggggtccctgagtttaaactagttccgccttcacaaggatacccccacgccactattactatgggtctctgacatttgacataaccgcctgaccttctctccctctaacaccgagtccttccccttatgcacacagtatccgcgcgaaataaaatggcggcgctgcttaccggtggcg

SEQ ID NO: 56573 - DNA, 435 bp, Zea mays
catgcaagctttaataagaattcagtggaacatcctattggacttattatcttagttgaccaagcttgaccctaaattactaagtataccccaagaatcttccagtagaaagattaagccctaccttattaagtgatcattcaccatcaaagtttaattgctaaagtacatatcatatcatgcatgtatcttactcattgcattcattagattgtaatctcgctgacggagagtacgtgctcatccccgagcaaggaactgtccaagaggaagaccaggagcaagctcccgaggctgccatcgaggacctcctcgcagccccagctattgaaggcaagccccggttttatgcataaccgtatttatatatgctactttattacacttaatgcttgtaggattgtattgtgcacttaagtgtacgagtttcttgaa

SEQ ID NO: 56574 - DNA, 346 bp, Zea mays
  unsure (1)..(346): unsure at all n locations
agctngcattgcatgttaaattccttgtattgctattaaggcttgtctaacctagttgagataaccgccatcaagagagtgaaaaagctatctcggtcaactgacagtctagtttaagctttagcacttaaattcttacttgttatgcaattgtcggttcttgaaatatgcatgacgtactgcacttagggggagtattcaacaactcaaatcactcatgagaacccctagtgctagccaaatgcaaattcaccattgcctatgtctctaaaatatctagcctatgcaaaaattttaaaagttatgaggtgccaaacctgcccacaaggatatttgggatataagt

SEQ ID NO: 56575 - DNA, 146 bp, Zea mays
tgaagcaagtatatctaagaattcaaaaacatggaaggaggcgggattacatttaccatcttgaccacctgatccatcccatggatactattgggatctggtttttcgaagagagacatctctttccctggctgggttggccccct

SEQ ID NO: 56576 - DNA, 405 bp, Zea mays
agcttgctcagaccttcgatttggtgttgatggtcactgcgcgacggccaccaccgcaccggactttgccacagaggagcagttcacgcgcgtccgccgggctcggcgagagaagaggtgagagaaacacagttgaactatgagatatagacgaacgattgaagtagaaacccagtgcagggggcatatttgactcttagatgataaatacatggaaacaaattattaagaggaataatacacatcaaatgggagtttaatcaattagaatatatttatagtccctttttacgaagaaaatctttccaatggcatttgtgcaaagcgtaatggttagagtcctacatatgcaattatctctacatgttggtgacgctgcccgatcccccattggcccttaaatgg

SEQ ID NO: 56577 - DNA, 365 bp, Zea mays
  unsure (1)..(365): unsure at all n locations
gaagcgattccaggtttaatcaaacaaacattacagntttcgaaatctgttctgacagaggacagaacacagcaaccaggttggtaaatccataactcataaactatcaggcctgtgttattaaaatttaacacaagcaagatccgaaaagcatctacaacttttttataataaccatgaacagattgtatcattaaatagggccaccatacagtttttgaaatctgtcagaatttggacagatcaagtactggatttggaaaaattctacttctaaaccggcggacctagggtggtaaatttaacaaccagcagaaaataaagtatctccacttttctatacacatatctcataaacataatta

SEQ ID NO: 56578 - DNA, 375 bp, Zea mays
agcttgcttctgctatggttcaacggccgattatagcgccatagcgtgcgtatcttggcaaggacactgtgtacaatcgcttctctggtccaaatcctatcttttcgctgggagttccaagtcgagatataggccggggtaagggaaatatagaggggagaaattttctgtgtcatccaagcccgaaccgaaacaaaaggggtgtcaagtcgtgtctaacgcccctaaggtaggtgtcatcttctctccacggagttctagggttaaattggcgccattttgtcaattgggtcgaaggggtttgaaaaggggattaaggtgaacacgtggagtctttatgcaggattaggttttgacttaagcaaaaactgaatt

SEQ ID NO: 56579 - DNA, 405 bp, Zea mays
  unsure (1)..(405): unsure at all n locations
agcttgcggcgctnccccgcggcggccattgttattgtttaaggttaaggtagggttatgtctcgctctcgcgtgccaccatggagagcggggtgggtggcgatgcccgctgggatccggtggctgcgggctcggcttctcgggcggtggcgactggccgactgggaggcgaggcgacgaggatgaagaggacgcgtaactacctggaccgggagagatgtgtggngtcggcttcggctggaatctggggctcggatcgggtctgacggacctgtgcttccggcttcgatcgcatcgaaactgtgagccgttntcgcaatacgtggtttacgcctttacggcacacgggtacggaacgactntcccaacgtccgaattatttcacttcccgcatattatacacat

SEQ ID NO: 56580 - DNA, 396 bp, Zea mays
  unsure (1)..(396): unsure at all n locations
atctttagaattatgccttcttgtaaagattcctcagcacgcacaagaatcttaaatcttcttcttggtttgctggattcaaactcttcaaacatcgaggcattaatggtacttgctattntattgggtctatactctgtacttattgtgtgttctgcggtgatgcctgaaattttatcangagcacagttggaactcttggctttgaacatccacaaaacttgaggtattcaaggactacaaatcagtttctaaaggcgaccctgacgatgtgagtgcagatgaaataagtcnttgtaggaactngtattctttggtcctttcatactacctgcgctttgttagagggtgctggcatcaacttgatgatactgctaattattttctcttaaaaac

SEQ ID NO: 56581 - DNA, 246 bp, Zea mays
  unsure (1)..(246): unsure at all n locations
caggccaagcgcggaccgttctgtctctctgcngcggaccgtacgcgacacaagaatgaccctcggacagaaccaatgcaaaaacacaagtttccactacagactgtccggatgaaaagcaaagaccgtgcgaaccctctcgcggaccgttcggccttaagcgcggaccgttcggttcggtaaaaacccaataacccgaaagttaccggttctgagaaatgaattatagggggcctcgcggaccgt

SEQ ID NO: 56582 - DNA, 381 bp, Zea mays
  unsure (1)..(381): unsure at all n locations
agcttctaaagggagaacacgtgatatgtgtgacttacgtgaaattcgaaaaagatagaccttgtgctgcttgtcaagcacgtaaacaagtgggaggagcacattacagcaagaatgtgatgactacttcaagacctctggagctgatgcatatggacctcttcggacccgtcgnctatctgagcataggaggaagtaaatatggtctaattattggtgatgacttttcccgcttcacttgggtgttctttttgcaggataagtctgaaacccaagggaccctcaagcgctttctaaggagaagctaaaatgagtttgagctcaaggtgaagaagataagaaacgacaacgggtccgaattcagaatcttcaagtgaggag

SEQ ID NO: 56583 - DNA, 439 bp, Zea mays
  unsure (1)..(439): unsure at all n locations
agcttcggatctttagccttgcaactcttgtaatatgacctcaaacaacttgggaatcagntataagaacagcccttctgattcccattgcttttagcttctgaagacccagaagcagggcttcgtactcggcaatgttgtttgtgcaactaaaatcaagctttgccgcataacaagttttaactttggaaggtgaaaccaacacagcagccgctcccgctccgaaggttccccaggacccatcgcaaaacactgtccatgcttcgacgtctttatttggttcttcctcctgagccctggcgtccagtcagcaatgaagtctgctaacgcctgggactgaatcgaagatctatgaacatattcaatacacaattcattgagctctgcagcccactttccaatcccttcagtagcttctcgattcttcataatatccttc

SEQ ID NO: 56584 - DNA, 323 bp, Zea mays
  unsure (1)..(323): unsure at all n locations
caccaagtcttccacttggaagcctcggggccgaaccattcgggcgtggtagcgtcgtagagactgctgataccgcgccgagtgtagtaaggctatgttccgagcctcttccagctggtccaatgaatcttctcggctagtctggttgcttcggtcgtcgtatgcctttgtcctggggaaccgtattctaagtccgtgggtaggacgacctcggccccatagactagaaagaacacgagaaacctgtggcccagctcggtgtcgtcctcagacttcaaaccactganggtagttcttttatccaccgcttaccaaacttgttg

SEQ ID NO: 56585 - DNA, 437 bp, Zea mays
  unsure (1)..(437): unsure at all n locations
agcttatatatgtngtacttgatgcgtccaggaagttgcgccactattttcaagcacacagggttgtggtggtgacatcctacccgttaaaggccatcctccacaactctaacgccacgggcaacatacccaagtgggcgacagaacttgccgagtttcaactggactttcaacctcaccacgctgtcaagatccaggtcctagctgacttcatcgtggagtggaccccatccccgagtgctcctaggggtccggatcccgattggatccccacctgcggagcccaggctccggtcttaccgagcccactgaacgctcttcttaatggattccccgccacannggggcagcctggagtggtctcatcgaccaagcgagatcaataagacatgtgcacctgagtcacaccaccacacatgcagagatgagcactgact

SEQ ID NO: 56586 - DNA, 204 bp, Zea mays
  unsure (1)..(204): unsure at all n locations
agcttctaaagggagaacatgtgatangtcttatcaatggtcacttcgaaaaagaagaccttgtgcagctngtcaagcagggaaacaagtgggaggctctcatcacaccaaaaatgtgatgacaacatcaagacccctggagcttgctcatatggacctcttcggacccgtcgtctatctgagcatangaagaagataagtctg

SEQ ID NO: 56587 - DNA, 312 bp, Zea mays
  unsure (1)..(312): unsure at all n locations
agcttgtactttgcctcaacatgacctgatcagtgattggcgtgccgtcttagcgcgtntgctgacgcgcccgctgtcaatccaccttcaatcacgtcaactgccatatctatccctacggctgactgacccgcggcccccacgccttgtggttatgtgaggccacgcgcggtgcgcctcgttgtcgttgacttggattaaaagataacctttagtcttctgcagcggccccaaagcggcgcgctatcgcgtgcggtggtttgctctttctgcacccgaaatcccgcacacaaaccgtatgacttgtggaca

SEQ ID NO: 56588 - DNA, 402 bp, Zea mays
  unsure (1)..(402): unsure at all n locations
tgcacgaattcangctataaaggcatggtacatagcaaatgctgatgatcgaccgatgcctaataccaaggccgagtggtcatcaatttacctgacggaggagcaataccttgaggtaaacaggttgttgcatctcatatcgcacgaatccatgtatttgctttattgaaaaaaatttcatgtangtgtcggtgccgtggatggccactcgattagacgattatcgggccttgtgcagatggtgggcttcccctgagtttcgtgccatttctgaaaggaacaggggaaaccgtgggactgagtcgttccacaactacggcggcgatggtcatgtgcgcttggctaagtgaatggtaagtcacagtatgtttgaacttttgaatacgtagaaatgtgcattct

SEQ ID NO: 56589 - DNA, 374 bp, Zea mays
ggatctctaagtcacctgcggcatgcaagcttgcttttgaaataaatgttattttatgttattcgcttccgcatttctttatctccgatgttctgtgatgtctgcaagacgggtgagacgctcctggtgaggtaaggaaagataccgaacttgtcaagtagttcaagggcacctacagggttgtctgaagtccgttggacaaggacaactgtaagtgggcctaattacttgggaggttccgtcacagctggtatcggagcgtagcccttctttgcagatattatgaagcatcttcaaaaggattttcaaaagtcttacctaaaaaaaattcttttctcttcttacctaagtattctgaagagtctatcttaaag

SEQ ID NO: 56590 - DNA, 352 bp, Zea mays
  unsure (1)..(352): unsure at all n locations
gacccgggatcttaagtcacctgcggcatgcaagctttgaagtaanaatcccatgcatgttaagttngtatgcttccctacctcttctttgttaactctgttttctccaggagacacatcgtacatttgtaaaaaaaaaaaccagaaataactgtcatgaactgcagcgcgtttctgctgaatgcactgaaagcttatctgggccattagcccgttagccccctctgtatcatttccgaccagttgagcaactctgcatagcatcagcatacatatgcaggcgtcacaaaaggggaggctgcggagaatcatncaattggcatctgaccaatttagcctgcgcttgccatgc

SEQ ID NO: 56591 - DNA, 262 bp, Zea mays
agcttcagcaatttcaacactcttttttggaattgtgcttgaagacttaattgtctccaagacgtctagtacatttaccattctttttctttttggggtcactgatggccccttttgggtttttgctgtttcaatatttactgcaggactcaaaacttctaatggtttttccttagaccgctctttcgcttcttccattttttctgtggatggtgcttcggccatctctgcagtttctggcaacaaacttggcttgtcaact

SEQ ID NO: 56592 - DNA, 162 bp, Zea mays
agcttatgaagattcttcatcccaacgtgggctagtctgttatgccagagccaacccatgttagtcttagcaattaagcaagtgtcaagttcaactctataacatcaactaagtatagctgaccctctaacactcccttaaatgcaacggatcatcacttct

SEQ ID NO: 56593 - DNA, 428 bp, Zea mays
  unsure (1)..(428): unsure at all n locations
atcggggggagagtggaatcgtccctcatctncgacgacgaaccaactgtgcctgtggaagaaacacctcagcgggatcctcgtcaccaaggaaccgacgcaataacacccggcgacatcatgaagcccgagaacgagacccaccgcagcctgtgtcgcgagataagatctccaacgtgggagaaactctatatgaaccagtctttagggagaggaggaattcccacccacgtgattgtcggcaagctcaagggcaggccacgcaggaggcgagacaccgtcgagagaaccctctcctccgacaaaatctgaaccttgacttcgcccgagccatgaacacaccgagcgaggtcggtggagtgttggctcggatagccaatggcctgaaacaccccgtccaatccctggaccggcggacttactcctgg

SEQ ID NO: 56594 - DNA, 475 bp, Zea mays
  unsure (1)..(475): unsure at all n locations
agcttaatcccgaaaaatgtgttttcggtgtatcggcaagaaagttactctggtttattgtcagccaccggggaattgaagctaatccagaaaagatcgaagctatcatgaggatggaggcaccgagatcatagaagaaagttcaaagacttaccggatgtatggcagccctgagcagattcatatccaggctgggagaaaaaggcttaccattctataaagtactcaagaaggtggacaagtttcaatggacttcagaagcactggaagccctagacgcattgaaaaagttcttgacgacaccaccagtgctgaaaccaccacgtcgagccacgccgactcaaccagctgaagatctgatgctatatatctcttgcacgactcacgtggtgagcaccgcgtnggtagtcgagtgagcagaagaaggacatgcatactcagtacagcatcctggttacttcattagtgaagttct

SEQ ID NO: 56595 - DNA, 435 bp, Zea mays
  unsure (1)..(435): unsure at all n locations
agcttctaaagggagaacacgtaatangtcttacttatgttcaattcgaaaaagatagaccttgtgcagcttgtcaagcagggaaacaggtgggaggctctcatcacaccaaaaatgtgatgacgacttcaagacccttggagatgctgcatatggacctttttggacccgtcgcctatctgagcatangaggaagtaagtatggtttaattattgttgatgactcttcccgcttcacttgcgtgttctttttgcatgaaaagtccgaaacccaagggactctcaaacgctctctcaggagagctcaaaatgagtntgagctcaaagtgaagaagataaggagcgacaacggatccgagttcaagaaccttcaagtagaggagtttcttgaagacgaacggatcaagcacgagttcttcgctccctacacaccac

SEQ ID NO: 56596 - DNA, 295 bp, Zea mays
  unsure (1)..(295): unsure at all n locations
agtcaacaggaatcgtcaaaacaagtttgcatctagattctgcttcggtgctgcgacaccatcttttggggtgttntcccatgtatcgtgttggagcccattcggggtgcatctaggagtcttgcacgccactaaaacctattttatcaacagtcatgaccactattanggttgagtctttcttagattcattatgttatcgaatagtgttgtcgntcatcgatttgtgagaccccacctcgtgatcaatgcatttgattgtgttcttcctattcttgcttgtggtcttgggtac

SEQ ID NO: 56597 - DNA, 318 bp, Zea mays
  unsure (1)..(318): unsure at all n locations
agcttgaagtcaattctgattcgctaatccttatgcaattggctcatggacattntctgctcatgctcccaccctccactccgttgaccagctgacatcgagatggagcactattcgtgcaggcgctttctccctgcactgtaaaagatggtcccaggtttttggatcctcaggtgcaagtttacctatccctgtggaattcgagcttagtggcatcccaattcatgcctgggaactttccactgtccagcacattttgaaccctttcgcctgggttcagaaggtacatgaggagactctngagctcaagaatttgga

SEQ ID NO: 56598 - DNA, 380 bp, Zea mays
  unsure (1)..(380): unsure at all n locations
agcttgaaggactgcttcggcaggagagctttctaacgtgaagacttgttcggtccacggagtcgctntatccgagcgcgagttacttatcgcagaaggtgatgagtgaggtatccgtatcccggaggcgtaagagtccctcggctcggtcagccttggctgcttacgtgtactccgtcatttccaggatccgctttccgaagtagtcaagaagcacgaaagtaatcctgctaaaaagagatccttnttcgaggaaaaattcgacgcagagggggtctccccccctttagcccccgagggagggtcgggctttgccgaggctaggccgacccttccttgacgactaaacatttgcgacgtgcgaggtatatgaacaactt

SEQ ID NO: 56599 - DNA, 472 bp, Zea mays
catgcaagcctttgaggaagttctgagagggcgcggcgatatctgcgctttctcaggtgcccgaggaatcatggctattttggagaaaacaggctgcgaccatgtgaaaactttggctcaagccgaagctactttaaatattgaagatacaaaagacccttcggccgaagccagcttagtgggcggaaaattctttactgacatctgggaaaatggtggccgaaagatggcgcacgagataataaaaaagagtgaaaaagattctcatgacgcacaagaagcgatgagggcagctgaaaaaactgcagaactagaaaggaggataggtattgcttaataacttctaactttatgttttaatttttgcgaatttcaacatatttacgttgtctatcgcagctgagctatctgcttccctagagcccttcgagccaacgggcgacccagaagttaagagagaggaagaaatcac

SEQ ID NO: 56600 - DNA, 450 bp, Zea mays
  unsure (1)..(450): unsure at all n locations
acgcttgccctagtgatcggctatcatgtctgaatggctctctggtaagtcgctccaaccgttttgaggccaaatggcatggtggtatagcagaaagctccaaatggggtgatgaatgcagttttttcctcgtcttcttttgccaggctgatctgatggtatccggagtagcaatccaagaaagacaacacagaacatctagcggtcgagtccaccacctggtctatcctggggagcccgaagggatccttcggatagtgtttgttgagatccgtatagtcgacgcacatgcgccaatccactttattctttttgagtacaagaacaggatttgctaaccactcaggatgcagtacttctctaatgaaccctgctatgactaagcgagctagctcgacacgaatggcttctctcttatcangcgtgaaacgatgcaacttttgtcgtatc

SEQ ID NO: 56601 - DNA, 425 bp, Zea mays
  unsure (1)..(425): unsure at all n locations
ctcaagctatcaatcttacaatattttatatctataagattgacccacagttattttgagttataatatctaaaactcatatcatctcgagcaagatattgatgttgtagggaataaaggattatcctgtgtggaaaatcaaagcctacaagatggaggaaagccaaaggatggtaacacttatgtctttaagtgcaaatgccttcaattatcatttctcttgtgtcttatgtagtcacatagaanaaggaagcacttaagaatattgttaaattatgtcaccattctttagagaaagttcctctcatatggtagaatgcattttcatcatttctatattatggcaatctacttgctntaaatagttgtaagtacctcatggcatgttttacattaattatccctattgtgcatcttcttacata

SEQ ID NO: 56602 - DNA, 421 bp, Zea mays
  unsure (1)..(421): unsure at all n locations
tctgagtcacctgangcatgaagcttncctagtgctacaggctcacacgccttctgttatgacctatagcactcctggaacgtcgacaaccttcgcaaatatttgtttgacccatttagggctgatatcgcccttgtaattcgccgcagacaatcttgtaccggcccgcactctttttctcccggtgggtgaggtttttaacgaggcggagccatgcaatatatgtgagaaaaatcccncgcaaaagcatgtgtcgaaaaaagaccgcacaacggtctttggcattcgaccaattcgaagtcaccgcgaggctaagcgctagccaccctcgcgtgcgaccaatccgtgcagaagtcgtctaagggtgcagccggacttagcacaacaagtgcgcaaaatccgaagtctatcgcgaagacta

SEQ ID NO: 56603 - DNA, 268 bp, Zea mays
  unsure (1)..(268): unsure at all n locations
agcttctaaagggagaacacattttatgactttttaatgntcattctgagaaagacaggatttgtagtgcatgccaagcaagaaagcaagttggcactcatcatccgcataagaacataataacgaccgacaggccactaaagctcctacacatggatctattcggcccgatcgcttacataagcatcggtgggagtaagtactgtctagttatcggggatgattattctcgcttcacttgagtattcttttacaggacaaatctcaa

SEQ ID NO: 56604 - DNA, 478 bp, Zea mays
  unsure (1)..(478): unsure at all n locations
agcttttaacaaacttaggcatgagctaaatattcttgattctcggaatttcttttgatgttntgcacacatagcttattattataccttgtgatcatatctctttcatgtgctatgactaatgtgttttcaagtttatttcaaaccaagtcataggtgtattgaaaaagaattagagtcttcggcgaagacaaaggcttccactccactccatcaaattacttatccttcgccgtcgctctgagcaactctccaatttttggtataatcttcactcatattttgtttgccaaaggaggagatagtagttataataagggcttatatttcactcaagtatccgtttttggcgattcatgccaaagggagagaaagtattagcccaacgcataaggactgcaccaccaccaattntcaaaaattgagttaaggaaaagtcttgaaatgatgaatttttcaattgatatcttattatatt

SEQ ID NO: 56605 - DNA, 364 bp, Zea mays
  unsure (1)..(364): unsure at all n locations
gcttcctcaatctttcgtgttgcttaatgaatatacttcaatgtgtataattggcccaagccatgattntaaatttttcatacccttttccccattttcttgaattttgctcatagggctcacttaaggttcttattatggttgcgacattattacctttttgaaagacccatttgtttgaacatgatacttttaaatataagcttggtgggttcttccctcttaagcaatttgatgctcatgatcaaattggctcacataaaatgatggatcttgggttagcattttgagagaaaccctaggagacactatggtgtcataataaataaataattacattataaggagacaacggtccatcaac

SEQ ID NO: 56606 - DNA, 331 bp, Zea mays
agcttatcttaacctgagaagaaagcttattctattgggtgatgtgctagtttgagctatggtgatgtgttagtttgagccttggtgatgagttagattgagctttgctagcggggtattcatatgcttcttgcaataatatatgtgttgcatcatatggactaatgcttccgttgctatgaattaattggcatctattgtgttcattctgaaatagacagtcattgtgataatgatgcatgtggtttaatgtgcttaagatgctttaaattaatatctgaacttaaagtgggatcttaatggtgaatagcggaaggttgatattcctgtg

SEQ ID NO: 56607 - DNA, 394 bp, Zea mays
  unsure (1)..(394): unsure at all n locations
agcttaacaccgaatagtggtgtagtgatcttctatagagatggccaaatgggccgtccggcctggcccgaatccgataaagcccggcccgccaggcacgttaagaaaaccgggccaggcctttcaagcccgtgggctcatttccttgaccgagcccggcccgctgtgggcctaaatgggatggcccgacttggtaagcgcagtanaaatgggtcgaaaatcgtgctaagcaaaaaggtggcttgacgggcttagagctagggccgggctagcctactgggcttagttttctatttggatctggcccgcttatacgtgtcatgctggcctgtgcctgtataaaagcgggccgaaccgagctggtaccgggccaaaaaaacgtgcttcgggttgg

SEQ ID NO: 56608 - DNA, 322 bp, Zea mays
  unsure (1)..(322): unsure at all n locations
aatgataaaacaaattttgataggtgcctaaaattaagagcttactgttaaaattagtttaaggatttttgtagcaaatagatattttagaggaataaaaggtactttaaaagtacttaatgaattttagtaatgaaattaaagctccaaaaattataaaaatttgatggggaaacaatttgtcataatattagccctatgtaaaaatcctaacctttntagaagttgattgcccaagaaaccttgccatagctaaatagagataattaaaactaccaaattagtattaaaagtatgtttaagagaagttagaccatataaa

SEQ ID NO: 56609 - DNA, 437 bp, Zea mays
  unsure (1)..(437): unsure at all n locations
gcttctaaagggagaacatgtgatatgtctaaccaatgttcatttcgaaaaagatagaccttgtgcagcttgtcaagcagggaaacaggtgggaggagcgcatcacagcaagaacgtgatgaccacttcaagacctctggagctgctgcatatggacctcttcggacccgtcgcctatctaagcatagggggaagtaagtatggcctagttatggttgatgacttttcccgcttcacttgggtgttctttntgcaggataagtctgaaacccaagggaccctcaagcgcttcctcaggagggctcaaaatgagtttgagctcaaagtgaanaagataaggagcgacaacgggtccgagttcaagaaccttcaagtggaggagttccttgaagaagaanggatcaagcacgagttctccgctccctacacaccacagc

SEQ ID NO: 56610 - DNA, 372 bp, Zea mays
  unsure (1)..(372): unsure at all n locations
ctggtagatgctttgcatcttttaccaaggtagaacagattggggactctgaaaacaagctcacctgcgaaagttgcaatgctcaagtttctaagaacaagcagcttacacttcatagagcaccagatgttattgcatttcatctcaagcgttntacaacccttgacaattctgttgaaaagattgacaaacatgtggtgtaccctctggagggtgatntgaagccatttcatagcaatccagacacagtggtgagtttttccttacaatagtaacttgctaaatgcctggttggagacatgctgctataggaatatctaggctaanggatttggatccagtctttctgcacaaacagtattaatttcactt

SEQ ID NO: 56611 - DNA, 332 bp, Zea mays
cagcttatgaatgaactaaatatacttgaatctctaaacttttattgaagcactgcacacacagctaaattatatacctttgatcatggttctttcatttggtacaaatgcatatttcttattcttcttgtgccaatgttaaaactaatatgctttcaagtatacttctatgtttagtcttaaattgaaagtgaaatggagtatctagcaaagacaagtcttccacttcaactctgacggtatcatttatcctttgccgttactcataaaaatctcaattggtatgaccttccactcatatactttaattactcaaagaggagaattcaagt

SEQ ID NO: 56612 - DNA, 364 bp, Zea mays
  unsure (1)..(364): unsure at all n locations
cagcttctacttcgcccaagtcccaagacgtgttttgttattggtactgcggaaacagagtgttctttgttttttctatcaatttattaaagtacttgtatgatggattgaaggtgatggcgcttgcacctttgctcaattgatggtgatgcacggcctgccttggtgtgaggagtatttttgtagttcttatttgtacgatgagtgttcttcctggaaaaaaagggaccaatgtctacgctacgcagttcctctgattgtttttacatctaattngttgacttgctacttatagagttcagtgattattttagtgaaacagattctaatttgcttacttacatggctgctcttagccccaaca

SEQ ID NO: 56613 - DNA, 277 bp, Zea mays
  unsure (1)..(277): unsure at all n locations
agctntacaggagaaagaaatgatatgaactctttggtgcttgagagagtcaagacaattcttgttaacttaagctatcaatcttcaaagttcgatatccatgattgacccaaggttatttttcaaatcactatgtcttaaactcatatcatctcgtgggaagatattaatgttgtaggaaatgaagaattatcctgtgcccaaaagtcaagacctacaacatggaggaaagacaaagtatggtaacattnatgcttttaagtgcaagtatcttaaa

SEQ ID NO: 56614 - DNA, 322 bp, Zea mays
tgcagctgcagcttggaagaataaccattccacgttatcttatttcgagattgcagccagtttacgagttccaacttacagcatttgaggaaaattctcagaatctagagataaaccaatagaatctttggcatataattaaacatggcaatgttattatttaacagattattctaggcgacaacttattctactttcaggtatgaacagaatacaacatctacttaaaaggactcatatgtccccaggcttgttttgagttcaatgagaattaactctttgtttgcagcactcaaaatgttgaaatgtttcagttcctagt

SEQ ID NO: 56615 - DNA, 409 bp, Zea mays
  unsure (1)..(409): unsure at all n locations
agcttgtccaatactagttgagatgatttggatattttcaacggagacctccaataacaccaatgtgtagtggaattctaaggcacgatagtaatggaaacagaggcaacggaagcccgaagttgatatataaagagacagttcaatgagactcaaagaatagaatatacccaaagatttggtcttgaataggagtgcatgaaaaataactatctacatatctaaaccttgatgtttctgtcttctactgggttccaactctagcataccccaacttgtttgggactaaaaagctcggttgttggcatttttcagtttgaccatgttngctagaaggaaagcatanaaagttttgatcttacgaccaagatatctccacaagtgccaaagaaccacccaaagcatttat

SEQ ID NO: 56616 - DNA, 341 bp, Zea mays
  unsure (1)..(341): unsure at all n locations
agcttgccatacccctccctcgccggccgcactgattactctcaccgccgtcgagctgtcgccgttacgtgccacgtgtttgtgcgctggtcctcgtcgtagtgactcactgggtgcatgtncggtgatcaccggagtgactgccacggtaaaagccacctatgtctgacgccgtgttcttctctgtttccggccgccagcttttgccggccaaattgagcgccaccgctgaagcctnctataaatggatggcccgggcagctgcgctacatcgtccnaaaacagagcctcactctcaccctcaatcgttcttcagccgttaccaatttcggattcttccc

SEQ ID NO: 56617 - DNA, 363 bp, Zea mays
  unsure (1)..(363): unsure at all n locations
tcgatataagttctgcatccccttaagaacgtcttttgaacttcttcgccttctattatggcggtattcacgttgacttgtcgcgcttcgccttatatttcggcggtatctggctctacattctcttaggaacgaactttgagcaaaaaacttacgctgtgcttccttangaaccggcttttgtagcttcgtcatgctctacatccccttagggacgactttcgagcctctccctggttttctttntctctgcactcgatggtgcatgctcagatnttacatttacatattttgngagattntgctcttatggagctgaataagaaaagaaaaatacanactatggccccattaaaacctttc

SEQ ID NO: 56618 - DNA, 275 bp, Zea mays
  unsure (1)..(275): unsure at all n locations
cattttgagaaagacagggtgtgtagcgcatgccangcaggaaagcaaggtggaatccatcatccacacaagaacatcatgacgaccgacaggccacttgagctactccacatggatctattcggcccgattgcttacataagcatcggcgggagtaagtattgtcttgtaatagtggatgattatactcgcttcactcgggtattctttttacaggacaaatctcaaacccaagagaccttatagggattcttgagacgggctcanaatgagtt

SEQ ID NO: 56619 - DNA, 433 bp, Zea mays
  unsure (1)..(433): unsure at all n locations
taaagatgaatatcccatgcccatagccgacacattaatcaataatgcattagggaagtaaattattagcttccttgatggaaatgccggatataatcaaattctcatggccaaagaagatgcgtctaaaacggcctttatatgtccaggcttcattggtttatttgaatgggtatgcatgacattcggtcttaaaaatgctggtgctacttatcagagggctatgaatctgatcttccatgagttgttaggaaacactgtggaagtctacattgatgatattgtantcaaatccgctgagtttagttctcatatagctgatctgcgcaaagcctttgatanaatgcgtccgtattggttaaaaatgaacccacataaatgtgcttttggagtgtcggctggtaacgttttacgatttatcatacatgaacat

SEQ ID NO: 56620 - DNA, 438 bp, Zea mays
  unsure (1)..(438): unsure at all n locations
agcttctaaagggagaacacgtgataggttcgactatcgtgcaattcgaaaaggatagaccttgtgcagcttgtcaagcagggtaacaagtaggaggagcgcatcacagcaagaatgtgatgactacttcaagacccctggagctgctgcatatggatctcttcggacccgtcgcctatctgagcataggaggaagtaagtatggtctagttattgttgatgacttttcccgcttcacttgggtgttctttttgcaggataagtctgaaacccaagggaccctcaagcgcttcctcaggagagctcanaatgagtttgagctcaaggtgaagaagataaggagcgacaacgggtccgagttcaagaaccttcangtggaggagttccttgaggaggaagggatcaagcacgagttctccgctccctacacaccacagc

SEQ ID NO: 56621 - DNA, 289 bp, Zea mays
ggttcaccaaaatcccaaccttccacttgggagtatcccctgaccaccagtcgagccatggtccctggcaccacaccatgcccatcttgcttgatgcggaagacccactcggctcctacaacaatttggatatgacgtggaactaaatgccatacctcattcttagtgacagtgttgagctcctcttgcattgccaccacccaatccgaatcttggagagcttcctctaccctgcgtggatcaatagaggaaacaaaagagtaatggtcacaaaaatgagcaacccgag

SEQ ID NO: 56622 - DNA, 426 bp, Zea mays
  unsure (1)..(426): unsure at all n locations
gcttgtagcccctactgcaagcaccccggttatttatttataagcctcattccttctcttgtgttccatcttgcatcaacccatctgggcaggggcacgcgacacaaaattcactagtccgtccggatgagggtcccccgggtccgaaacaccgacataaagcttgttgtttcacttagttttatctttcaaaatctcccaacaatgtatgaaatggaaaggttacattntgatagcatcctctatctgcacaagttgattctgtctagaaagttatcatatttgaagtcaatgttgttgtaaccaaataaaaaatccaaaaaagccaacatacnctatcaacctcatttttcctactttcatgccttctaccaatcattgctttgtacccacagaatttcttcacaactttctgtatggatcatt

SEQ ID NO: 56623 - DNA, 356 bp, Zea mays
  unsure (1)..(356): unsure at all n locations
agcttctaaagggagaacacattctgggactaacatatgttncatttgagaaagacaggatttgtagcgcatgtcaagcagggaagcaagttggtgttcatcatccacacaaaaacatcatgacgaccgacagaccgcttgagctactccacatagacctattcagcccgatagcttacataagcatcggcgggagtaagtattgtcttgtaattgtagatgattattctcgcttcatttgggtgttctttntgcatgataaatctcaaacccaagagacattgaagggattcttgagacgggctcanaatgaagtcggtttaaggaataaaaagattagaagcgacaacaggacg

SEQ ID NO: 56624 - DNA, 468 bp, Zea mays
  unsure (1)..(468): unsure at all n locations
agcttgcccgagcttgagccgaagaccatccttatcggaatagtgcaatcgcgctcgccggagttcgtgaacccaccggagcgcgtggatcgggtaacccactgcaccatttctcaattccttgcacgcatggcctctacatcacccagtggagctcctcatgcactttaatttaaccctactgccgtggcttggccggagcaggtgccaccgatgacctccgccgcctgcgctcgtggccagagcagctccagccaccttcggcgccgacccgcacaccgacgtgaccgccgtgacctccccgacgtcaccgaccaccccaccggagctctactgccgccggtaagcctcgccgccgtgatctttgccccggtaactatntcagccagccaaggaccgcatgttagatntatgttaagtacagggggttttgtgtaaggtcagtgactcatgtgaatagtagaacga

SEQ ID NO: 56625 - DNA, 450 bp, Zea mays
gcttggacagttcttctaagttctcttcacttcttttaaatcagatccgcgaatccaatcatttgtacagattaggcgctcaaccattgctggggtgagtgaactcctaaactcatctagtgttctcccccctacgctaaaggctgactcagaagcaactgatgagataagaattgctaaaagatcacgggccatgcgagacattattggcaacctagtagcattgtccttccaatacttaagaatatcaaaaccttttttgtcctcttcattgtcctctaaaagatatttatctaactcagacttgacagtactattgcaacacccattattgctcatcttgtgagcaattatagacctcataagccttttgttcaatgccggtttatcttgagaatcagaaatgtgtggtgtcttgtcactttgaccatacatttgattatactcatc

SEQ ID NO: 56626 - DNA, 357 bp, Zea mays
agcttcgtgaaatattctccgaagctattattatttttatgttgcctctctaatgaagctacacttcttctcaatttatcttgtgccttaacacgattttctctttttcataacactctccgaagatcgatactgtatccccttcttgttccacatgcaatatgctatatgatgcttatgttatgcgaaatgatgtgatgatgttatgttatgcaaaatgatatttgtgccgaaaatacacacatccctgcgataaagcacacattgtcttttatcagcgctgactttccgctgtaagcctcccttaggagcttcttcgccttttactttcagcggaatcagcgttgacttttcgct

SEQ ID NO: 56627 - DNA, 309 bp, Zea mays
  unsure (1)..(309): unsure at all n locations
atccatctttattcatgctcaacatattatatcatatccccaaattcgacaagtttgacccaaccctaaactcagacgcatattttcggatgcttgcgagcacacaacactgtaacataaaacggcatggcactaatgccgtgataaacagaagaaaaatcaagacacacagttgtgcgctgagttgcgctaggcaccaccgtccattgccagtgacagagacggcatgctatnttatgtagtttcattcaatataaagactcgcccgcccnctcaggccacgttcggntactagtggtttgaggggga

SEQ ID NO: 56628 - DNA, 300 bp, Zea mays
  unsure (1)..(300): unsure at all n locations
cgtgcatttcgaaaaagatagaccttgtgcagcttgtccagcangtaaacaagtgggaggagcgcatcacggcaagaacgtgatgaccacttcaagacccctggagcttgtgcacatggacctcttcggacctgtcgcctatctgagcataggagggagtaagtatgggttagttattggtgatgattnttcccgcttcacttgggtgttctttttgcangataagtctgaaacccaagggactctcaaatgcttcctcaggagtgctcanagtgaagaagataacgagcgacaacggat

SEQ ID NO: 56629 - DNA, 435 bp, Zea mays
  unsure (1)..(435): unsure at all n locations
agcttctaaagggagaacacgtgataggtctaactaatgtgcatttcgaaaaagatagaccttgtgcagcttgtcaagcagggaaacaggtgggaagctctcatcacacaaaaaatgtgatgaccacatcaagacccttggagatgcttcatatggacctcttcggacccgtcgcctatctaagcataggaggaagtaagtatggtcttggtataattgatgaattttcccgcttcacttgggtattctttttgcaggataaatctgaaacccaagggaccctcaagcactttctcaggagagctcaaaatgagtttgagctcaaggtgaagaagataangagcgacaacgggttcgagttcaagaaccttcaagtggaggagttccttgaggaggaanggatcaagcacgagttcttcgcttcctacacaccac

SEQ ID NO: 56630 - DNA, 482 bp, Zea mays
  unsure (1)..(482): unsure at all n locations
agcttgaagaaggcagagaagaaactgccacctgttgtgaccctcatgcatgggtttttccttcactcccttgacgtgcatttgaggaaaactacttgggccccacacatgcatgtgcatgcacccttctgcacgcacaattccctgcatgtgtcgacatccaaaacaaaacttcctcatgacgatcttctatggcttgaaactccgtaacccttcatgtgaattagcttcgaccaatcacgtgcgccacttcgtaaataatctatgagctattagttattcaatatattctgtgttacgattcnagttcgattcattgcatatcattagcttaataataatgtcgtcaatatatattagtaacatntatttgtcacgacacnaagtttaattaattagttaattatttggtcatccgatatntattagaataacaatntanataacactannattatagttatttgtgctttttataatac

SEQ ID NO: 56631 - DNA, 406 bp, Zea mays
  unsure (1)..(406): unsure at all n locations
agcttgccaatacttgttaaaacaacaacatctgttattttgcaactgcagaccataccagtaacttggcctttcgcatgctggggactggatatgattggacctttcaagaaagctcaaggaggatacactcatgtattggtagcaatcgacaaattcactaaatggatagagttcaagcccatcgcttctttaacctcagctaaggccgtggaattcatacaagacataatattcagattcgggataccaaacagcatcataactgacttangatccaacttcacaagttcagagttcttcgacttctgcgagcaaaagagcattcggatcaagtatgcatctgtagcacatccaagaaccaacgggcatgttgagcgagccaacgggatgatactggaggcac

SEQ ID NO: 56632 - DNA, 259 bp, Zea mays
  unsure (1)..(259): unsure at all n locations
tcagntatatattgggcacttgagactataactggccatgcgtgtgtatacatgcaaatcttaataattatgtcaatgcaactgttaccatggttgactgagggttttcctgcaaaatccaaatatgttttagtgcgaagtgttctgtttatgtgttgctgaaaatttatctgcgtaccaacttattgttcttttgcgtgctcaagttatgttaaatactgaagcattctttgaaagaccctgtggctatgtggcatgt

SEQ ID NO: 56633 - DNA, 383 bp, Zea mays
  unsure (1)..(383): unsure at all n locations
agcttctaaagggagaacatgtgttaggtctttattatgaactttcgaaaaagatagaccttgtgcagcttgtcaagcaggtaaacaggtgggaagctctcatcatagcaaaaatgtgatgaccacatcaagacctttggagctacttcatatggacctcttcggacccgtcgcctacctcagcatcgggggaagtaagtatagtcttgttatagttgatgatttttcccgcttcacttgngtattctttttgcaggataagtctgaaacccaaggtaccctcaagcgctttctaaggagagctcaaaattgaattgagctcaggtgaagaagatacgagcgacacgggtccgagtcaagaacttcagtggaaaatatttgag

SEQ ID NO: 56634 - DNA, 475 bp, Zea mays
  unsure (1)..(475): unsure at all n locations
agcttgaaaaagttgagattgcctcgactttattctttggtgcagatgttgatcctagggcaatagatcttgccatgagaatcgccaaaaggatgttcctcanaatgaaggaagatgaggcgaagaacaaaattgaagaagaaaatgatcgatggagaccaaacgacgaatccacctcttcacaaggttcgtctttaaaatccacttctcatatgtgctttattgctaatgggagtgacagtgaaagcaaaagtaaggatgaggaggagcaagaaagtgatagtgaagatgaggatgatcttcaacaattcttcgctcagctaagcaagaaacatcggatgagcttgctcaaactcatgaaaagagcggaagaacaaaaagaaatgcttcataagcaagaagacttnctcatcagaaaaatcgaagacttagangaagtgaccaaagagcatgagaagctatagtgctctcatga

SEQ ID NO: 56635 - DNA, 436 bp, Zea mays
  unsure (1)..(436): unsure at all n locations
agcttcttcatgcgattctcacttatatgacctctttacagtgccacatgtaggtaggacttaaatcattatgccaaggccttttagcactaatattacagataggtgcatcatcaagatttaaaatgaataacccattcataatggatgcaaaagccacaaacatgccattcttggagatcacacaaccattgttttcactcgcaaatgaataaccatccttcatcaaacatgaaggagacataatgtttcgactcatactaggaactagataacaattatttaactccaaaataaatcctgatgggaggtggagttgcatcgtcccgacggtcaacgcagcaactcttgcattattgcctacccggaaaatcaacttctctcttttcacgcttctacttcttatcanttcctgcatcgaattgcatatatgggc

SEQ ID NO: 56636 - DNA, 206 bp, Zea mays
  unsure (1)..(206): unsure at all n locations
agctgctgggggtggggctggcgctgcaaaagctgtcgcagaatctcattctgctgggccatcagctcctccactgtgggagctggaggaggtggcggnggaacctgctcgttatgcccgtgacgctgcctagctgccatctgaaaacagagattgtcgccattgttatcccaactcacaatttcgaacgacatgctattatctca

SEQ ID NO: 56637 - DNA, 420 bp, Zea mays
  unsure (1)..(420): unsure at all n locations
gcttatatctnccatagctctgtgtgttcattatattcatgcatgtccgaaccattgtattctgtatcgtggcgattctgagaacgcatcaagatgcccagtttgcaatgtcagtcgatacaagaagagttacaatcaagactgtgtaaaaaaattcccgaagaagaataaaaacaagaaatccactattggacctgaaagtgacgatgacacttttgatgacatggatgggaaaaagaagtcaaagaacccagctttggtgatgtggtatcttccagtaattgatcgcttaaaacgtttgttctcaaaccctagggaggctgagcttatgcgttggcatgctgaaaatcgcaagcagaataacaaacagattcgacaccctgctgatgcatcacaatggaaaaatttcgatcttatgta

SEQ ID NO: 56638 - DNA, 421 bp, Zea mays
  unsure (1)..(421): unsure at all n locations
agctntgtcctttggaactggtgagttctatggttcctttagcacaatgtacgaactgcctttgccttcctaactatgacataccaaggatcacgtctatagtgctctcttctaacactataggggtagcccatctgggttagaaatacagggtaagaagggaagaactatagataaggcgagtaattacgagaaatgttaatgtgggggatttattagctaagtagattagtgtgttatccactaaagctaatacattaccttatggtggtacatgctaagatgcccgactataatgtttcaatcaatcaaagaagcaaatcaagcatttatcatcagaacaatcaatcaatattnttaaatatagaaaatagttttcattttttggcttaagtccctatctcttaagagttcgagatgt

SEQ ID NO: 56639 - DNA, 437 bp, Zea mays
  unsure (1)..(437): unsure at all n locations
agcttctaaagggagaacacatnttgggattaatcaatgttcattttgagaaagacaggatttgtagcgcatgtcaagtagggaagcaagttggtgttcatcatccacacaagaacatcatgacggccgacaggccacttgagctactccacatggatctattcggcccgatcgcttacataagcatcggcgggagtaagtattggattggaattgtggatgattattctcgcttcacttgggtgttctttntgcaggataaatctcanacccaagagaccttgaagggattcttgagacgagctcaaaatgagttcgggttgagaataaaaaagattagaagcgacaatgggacgaagttcaagaactctcaaattgaaggcttgcttaaggacgagggcatcaagcatgagttctcttctcttacacaccacaac

SEQ ID NO: 56640 - DNA, 208 bp, Zea mays
gttccatgctgaatcattctcatgtttagcttctccatttcttggcataaagtaatgtcagaagtttctatcgtcaaacaatggcaggaagccttgcgacttaacgcatctgccactacattagccttgcctgggtgatattgaatcgccaattcataatctttaatcagttcgagccatctcctttgtctcatattaagctctgact

SEQ ID NO: 56641 - DNA, 436 bp, Zea mays
agcttatggccaggtaactctgtcgatacctctatctcttttctatatgcaagtgggtcatcaagatggtctctcttggaccactctttgttgtcttcactatgtaattattggtcgaaattgtcgaggccttgttaccttcagtacacgacagtggcgacaccacaaatgtattcaatatgatcttgcaagactataactcttatgagtgcaacaacgatagtgcatggaagcacctagcgaaaagaggtatacaaacctcactcaaacactaagcctaaatctagagaaagtgctataagcggtggtctaactaactttagcacttcgcagagcatctactctcaccgagtgtgtctttaagcgctgtggtgtccggagcttatatagaagagcctcaactctcttcatatgttccttaacttccacacatctc

SEQ ID NO: 56642 - DNA, 465 bp, Zea mays
agcttgccactatcaatgtgtgcaggaatggatcttatatttattctggatttattaaaacttacacctcgtttgaattattagaattaaattctattctaataataataatttatgcatatatcaattaagctattgggttttatgcaaaacatatcaatatactattattagcaagatgtttaagatatttatatattatatctttattataaatgagtgagtcaaaaaacgtcttgtaagtcacatacgcaaaataaattctactaataaataatattatttcttatcctccatcacatgaatttatgatagatctatatctgaaattagaaaagtggtggaatgtcaatttagccaaaaatcgtttctgttgatgattcctgaaaaaacgaacggggcattataaagctcacaaacctcacaggtgctcagctaaagtacacctactcgatggaactagca

SEQ ID NO: 56643 - DNA, 446 bp, Zea mays
  unsure (1)..(446): unsure at all n locations
agcntttatgatctgtatagatatgacagatattttccagcagatagtgacgccaaattttcagggcatgaacaacagcagctagctccagatcatgagttgggtaatgctcctcatgtcngggcaactgccgtgaagcatacgcaattactcggccctcttgcattagcacgcagccgagtccactgccagatgcatcacaataaacatcaaaaggcttggtgatgtccggttgagccaataccggagcagtggttaacaatgtcttcaattgttcaaaggcttcatcacacttcgaagaccaattgaattaacatcatttttcaataaacttgtgattggcttcacaagcttagaaaagtctggtataaatctgcgataatatccagccagtccaaggaaacttcngacctgatgaacagtggtagggggtttccacttcaaaa

SEQ ID NO: 56644 - DNA, 441 bp, Zea mays
  unsure (1)..(441): unsure at all n locations
tttttaagctttggatccttagccttgcaactcttgtcaatatgacccgaaacaacctgggaatcagttttaagtatagcccttctgattcccattgcttttaacttccgaagacctagaatcaatgcttcgtactcagcaatgttatttgtgcaactaaaatcaagctttgccgcataacaagttttgactttggaaggtgaaaccaacacagcagccgctcctgctccgaaggttccccaagatccatcacaaaacactgtccaggcttcattgtctttattcgtttcctccttctgagcccctggcgtccaatcagcaatgaagtctgncaacgcctgngactgaatcgaagatctatgaacatattcaatacanaattcattgagctctgcggcccattttccaatccttccagtagcttctcagttcctcataata

SEQ ID NO: 56645 - DNA, 308 bp, Zea mays
  unsure (1)..(308): unsure at all n locations
tgctgactacactcaaaccacttattcagaggcccaatcttcagctagaggcagtgaatctaccgacacagaagacatttctcatacacattctgactacctaattgacatcacatgatggacatttccaaaaaggaaggtctctatggcagaatactgctctangaaaacttgcaatcaatatactctgccatcagacacaaatggtcaattctttcacactcaagctccaatttgatgttttttgggggcacattgatggatacccactttcacaaacatcaggtgattgattggactttcatgat

SEQ ID NO: 56646 - DNA, 139 bp, Zea mays
gcagcttggtgttactgtactcgtcgttcaggatccgttccgaatagcaagaacacaaagaatctgcaaaaaagatcttttcgagaaaattcagcagaggggctcccctttacccccaggaggtcggcttgcagtagac

SEQ ID NO: 56647 - DNA, 307 bp, Zea mays
tcgacccggatccttaagtcacctgagcatgcaagcttataaaagtaggtggtttttggttgatttattaaaacgaaaaagttcccagataggtggattgatatggtgatgaggatagttaaagggggaaaagtttgcgtgaaacattaatggggagaggagcaattttttcaaaactttcagaggccttagacagggtgaccctctttcgcctctgttattcaatggttaggacgtgaaactaaatgtcatacctcattcctcgtgaagttgttgagctcctcttgcataactagcacccaatccg

SEQ ID NO: 56648 - DNA, 315 bp, Zea mays
  unsure (1)..(315): unsure at all n locations
agctntagtgattagagagagtgatttgttgtgttcattngagctcttgcgctnggatcgcttcttttctttctcattctttcttaagatcaaactcacttgtaattgaggcaagagacaccaatcgtgtggtggtccttgcgggaacttcatgttccatttgtttgagaagaagaagctcactcggtccgagggaccgttcgagagagggaaagggttganagagacccggtctttgtgacacctcaacggngagaatggtttgcagaaccgaacnnctcgtaaacanatccgcgtgtcacactctttattcac

SEQ ID NO: 56649 - DNA, 293 bp, Zea mays
  unsure (1)..(293): unsure at all n locations
agcttcaactccatctatattatggattgtctttgaatcagnccagcttccttcggcccttctggcagcttcctgactcccatgaatagcaataagcccttggtccgaaggtatcttcatgcagagataagctgggtgaagaattgcttcaaaagcatttagagtaccacgaccaatgatggcgttgtaggggtattccatgtcaacaatatcaaacacaatttgctcagtccttgtgttattaacaaatccgaaggttaccggcatggtaatcttcccgagtgccacaatct

SEQ ID NO: 56650 - DNA, 394 bp, Zea mays
agcttgtttaggctcgtcctccttcttcatccagatttgaggatagcctgagtaacagtctaatagactcatgagctccgaagtggctgctgcatctacgtgggagtctattcttggcaaatagaactcatccttcgggcatgctttgttgagatatgtaaattcaataaacattatctattttccattgcccttctttaccatgacagtgttggctagccattctgggtatgttacttccctgattactccagcactgagaagccttttaacttcgtttcttgccccttcggctttgtcatcagacatctttctaagcttctgcttccttggtctgatggctgggtctacattgagtgaatggtcaataacatctctgttacaccacacagat

SEQ ID NO: 56651 - DNA, 258 bp, Zea mays
  unsure (1)..(258): unsure at all n locations
ataacgagggttacattttatatcctgctggttatcccgagcacaaaattagaagaattcattctaggaagtctcactctggctctcatcatgcttttatgtataagagtgaggcatctagttctaggcaatccactcatgttaaatngcctaaaaagaaaacttctaatgcatcaaatgagcctactatttcatttaagacttttgatgcttcatatgttntaactaacaaatcaggcaaagtagttgccaaatatg

SEQ ID NO: 56652 - DNA, 428 bp, Zea mays
  unsure (1)..(428): unsure at all n locations
gatgcatttttgtgtattccagactattacaacgctagatgttgtgaaacaagaaggtgatgtcataatggatgttcttggaacctaaacatacttgcatcaaatgttattttttgaagtacaagatacagggatagaaccagttgtatcagggtggcatggtaagcactacttatgccttttcatctatcccacttcctatgttgngcttcttgttccttaagctctatgggtggacaatatgctttacaggaactatatctctatgctctaaaacacaggtgcatttacgactttatgattgtgtcgaagttattaccagaaagtgcctattgcatgctatgtcatataaatctgtcataacagaaagttacaaacatctaagttaacttcagtctagatggtacagtgttctttaatataatttt

SEQ ID NO: 56653 - DNA, 473 bp, Zea mays
  unsure (1)..(473): unsure at all n locations
atgcaagcttaacaacaatgagtgtgtcntctaggcttgtatttgattgagatggtgagctccatgactagagcttntaaaaaataccaggactctgcgacgacatcctatgagcatctcggtcgacgagttgctgaacttgttacatgcatggacatgctagaggctcgtcctccaccacaagctctagccccagctactggtgcagtattgctctctcctacggatgacggtagaataaaaatataattcccatcttgttcataagcagcatatggttagacaagccactagtggattttaaggttttgctatcatatgatggaatgaacttgtcaccacacgtgttgtgccacatacatggaatacgttataagaggtgatgcgagctcactntgtccccttcttatagacatgatattcgaaaagtacaccgttagatatgggggcatgtatgtgacgaatactaccag

SEQ ID NO: 56654 - DNA, 469 bp, Zea mays
  unsure (1)..(469): unsure at all n locations
agcttgtcaacaatataagcacaaaagagagaatgttgcttcggtagatcagccgaagcctatgcttctatgtgaagatatagcagatcaaagggtactgctgggatctcagctatctgatgagcaagaaaagactctactaagatttttgttcaacaacaaagatgtcttcgcttggacagtcaatgatctttntgtggtgtcaacagagatgtcattgaacattcacttaatgtggatccatctttcaggccaaggaagcaaagacttcggaagatgtttgagggtaaagctgaagttgctcggaacgaagtaaagagacttctcagtgctggtgttatcagagaagtaacatatccagaatggctagccaacacttgtatggtgaagaaggctaatggcanatagagaatgtgtattgatttcacagatctcaacanagcatgtccaanggacgagttccattacc

SEQ ID NO: 56655 - DNA, 473 bp, Zea mays
  unsure (1)..(473): unsure at all n locations
agctttacatagcaagacataaaagactacttcttctttctgccgaagcttttacatagcaagacataaaagactacttctcctttctgccgaagttntcctttacatgacaaaacataagagactactactctnttacacaatgattcgtaaaaatccagttctcccttatactgaacttttccttgtgccgaagcaacggaacttttcacttttgcacacaacatagcgtaacaagtcataaaaggtacttctccgaagctttntttgccgaagcagccacttgggaacacaaatgctatgaatgaatgcttatgcatgcgaatgttatgatgtaatgcacgaatgaatgtccgaagcatatgtccgaagccatatngtcagccattacttgaaaacaaccacacattagctctgcattcccttangaacgactntggagcttcttcgcctcttacttaggcaatatcagc

SEQ ID NO: 56656 - DNA, 421 bp, Zea mays
  unsure (1)..(421): unsure at all n locations
agcttgtgagcaatacaagttcagaaggatattttcttgttcggctgatcagccgaagcccatgctcttatgtgaggatatatcagaacagaaggtgctactgggatcttaactggtcgaagagcaagagaaaaccttgataaggtttttgttcaacaacaaagatgtttttgcttggtcagctaatgatctttgtggagtaaacagggatgtcattgagcactcgctcaatgttgatccattcttcacgccaagaaagcaaaggctttcgaagatgtctgaccacnatgcccgaagggctcgcaacgaagtgaaagacctctcagtgctggagtatcagagaggtaaatatccacaatgctggctacactgtatggaaagaaggcatggtaatggagatgtgttcgattactgatctcac

SEQ ID NO: 56657 - DNA, 458 bp, Zea mays
  unsure (1)..(458): unsure at all n locations
agctatactccttggtcttcggaagctaattgttatgggaatcagaagggcggttcttaaaactgattcccaggttatttctggtcatattgacaaaagttataaagcaagagatccgaagcttgaaaaatatttagacacggtccgaaggattgaggcttccttcgaagggttttctgttaaaaatattcctcgtggagacaatgaatatgctgatttattagctaagtcagcagcacaggggctgccattaccttcagaagtatttttcgaaacaataaaagcaccttcggttgagcttcttgaaagagcagtcctcaacatatcccctgtttatagtgaggactggagaactgagatcatctctntcctccagggtaactttctttcagatgacgaagcttataacaagaggatagaggcaagagctcgaccatatgtataatagaaggggacta

SEQ ID NO: 56658 - DNA, 411 bp, Zea mays
  unsure (1)..(411): unsure at all n locations
agcttcatgcatctgctgccagaaatgataggtgtattgcgttcctctgtctgacactatcttctttggcacaccatgaagaccaacaatccacgacatgtacaattctgcccatactgcactgatgtagctggtcttaacatgtatgaagcgggctgacttggtcaagctggccaccactacccaaatggaatcgtatccggctcgagtgcgaggcaatccgactatgaagtccataccgatctcagtccatttncactgacgatattgcaacggttgcaacaatccatctggtctctggtgctccgccttgatccgccgacaactatcacagatcgccacatgctcgcgatctcctcttcattccgtaccaccaggattccatcttcagatcctgatacattttctcac

SEQ ID NO: 56659 - DNA, 376 bp, Zea mays
  unsure (1)..(376): unsure at all n locations
agcttctaaagggagaacacattttgtgacttaccaatgttcattntgagaaagacagggtttgtagcgcatgtcaagcagggaagcaagttggtgttcaccatccacacaagaacatcatgacggccgacaggccgcttgagctactccacatggatttattcggcccgatcgcttacataagcatcggcgggagtaagtattgtcttgtaattatggatgattattctcgcttcacttgggttttctttntgcaggataaatctcacacccaagagaccttanagggattcttgagacgggctcaaaatgagttcggcttaacgatcaagaagattagaagcgaccatggaacggagttcaagaactctcaaat

SEQ ID NO: 56660 - DNA, 351 bp, Zea mays
  unsure (1)..(351): unsure at all n locations
atacatacatttcatcttttcttacaagcagaaaaaaaatntcgtatagagagtgctgcttattatattaactatctaaaaccattagtttaacaagtaaattatataaaatttcttgacatactttataaggccgttatcaaacacatttacattccaggagacactaacgaacccctcattcatcanatcatttgatgggcatcgtgcatagtagtatagctaactaagtctatgccaaaaaaaaaagaactaactaactctcaggctgcgcatgggcatggcagacacaacaccgagcttctgcttgtttcttgacgacgagtatgtggagtaggctgtcgtcccaca

SEQ ID NO: 56661 - DNA, 455 bp, Zea mays
  unsure (1)..(455): unsure at all n locations
agctntgcatcaagtttcagctnttcttgttcaaaattntctgattgggaaagaagcttcgaatttaattctgttattttggcttcagcattcgctagtaagccttcggtcgtttgaagctcgaagtctttcttttcgatggcagctgattgctcttttatcttgttntctaagttctcaattataacttcgtgtcttttatcctctaaatcctgctgcatttttaaagccttgctcaaaagcatactctgtggacaaataaccttcgttaggaaatatttatgttattaaaaatagtaaaggttagacacaagttgtttaccttataaatggaatagaacaaactgccgacaatgtgttgtcgtcggtagcggctgatgtctgcttcgagcttcgggaaaccgatactctntgatagagtaccgataaccttcgcaccggtttgatctcatatg

SEQ ID NO: 56662 - DNA, 378 bp, Zea mays
  unsure (1)..(378): unsure at all n locations
agcttggacagtgttctgtgatggttcctgtggaaccgtcggtgcangagcggctgctgtcctagttgcgccttcaaaagtcaaaacatgttatgcagcaaggcttgacttcagttgcacaaacaatattgctgaatacaaagcacttctgttggggcttcggaagttaagggcaatgggaataagaagggccatcctgaaaactgattctcaagtcatttctggccatatagacaaaagtagcaaggcaacagacctgaagcttgaaaaatatctggatacagttcgaaggttggaggcttcttttgaagttcttctgcaatagtattccaagaggagaaaatgagagtgcagatctgctagccaagtcagcagcac

SEQ ID NO: 56663 - DNA, 382 bp, Zea mays
  unsure (1)..(382): unsure at all n locations
agcttaaagccatggtaagtagcataggcctataatttgtgaattgactccagcctagctacgggtgcataggttncatcaaaatccaaaccttcgacttgtgaataacccttggccacgagtcgagctttgttccttgtcaccacaccatgctcgtcttgcttgttgcggaagacccatttggttcctacaacattttggttaggacgtggaactaaatgccatacctcattcctagtgaagatgttgagctcctcttgcatcgccaccacccaatccgaatcttggagtgcttcctctaccctgtgtggctcaatagaggaaacaaacgagtaatggtcacaaaaatgtgcaacacgagatctagtagntacccccttat

SEQ ID NO: 56664 - DNA, 298 bp, Zea mays
aacatgacgaatgaagtagccagagcctttgttcgaagctacgggagcaggagcttcgatcttttcagatgctagctgctctgcaaattttttctcacgcatggcaggctccatcctggagggcactaaaggcccaacttcggctttagttagaacttgcgcagcttcggattctgcatgcccagttctggcttccacctgcatatatagtagcttcaacaactttctatgtaccaacagggctcaagaccttcgtagttctcagcacaaaatctaacacgttgccatcttccacctc

SEQ ID NO: 56665 - DNA, 393 bp, Zea mays
cttgccgactcggtcgaagtgagacccattttttctcttaacattacaacgccgagggagaagcaagaacatgtctcttactatttcgttattataagataagatgccctgacagccacattttttttctctcgcgtcttgatttggatggcgcgatttattagatacgatggagggattctattaaacttatggtataatttatatgttcatttattttgaagcctttaatctggataacaggagagtaaatctggactcgtctacaggaccggtcctgacatttctgaggccctaagcgaagatcattatgaatgccctatacgaaagttcgattctgctattttttaaatatgatatctgagaaacaaacaagttgatgatttatatttt

SEQ ID NO: 56666 - DNA, 399 bp, Zea mays
  unsure (1)..(399): unsure at all n locations
agcttgtgaagcgtattggggccttttctgttgacttccttcatcatcagtttgagcagagttattaattgacctaacgagcctcgggtgaaatcttgctccgaagcccctggtcatttcagagaacctgaatgcttcctcccttctttgacggaagtcattgtcagctcgaatgtattcgtccatcttctggagcagcttctccaacgtttgtggtggcttcctggcaaagtactgcgctgaaggtcctggccgaagccncttaatcatggcctcaatgacaatatcattaggcactattggcgcttgtgccctcagacgtanaaaccttcggacgtatgcctggaggtattcttcgtggtcctgggtacactgaaataaagcttgagcagtgactgg

SEQ ID NO: 56667 - DNA, 297 bp, Zea mays
tgagtcttcactacaagaacaaccactgaataatacacaacaaacacgaagaagctaccccactcccaaacatacaacatccaccatacgcgaagctaagagaaagcctaacaacaagaggcggcgctattcaaaaacgacgccagagagggctataataagcgcggaaccattgcagaaatgcgtgaaccatactggaaaaaacaagagatgagcataaaagaatatcgtaagtgaaacatacaaataacaggggcaccacatgaaactcatataaaacgccatatgcgaaatggc

SEQ ID NO: 56668 - DNA, 406 bp, Zea mays
tcgcggcatgccagctcgtccatggtcacggcggcggtaatgttcgatttttttaaaaccgcagatcaccgttgatggtggataataaatgatggcttgtgagccgttatctttgtaactaagagaccaagagctatgcatggtcaattaggatgatgggggcgagggcacggtgaatatatatgtctggtgatctatgtcgactactcaagtgataacctttcccggatattgctggctatcaacgacgacgtcgggcgcagttcttttctaggggtttgacacgtctcgcccgactgctacgcggacaaatcaactatgtcctgtgtgaactgatggaagcggcgttgtgaacattcacgacagaaatatcagagaccgtgtgtgcaccgagatagttccctcc

SEQ ID NO: 56669 - DNA, 377 bp, Zea mays
  unsure (1)..(377): unsure at all n locations
agcttctaaagggagagcacatttatgactatccaatgttcattntgagaaagacaggatttgtagcgcatgccaaacagggaagcaaattggtgttcatcatccacacaagaacatcatgacaactgacaggccactagagctcctccacatggatttattcggcccgatagcttacataagcatcggcgggagtaagtactgtctagttattatggatgattattctcgcttcacttgggtattctttttgcaggaaaaatctcaaacccaagagactttgaaaggattcttgagatgggctcaaaatgagttcggcttgaggatcaaaaagattagaagcgacaacgggacggagttcaagaactctcaaattg

SEQ ID NO: 56670 - DNA, 334 bp, Zea mays
gactccataactaacataaagcctccacgacataataataaactactaataaagggtcctatttatttcaaggtctgagatgcacattattaaaagagtctttttacaagtcaacttcatatagactcttcttattccttgtacagcaaccattgacctattgcccatcaagggggcgtcattggtggtagcctcgtaacaacaaaataaatgtagatcaaaacaaacatatacattggctccaatgtctaaccatcaatcgatggattgacatgctaagagaatataacatacatactcaaaattctcaagctcagtcaatagccacaatttg

SEQ ID NO: 56671 - DNA, 427 bp, Zea mays
agcttctagtccacgtccatgctgtgaacaacttgttatgatagtattccatgaaacctcattcctcagtgacatttcagaaaagatcatcttggcatcttcaatactgccacactttccatatagtgaaatcaaagcattggcaacttcagtttcagaggtgtgccctgtcttaacagctctaccatgtacttgttctccttgttttatatctgcaaggttagctaaagcgctaatagcggaaataaatgtgaacacattgtacttggcacctgcttgacccatcttcatgaataccatgagagcttgttcataaagacgactttgtccaaaacctgatatcaatccattccatgtgatctcatccttgtgttcaatttcccgaaacaaagagaaagcttcttcacttcttccacatcttgcatac

SEQ ID NO: 56672 - DNA, 433 bp, Zea mays
taatgggagaacacatggtgggactaacattatgtcattttgagaaaaacaggatgtggagcgcatgccaagcaagaaagcaagttggcacccatcatccacataagaacataatgacgaccgacaggccactagagctcctacacacggatcttttcggcccgatcgcttacataagcatcggcgggagtaagcactgtctagttattgaggatgagtattctcgcttcacttgggtattctttttacaggaaaaatctccaaccgaagagaccttaaagggattcttgagacgggctcaaaatgagctcagcttaaggatcaagaatgaaataagcgacaacggaacggagttcaacaactctcaaatcgaaagctctcttgaggacgagggcataaagcatgagggctctacccctacactcacaacaaa

SEQ ID NO: 56673 - DNA, 435 bp, Zea mays
  unsure (1)..(435): unsure at all n locations
agcttgtgaagattcttcattccaacgtgtgctattcggcgatgccagagccaacccatgttagtcttagcaattaagcaagtgtcgagttcagctctatcaaaatctactaagtatagctgaccctctaacacttccttaaatgccactgaatcatcacttcttctaaagacagtaacacctatatccgtaaaaagacaattgtagcccattttacataattgcgaaactaaaagcaagttataatctaaagaatctacaagaaaaacattggaaatggaatggtcaggtgatatagcaattttacccaatcctttgaccaaaccttggtttccatccccgaatgtgatagctcgttggggatcttagttnttctcgtaggaggagaacatcttcttctcccctgtcatgtggtttgtgcacccgctatcgatg

SEQ ID NO: 56674 - DNA, 413 bp, Zea mays
  unsure (1)..(413): unsure at all n locations
accgactgcagcatgcaagcttcaaaagggagaacacgngataggttttactatcttgcatttctaaaaagatagaccctgtgcagcttgccaagcacgaaaacaagtgggaggagcacatcacagcaagaatgtgaggaccacttcaagacccctgaaactgctgcatatggacctcttcagacccgtcgcctatatgagtataggaggaagaaagtatggtccagttattggagatgacattttccgcttcacttgggggaactctttgcaggataagtctgaaacccaagggaccctcaagcgcttgctcaggagagctcacaatgagggtgagcttaaggcgaaaaataaaaagagcgacaacgggtcgcgagtaccgaaacttcaagtaaagaattccctgaggagga

SEQ ID NO: 56675 - DNA, 321 bp, Zea mays
cccactgtaatttatacagaaattatggaaaaattaaaccaccgccgcagttcaaacctcactagaaaccataagtggaaattcaaggaaggaaaaggataatggtaattaaagtcatcctaaaacccttgtaatttgtccactgaaatgtataaagacaatacaagtccactatgttatctccaataaaaacctaagcctaaaaggtaatgagtataaaccacttggagcctcgcatgactaagaaaccctaaggtactccttaccttaagtttctttttagcataatggtatttaatcctgcataaccatgacatacat

SEQ ID NO: 56676 - DNA, 407 bp, Zea mays
agcttcgaacttcactgacgttgaatggctgcttccatattgatattgcttctaccttggacgggtctacttctattccttctgcagtcaagatatgcccaaggaaggctatcttttctaaccagaattcacatttgctgagcttagcatagagttgatgtgtcctgagtcttccgaggacgatccggaggtgacgctcatggcctttgcgattcttggagtaaataaagatgtcatcaatgaagactatgacaaacttatccagttcttccataaataccttattcatgaggttcatgaaaaaggcgggtgcgttcgttagtccaaaaggcattactgtgaactcatattatccgtaccgggtgacgaatgtagtcttctaaatatctgcttccttgattctcagt

SEQ ID NO: 56677 - DNA, 367 bp, Zea mays
gaggagcacacaccggctttatatagggatgcggaagacaaccggacgcccacgaaacgatgaagaaacacgcacaagaccactcaaggaaagaatacatgcgggagtctgccagagaaacgcttgcgtgaatgccaccgaagctttcctacttgctaagagccaagcgaaagctagcagccagagaaagatcgtgaccagccagatacagcgcgagcaatcagcagccggatgctccgcaagggccagagatagaagaacggccatggcccggaaaagtggcacaagcgagatacgcagctgaagaaagcaacccccataacccaccaagcgcgaaccaaggacgagactcctttaagtgggggag

SEQ ID NO: 56678 - DNA, 430 bp, Zea mays
agcttctaaagggagaacacattgtattattttcaaatgttcatttcgagaaagactggatttgtagcgcgtgccaagcagggaagcaagttggagctcatcatccacacaagaacatcatgactaccgacaggccactagagcttctgcacatggatctattcggcccgattgcttacataagcatcggcgggagtaagtactgcctagttattgtggatgattattcacgcttcacttgggtattcttattacaagaaaaatctttgacccaagagaccttaaaaggattcttgagactggctcaaaatgagtttggcttaaggatcaataaaataagaagcgacaacgggacggagttcaagaactctcagatggagagattacttgatgatgacggcatctagcatgagttcttctctctctacac

SEQ ID NO: 56679 - DNA, 384 bp, Zea mays
  unsure (1)..(384): unsure at all n locations
agctcgaagccatggtaagtagcatatgctattaatatacgaattgactcaagcctagctacgggtgcataggtttcaccaaaatccaaaccttcgacttgtgagtatcccttggccacaagtagagctttgttcattgtcaccacaccatgctcatcttgcttgttgcggaagacccatttggttcctacaacattttgattaggacgtggaactaaatgccatacctcgttcctagtgaagttgttgagctcctcttgcaacgccaccacccaatccgaatcttgtagtgcttcctctaccttgtgtggctcaatagaggaaacaaaagagtaatgctcacaaaaatgtgcaacacgagatctagtgngtacccccttatga

SEQ ID NO: 56680 - DNA, 397 bp, Zea mays
  unsure (1)..(397): unsure at all n locations
agcttccagctaaggatgaagaagtcagactttgctcatgggtttgtcgacatatccatttgtatctacaaggagaaagatgttcatactcagttttcagggaaacagaaacttatatattttttctttcaagataatacaatataggtaagtttgcacagacaggaattcagtacaacacttgaaaagatagatcttactatgtaaatctgcacaaaaacaatacaaagctatgtttaaccaattgagcaagtgatttggaatggccttaacaaagattgaccttattgattataacacaatcagtatatgactgaattcatcttatctgcctctgctgtgaatgtgcaggatcacacgatggaccanagcacccaaaccaagtcggtatcacact

SEQ ID NO: 56681 - DNA, 384 bp, Zea mays
  unsure (1)..(384): unsure at all n locations
agcttggaggcgtctattggttgtcgacttgttgtagactcctccttcttttcttccgtcgccttgaatgcgacgggttgagcctctgatgtagatggatcatcaagctcgttgatcttcctcgagtcttcgatcatgcactcaaaacttacaaaatgcccgattacttcctcgggggtcattntagtatatctaggattaccacgaattaattgaacttgagtggggttaaggaaaatgagagatcttataataaccttaaccatttcgtggtcgtcccattttatgctcccgaggttgcgcacttgattcaacaaggtcttgagccagttgtacatgtgttgtggctcctcccctttgcgaagccggaaccgaaccgagctc

SEQ ID NO: 56682 - DNA, 443 bp, Zea mays
  unsure (1)..(443): unsure at all n locations
agcttatatcaaattcataggttaagaaatgataaatgattctatagatttacatgctactttttctaatgtataatttatagcacattctttttacttgcttttctatataatttaagataatatacaaatatattatatagacaaatatattaacttaattagttttatctaaattataattattagaatggaattcaattccaatgaaacaaaggggccttaatagtaatttaggcatatatcaattcagttaattaggttttatgcaaaatatatttgtatactattattagcaagatgtcggagatatttatgtgctatatctttactatagaggagtaagacgaagactgtcatgtaagttacagagtanaaataaattntactaatgcataaaatcatttctcatccttcaccctatgagattgagataagtttat

SEQ ID NO: 56683 - DNA, 458 bp, Zea mays
  unsure (1)..(458): unsure at all n locations
ttaagtcacctgcngcatgaagcttaatgcacaattctccccttgttatttttcttccaaaaaagatataaagaatatagagggcagaaattatgattaatcaagatttgaacacactatcatgaaaagggtccttatatggcacaaaggtaatggagaagtgacctaaagtgatgtacctttgcattttaccttttcaaggggagttccatacttgtgttgtatttagagttcattttgcaatctcttgttggcataattgtgacataagtccaagatatcagctgaatattgtcatactaattgaaagataaatcttgatacctggagtctagatgtcatctaacattttcttatcataacaagagacaacatgaaaattgcacaagtatggattatacaactagtgatcatgttcacaaaatatcaattataaaccaccaattgatacaatttga

SEQ ID NO: 56684 - DNA, 378 bp, Zea mays
actcagggagaccacaggatagagggcagaccggcagaggctacaagggagaccgacaaaggcggcgcgacaaatacaggcttgcagctcttcagcataattcagtcagactcagacacgagctcttctaaaaaaatttgggcctacgccccaggccgtggcccaggcagccataggcctatgtctgcccctgacaccagcctgaacaaggtctagtcgaaagaaacatttcccctcctgcgcattgactaggtggttgactctacctcggggtgcgaggggctaagctttctagatgcctattcaggctactactagattgtgaagaaggaatacgataaatcgccacttctttcatcaccccttttggctcatact

SEQ ID NO: 56685 - DNA, 428 bp, Zea mays
agcttaaaaagtgatcggtggtcaagccgtttgcttgtgatcgttatgacaccattgctgattttaaccgttgatccttagaacagtactgtacagctatccactgtgtacctatgtagatcctgcatattgagaaccctgctaggcctctctttgctggcattgctgcagctgaaaaataggaatgttggatctttaaccttttgtacaggagtgtttactgcggttatttgatctgcgtgcattcgtatattggaagaaggggaggctttgccacccaagaataaagagtggatggatgcatgacgaacactgactgaacacgtcataattggcaggtggattgatgagtttccctacgctcggtgtggggggaagcaacatcacatatgtacaacgccagtttggacgccgcaacaatcattcca

SEQ ID NO: 56686 - DNA, 397 bp, Zea mays
tggaagaagtccgaagacaaagccttatgttcttgatatgaaatcaaaaggctcccgcgtgctagagaaattaaagaggcgacatatccagagcggctaaccaatattgtgacggggaagaacgccaatggaaagaggacgatgtgcatagaatttatggatctcaacatggcatgcccgaaggatgagatccgcttgccaaaaataaactccctcggggatgctacaactacttcagaactcaagagctcgtcgattgctcccacgataccccaaatctatagaaaaaagaagatgagcctagacaagaacataacccctaggagacctatagtaccttctaagcccgtgggctaagaaagccacagaacctcagagaacgatgccaagccttact

SEQ ID NO: 56687 - DNA, 250 bp, Zea mays
aagcaacacaagcaccaacgcgagagctcacggagagagcagcgcttaccatcacaccaacacacaaggaagacaggacaacggacaaagaaccaaacgggcacggcaaccgactcacaagcgacgaagcttagaacaaaagaatggacgcaagaacaccaacacacgcggtaaaaaacgggaaccgatacacaaggacgccgcgcccacccccaagagaaaacaagaaccgaaggaacggaaccaaaaa

SEQ ID NO: 56688 - DNA, 402 bp, Zea mays
  unsure (1)..(402): unsure at all n locations
aacatacaatcaacgttgatccaaggttctacagcagcaagtaaatattttcttcatatatagttgtgtataagtgtagagttggattaaaaatagacctctctctgcttatccatatatctgtaagacattgggcaaatgtgcaatttgagtaatgggctcacagcaggattcatttgtcagtcatctttcaacccttttgtagcatgtccccatttctttattgtattggcactgtcatgaatgaaaaatggtataacaatggactaaaacatntaattccaattgcgaaatgctcaaatttagtggggggaagtccattccgaccacagccaattcaattaattgctgatcctttttaaaacaatagaatagaatcacaagtttgggctctcactagca

SEQ ID NO: 56689 - DNA, 240 bp, Zea mays
gctttttgcggaggccaaactgcaccgggaaaggacgtatcactcacaccagcctcaaaacgaaaaagcccaacaagcgagaacaaactacaactacccaggagagccccctacccgaatcactgtggcgaggtggtgcaagcacatagcacacaaaccacaaaattacggatcttaaacaaggaccacataacggacaacatacacaaacttgcagcacaattcatgtctcaagacacg

SEQ ID NO: 56690 - DNA, 445 bp, Zea mays
  unsure (1)..(445): unsure at all n locations
ctgcagcatgcaagcttgtgaaggatcttcatccccatatgtgtcaagcggcgatgccacagccagcccatgctagtcttagctattaagcatgcatctagaccggcctcttcttttgcaaaatcaactaaataaagattgccgtctaatacacccttaacagctagcgaaccatcactttttctaaagacagacacatccacatttggaaaaagacaatgatattccatattgcataattgacttacagataataaattatatctcaaagattcaactataaacacattagaaattgagtgctcatttgagattgcaattntacctaatccttntaccttgccttgattcccatcaccgaatataatcgaattctgggaatccttattctcgacgtaggaggagaacattntcttctccctcgtcatatggattgtgcatccgc

SEQ ID NO: 56691 - DNA, 451 bp, Zea mays
gatcttgagtcacctgcggcatcaagctttctgtccttgatgctgcattaacttccactgttcaaaatggatctcctcctgcaggtgttttcacaaggccacgtcaatacacctcatgaaaactcctacatctccacgcttgtacaaatcattcccaatacgagtgtagttggcagactgtcgatcgagtcattcgacaactgccttgtcatctggctattcttcattcttgatgtatctaataattggggtcctctagtcattcgagtctatctctaaaaccagtacaatgtttcttgttgccttgtactcttcttctgactcctgtgaaatacttgggtatcatacctcttgcacaaaaacatttggaggagcatgagctctgttggaaccatgtttctaccgcgtgttggctgccacgttgtattcccttttcacatggcggaactct

SEQ ID NO: 56692 - DNA, 324 bp, Zea mays
agcttgacgggaagctgttttttacactctttagtcccctacctggcgcgccaactgtcagcgttccgagaccggtgggtccctgagccgacgagtgaatgtcgccgcgtgccccaacccatattggtcgagcgcgagggcgagcgcgatagggggagagctaagcggcccgaaaccgtcgtgagagatgtgggaatcccgcggtctttgtgttcgtcccgcgcccaggtcgggtgcgcttgcagtatggggtcacaagcgtccacgcgggagagggagcgagcggcttcaagcgagcgcctgtcttgttctcgtcctcgcgcg

SEQ ID NO: 56693 - DNA, 439 bp, Zea mays
  unsure (1)..(439): unsure at all n locations
agctnttangttttctcaacttgggctatgttttacccctctaatccctatttagggttaagttccctatccagggttctatttgcaaaatgctataacaatacaacttgtttgaaatttttacctaataaatgcactctaggtgtgtcaaccacctgcaatgccaatgtttatgatgccatgctcaacttttagttgcagtaacaccaggggtgttacagtatgtttgaaactcgtatagataatggttagttggcggagtctgaaggagttgcaggtgaagaccctgagcagcagctggttggtgaaggcaagtgtcccttgacccatctatgtcctactcattcttataattcattccccgcatttaaacagtttatacctaaggattgactagctnntngttatcttgtccttgtttacctattctagttgggta

SEQ ID NO: 56694 - DNA, 436 bp, Zea mays
  unsure (1)..(436): unsure at all n locations
agctntgtgattacacaaccgagctcgacgtctattatctatgacgccgagctcggtgccatgtcggcgccacgacggccgagtgtgctagcgcagcacgtatctcggcgtcatagtctatggcgccgagctgtgttacctcggcgccatagcctatggcgccgagcaaagggtccaaaaatgacattaaatttttttagaggctaaacgttattttttttttcaagaaaggactagaatgcaaaaaattcggaggcggagacatgctatagagcgggatgtaggctagctagagacaaaagcatagtatggacatgtgagtgagcggaagtggggtgattgatgaagcgagagtacgacgcaccgtacatgagacgggagggaaaataaaggagagggtgcgtgggcactctgggagccttatactgtccgcaac

SEQ ID NO: 56695 - DNA, 390 bp, Zea mays
agcttgccaagctctcagacccggccggaatatattggtggcccgagatcgacctcaccggacttcggtcttccgccgccgcgcgcggacacgagctatacagcgagtcttcgcccaattccttgcgctcatgtcttctctagcatcccgtgaacctccctgacccatctaattgaactatctcgccgtgaccaggccggtctcctcgccggcgacgagcatccacgtctgcgcgcgtggaccgatcgacttccgccatatacgacgttgtcccgcacaccgttgtgatccccgagacctcccctacgtactctaacacttcaccggagcaatcttgccgacggtaagccccaccgccctttcttccaccgccggtaccgtataatgtaa

SEQ ID NO: 56696 - DNA, 440 bp, Zea mays
agcttcagcgacaggggctggtactatattttcgtttgatcccaatcaggatgtcctttctcttagagaggcccgaagccagaagaggaaggctgtcagtccaacacctccggaggatgacctatatcaggaaatccaaaacctggagatccttcagcagcaggttcaacgcaagaaggagaagatggctcgtctagctgatcttcagagacagatagacgaagcttctgaagaggttcgtcatcttgttcaagatgatcaaagccgaaggcctccacgcagagagcttcatcaggaaggcttctacaatgaggatgactggtatgaagatttccatcatggaaactttgcttttgatgatgcttcttctctctcaatagaattgcaggctacaccttggccacagtcttacaagccacctcagctccccatatatgacg

SEQ ID NO: 56697 - DNA, 375 bp, Zea mays
agcttaatgcccctcctaaaagattgtcaatttttgttaagggcaaagctcccatggctcaggataacgagggttacattttataccctgccggttatcctgagcacaaaattaggagaattcactttaggaagtctcactctggacctaatcatgcttttatttataagagtgaggcatctagttctaggaaatcaacccatgttaaattgcctaagaagaaaactcctattgcatcaaatgaacctagtatttcatttaagacttttgatgcatcttatgtgctaactaacaaatcaggcaaagtaattgccaaatatgctgggggcaaacacaaggggtcaaagacttgtgtttgggtacccaaggtgcttg

SEQ ID NO: 56698 - DNA, 435 bp, Zea mays
  unsure (1)..(435): unsure at all n locations
agctngtggaagaccagatcatcgaagcttataagtttctggatgagaagtggtcacccaagttccgttgatgaagcaccagaagactaatcaaggaaggaatccatgtggaagttcgcaagaggaaggtttgtgtgttggcatcgatgcttcttcaataagctagctgccaagcgaaacctagaagcctgaagatgatcttgagtagccagaatcagcgtttgcaatcgtcaaccagatgctcctcaaggccagatcttgttgaagttccatctcctcgaagagttgcaaagtgaagatatgtagctgaagtaaagctatacccataacccttctaagccgaatctcgaggatgagattccttttaagtggggtagatttgtagcatcccacaaattcaaatcttggaaatttctcaaactcgctctaaattca

SEQ ID NO: 56699 - DNA, 425 bp, Zea mays
agcttacattcagttgctagatggtctatttttgaaccataaccgcgaaaaaccctggtggaaagatcatctccattttgcatagagtaatgccaattgatttttccatatggtccaactcgttaacatgaagcactttagaacatatccctcgaaaataagcagacaactcaaatattacagctgtgatatcatctggaagaagacccctcaaaccaataggcatgagctgctgcatcaggacatgacagtcatgtgttttaaggccaacaatctttccttcagtaacattaacacattttgatatgtttctacaataaccatcaggaactttaacctttctaagaaaatcacaaaatgctcgtctctcacttttagacatagcaaataaagctggtggcaagaaaactttcctgaaggttttc

SEQ ID NO: 56700 - DNA, 387 bp, Zea mays
  unsure (1)..(387): unsure at all n locations
agcttgtgttntatgtacccaactcttgttgggtcctactaagttagtcaaaatagtttttggaacccatatgcatgttttgtctcccttgcatttggatcccaacttcctagccactacttttgcattcttacatgaaagaacaaaagaagtgttgcaagcatgaaaaacagtagtgggttcattacacattttcctaggcatatgagacacaacatgatttctcctaggcacatgagacacaacatgattgcgcctaggcctatttctactacaatcataagtagagctggaagcaatcatagcatgatcatagtttctatcattaaaagcattcctataaaattttctatcataaatgtaggcatgacacntttgagaactact

SEQ ID NO: 56701 - DNA, 394 bp, Zea mays
  unsure (1)..(394): unsure at all n locations
agcttctaaagggagatcacgtgataggttttattaacgcacaattcgaaaaagatagaccttgtgcagcttgtcaagcaggtaaacaagtgggaggagcacatcacaacaagaatgtgatgaccacctcaagacctctggagctgctgcatatggacctcttcggacccgtcgcctatctgagcataggaggaagtaagtatggtttagatattgttgatgacttttcccgcttcacttgggtgttctttttgcaggataagtctgaaacccaagggaccctgaagcgctttctcangagagctcaaaatgaagttgagctcaaggggaagaagataatgagcgacaactggtccgagttcaagaaccttcaagtggaagaagttcttgagga

SEQ ID NO: 56702 - DNA, 389 bp, Zea mays
agcttgaaggcatcgatggggagtctactttatgtagactcttctatcttctcctctgttgctttgaatgcaacgggttgcacctcgggtgtggaggtggcgtctcgctcgatgatttgtttggagcctttgatcatcaactcagagctcacaaactttcctataacctcctcgggagacattaacttgtatctaggatcaccacgaattaattgaacttgagtaggattaagaaaaatgagtgatcttagaataaccttgaccatttcatggtcatcccattttgtgctcctgagggtgcgcacttggttcaccaaggttttgagccggttgtacatggcttggggctccttcccttggttgagcaaaaatcgaccgagctccccctc

SEQ ID NO: 56703 - DNA, 439 bp, Zea mays
  unsure (1)..(439): unsure at all n locations
agcttctncattgcctttataggaatctcatttattcatctaatatcgctgcattggcagctttatctactttctggaggcctgaatgcacggttggtggggacgatggtcaccaagttacagtgcatgatcctgaggtagacgtacactcccaatgtgctctattgtttatggttttgccaatatatccctcaaaggtcatgctcccttatagcattagattcattaattatactccctgcatcctgaaaagaatgcaattatagaacagtgatacactaaagtatgtcaagtttgatcgagtttatataaatatgttaataattaatgtattttacaggttagggatccacttcctcttacgatacaccatatgcccatagctgtaacatatgcatattttggtgaaggtaacatcgtggtatgttcaaatatttga

SEQ ID NO: 56704 - DNA, 265 bp, Zea mays
aaacgaagaacaaaaggctccaaacaaatcaacgaacgaggcgccaactacacacccgaggtgcaacccatcggattcaaagcaatggaggagaagaaagaagaggctacagcaaggaagccccccatagacgcctccaagacccgacaacgaagaaatggcgcacaacatcaagagcctccgccaaatcctcaagccaaggagggggaaggagtacaagccccgctccacaaaagtgagccacaaatgaggaaagcccggacac

SEQ ID NO: 56705 - DNA, 293 bp, Zea mays
  unsure (1)..(293): unsure at all n locations
agcncgacaacaccaatggagagcgcacattatatttctgacatcaagaatatatagaacattcctcaacatgcaaaagcgggtcctatcaaccggcttagtgaaaataaccgctaattgaactcccgaactcactccctctacaaagacatctactttagccacatgagctctaaggaagtgaggacggatatcaatgtgcttggcgcgagagagatgcacaggagtattatcaatttcaacagcactctcattatcacacaacaaaagtaccttctctagaactacgccgt

SEQ ID NO: 56706 - DNA, 344 bp, Zea mays
atgttaatcttaccaataaagcaagtgcctagttcagctctatcaaaatccactaagtatagctgaccctccaacactcccctaaatgccaccgaatgatcactttcttctaagacaggaacacctatatccgtaaaaagacacgcagtaacccattttacataattgcgaaaccgaaagcaagtccgaatctaaagaatctacaagactaacattgcaaatagagtggccaagtgatataacaatattacccaaccctctgaccaaccctcgaactccatcctccaaatgagattgctccgcggggatcttggtattcctcatacgaggagaacatatacttc

SEQ ID NO: 56707 - DNA, 419 bp, Zea mays
  unsure (1)..(419): unsure at all n locations
agctncagatataccatgaagccattttttccgattactttatctcccgccgcaggagatagaaaggaagccatcttcgtcgtttcctccatatatcaaagaccctcgggagaatatcaagctctttgcataatgttgtgcttcggccattagctcttctgatagatgcttcctcgaaccatgtcaaacaatatattctaaatcatcttgagaggatgcctcgggcatatgtgacgttggctatttcgcaagactgtccttcgccagcttattacaaaaatctgagcatgatattctactggctaaatgacttcacctagtgtctcccgccttcttccatacaggcgtgggttctaatcccacctcttgcatcgatttttaacattaactctgattaaccaaattgcccacggctaacg

SEQ ID NO: 56708 - DNA, 314 bp, Zea mays
tcatatccgagccacggatcagcagcatccgagatggagcacgcgcgccagcggtgaagcacccagactacaagcacggcccggctcccttgagcgacggcctccccgacgggcggcctcccgcacgtgacctcgagaaggaacacgccgaacgcgaacacgtcaggggcaggggccgccttggctctgagcccgagctacggggctaggaacccgaacgcgccgaccacaagggtggagctcggaaccgtgccacggtcgtacaaacttgagagcccgaaatcgcccagccggccactcatctccgagtcgag

SEQ ID NO: 56709 - DNA, 366 bp, Zea mays
ttacaagtgatcactaccgcttagggactagagagagtgcgatccgcgtgttctctgacgctccccgctgcatgaggctcggaaatcgcgccttcctctataccttctaaaccttccaagtgattagtaaagcaagccagaaacacctaagtgtgtggtgatccttacggggtcctagcgacccaattgattaagaagcactcgaccgggctgtgggaccgcatgaaagaaggaaagagaaggaatacacctggcctttgtggcctcctcaacggggactaggctcttcggaaccaacctcgggaaaaaatcacccagtccttcggaacaaccccacagaaaaggacccccccccccccctccaaa

SEQ ID NO: 56710 - DNA, 415 bp, Zea mays
agcttacaagaaacattctaaaacttctagtccttttttttcgcacacgaatctttgagataatgacttgagctccatttgagttgtgaactctgtgcgttgtgtgttgagctcaagttgtgacttgtgtgcgtagttgtgctgcgattagtgtcttgtgtgtgttgctcatcccaaccttactccgtgctttcattgtgatctttgttggaagggcgagagactcccatcttgtggagatttcttctaacgggaataatcatcttaaggagaaaccgtggtattcaagttgatcatcggatcacttgataagggttgaatgcaaccctctttcattgggactctacaacgcggaagtatgcatgtgtacttggcccaaccacgggaaaaaatcgcgtgtttggattgacctttt

SEQ ID NO: 56711 - DNA, 400 bp, Zea mays
ctgctgcatgcaagctttaccaaaaggatgttatttgtgcctttcttaatggaccaatcaaagaagaggtctatgttgagcaacctccatgctttgaatatagtgagtaccctaaccatgtgtataaactctctaaagcgctttatgggctcaagcaagccccaagagcatggtatgaatgcctaagagatattcttatcactaatggcttcaaagtcagaaaggccgatcctactctattcactaaaactctcgactatgatttgtttgtatgccatatttatgtagatgatattatcttttggtctactaatgaaactacatgtgaagaatttagtacgatcatgacacaaaaattcgatatgtcaaagatgggagagttgatgtattttttggattt

SEQ ID NO: 56712 - DNA, 136 bp, Zea mays
accatattttctatacgggttccatgtaacatacacatgcagctcttatgggcacattcatagtactcgaaacaagaatttgtctcccagatgccagaattacttaactcctaactgatattaatttctcccatgt

SEQ ID NO: 56713 - DNA, 434 bp, Zea mays
agcttgtggaggttcttcatccccacatgtgcttatcggcgatgccacagccagcccatgcaagtcttagccattaagcatgcatctagagtggcctcttcttttgcaaaatcaactaagtaaagcttgccgtctagaatacccttaaaagctagtgaaccatcacatcttctaaagacagacacatctatatttgtaaacaaacagctatatcccatattgcataattgactaacagatagcaaattatatccaagagactctactaaaaacacattagagatagagtgctcatttgagattgcaattttacctaacccttttaccttgccttgattcccatcaccgaatattattgaatcttgggaatccttattcttgacgtaggaggtgaacatcttcttttcccccgtcatatgggttgtgcatccgct

SEQ ID NO: 56714 - DNA, 392 bp, Zea mays
ctacgccccacggccgaaggctgcggcggcgatcctgccggaacaggggacgcaagagctcatcccggacgcggcggccaggggcatcgcctactcggtgctgcagggggtgctggtgaccaaagtgcgggtcagaccccagcgacgcgcggacggcggaggagccgtcaagagcggccccagcgactacctcatccaggaggaggaacggctcaacgaccacaacgacgtcgccaagtgcgccgagatccagaacgccatccacgaaggtgagaaaccgaacgagcgctggctagcgcggggttgtacggaggatgacacactctctctgccgcgtaaccctcatatactcttcgatgaagacatacatacactacgcgcgcgggggttgc

SEQ ID NO: 56715 - DNA, 360 bp, Zea mays
cagcatgcaacctaccattatcttatgaactcaatgttacattactctctaaaacggggagaacaaatcgacaaacaggggagaatcataagccaaacataacatgtacgacattgaagagcgacatttaatccatggctcaccgcaccccacgaaatagatgacaaaagttgtctccatactttgacccccatatgtgccgttggcattcgactacaaaaatggcacttcccgaaatgcacacatttagggggaggaaaccatctcacccgactcaaaacctcattaacaaaacttactgaagctataaaagtgtggtcatccaccccccaaaacggggagactgaacatgccatcacc

SEQ ID NO: 56716 - DNA, 425 bp, Zea mays
agcttgtccaacacgtgttgacatggtttgtatatgtctaacaacgacctccatagacaccaatgcatagtggaaccctatgccacaatagcaatggaagagagacaggagaagaccaaagttgacatgggaaggggaattaaaaaataagtgaaaaaaaaacacaaagatttaacctagaataagaatgcatggaaaacacgtatccatatgactgaccttcgactagtggtttctgttggatttcaactctagcctactccaacttgcttggactaaaaggatccgttggtgttgtatgcttgccttaattttacttttaaattaattatgcatgtgtaacacgttaaagctggaagtgtttcttagcagtttcctactcaatcattgcataggtcatgtaatcattatgaattttcaataca

SEQ ID NO: 56717 - DNA, 438 bp, Zea mays
  unsure (1)..(438): unsure at all n locations
agcttcccctgtacgccaaggatatgcaaattctttttgtcatggacaagaggatngtctcgacaacatacattagtggctccaagtgctatattctttatgttcctgggcccacatgtcggggcccagagcctatgtgcatgccccccttcatctataaaaggggaggcatgcgacgttacacacacacaatcttatgacacaccttagactcgcaagctctcaagcaatacatctcacagaggagtagggtattacgcttcggtggcccgaaccaactcaaatccttgtgtgttcttgagttctccccgttcattccaacgatcaagcaaaacgcctaagccccttctcatcttaggatttagggcgggtgcactccaccacctcggcggagatatactcttcgacacatgcatttgttccatataacactcttcc

SEQ ID NO: 56718 - DNA, 334 bp, Zea mays
  unsure (1)..(334): unsure at all n locations
aacgacgaggagcaaacccccgaacgccgaactgtttaaccacgccnccccagaagggctgagccaagatggaaccaagcgctgcgaagccacaacgctgcccaggaacggcaacaaggcggaggcctctgaaagtcccccaccggaacgggccgaacggccggaggataacacaagccccaacgagcgggaacgcgcttaacgcgccgctgcgcaggccgactgagggccccgaaagcagccagaaagaagagcaaacaccgcggcggggctaccccgaaacaccccggagccgaaggaccctccgacaagacgtgagaccagaaaaaacacc

SEQ ID NO: 56719 - DNA, 394 bp, Zea mays
cttctcatgtggggacttaatgggaattctgaatttcaaaattctgaaattcagaccttgagccaaagatcagggatgttcaccttgatccctaactcgaatcctaatggccccattgacaaaattgtgtctaactaacccctctgtcgtgtgccagaagatggcattgggacacgagccctaaacacgacaaaaccttggatttgcctcgggtttgggcagggagacagaccggatttcctggctccatatctctgcaaccagtaggctaaatcctatgacccccacacaagaatggtagcttgtatggaggagaagagattttgtgcactgaccaaggcgagagcaggctctgatgagcgaccacacgcgccacaacttgggcagaacgcac

SEQ ID NO: 56720 - DNA, 425 bp, Zea mays
agcttataaaaatcttggatgaatctgcttatatacccagctagtccaagaaaactccggacttggtgaacagttgttgggggtttccactccagaatatctttgaccttgctaggatctaccgcaattcctttaactgataacacgtgccccaaaaattgaatttttttcagccagaacgcgcacttgctgaacttggcatatagctgatgttccctgaggcgcgtcaatacaatccgtaaatgctgagcatggtcctcttcattcttagaatatatcaagatatcggcgatgaagactaccacgaacttatccaactcgggcatgaacaccgagttcatcaaataagtgaaatgggcaggagcatttgtgagcccgacagacattaccaggtattcgaacaactcataccgcgtagtaaacgc

SEQ ID NO: 56721 - DNA, 329 bp, Zea mays
agacttttctgagcgcgctggcgtctttcttcttgctctaggatggcgcgtcgcggtgagacggtgctcgtcttcgtctcaagcgcgaagtcgatacccggcgcgcccctcgatggggtgccggcgctgtctactcgctcgacagccgacgaggtgctgcctcctaattggccttggtcgccctgcctttccctccgtctgcgggggaaagggcaggatgaacttcaagggtgttcttccaccactcggggaagacgtctgcgaatccgccgccggcgggctgtctgccgtcattgtcgttgttccgtggcggtggaaagagtatcatg

SEQ ID NO: 56722 - DNA, 383 bp, Zea mays
agcttgaagaacatttttacctagtctaatcttaatatgatgcggaggagatggctcgagctgattaaagactatgaattggagattcattatcacccacgcaaggccaacatggtggcagatacactaagtcgcaagacttcctatcattgtcttacaatgaaaacctctgacatcacattatgccaagaaatggagaagttaaatctgggaatgattcaacatgaaacattcaatcaattgaagcttgagtcggttcttctgcaaaggataattgatgcacaaagaagtgatgagggtatgaaacacattcatgagaaaataatggccagttaaacaaactgtttcaaaaaagatgatcaacgcatttgatggtttaacaa

SEQ ID NO: 56723 - DNA, 397 bp, Zea mays
agctttacacaagccttacttattctccttcataactggaaacgcccttcagccacaggaacacttagagtactcctcatcacctacaacaacatgggttcgaaaaccctgagtactaagtgtactttcgcaaggcttacccgactaatgaaaaatgactcttaaagatatgctagttaagtaggaatcaaggaaaaggctttagcaagaatcaacttaaatacttttgcagaaatagcttactaaagggagtccttactttccatattttaacgccagaataaatattaataagctctgggtgcatctagtctaatttcaccatctcatcaattcaacatgatttttattcataatggttacatcccgacttgggttgcagggcagcgatcaattc

SEQ ID NO: 56724 - DNA, 409 bp, Zea mays
agcttcagtactataactttttctaagacttaagatcgaaccgacttaaagatggaatgacttcttagtccataagggtctgagtcataattgtaatcttttgaaaggggcatgattgttatttctcacaggctacgtcctgtgcctataaatagatgaacagtgctcttttactgttcacgcaatcttgtaattgctaacgcattgtgctggaattattgttttctgccaaggcgaaggtataaatgtacttaaatattatgctttaatatttaagctcatattataaaataagtgaataatgttatttattcttggaattccataatggtgtatattttatatttcatttcgcattggtttatctctgaacacgaaggtatgacctttctgatatattattcataac

SEQ ID NO: 56725 - DNA, 437 bp, Zea mays
  unsure (1)..(437): unsure at all n locations
agcttgacaaacaccatttgacattatacatataatttctgagatcaagaatatttagttcattcctcaacatgcaaaatcgggtcttatcaagtggcttagtgaaaatatccgctaattgatcttccgacctcactccttctaaaatgatatctcctttagcaacattatctctaaagaagtgatgacggatatcaatgtgcttggtgcgagagtgttgtacaggattattagcaattttaacagcactctcattatcacacaacaaaggtaccttttctagaactacgccatagtctagaagagtttgttttatatataaaatctatgtgcaacaagcacctgcggcaatgtattccgctttcgcagatgacaaggcaacactattttgtnttttggatgtccatgaaactagtgatctaccaagcagatggcat

SEQ ID NO: 56726 - DNA, 360 bp, Zea mays
  unsure (1)..(360): unsure at all n locations
naagctgaagagggtgatatagcgtggctgtatcttgttataagatagatacccacagncaagaatgactaaattgatgccacgtgccgctggtccatctatgattttggagaaaataaatgataatgcatataaacttgaggtttctcccgagttccgggttaagcctacattcaacattgcagatttgaaaccgtatttgggggaagaagatgagcttgagtccaggacgactccacttcaagagggggaggatgaagaggacatcactaccatggataccaacaacactcccctagttgatgttctaggtccgaatactcgcgcacgcgcaagacaaatgaatttgcacgtgagctc

SEQ ID NO: 56727 - DNA, 365 bp, Zea mays
  unsure (1)..(365): unsure at all n locations
gcagcatgcaagctnttacagaagaaggaagagccttcttcatctataaaggcgggcgggcctaaaaagcgaagaattattactgttatgcaagccatcgaggaaacaccaccgccggccttaccataaaagatgacaccagctatcggagcagttacttctgccgaagctgtggctaccgaagctactaatctagagagaacgttatctgctattgataaagtactcttggatataaccgcagaagagactgttgcggctacagaagaagaactggccgcaatgcctgagaaagggaaagaaattgccgaaaacacttccgaagaaaaaggcttcagctttcagaaactagtcggtcaagaatt

SEQ ID NO: 56728 - DNA, 370 bp, Zea mays
  unsure (1)..(370): unsure at all n locations
agcttcgcccggtagtcctacccgcgcacttcttttttttttgcccgctccggacctttacgctctcttcctttcttctctctccgatcctattcttttcccgctgagctcggctccgacggggtggtgactgacttcctcgccccagccctcgcgcgattcacaacggagccgtggcgaccaggcaagccattatatggactatggctccgtggaataggtcgctgctagctttactgcgaggatctcggaagactccaacagctctgcgcatcaatccgccattctttgcgttcagttgtgagccanacacactgagacgaccctcagttaaactgggcccacaacgcggggtgagcaagatggaaag

SEQ ID NO: 56729 - DNA, 368 bp, Zea mays
  unsure (1)..(368): unsure at all n locations
ccgcaacaacancaggaaccgaactcacgtttattgtattcataacanacgctccgacacgaccgacgatgcattccaaaatctcttctaccacgccgccatagagaacggacctagtctgggaaccaccacatacagcaaatacgtttcaacctctgacaatgtcctacatcaaaagagacgtatggcactcaccagcgcgtaaacaatgacgaagccttctggattttgaaaaggcgatttcagactatcacccctatcgaagccgaaattttaggagcaaccacccctcgggattcctcttaagctccacgacagcaataaatctgtcaatacctgacaaaggagtcccgaggagaccgacacta

SEQ ID NO: 56730 - DNA, 434 bp, Zea mays
  unsure (1)..(434): unsure at all n locations
agctttaggcattattaatggctaaataatttctggttgttactaaaaannctgacctatttttattaaatactagagtaatttcggagtctagtaaaattggtcccatgattttatcattnttctagatttttttataaatttcctaagcctggcagaaaaagaaacgggaaaatgatgaacagtgacgggctgaaaccagcctgaaccggcccacgttcaatcgaaacgcgcccgcgcacgcgcccacgatgttcaatttgcgcagaggaccttggccattcaaataatcggtgaagaacccctggctactattcactatctcactgaaattcgcagttaggcccctgcacttctgtttcttcgcagcgacaggtcctcgatgatgaacgccggtgagcacaccctccgacgaacttgtaccggccgatata

SEQ ID NO: 56731 - DNA, 290 bp, Zea mays
gcgaagggacacgaaagcggaaaagcccaccgaaccgagggacccctacaccactgggatacggatacctcactcatcaccctccgagagaagcaactcacgcccgcacaaaaatccatgttaccgacaaaaaatccagaagctcggaataaggggaaaagagacgcagcactgcaagcgcagcgagggtgtggttactggccacagcggccgcaaaaagcacacactacaaggcaaactgaacctgcacgggcgggacttcacgctgaaaggggccgaacacccccggc

SEQ ID NO: 56732 - DNA, 331 bp, Zea mays
catatcactatcacaggctcacacaatagtggttagcgcatatgtaaccctactggttcaatataatttctgctctctggttcatatcgagatgatgacgactgtgatgttgtgcctatggatgcctgtcataatctgctaagtataccatggcaatttgattcttattgtctgcgtcatggtatatcaaataaatattttctcatacaccatgattagaaaattattttgcttcccatgttccctgaagcattatgtgccagtaagattgtgcctcaagctaccatatgctaaaactgataacaacaacaaatatataattcgttggtaa

SEQ ID NO: 56733 - DNA, 387 bp, Zea mays
agcttgtgaagattcttcatcccaacgcgggctagtcggcggtgctagagccaacccatgttagtcttagcaattaagcaagtgtcgagttcagctctattgaaatcaactaagtatagctaaccctctaacactcctttaaatgctactgaatcatcactccttctaaagacagtaacacctaacacctacatccgtaaaaatacagttgtaacccattttatataattgtgaaactgaaagcaagttataatctaaagaatctacaagaaaaacattggaaatagaatggtcaggtgatatatcaattttaccaagtcctttgaccaaaccttgatttccatctctgaatgtgataagctcgtggggatcttgggttttctcata

SEQ ID NO: 56734 - DNA, 422 bp, Zea mays
cgctacttagactgtctccagtttagcttttatattcgggacacagtattatagatgacaatgtttaatactgtttacggagagaagtttgaaataggtgataagatagaggatataattcgagatctgttggagatagcctatgaagctgtttacatttgggaaggccttttttttacctgtggctttgtgaggagcaactttagtcatgttgtgtttcccagtgctaagccatatctgttgactggtgattctatactcaagactgctctatctcactagaaagcagaccatgcatgagatttttttaattgccatggccagagagtatgtgccttctacatataattttttagtttttttactactaccactcgctgtaccaaattatagactgctttggttatctagttatatatagc

SEQ ID NO: 56735 - DNA, 347 bp, Zea mays
caagcttagcatgttgttaatcatggccattttcgtaacgagcgatacgttcatgtccaaatgatctgctcgtttatcctcctgttttgtagaaacaccaaggcattctgatgaacagaacactgagaggactacaaaagggaatatggaaacagaaaactctaccttcatggcatatcaatcagtgcttggcatgttgtcgaggcaattactgtctgaaacttccacagcacttaaactggatgttaaagtgatgccataaacattcttgacttgacattcaagttcttcgagcaaagtcttagctaggagaaaataaaaaaaaaaaatgaggttattagagccca

SEQ ID NO: 56736 - DNA, 418 bp, Zea mays
agcttgtgaaggttcttcatccctacatgtgctatgttgcgatttcacagccagcccatgctagtcttagctattaagcatgcatctagaccagccttctcttttgcaaaatcaactaaataaagtttgccgtctaatacacccttaaaagctagtgaaccatcacttcttctaaagacagacacatctacatttgtaaaaagacaattatatcccatattgcatagttgactaacggatagcaaattgtaaccaagagactcaactaaaaacacattagagatggagtgctcattagaaattgcaattttacctaacccttttaccttgccttgattcccatcaccgaatataattgaatcttgggaatccttattcttgacgtaggaggtgaacatcttcttctcccccgtcatat

SEQ ID NO: 56737 - DNA, 436 bp, Zea mays
  unsure (1)..(436): unsure at all n locations
agcttctaaagggagaacacattntangattaacttatgttcattttgagaaagacaggatttgtagcgcatgtcatgcagggaagcaagttggagtccatcatccacacaagaacatcatgacgaccgacaggccgcttgagctactccacatggatctattcggcccgattgcttacataagcatcggcgggagtaagtattgtcttgtaatagtggatgattattctcgcttcacttgggtattctttttacaggaaaaatctcaaacccaagagaccttaaagggattcttgagacgggctcaaaatgagttcgacttaaggatcaagaaaataagaagcgacaacgggacggagttcaagaactctcaaattgaaagctttcttgaggaggagggcatcaagcatgagttctcttctccctacacccctca

SEQ ID NO: 56738 - DNA, 415 bp, Zea mays
  unsure (1)..(415): unsure at all n locations
agcttaaaccangagaatctagtaaatatgttctttgttagtgaaagtacaatccttgacaaaagtgcattattttaccaagttggattgaaatgtagcagcatacttcatgagaaacttattcttatactcgagactttatgagattactaagagaaaatgttagactcaatatgatcaacatatagaaatgaaactccccctaaaggtatgcatcaagaatttgaatgcacttctcttttaacgacaaatagggagaagcattattcatcttgatcaaggcttataaaatttgcaataagcaacctatgcctagtattctcacaatgaaaaaggtttagaatgcttacaaccacaccattgattggtttgaagatcttatctgtcaagtaagtggtggtggtcttgatgtctt

SEQ ID NO: 56739 - DNA, 388 bp, Zea mays
ctctaagataacccgacccatgaccgagttgctcatgaaggacaagaagtttgtgtggtcggaagctcgtgagaaaagctttcaagaagtgaagaaaagattaacctcagctccagtgttagtattaccagataaccaaaagagcttcgtcatcttttgtgatgcatcaaaacaccgtttgggttgggtgcttatgcacgaaagaagagtaatatcttaagcctcacggcaattaagagcacatgagcagaactaccctacccatgaattggaactagcagcacgtgtgcatgccctaaagatttggagacattatctgattgggaacaagtgtgaaatttacactgaccacaaaagtctcagggatatcttcacccaatcggatctc

SEQ ID NO: 56740 - DNA, 372 bp, Zea mays
  unsure (1)..(372): unsure at all n locations
agcttcaggtacaaatgttattcttatgttatggtncaataaaccataattctgtacaatgtacataacattaagttcgcacaaataattgccaaaaacatttggaaccaaacagatcatgggacctaacaacctttaacaacgcttagtatgaacgcaccagaactctgcctccatattccacgaggcacaaccaactccaggtaagatttcctcatttccatcaacaaacataagacaatcccattcagtacagacacatggtagcattcagatattggcacaaaccgtacacacacacacaaaaatatgtatctatctgcataaacagataaacccatgaaagttttacaaagatgaacgaagtcagtc

SEQ ID NO: 56741 - DNA, 362 bp, Zea mays
agagcaaacgacagccttgtataatcatgtaccaccggagaactaccaaagccccttgacgcttaccagcaacgcaggttgacacaactagagatggcaacgggtacaaacccgccgggtatagccgccccaaacccgtacccgcgaaaaatatctatgcccactgaaaaacccgcacccatgacgggtttgagattttgcccaaacccgaacccaacggggtagcgggtacccaaggcgaacccgcgggattgaacacaaaaatactccggcgtctcataaacaataaggaacgtaatgagaaatgataacatgatccaacacctatggaatgaacaacgaggtcatgatgcggtataaaa

SEQ ID NO: 56742 - DNA, 344 bp, Zea mays
acaatatctcaagaacggctcaacggataggccactttatgtatcgagaagaaataattgaaccaggttgatagcaacactattatcaacgacttcgtataagaaatgttagaagaaattttcgaggtaatatgtaaacatatttgaatttattttgatatatttgagttttttatcaaataaaaattttgtcgatatacttagaagaaagttaaaaaattatagatgaagctttaaaggccccaattttttgtttcgccctgagtccctgaaatctcaagaccggccctgctgtcgacactgggccgcgcgttggagacgaaggagaccgcacatggcttgct

SEQ ID NO: 56743 - DNA, 83 bp, Zea mays
caccggactgtccggtgtgcaccggactgtccggtgcgccatcaaacagaggctggcagcaaccgtcactattggtggttaaa

SEQ ID NO: 56744 - DNA, 414 bp, Zea mays
  unsure (1)..(414): unsure at all n locations
agcntgcttgacatgtacaaagcttgtatttatggcatatgtttggtaggaaggatgagacaagtcttcaagcgatataccaccttgctttactatctttattgcaaatttgggacatacatgcatagaggacaaactcaaagaagttctatctaagtatgatatgtggattcttctaatttgcttgtaaagtagatccatagtaatgaaattgcgtattgtggttctatattgtgagcgcacctaaatttcatgttcttaaaatacatagccgtgttggaatgtctgtagctttttctaatattacggcatatgtacctatacctttagggcctgtttggttcctaaggaatgatcacccgtaaccattcctagccagattatttgtcttattatataaagggttgatcaact

SEQ ID NO: 56745 - DNA, 404 bp, Zea mays
agcttacttgtatgtacatttgttttattatttagatgtcatgtgggtacatctctttacagtcttgaacaatgcattacagtatagcaattccttgttctgcatgacagatatacaacaagcccacatctctttgaagcagatgctgaagatgcatttattcgtgtaaggaataaggtatgggtgttacatatagcttcatcgttttctgcaaccttcaacattactcacatgcattttaccatctctactgccaggggaaagtcccactttatggctgtgattgttatgcttatgctcttctggcttctgggtttgtggatattgttgttgaaatctggttgaaggtatgatgtccatctctttgttaagacttacgaatatggcattagctctaaatgtct

SEQ ID NO: 56746 - DNA, 420 bp, Zea mays
  unsure (1)..(420): unsure at all n locations
agcttcatgaagaggattcttttgtcatctcatgcggacagcttcagccgaagctgcttcttcctacaagaccttcggcgacgaagcatagtcccaacaacaatcaagaataaatatcctcttgctcgtattgacattctatttgaacagctgagaggtgcccaggtattctataagattgatttgaactctggttatcatcaattgaggattcacgaggaggatattgagaagacagcttttagcaccaggtatgggcacttcgagtttatcgtcatgtcctttggcttaactaatgcccctgctgctnttatggaagcaatgaataagatgttccatgagttcttggatgaccttgtggttgtgtttcttgatgatattcttgattactcgaagacggaggaagagcatgagcgacat

SEQ ID NO: 56747 - DNA, 323 bp, Zea mays
agcttaaagggacatgatcaaatgcatagtttacatgtatgctatagatcaatccaaattacgcaaatctaagacatttagctcactacgcaacctgcaaaaccttttctcatctaaaggcttggtgaagatatcggctagttggttctcggtgctaatatgataaatatcgatatctcccctttctggtggtctctcaaaaagagatgtcggatgtctatgtgcttagtgcggctatgttcaacaggattatccgccaagcggattgcaatctcattatcacataggagggggactctgctcatattgtagccaaagtcccg

SEQ ID NO: 56748 - DNA, 390 bp, Zea mays
agcttctaaagggagaacacgtgataggtttgactaacgtgcaattcgaaaaagatagaccttgtgcagcttgtcaagcaggtaaacaagtgagaggagcacatcacagccagaatgtgatgaccacttcaagacctgcacgcatcggttgccgaaatttaagcatttctcttgaagttctttcaatgatttttgcaaaattgaaattttctcgatctcagtcttgagactcgtttcaaggttcttcttttcctgctcagatttttctgactttttgagtaattcattctttaaactgtcattttccgcttggacctcaaccaagggagccttcatagaatgaataacggagtctttctttctaacgcagcttcgtgttctttactatga

SEQ ID NO: 56749 - DNA, 428 bp, Zea mays
  unsure (1)..(428): unsure at all n locations
tgaaatggtgaagaactatttaaggtcaacaatgtctcaagaacagctcaacagattggccactttatgtattgagaagaaattattggacaacgttgatagcaacactattatcaacaacttcgcatcaagaaatgttagaagaaaatttttaggtaatatgtaaacatatttgaatttattttgatatatttgagttttttatcatataaaaaatttgtcgatgtatttagaagaaaagaaaaaaaatctctactacttcttaagttagcaatagtagcctgccttttcgtgttctgccattctgcgatctcagacgtccgtccattctaccgttctacaatctcagccgtccaatcccgcacaccagttttcgcgcgcagaanaaaatcaaaccgtggctgcctacggattgaaccttggatcta

SEQ ID NO: 56750 - DNA, 443 bp, Zea mays
  unsure (1)..(443): unsure at all n locations
taagctgctcataccatntaatatgtttgattatgtctaacggatactgtgttcagtaaaattataaagtttgatagtaataaaaagagagacatggcctgaccgagttatagtaggggacgactaaatgagacttgatattatggaacaagatttagcattgaataggagctatgtttttcggtttatgttcgcttttaatcttagtctaacttaatttgctcgggactaaaagtatttgctgctactataatgaagtgtttgatttgatgaatcactctatccaaaataaagaggtgcatcatgagtctattcatcaaattaggcgggacgaccttatttcacatattagtactatacaactaactacgaggaatgagatggtgatggattaactcacttcattccacaaaccaagtgacgagtgagatgatgatggacta

SEQ ID NO: 56751 - DNA, 327 bp, Zea mays
tagcaacccctcgagcctcacaaggacgttgaggcgaagagactggcacctctataacttgtgtcttctgatatgtgcggagataaatggaactctgaccatatgtggccaatgatactgtctcacttttattgatgactccaccatattttgctatgtgtctctcttaaaaacacacgatgaagcattccattattttaagacctatatagctgaacttgagaaccaacttgagatgaaaatcaaacgcgcatcgtccgatcgaggtggagcatatttgcctgatgtgtccgacgacttatgcgtggtacatggtcttatgaatga

SEQ ID NO: 56752 - DNA, 340 bp, Zea mays
  unsure (1)..(340): unsure at all n locations
cacgagatacgtctatctatatgttaattctaataagacagaccctgtgcagcttgtcaagcaaggaaacaggtgggaggctctcatcacaccccaaatgtgatgacgacatcaagacccttgcagatgctgcatatggaccttttctgacccgtcccctatctgagcatangaggaaggaagtattgtttagttattggtgatgactttatccgcttcacttgggtgtgcttcttgtaggaaaagtccgtaacccaccggaccctcatacacttcctcaggagagctcaaaatgagtctgagctcatagtgaagaagataatgagcgacaacggatccg

SEQ ID NO: 56753 - DNA, 395 bp, Zea mays
  unsure (1)..(395): unsure at all n locations
tcacgggctactggtggagctagctcaagcactggcttgctctgtatatggctgaggtgggctggccacggtggccgaagctctggcggcaatggcgggcggaattaagctcgccggagctaangggaagtggctggccggtgaaggtgagtgcggcgcgatatggcgcgtgcttgggaaggctttatatgcgccgcgcggtgcacgggcggtcgtggaccggctagtgcgcgcgggcgtgcacggtgaatgcgcggtgcgcgaacgggcgtgaaccacgggtgtcagtcgcggtcgaacacgtgttcccgttgcctctgcccctgttcaagcgccgaatgggaggaaatcctcgcgaatttgggctagatcactgcaagggatttgttcaccag

SEQ ID NO: 56754 - DNA, 384 bp, Zea mays
agcttgtggaagtgagttcaccggaggcgggctccaatgtttgtcacttgttctcaaatggtgtgaatcaagaacaagacaacacatttgtttaatattaatgaccatcgtcctccgaagcattacctcctctcggatataatgatcgtcaaacgaaggtcttgaaggatatgccttcatcatcttatggataaataagaatacataaagataaagataatgaatgttattcatcaattcattcatatttgcattcccataaagtatgtatgaatattaaccgaatatatattacattgataccttcggcttgctcgaaggtgcaaacgcgagaatgattaccatccagcgtgaatagtaccatgctactgtttatctatttat

SEQ ID NO: 56755 - DNA, 429 bp, Zea mays
ggcggctgcgattgtccttcgggcccgcatgtgcggaatgtgtcttcttctcttgtgcggggaacattgtcttcagtgggctcttggtgggtggattgggtgagggcgacggccttgccctttcttgcggcgagcagtgctgcctctccagcctcgtcagacttccggttagctctcttgggtgccatcgcgggtggttttgtcgtagcacgaacggtgagcgccaaatgttggaacttgctctcaaacgcaaggaggccaacaagggtgaatagtggtgacgacagggttacgtgcaaggaggcaatatctctgttcatctggcctcccacgggcactgtacaggggtatttataggtacctgagcgcccagcgccttgtgctaaggacgcatgtgccctcagctacctaggttatccgcagaatatt

SEQ ID NO: 56756 - DNA, 360 bp, Zea mays
  unsure (1)..(360): unsure at all n locations
agggagaacacngcttgggacttactaatgttcatnttgagaaagacagggtttgtagccagtggcgggcccaggatttagagaatgggtattcaaaattttttataggatgattttttgaagattaaaacatgtctatcgacatatatagttaattatatatatgtataacctataattaagcacacacgctatggtcatcactgattcataactagtctactgaactcaaatttcatacaactatttcaaaagttntaaatcgaaatgcatcntgtggggtgttgctcagtgctagctgggctgcttgtcctcttgacatnttcagtcgctaatgcccatctgtagccaatactgcag

SEQ ID NO: 56757 - DNA, 459 bp, Zea mays
  unsure (1)..(459): unsure at all n locations
aagattcttcattccaacgtgggctagtcggcgatgccatagccaactcatattagtcttagcaattaagcaagtatcgagttcagctctattaaaatcaactaagtatagctgaccctctaatactcccttaaatgctactaaatcatcacttcttctaaagacagtaacatctatatccgtaaaaagacatttgtagcccattttacataattgagaaactgaaagcaaattgtaatataaagaatctacaaggaaaacattggaaatagaatggtcaggagatatagcaattntaccaagtcctttgactaaaccttgatttccatccccgaatgtggtagctctntggggatcttcgttnttctcgtaggaggagaacatcattttctcccctgtcatgtggtttgtgcacccactatcaataatccaactcgagcccccggatgcataaacctg

SEQ ID NO: 56758 - DNA, 386 bp, Zea mays
  unsure (1)..(386): unsure at all n locations
agcttctaaagggagaacacactttatggcttactaatggtcattctgagaaagacaggatttgtatcgcatgtcaagcacggaagccagttggaatctaccatccacacaaaaacatcatgacaactgacaggccgcttgagctgctccacatggacctattcggcccgatcgcttacataagcatcggcggaagtaaatactggctagttattggggatgattattctcacttcacttgggtattctttttgcaggaaaaatcacaaacccaagagactntaaagagattttcaagacgagctcaaaatgagttccgaatgagaattaaaaaaatagacgcgacaatgggactgagttcaaaactcacaaatcaaagatttctt

SEQ ID NO: 56759 - DNA, 465 bp, Zea mays
tctaagggagagcacatcttaggattaaccaatgctcattttgataaagacaggatttgcagcgcatgccaagtatgaaagcaagttggagtccaccatccacacaagaacatcatgacaactgacagaccgctcgaactactccacatgggtctattcgacccaatagcttacataagcatcggctggagtaaatactgcctagttattgcggatgattatttttgcttcacttgggtattctttttgcatgaaaaatcacaaacccaagagaccttatagagattcttaagatgagctcaaaatgagttcacattgagaattaaaaagataagaagcgacaatgggacacagttcaagaattcacatatagaaggagttctttatgaggagggcatcaatcatgagttcttttctgctacacaccttaacaaaatggtgtagtggaagagtagaactctactg

SEQ ID NO: 56760 - DNA, 156 bp, Zea mays
agctcaatctagaaaaacgtgtcttcagagtgccagctgacaagttgaacggaattattgtgccacaccgaggaattgtggccaacctataaaaaattgaggccatcatgagaatggaagcgccgtgatcaccgaagaaagtgcaaacgcttactg

SEQ ID NO: 56761 - DNA, 461 bp, Zea mays
  unsure (1)..(461): unsure at all n locations
agcttgtgaatgttcttcatcccaacatggtcttttcggcggtgccagagccaacccatgttagtcttagcaattaagcatgtgtcgagttcagctctttcaaaatctactaagtatagctgaccctctaacacacccttaaatgctattgaatcatcacttcttctaaagacagtgacacctacatcagtaaatagacagttgtagcccatttgacataattgggaaacagaaagcaagttgtaatctaaagaatcaacaagaaaaatattggaaatggaatggtcaggagatataacaattttacccatacctttgaccaaaccttgatttccatcctcgaatgtgatcgctgtttgacgaatctggttattctatatgaggagaacatctttctcttcccagacatgtggctcgtgcacccgctgtcgagtattcaaacttgagccctcnggatgcat

SEQ ID NO: 56762 - DNA, 408 bp, Zea mays
cgccctctggcgttctaccgcagctgaagtaccaagtctcccacctggaagtctcggagccgaaccccttgggcgtgatagcgtcgcagagactgttgataccgcgccgagtgtagtaaggccatgtcctaagcctcttccagctggtctagcgagtcttctcagctggtctggttgctttggtcgtcgtacgcctttgtccttggggaaccgtattccaagtatgtgggcaagatagcctcggccccatagactataaagaacgatgaggaacccgtggctcggcttggcgtcgtcctcagactccagaccaccaagggtagttccttcatccatcgcttgccgaacttgttgacgtcgatgtacgtcctcggtttaagtccctgcagaagcataccgttggcacgc

SEQ ID NO: 56763 - DNA, 323 bp, Zea mays
tgcagcttttcttgtcgcatcaaccttgacattttatcactctgatttccagcctgctggccacttgcttcggtagctaattacagggaattttgtagttttccgataggcaaagttatagcaaccaaaattatcgtgcaatccatcttttctaacctttggttgataatgcagctcgtgaacccggcagaagctggtcgcaaatggttccaccggttggcttctgagtgcccagatataaacaataagcctaacgataagcgtaggggtcagctgatgaaaatagataccgaacctcttcagcacctcttcaatgatcccat

SEQ ID NO: 56764 - DNA, 452 bp, Zea mays
  unsure (1)..(452): unsure at all n locations
taatcgtggagacatatgtgccttttctggtgccagggggattgctaccatcttggagaggaaaggctgtgaccatgtgaaattcttggcataatctgaagtcgccttatcctctgaagacataaaagatccctcggccgaagcgagcctggtcggtggaaaatttttcaccaacatctgggacaatggtggccgggaaatggcccaagatattatacaaaaaagcgagaaaggcattcatgacgctagaaaagtagtagaggccgctgagaaaagtgcggagctcgaagggcacataggtattgactagtggtttttggctctttgttgtaattttttgatttcgaacttgtttacgctttgtaacatagccgtatcttctcctccctcagagcctgccgagccatcggcggacccncacacgaagggggacgacgaaattagaaagatgg

SEQ ID NO: 56765 - DNA, 467 bp, Zea mays
  unsure (1)..(467): unsure at all n locations
agcttgagcatattcagatggtggaactgggtcatactgtggttcagtgaatatggactgcttctgatggttatgtggggattcatccatatcagagacagggctctgactcatttccttgttaggaactaaatagtcaactccatctccaacaaaaatgtcatcatcatcttctctagaaacagggactgtgtgtttctccttcccattgaaattattgttccgagggggtggagccggtggtggcggcatatctgattgatgtttcagagtaaaaccactaagtttgggaaggttttactgactcgccatagtcaccacttgccatattgctctttcctgcattgagcanacatagtaaataagtcattaataaaatacctaatccatcaagcatctgaagctaattcttcagagatactattgatacattgaaacataactcatgcaccctatcaaaactaaca

SEQ ID NO: 56766 - DNA, 439 bp, Zea mays
taagcttctaagggagaacatgtgataggtctaaccaatgttcatttctatttatatagaccttgtgcagcttggcaagcaggtaaacaagtgggacgagcacatcacagctagaacgtgatgaccacttcaagacccctggagctgctgcatatggacctcttcggacctgtcgcctatctgagcataggagggagtaagtatggtttagatattgttgatgatttttcccgcttcacttgtgtgttctttctgcaggataagtctgaaacccaatggaccctcaagcgctttctcaggagagctcaaaatgagtttgagctcaaagtgaaaaagataaggagcgacaacgggtccgagttcaagaacctttcagtggaggagttccttgaagaggaagggatcaagcacgagttcttcgctccctacacaccacagc

SEQ ID NO: 56767 - DNA, 364 bp, Zea mays
catgcagctaagcttttgatggagggcctctcttatgacttaacgaatggaaataaagaatgggctacgaagctagaagccaaaggacttctgctggacatgttgacgaagctcaagtatgatgatgactaaaagagactaaagaccataccgtcctcaataattcatgctaagataatacatgaatgttatggacatgaatgtagttttatctgggctgcgtcccgtgcctataaatagatgaacagagacaccgcactgttcacgctggattggaatcactctcacgtcaattctcgttctctcaccatttggcaagccgaatgtaccaatgtaatatgaatatcggtgattgttattcatg

SEQ ID NO: 56768 - DNA, 397 bp, Zea mays
  unsure (1)..(397): unsure at all n locations
ctcgaacctcaagaactcggttctgtagttntccggagttcctaaggtgaccggcatgtagatgtgtcctagtggatattctccctcagtcggcacaatgccaaagaaaggagtgtctgactcatggagctctttgaggggaactcccaagccttggagcatccgaggaaggtgacgttgatgctgcttcccccgaccactagtacctttttaccctgctttctccgatcactggatcgacgaggagcgggtatctttttgggtggtcgaagttgagccactgatccgtccgagtgaaggtgatcaggagttctgaccatcgatacggcgagggaggtccaacggttgccaacaatatctgacgagcgttgagctttatgtgccttatgctttcttg

SEQ ID NO: 56769 - DNA, 413 bp, Zea mays
  unsure (1)..(413): unsure at all n locations
taagcttggaatagtgccgaagcttnctggaggccattaagacagcatactgtatcttcttcaactctgtataatttctctttgataaactaaggacctccgaaacaaaatatattggggcctgcctcttgacttgaccatcaagcttctcctggacaagcgctgcacttaccgctgagtgcgaagctgccacatataataataaaggagcccctggcattggtggagtcaatgttgttaggtctattaaatactggtgtagctcttcgaaagccttctgctggattggtccccattgaaagacttcggccgacttcagcacttcgaagaatggtaagtttctctctgctgatctggatatgaatctattgagagaatgccaatcttctgtcaatctttgagcccccttcttt

SEQ ID NO: 56770 - DNA, 411 bp, Zea mays
tattattcttgacaacgaagcaagtgttgagatcagctctgctaaaaacgactatggctagctcacctgctaatactcccttaaatgatactgagtcatcactttttataaagacagtcacgcttatatgcgcataaagacagtggtagcccatcttacataattgagagtcagagcgcatattgtaatctaaagaatatgcaagaaaaacattggaaatagaatggtcagatgatatgacaattttaccaagtactatgaccaaaccttgatttccatccccgaatgtgatagctctttgcggatcttagttgctctcgtatgaggagaacattattttctgccctgacatgtggctcgagcatccgctattaattatccaactggagcctacggatgcataaacctaca

SEQ ID NO: 56771 - DNA, 367 bp, Zea mays
  unsure (1)..(367): unsure at all n locations
gttacctcccatgagcgaaaggaaaaggtgtgatactantactacaattaccttatggggaagccaagcaaagggatttcactcccaacttacatgtttgccacaaaaatgcaattgatctaatttctctatatcaaccttttacagaagaagtttgggctactatcttagcatgccctctgatagggccccaggcccgatgggtacactacaaggtattataagtctttgtgagaaatcatcaaacatgacttcctattatccctaattattgtaccacgggacaatataaaaaagatttggatgcacaagttaacttatctaccctaatccctaattaaatggatgccatacacgctagtgactt

SEQ ID NO: 56772 - DNA, 352 bp, Zea mays
  unsure (1)..(352): unsure at all n locations
ggacgtgagaaatgcctttctctatatatccatcaaggaagaggtctattntgagcaacctcccggctttgaagatagtgagtatcctaaccatgtctataaactctcaaaggcgctttatgggctcaagcaagccccaagagcgtggtatgaatgcctgagatattttcttatcactaatgggttcaaagtcggaaaatctgatcctactctctttactaagactgttgcaaaagatttgttcgtatgccaaaattatggtgatgatattatatttgggtctactaacanatcaacttgtgaagagtttagtaggatcatgattcaaaaattcgaaatgtctatgatgggg

SEQ ID NO: 56773 - DNA, 405 bp, Zea mays
  unsure (1)..(405): unsure at all n locations
tcatgagcggtagcttcggtgttacgtataaacaggttttgtctaatgtgtttcttcctgcagtaccttcggcgacgaagcatggtcccaacagtagccccttcgtggtgctagatcgtttttcgtaacgagcttgatccgtgaaaaaagtctcttaggcttcgggaagccgaaggtccgaaaaacaccttccctgagctcgttgccgggaaacgatacaatttccgagcgcgaagcggtcccaccatgcaggttcaccttctcgggttttgtggcccaccgttcatgggtgcgagcgaatgtttgtccggtgtaaaagactntgacgattcaccttcttacctgcagcactatataaacagacgggtaggtgtgaagttaccacagcattcattgctattgcac

SEQ ID NO: 56774 - DNA, 459 bp, Zea mays
  unsure (1)..(459): unsure at all n locations
agcttcanaagatgtcagatgacaaagcctaatgcgcaagaaatgaagtcaaaagactcttgagtgccggagtaatcagagaagtgacatatccaaaatggctagccaatactgtcatggtgaaaaaggccaacggaaagtggagaatgtgtatcgatttcacggatctcaacaaggcatacccgaaggatgaatttcctttaccaagaatagattccctcatatatgcggtagacacttcaaagatcatgagtttgctggactattactcangctatcatcagatntggatgaaaaaagaagatgagcccaaaacaagctttataacccccagtggaacttattgttatcttctgatgcctgangggctcaagaatgctagagggagcttcagcagaaatgacttccaagtctctgcactcagaattgtagaaatgttctgacattatgtaatgatac

SEQ ID NO: 56775 - DNA, 379 bp, Zea mays
atatcaaatggacgtgaatagtgcttttctcaatggacctaatcttgaagaggtctatgttgagcaacctcccggctttgaagatagtgagtaccctaaccatgtttataaactctctaaggcgctttatgggctcaagcaagccccaagagcatggtatgaatgccttagggattttcttatcactaatggattcaaagtcggaaaggccgatcctactttatttactaaaactctagagaatgacttgttcgtatgccaaatatatgttgatgatattatatttgggtctactaacgagtctacatgtgaagaatttaataggatcatgacacaaaaattcgagatgtctatgatgggggagttgaagtattttcta

SEQ ID NO: 56776 - DNA, 321 bp, Zea mays
cttaccaattactttttccgctaaaacgctgaccaacttttctttcactcctcgcgccccttgtcagccttctaatcaggcaatcaaaattcaaagccgtcattaccccggtcaatcttcgttttggcccggtaccgaagcccgcaagacacaagtgatactctttggtataattcccaagaattatcatgcacatggtctcaattatgtccaaccatctcttgcaaagcttcctgaattgttttcacatttgaaacgggagcaagacgaacaagttcatgctttttcccacttatttctcttcgcattcccaaccacttg

SEQ ID NO: 56777 - DNA, 443 bp, Zea mays
ttataacaagcaccatctcttaacatatattttctatggataaactcaacacaagagatggcattagtagcacaagcactagtttcttatttagcaaccctgtatatgcgaaagacaagcgtgttgctaaaaatagagaaacctcataatatggactaaatttcccttgagcccttaagcacaatatattttgaatgatatggataatatgcatggttattcaatgaagtctagagggctaacttaaaccatattatggtgagtgtctaatatagaagaatcaaatccaaattaactagagagagagtacgtcacatagttttgaatttgttgaccatatgataatattcatttatcttccaattggacctttatttcataatcaataactgatgtatatgctcaagtgcttactttcccttagtggtacacaagtcacaaaa

SEQ ID NO: 56778 - DNA, 357 bp, Zea mays
atcttaagtgacctgcggcatgcaagcttgtgaagattcttcatcccacttttgttttctgcgatgccacagccaacccatgatagtcttacaattaagcaagtatcgagttcagcctctattaaaatcaactaagtatagcttgaccctttaacactcgcttaaaggctactgaatcatcacttcttttaaaggcagtaacacctatatccgtaaaaagacaattgtagcccattttgcataattgagaaactgaaagcaagttatagtctaaaaaatctacaagacaaacattggaaatagaatggtcaggagatatagcaattttaccaagtcctttgaccaaaccttgatttt

SEQ ID NO: 56779 - DNA, 424 bp, Zea mays
tcagaagcaaccagaccagccactcagtcaaaaggaccgtctgtgagaatcaaagcactgtcccccgagtcaaagtaaacagaacaagaggacatattaagttattaccatacacagaggctaagattcttggaaccagagaccacaaacatcagggtcattgaccacaccactcacccgtgcccctcgcacgcgtgcccggctacatgcacacaaacaccgacccacgcccctttgcagtgcactaccactgacccacacccgctttgcagtgcactaccaccgacccatgcccactttggagcgcactaacgacacacacgcgcgacttttgcagcgcatccaccgccattaacgccggcaacaggctccccttcgctaagcacacctgctagcctctgacagctgctctatcattacacac

SEQ ID NO: 56780 - DNA, 451 bp, Zea mays
tctccacaatcttgaggtaaactgcgaacctcgatcagacacgatcttctttggtactccatgtaaacacacaatccgagccatatataactctgctagctgagaacctttatatgtagtctttacaagaataaagtgagccactttagtcaatctatccacaatcacccatatagcatcatatcctttctgggtgcgagacaaaccagtaatgaaatccataccaatctcttcccacttccactcgggtatcttcagtgggtgcagtgagccaactggtctctggtgttcagccttaactctttgacacacatcgcacataaccacatgtgcagctacatctctcttagtccatattaccagcacttgtgcttcaaaagctaatacatcttagtactcctaggatgaatagaataatccgagtcatgggcttccttcacaatagtctctc

SEQ ID NO: 56781 - DNA, 264 bp, Zea mays
aagctcttctttagcctctcattttcttctttgagctcttgatatgaaacaatcattgttcctgcagattctatttcataaagaagatttgcttgtcgacgaacgacaagcattatcacatggtaatatagtatcaatttgaatacctgtgcatgagtgaggttgttgggattttaaatattctatcacaacctcatgagcaatggttaatatgatatgattatctataagaatttcatgagaacatagaagcatatcatattt

SEQ ID NO: 56782 - DNA, 327 bp, Zea mays
agctcatatgaataccttcgatcatatctcttctatattctatgactaatgcgtgttcgagtctatttctaacccaggcatatgtatattgaatgggaattggagtcttccgcgaagaacaaggcttccattacgtaaatcatacttcgtcatcactcctagcaactctctattccttggggagaaatgagcatcaaagaaaaggacttcatcctctcaggagagaagtaaagctcataagcaaaacgaccggatttcggctttggtgtaatctttactcatttacttatgacccaaggggaagaacgtacttcacaggctcttatg

SEQ ID NO: 56783 - DNA, 319 bp, Zea mays
  unsure (1)..(319): unsure at all n locations
tgggagaggattngatctcttgagtgtgtctagaattgaatgcctagctcttgtaagtggttggaagtgtgaaaacttggatacaatgaatggtgggtggttgggggtatttatagccccaaccaccaaactagccgtttggtggggctgactgtcgtatggtgcaccggacagtccggtgcacaccggacatgtccggtgcgccagccacgtcaccaaagccgttgggttccgaccgttggagctctgtcttctgggcccgcctggatgttctgtggcgcaccggacatgtactgtagagtgtctaatgcgccagtat

SEQ ID NO: 56784 - DNA, 434 bp, Zea mays
  unsure (1)..(434): unsure at all n locations
tctanagggagaacacgtgataggtttaactaatgttaccttcgaaaaagatagaccttgtgcagcttgtcaagcaggtaaacaagtgggaggagcgcatcacagcaagaatgtgatgaccacatcaagacccctggagctgctacatatggacctcttcggacccgtcgcctatctaagtataggaggaagtaagtatggtcttgttatagttgatgacttttcccgcttcacttgggtattctttttgcaggataaatctgaaacccaagggaccctcaagcgcttcctaaggagagctcaaaacgagtttgagctcaaggtgaaaaagataaggagcgacaatgggtccgagttcaagaaccttcaagtgtaggagtaccttgaggaggaagggatcaagcacgagttctccgctccctacacaccacagc

SEQ ID NO: 56785 - DNA, 370 bp, Zea mays
  unsure (1)..(370): unsure at all n locations
gcttcgacttttagaaacagctntttagcgcttcctaatatgtctgaagctgctaagaaggctgctgctgagatgaagctgagtcttgatgaagagaaaaacctagggtttcttatagcgatgtcgaagtccaacacagaaaagattaccaaggaaattctggaggggctgtctgaagatactggtgacagtgaaagttatgatatggacagcggtggcgaagactccgaagatcgcccctggcgaccaagccattcaagttatggtaagtcaactatcaaagagaatcatcttgttaatatgagaggaaggatttccgggatctgtctattggaaggcggacgaaggggaaaaaacttgtccacaccct

SEQ ID NO: 56786 - DNA, 458 bp, Zea mays
cttacgaccaaaccgcacccgcatccatatcacattcaatggctcaacaatagtggtaaggtcaaggtaaccaagctggtacgaattaattttgctattggttcatatcgtgatgttgttgactgtgatgttgtgcctatggatgcttgtaatattctgctaggtagaccatggcaatttgattcagattgtatgcatcatggtagatcaaatcaatattctctcatacaccatgataagaaaattattttgcttcccatgtcccctgaggctattgtgcgtgatgatgttgctaaagctaccaaagctaaaactgagaacaacaagaatattaaagttgttggtaataacaaagatgggataaaattgaaaggacattgcttgcttgcaacaaaaactgatgttaatgaattatttgcttccactactgttgcctacgccttggtatgcaaggatgc

SEQ ID NO: 56787 - DNA, 435 bp, Zea mays
cactataccaaatggatcgtgaagagtgccctctctaatgtgtccttcatagaggaagcctatgttgagcaacctcccggctttgaagatagcgagtaccctaaccatgtttatatgctctccaaagcgcattatgggctcaagcaagcccctagagcatggtatgaatgccttagagatttccttattgctaatggctttaaagtctgcaaagccgatcctactttattcactaaaactcttgacaatgatttattcgtatgccaaaattatgttgatgatatcatattctggtctactaacgaatctacatgtgaagaatttataggatcatgacacaaatattcgagatgccgatgatggggagttgaagattttctaggattccaagcaagctactccaaatggcacttttattggcaaacaagtaccctc

SEQ ID NO: 56788 - DNA, 373 bp, Zea mays
  unsure (1)..(373): unsure at all n locations
acttgcgcaacttgtcgagcagggaaacaggggggaagctcttatcatgccaaaaatgtgatgacaacatcaagactgtaacacccctggtgttacgattactaaaactctgacatgtcatcatcatcatttgcattaacttgcttgatacacctagaatgcattcactatgtcaacaatttgcaaaattgggatgttttgtattgagnggagggcttagtattagggctctgctcgagctaagtaggtgagcatcatctcttaggcgagtgacaagttgacttggagtcttaagtactgaaggtaaacttagaacctagagtaactttacctttgaagtgaaatcaagtggaaggatcgcttgaggagaggg

SEQ ID NO: 56789 - DNA, 409 bp, Zea mays
tgtagcgcatgccaagcaggaaagcaagttggcacccatcatccacacaagaacatcatgacgaccgacagaccactggagctcctacacatggatctattcggcccgatcgcttacataagcatcggcaggagtaagtactgtctagttattgtggatgattattctcgcttcacttgggtattctttctacaggaaaaatctcaaacccaagagaccttaaagggattcttgagaagggctcacaatgagttcggcttaaggatcaagaaaattagaagcgataacgggacggagtttaagaacactcaaatcgaaggtttccttgaggaggagggcatcaagcatgagttttcttctccctacacgccacagcaaaatggtgtagtggagaggaagatataactct

SEQ ID NO: 56790 - DNA, 379 bp, Zea mays
  unsure (1)..(379): unsure at all n locations
agcttgtattataaacgcgatactatngctattgatttttactcttttctgataactatagtatgcttcagcgcttacctagaattctttattttcttaatttacttatgcgtccaatttactctgatctcctaagaaaagcgctagatcggaagcggatatcgagtttctttcaactatagaaacttaaagctatcttcagcagatcccttattgtatcctctatcttatttactatttcaaacttatctttacaaatagtatcaaacagtgtcatctacagctccgtgtcccttattttacacactctactggagatgaagacaatatttgacaattattatttttaaaaaatctctctcaccacactgctagaaag

SEQ ID NO: 56791 - DNA, 448 bp, Zea mays
  unsure (1)..(448): unsure at all n locations
aagctngaagccatggtaagtagcataggcaagtaatatatgaattgattctattctagctacgggtgcataggtntcaccgaaatccaaaccttcgacttgtgaatatcccttggccacaagtcgggctttgttccttatcaccacagcatgctcatcttgcttgttgtggaaaacccacttggttcctacaacaatttggttaggacgtggaactaaatgccatacctcattcctagtgaagttattgagctcctcttgcatcgccaccacccaatccgaatcttgaagtgcttcctctaccttatgtggctcaatagaggaaacaaaagagtaatgttcacataaatgagcaacacaagatctagttgttacccccttttgaatatcgccgacgatggtgttcacaaggtgatctcgtcgaattgcttggtggactcttgggtgt

SEQ ID NO: 56792 - DNA, 263 bp, Zea mays
  unsure (1)..(263): unsure at all n locations
tatccgagcgagagttacttatcgcagaaagtgatgagtgaggtatccgtatcctataggcgtaagagaccctcggctcggtcagccttggctgattacgtgtactccgaccgttccaggatccgctntccgaaatattcaagatgcacgacagaaatcctgctaaaaagagaccttttccaggaaaaatcacgcaaggggctccccttttaccccgaggaaggcggctttgcgaagctagccgaccctcctgacacaaactt

SEQ ID NO: 56793 - DNA, 419 bp, Zea mays
  unsure (1)..(419): unsure at all n locations
cctgctgagacggacaccgggctgactacatcccttattattattgtaagattggacgattggcaagacgaacaaacaaaagatgagattcaacacctgctccaaaagcctcaaccacgcctcacaaaagggacatccatgtgatgatcaagccacacttcacattaagaggtgtagcgaatgctctatagaggggcactctgataagtcatgttcctacattaacaatggcttgattattaacaaggatgatagactctcgtttaaacgctccaagaatggacactggcttaaatcttgtccncatttaaaacaaacaggcatatggttagaaaagaaaagtcttactaaccatgtatcaagcaataaacaaagaaagaggaaatcttcaaaatttggaaaacgcctatgctacacat

SEQ ID NO: 56794 - DNA, 309 bp, Zea mays
  unsure (1)..(309): unsure at all n locations
tataaaactcagctctaagggaacacaagccgccggcgcgtcataaccctatagttctatgcgtctgggccgcgngcaggtagcacgtctgtaccttcgactagtcacgggccgtaaaccagctactgtcatttacagctcatgatagacgatcgggctatctaagtgggcttggtagctccgctgcaatcagtgactattatgcccatataacaatggttaacaatgaataaacagatccaagtgttccaaggcaggctacctaccgatcaataggacgcgtgagcggtgcgagggttgcccgtaact

SEQ ID NO: 56795 - DNA, 378 bp, Zea mays
ccatgggcgaacccctcattttccgaccagacgcatgggcgaacaatcatgccgtccgtcgccttgcgccttcgtgccgttttccctccgttccgccatgccctttacgcaagacatacatattaccttgcgggtctttccacacgctcggacttagcttaaattcggggccatgcccgaacctcaggtattcgcccctgcgccatgggcgaacccctcgttatcggcccaaacgcaatggcgaacagccatgccgtcccgtcgtcatactgcccttacccaaggaatatcgtgcagattcggtgtctatcacacgcttggacttggcttatttttggtcgtgcaaaacccacggaggtcttcggcacgctgcgcctt

SEQ ID NO: 56796 - DNA, 345 bp, Zea mays
tggcttgagtgaacggcacggtggaactgacggaaaacgggacgatgcgcgcggcgactggcggtaaggatgttcggacttgcgtatgggctgaaaacgaagtgttcgccatggcgcacgggccgaaaactgaggctcgggcacgaactcgaaaataagctaagatcaagcatgtggaaagacaccgaacatacagcgtatgtatttggtgaagggcacagaggaacggagggaaaacgacacggaggcacgcagcgactggcggcatgggtgttcggccttgcgtttgggctgaagacgaggcgttagccatgtcgcgcgggccgaatacaacggttcggacac

SEQ ID NO: 56797 - DNA, 409 bp, Zea mays
  unsure (1)..(409): unsure at all n locations
cggaccttanatcgactgcggcatgcaagcttatatcatatatggttgccgacgagactttgttggctgctgaggaaaacacggccgccttgcctgataaagggaaaaaagttgtttatacttcttctggagagaaagatattgaccttcggcacctgggtggccaggaactgttcgaggcagacaatgaggagttgaaagaatatgtaatatcttgcggctatcaaccgggatctttgctcttcggcggggttgatggagaaattttgggatgtattcttcagtgcaccggggcaaaaataaccggcactttgactaagagtgttggtttcccaagcttgagcctgaatcaatggtaccgatgaccacatattgtcgatgcctatttattcccatttcaagggaaact

SEQ ID NO: 56798 - DNA, 381 bp, Zea mays
actcagctttggccaacgatgttaggtttaactacgtgcgcgctctggattacttgattcatgccgctatggctggctgaccattgcttgccgatcattaatgtcgcttatgctttcttatcacgagatctatccatactctgctgcttccccgtctatgtaatcctcacacgagatgttgtctaaattttatataccactgtctaaggtgtgagttagaaacattctggtgagtttgtggatctcgcggcgtgacaaatctcgacactctataagctcttctagatatatggtggtgcttcgttcagactctatatcaaacgtcaatatccgcttgtgtggcatgcctagtgacttctctagaaacacaatcggaaactt

SEQ ID NO: 56799 - DNA, 352 bp, Zea mays
  unsure (1)..(352): unsure at all n locations
agcttctaaagggagaacacgtgatatgtttgtcttacgtgcaattcgaaaaagatagaccttgtgcagcttgtcaagcaggttaacaagtgggaggagcacatcacagcaagaatgtgatgacctcttcaagacccctggagctgctgcatatggacctcttcggacccgtcgcctatctgagcatagggggaagtaagtatgggctagttatcgttgatgacttttcccgcttcacttgggtgttctttttgcaggataagtctgaaacccaagggacccttcagcgcttcctcaggagagctcanaatgagtttgagctcaaggtgaagaagataaggagcgacaatgg

SEQ ID NO: 56800 - DNA, 387 bp, Zea mays
  unsure (1)..(387): unsure at all n locations
tgacaccgcgaactctatacctacagcagcgtctgtttctctatgtcggcgaggagcgccttctcctttcttttcttctcacggcagaaccgggcgatgtgaccataaccgccgcactcgaagcactggcccttgttgcggctccagcctcgccggcttgaacccgaggccatgctgctcgcgtcggccacgtcgtagctgtgctcatcatctccgatgttgccgcgatcgccattgccgcgcctcttgtcaccgtcacggggcttgcgctgcttgttccgttcccgacgccgcgcctnccactgtgcctcagtgagcaacagctgccccacgccctccgtggcgaccttcttcgccttggtgtcgtcgggcgtctccgcaacacgt

SEQ ID NO: 56801 - DNA, 365 bp, Zea mays
  unsure (1)..(365): unsure at all n locations
agcttatgaagattcttcatcccaacatgggctagtcggcggtgccagagccgacccatgtttctcttaacaattaaacaagtgtccagttcacctctatcaagatctaccaagtatagctgaccctttaacactcccttatatgctatggaatcatcacttcttctaaagacagtgacaccaacatcagggaatagacaggtgtatcccatttgacataagtgagaaacagaaagcaaggtgtaatcttatggatctacaagaaaaacattggaaatggaatggtcacgagatatagcatatttaccaagacctttgaccaaaccttgatttccatccncgaatgtgatagctcgttggggatc

SEQ ID NO: 56802 - DNA, 409 bp, Zea mays
tacgctctggctgtcttatgctgttagctatataaactcaatttctatagtttaccaggtcacaaaggctaagatccacgtgtgtgttgcatcaaaacagacccgcaagcctcacaatgctggtgaggctaggaacttggcacctctacaacttgttcattctgatctgcgcgagatgaatggaattcttacccaaggtggtaaaagatactttctcacttttatagatgacttcactacactttgttatgtgtatttcttaaaaacaaaagatgactcgtcaattattttaatgcctataaagctgaagttgagaaccaactttgaaagaaaataaagcgtttcaggtccgaccgaagtggagactatttctctaatgtgctcgatgagttctgcgaggaacatggta

SEQ ID NO: 56803 - DNA, 453 bp, Zea mays
  unsure (1)..(453): unsure at all n locations
agcttgtctctaaacaaccaggctacgtcgttcttaatttttccaccacgtctggtgaccatccattaagtttggaggtaaacctcaggtcggacattattttgttggcttccctctcagggatgttcaaaatgcatgtaggtctcctattaatgccacccctcctgtcctatatctctcggactctctggtggctgaagaatatnggtagggatgtaatcggatcggatacggacggatatcactgaaatcatatttgttttcatatttttattcggattcgaattcgaatacggatagcttcggatacgaataccaatacaaatattctcggatacaaatacgaatagctgtgtgtcgaatacggaactagtcngacacggatatngtccgaaccggtttttgtcggatatcatgtatacatatttcacacatatatggtctaatcatgta

SEQ ID NO: 56804 - DNA, 457 bp, Zea mays
  unsure (1)..(457): unsure at all n locations
ntagcacttgatccaactagaccacttggtgctcttcacaccttgcttaaatagtgntacccttcacaattttagtagggtgagcatgatacctatcagtggtggaggatgcgccaaaatcaaggtgttgctaacgcaacgccgaaataattcataaacataatccaaatcaattcatagctacaaaataagcgatgaatataaaaatacatatcttatttaagagtcatcatgatcataatccacttaaaatgttagaaaatactatgtcggttccttctagctcctaggctccttgtccttgccgttccaacaatggagacggtgacatgggctacaacgggaatcggaacagtcgaatagggatggacatcagcggcatgtgcagagctgggcacgatgtcgacgcgcctacgcagagcanggcggcggtgcatggagtatagcggcatgagta

SEQ ID NO: 56805 - DNA, 256 bp, Zea mays
  unsure (1)..(256): unsure at all n locations
acatcttctaaagacagacacatctacatttgtgaataagcagttatattccatattacataattggctaacagatagtaaattatattcaagactcttcactagaaacacattataaatagaatgctcattggaaattgcaattttacctagcccttttaccttgccttgattcccatcaccgaatattattgaatcctgggaatctttggttttaacgtaggaggtgaacatcttcttnctccccgtcatatgg

SEQ ID NO: 56806 - DNA, 457 bp, Zea mays
  unsure (1)..(457): unsure at all n locations
taaccttgacgccctgaatagctccaggaccaccagcaatgccattcttaggccaagtgtttcctccaacagcaggaatgaagtgcccacggcgtctgaagatcagttggaggactccaatgatgatgatgatgccaggtcttgtactcctgctgggaagtaaagcttaatgcctttcccttgggttgtgcagttttatctgtgcccttgatgttggaaacttttggtggttatttatgtataactacaagatagccgtctatgatgatgtgcatgtggcacattttttgtttgccacaacacactttgaaagagcttatggctctttggttgttggcatggatatttgtgatgtttaagacttatgtcgcttgttcttttggtctctttggaaaacgtcatgtatgggctcattgnggaatttacttatgcaatctctgaaactttatgggtttct

SEQ ID NO: 56807 - DNA, 400 bp, Zea mays
acaagagcacatgatgaagatgacctgtttacgtagctcacgattaacgactgggatggacactatatgatgggttatctctgctgaacctaatgcatacacacctgttcaactcactgactgacgatacttactcctgggaactctctacgatcatatattgtccacactgactaatacacgacatttgcgcacacttatgtcttactcatgcgcaccagagaaaacatactgctcaggcacccatcgcaaattacttcatgacaagcacacttaacttggagatactttcaagataagcttctaaaacagaagatgcaccttcgtagaaaggatactctatgaattctattaagccgtcggccaagatatcaccaatccaatggccatgatataccat

SEQ ID NO: 56808 - DNA, 295 bp, Zea mays
agctcgagctcacagacgagaactacagctctgtgcttgttttctacgtggagaccacggaggacaacacgattcctctgcccctccagcagagcatgtgtggcgccaacccaccggagaaagtgctgccgctgaagggggcacaccacccgcccttcttcttcaagccgcacgcgctgcacaagacgctggtcgagatcgccaccatgccgcatgttcgggcttcgtgagaacgtgtttgctcagcttcagggttttgccggccggtgagcttacatggctgtcgtacatgctg

SEQ ID NO: 56809 - DNA, 395 bp, Zea mays
atttgagaaatacatggcttatagcgcatgccaagcaggaaagcaagttggtgttcatcatccacacaagaacatcatgacgatcgataggccgcttgaactactccacatggacctattcggcctgatcgcttacataagcatcggcgggagtaagtattgtcttgtaattgtggatgattattctcgctctacttgggtgttctttttgcacgaaaaatcacaaacccaagagaccttaaagggattcttgagacgggctcaaaatgagttcggcttaagaatcaaacagattagaagcgactgatagggaaataggcttacaccttttcctaaatagattttggtgggtgaattgccaacacaattattggacttctactttgtctagttat

SEQ ID NO: 56810 - DNA, 256 bp, Zea mays
acaggggaaccataagtgtggcgaccacgtggcggtgagcggtatggatgctgagtcccaacaggagcgggagaaccaccctcctggtgatggcgctctgccaactcaacacgcaactgcgcgatcttcggtctagccatgctttactcgtccagagagtgatccaactccgtgtttatcactgcgactaggttgactgtgctgctcaacctatggttagcctcaccaacaggtgagacaaccacaccctctgtgc

SEQ ID NO: 56811 - DNA, 438 bp, Zea mays
  unsure (1)..(438): unsure at all n locations
actcagcttggaggagcactgtggcctttgctggtgactcgctttgtcgtcattttgagtataaatgngaattgacctgacgtgccttggataaaatattcctccgaagcccctaatcatttcagagaacctgagggcttcctcccttctttggcgaaaatcattgttagctcgaatgtactcgtccatcttctggagcagcttctccagagtttggggaggcttcctggcaaaatactgagctgcangtcctggccgaagccccttgatcatggcctcaatgacaatttcattgggcactgttggtgccagcgtcctcagacgtatgaaccttcggacatatgctcgaagatattcttcatgatcctgggtgcactggaataaagcttgagcaatgactggcttcgtctgaaagccttggaagctggttatcagcat

SEQ ID NO: 56812 - DNA, 450 bp, Zea mays
  unsure (1)..(450): unsure at all n locations
agcttcagctccatctatattatggattgcttttgagtctgtccaatttccttcggcccttctggcagcttcctgacttccatgaatagcaatgggcccttggtccgaaggtatcttcatgcaaagataagctggatgaagaattgcttctaaggcattgagagtaccacgaccaatgattgcattgtaagggtattccatgtcaacgatatcaaacacaacttgttcagtccttgtgttgttgataaatccgaaggtcactagcattgtgattttgccgagtgctacaatctgccttcctccgaagccgcanaggggatgtgtggcatcatgaatattatcttctggctcttgcatctgtctgaaggccttagcacatatgatatcagctgcgctgcctgtatcaaccaaaacattatggaccagaaattctntgatcacacaagagat

SEQ ID NO: 56813 - DNA, 466 bp, Zea mays
  unsure (1)..(466): unsure at all n locations
ntaaccctanataggattaaaggggtaaaacttaacccaagttgataaaacctaaaagctctagggtaaaggtcataaaatgaccccaaaaataaagttgaatcacatttatacccctgggataccagaaaccctaattggaaccctcggaaaaccctgaaaccaaaccctatgggcttatgtgcaaaattagcccacttttgggttaaagtgcaaaaaccaagctaaataagtattttaagtcatttggttcacaaatatgtggacttgaaagccaaaccctaagttttggacttaaatgcaaaatggacctcatttgagttctattctaagtctaaaaatcagagaattggctcaactctggagctttgcatctttcagattatagggtttttgccctatgtcaccacatcagaattgtagcccaattataggagaacaactttgtttaaggattcaagccatg

SEQ ID NO: 56814 - DNA, 410 bp, Zea mays
cgacccggatacttaagtcacctgcggcatgctagcttctaaagggagaacacattttatgactaacaaatggtcatttttagaaagacaggatctgtagcgcatgccaagcatgaaaacaagttggtgcccatcatccacacaagaacatcatgacgaccgacaggccgcttgagctactccacatggatctattccgcccgattgcttacataagcatcggtgggagtaagtattgtcttgtgataggggatgattattctcgcttcacttgggtgttctttttgcacgaaaaatatcaaacccaagagaccttaataggattcttgagacgggctcataatgagttcgccttaaggatcaagaaaataagaagcgacaacggaacggagttcagaactcacaaattg

SEQ ID NO: 56815 - DNA, 354 bp, Zea mays
ttatctggcacctggccgaatacaaagcagtgattatcggtgtgtgtaatagaacatctgagttatcggccttgattccaaatatccactatccctatgtattcaagttaattattgtaagtcgattcaatatacatgggatgttccaatgaaccgtgttaagtcctgtcccacggggtttctccacgtaacgttactgatgaagatccagttccttccaacaagtgctctgtatcagttcatcgtttggtgaccgattctctagacaacgccaatgcacccaaggtattcatgatcatgttgagccacagcaattgcacaacagttagaggagcgctccctgaatcgacatga

SEQ ID NO: 56816 - DNA, 345 bp, Zea mays
agcgcatgccaggcatgaaagcaagttggtggtcatcatccacacaagaacaccatgacgatcgataggccggttgtactactccacatggacctattcggcctgatcgcttacataagcatccgcgggagtaagtattgtcttgcaattgaggatattattctcgctttacttgggtgttctttatgcaggaaaaatcacaaaaccaagagaccttaaagggattcttgagacgggctcacaatgagttcggcttaagaatcaaaaagataaaagcgactgaaagggaataggctacaccttttctaaatgatttggtgctgaactgtcaacacaataatgact

SEQ ID NO: 56817 - DNA, 395 bp, Zea mays
agcttcacacctctggactaactcggtggcatcactcttcgctgttggccaatagaaaccagacctaaaaactttcccaaccagagttctagatgctgcgtgtactccgcactgtccggcgtggatttcatccaatagctgcttcccagtagtcgaggaaacacacttcatgaggactcccatcgcaccccttctgtacagtgtgccccctatgagtgtgtagtgggccgactgtcttgcgaggcgttctgccacagccttatcatccagttcttcttcattctttatgtacctgatgatagactctctctagtcattagggtccgacttccggtggctcaaggtgttgcattcttctgtctgatctgacggaataatctggcgtgacacttttt

SEQ ID NO: 56818 - DNA, 444 bp, Zea mays
tctagatatgtcgaggtgacaaatgatgagggtgaattggatttactaaggtcgtagctaagcaacttcgtcggttgcccatcattcctcggctttcaaggttgttcctcaacaaggaaatagctctgcatatgacgtggccaaagaatggtgtacgtctcgtcactgatccagacataatggtccatccgtcggacggtgatgcatggaaggcatttgacgagtttgatcctgaatttgcaaacgaccctaggagtgtatggcttggtctatcgacggacggattcacacctttcaatagcagtgcaagcccttactcgtgttggcctatcttcattgtgccatataatcttcctcctgagttggtcaataaagaagagttcatgttccttgcactagtcatcccaggccccgagcatccagggcccaaagtgaatatgtttg

SEQ ID NO: 56819 - DNA, 429 bp, Zea mays
  unsure (1)..(429): unsure at all n locations
agctnttaaagaccaccacctcatcatctttgtgaaggggaacgatgctctcccccgtccctcactatagaaatatcatgaaaatatctgctcttcatcgcttcgatctaccattgcttgatagttgacttcccaaaaacaacatggctcagcctccacgaccgatcttcatcatcttcatttccactctccactatcactatcgctggaatccccagacaacccagctagcatctcattgggaatcctttttgcattggtattttccatgttatggcaaatgccgaagcttaaaaactagtcaagctcgcaaagagaataaggctaaaatagcaatcacaacgcaaacagctaaatggcacgacaaatattcacggcacaggcttctatatatatactctgagctccaccgctcggtgggtcccgcag

SEQ ID NO: 56820 - DNA, 344 bp, Zea mays
  unsure (1)..(344): unsure at all n locations
gctactagcacacacaagcatagagctatctacagcagcgccagacacaacgacactactgcaccttgatgagtcaaaagcacgccctatcctaggcgactggttcagaaacgacatgattgaaggatggtggctcgacacccgcgccacttatcacatgaccagccgacgggagttctttatcgagctcgacttaagcgtcctaggctctcgcaagtttggggacgcctgcctcgcgtcagctcaatcatattcaccggcgcgtctggagagcacatgttgctcactanaggctactacatacctagtgggatgaactctatcatcaacttgggacatctgga

SEQ ID NO: 56821 - DNA, 382 bp, Zea mays
cagcttgaagccatggtaagtagcatattttttaatattcgtattgattcaagcctagctacgggtgcataggtttcaccgaaaaccaaaccttcgacttgtgaataacccttggccacaagtcgggctttgttccttgtcaccacaccatgttcgtcttgcttgttgcggaacacccatttggttcctacaacattttggttaggacgtggaaccaaatgccatacctcattcctggtgaagtttgtgagctcctcttgcatcgccaccacccaatccgaatcttggagtgcttcctctatcctgtgtggctcaatagaggagacaaaagaagaatgctcacaaaaatgtgcaacacaagatctaagggctacccccttat

SEQ ID NO: 56822 - DNA, 438 bp, Zea mays
agcttcggcgatggtaaaaattttggcaggataactttgtcaatagcaatgaatgctgtggtaacttcacacctactcgtctgtttatatagtgctgcaggtaaaaaggcgaagcgccagaatttttacaccaagcggacacccgcttgcgctcgctgcgcggtggaccgcatggacaaactgagagcacctagagggggggggtgaataggtgatcctgtaaaacttcaaaacttaagccacaaaaactcgttaagtgttatcacacgtatggccaagtggctagagaggagtcaaaacacaataaccacaagaattctatcacagagatgacacggtggttattccgtggttccggcaagtacaaaacttgcctacttcacgttgtggcgttccaacggacgagaagttgactcaacttctctcaagtgatccatg

SEQ ID NO: 56823 - DNA, 467 bp, Zea mays
ttacataacacttagaagagttagagagagatgaaggaagcacgattattgaaaccaagcaacaagagcaacaaatgaaacatgaaacatgaatcactctctctctctcaagtcactaatcactaatgatcacttgtctcaattgcgaaacttgaagagattggaagctttgattgtgtcttggaatggattgctagctcttgtattgaatgtatatgagtggagtgcatgggtgttttgaatggaggtggttgggattgtatttatagccaccaaccacttactagccgttgctccctttctgccgaccgcggactgtccacgcccttggtccggacagtccgcccgtgcacatcaacggctgaaatcgcaacggtcagcagtaacgagtatatcaacagctatagagcatttaatgtgttgtcagatctcataataagcagtcgcggactgtccgaccatgcacc

SEQ ID NO: 56824 - DNA, 424 bp, Zea mays
agcttgctaaaagtcttttcatctaggggcttgtgttttatatcagctaattgggtgagggtgttaacataagcaatttcgatatccccttttgttggtgatctcttaaaaagtgataccagatgcctatgtgcatagtgcggctgtgttcaatgggattatccgccatgcggattgcactctcattatcacataggagagggactttgctcaacttgtagctatagtccataagggttagcctcatccagagtaattgtgcacaacaatgtcctgcagcaatatactcggcttcggcggtggatagagctactgaattttgtttctttgaagcccaagacaccataactcttcctagaaactataaatatcctgatgtgctctatctgtcaatattacatccggcataatcggcatcggaata

SEQ ID NO: 56825 - DNA, 465 bp, Zea mays
  unsure (1)..(465): unsure at all n locations
ncgtgatctntaactttattttcaaggtcttgaatgtcgaatttctttttcttcaaagcagcttcgtgactttcgactatattttctaaatctttgattgtagcttcgtttatctcgtcttcaagatcttgctgtatcctcagcactttacttagtaatatactctggccaaacaactttcgtcagagaacatcttaattcaaaaaataataaatagttaagagttttaccttaaaattagcgtagaacaagctaccggcgatatgttgtcgcttgtacctccagaggttcgcctcaatcttcggcagaccaacattcttcgagaaagtcctaacgaccttggcctcggttcgattccgaaggcatctcagtttcccttcattgactccgccaaatagcagagcctctggtttgtacccacaggatacagcatattgcttcacctcttctttttcagtttctgat

SEQ ID NO: 56826 - DNA, 436 bp, Zea mays
  unsure (1)..(436): unsure at all n locations
agcttctaaagggagaacacgtgataagtntgtcttacgtacaattcgaaaaagatagaccttgtgcagcttgtcaagcaggtaaacaggtgggaggagcgcatcacagcaagaatgtgatgaccacttcaagacccctggagctgctgcatatggacctcttcggacccgtcgcctatctgagcatagggggaagtaagtatggtctagttattgtcgatgacttttcccgcttcacttgggtgttctttttgcaggataagtctgaaacccaagggacccttcaagcgcttctcaggagagctcaaaatgagtttgagctcaaggtgaagaagataaggagcgacaacgggtccgagttcaagaatcttcaagtggaggagttccttgaggangaagggatcaagcacgagttcttcgcttcctacacaccaca

SEQ ID NO: 56827 - DNA, 472 bp, Zea mays
tactcctctctgggaagggccgttcatcatcgccaagaatttgaatcccgggacatacaagctggccaacgatcgaggcgaagtctacagcaacgcttggaacatccaacaactacgtcgcttctacccttaaaatgtttcaagtcgttcatgtatctcgctttctttacgtgtataaataaagtctaaccgtcaagggaggatcagccttgcctcagcaaaaactgaacctccctcgggggctagaaggggggaaccccctctgcgtcaaaattttcctcggaaaagttttccgccaaaacgacttccgtgcttttcgactatatcgataacgaaatcctaaaaacgacgagaggaaccttaaatggcaaggctgaccgagccgagggactcctacgcctccgggatacggatacctcattcatcaccttccacgaaaagtaactcacgcctcgataagtgattctgctac

SEQ ID NO: 56828 - DNA, 440 bp, Zea mays
  unsure (1)..(440): unsure at all n locations
agcttctaagggagagcacattntangattatcaaatgttcattntgagaaagacaggatttgtagcgcttgccaggcagggaagcaagttggagtccatcatccacacaagaacatcatgacgaccgacaggccgcttgagctactccacatggatttattcggcccgattgcttacataagcatcagcgggagtaagtattgtcttgtaatagtggatgattattctcgcttcacttgggtattctttntacaggaaaaatctcaaacccaagagaccttatagggattcttgagacgggctcaaaatgagttcgccttaaggatcaagaaaataagaagcgacaacgggacggagttcaagaactctcaaattgaaagcttccttgagganganggcatcaagcatgagttctcttctcctacacgccacaacaaat

SEQ ID NO: 56829 - DNA, 456 bp, Zea mays
  unsure (1)..(456): unsure at all n locations
tttgattcatcataatctgatcccattaccaatttctctttctatgtgtcaggttcacccttcaaccaatgctcctggaaatggtctaaacttccattttggacatttgtagcggttgggcaatatatgtagttatcacaggaattctccctgcaagatgatttccatgatataccatcatccatgtcaccggattcagtgaagcagggacattttgatccttctatcttcacctccatttcattattgagcgctgaatcagctntctccagtaattcagcaataaacttctctttaaacaagcacttcagttcaaggagagctcccacaaccacaaatgcatttggtgggcaaggtatggttccatctttattcacactccactgtctcaagctagaagtgatgttntcaccaggaactacactatctatcaacatgtcattctgtccatcagat

SEQ ID NO: 56830 - DNA, 465 bp, Zea mays
  unsure (1)..(465): unsure at all n locations
agcttctaaaaatctggtatgaatcggcggttatatctagccagtccaaggaaacttcggacctgatgaacagtggtcgggggtttccactccaaaatgtccttgactttgctgggatctaccgcaatccccttggcagatattacatatcccagaaattggatttcctccaaccaaaacgtgcatttgctgaacttggtatataactgatgttctctcaagcgcgttaacacgatccgtaaatgttgtgcatgctcctcttcatttntggagtatatcaaaatatcgntaatgaagaccaccacaaacttgtccaactcgggcatgaatatcgagttcatcaaatacgtgaagtgggcaggagcatttgtcaatccgaaagacattaccagatattcaaataatccataccgcgtagtgaatgccggtgttggtatatcttcgggccgaatacggatctggtga

SEQ ID NO: 56831 - DNA, 358 bp, Zea mays
acctattcacccttctccctccaggagctctcaattggcatcaaagccggactcttcacataagggactaaacgccttgagagatggatcctaaaggaaaggggatggtggtcaacgacaaagagaatgagtccatcctcaacgagccaagagatgacaagcccactgactcaggctcgagtcacaacaaaaaggaccggtaagaagaagatgcgcatcaagacaaacatctactacgacagtgatgcatcttcttcttcaccaagagatgacgatgatgacgattcttcgtccaagaagaagacggttaatcaaaagtactcttatgactattctcgcatgccggacaattcgaatg

SEQ ID NO: 56832 - DNA, 350 bp, Zea mays
  unsure (1)..(350): unsure at all n locations
agcctntaaagggagaacacgtgatatgaatatcttatgtgcaattcgaaaaagaagaccttgtgcagcttgtcaggcacgttaacaagtgggaggagcacatcacagcaagaatgtgatgaccacatcaagacccctggagctgctacatatggacctcttcggacccgtcgcctatctaagcatagggggaagtaagtatggtttaattaattgggatgactcttcccgcttcactcgggtattctntttgcaggataagtctgaaacccaagggaccctcaagcgctctctaaagagagctcaaaacgagtttgagctcaaggtgaaaaagataaggagcgacaatg

SEQ ID NO: 56833 - DNA, 449 bp, Zea mays
  unsure (1)..(449): unsure at all n locations
tcgacattatnttcaagcgtatcatataatagtcccttcatctcttcctctaaaggatataatgagaaacagagaagctacaggaagaattgaaaaatgggctacggaactcaatgaattcactattgattatgtacatagatcctcaatccagtctcaggcgttagcggattttgttgttgattgaacgccaggggctcagggagaaaaaaacaaccaaagatgttgaagcctggacagtattctgtgacggttcttaaggaactttaggcgcaggagcggctgctgttctagtagctccctctaaagtcaggacatgctacacaacaaggctggactttagttgtacaaataatattgccgaatacgaagctctcctgttagggcttcggaaacagagggcaatgggaataagaaaggctatccttaaaactgattcccaagttatt

SEQ ID NO: 56834 - DNA, 375 bp, Zea mays
  unsure (1)..(375): unsure at all n locations
cgatattccacaatttgtcgcagtttgtacccttaattgatcgcattatccaaacattgtgagatgcccattatccaagcattatgctacaacctatagcctacactgctactctttngatgtctcattntgtggctagtaggctagctgcagacatgcaagtttgcaacacaccactcacgtgatgtattaacaatttgctactgagattatatattttatttgcttctttgttcctattagactgacatgacaacacacagacaggcgcacaatataatctaataatgtgtaattcgtatgatcgtatatgtcagtaccctataactaggttatcccttactactgtatgaagatgcaatacccacgtggcta

SEQ ID NO: 56835 - DNA, 164 bp, Zea mays
gctgtctgaacatactggagacagagaaagttattatgtggacaccggcggcgaatacttcgaagataggccctggcgaccaatccattcaaattatggtcaatcaactatcacagagaatcatcttgcttatctgagaggtatgtctttcccggatctgtcca

SEQ ID NO: 56836 - DNA, 245 bp, Zea mays
  unsure (1)..(245): unsure at all n locations
aatgagaaacccattcataatggatgcaaaagccacaaacatgccattcctaaagatcacacaaccattgtgttcactcgcaaatgaataaccattcttcattaaacatgaaggagacataatgtttcgactcatactaggaactatataactttatgtaactccaaaataaagtccgaagggaggtggaggngcatcggtccgagcggcaagcagcaactcttgcattatgctaccggaaataa

SEQ ID NO: 56837 - DNA, 370 bp, Zea mays
agacaaaatcccctccgcacgggaatagtatatactcttattggaacgtaccatactatacgacaagatcccgcgcatataaaatgatcaatactgcatataactatgacgtaactatatgtgtgcacttatctaaaggaagtaagtctatccctatgggattcaataatgatgactcacattgtcatcacggatataatggatcatgcattcgtgaaactactcccttgtgtacctaatgctctattatctaagcggttcaatgaggaccttccaagcgctatcaagatggattcagaaacgactgatatcagagtcattggcagttccaatcattcgagctcaaattgatctcttatcacatatgatc

SEQ ID NO: 56838 - DNA, 358 bp, Zea mays
  unsure (1)..(358): unsure at all n locations
catgcaagctngtcatggtattgaaacaccctttgtctttgtgttgtaaagagttatcacactaaagaggagcttaaccaggtatttatgacttaggtattctagcctggagtataggattgtggcaactacccaataccatgagaaaaaaacaaggtagcatcttgtcttttcttttattaactaatttaaatttaaatagcttgcaagtgtaattgaataatcattaggattcatgatgttgtacttaacattttcttacttgttctctaaaagcataccaccaagtgagagcctatattatatgtttcgcagcgacacggtaagttaagacataatgatgcacgatgtatgggtt

SEQ ID NO: 56839 - DNA, 394 bp, Zea mays
agcatgggatcttataggcttgtaggaccccttcttgaaggtagatctatgacactgtgttcttgcttatatctgctcgcgtacttgtttgcattggcaagaacaaaccttcctgacgaggctaattcatgcgtccatgagctattaaacaacgaaccaatcgtgtaataattgcggaagttctatgtgtcatcggaagacttcaaccattaactttaagagtttcatccaaaacaacttattggaagatcgaacctttcttactatatcaggcatctcatatccgataccacatgtcaatacctttgcagcaccaccatctcacttggtataacacccatccaatcctggaccacgcggacttactcctgacagctctctaagatcatatatc

SEQ ID NO: 56840 - DNA, 419 bp, Zea mays
  unsure (1)..(419): unsure at all n locations
taatgtcacataattatgattcattgttatggcccgaaaacgaaacatggaataccattgttatgctggggtatgtcaagccgactagaccgaatgccacatataatttctggagttcaaaaataatccaagcgaacagataaacattcaatggatagagcatgagctttacgaagagcttaaggtagttctatctctggtatatcaactaatntatgttaatatctaaatattaagaagtgatattagacaccgtcaacttcctggtggttgtctgcatgttgtatagtaacgagtggggcttatatactagcgataatacaccaattgtgatatggcgtggccaacaccgtataccggaaaataaagacacgtgacatttcaatcaaaacttgatttacagagagcggctgcatttg

SEQ ID NO: 56841 - DNA, 344 bp, Zea mays
  unsure (1)..(344): unsure at all n locations
tgcaaaccatctacatctactgtagagcatgtttctatttgtactagacgtagagatgttaatatagaagctatggatgatcaccttgccataattaaacaacaaaatgatcacatagctaaattaactgctaaaattaccgagcatgagctcaaaaatgaaaaagttaatattgctcgtagcatgctttataatgggagaccccttggcattaaggatggcattggtttccaacaggggagaaatgtcaagcataatgcccctaaaaaatgtctaactttgtaaagggcaaggctcccatggttcaagatagtgagggttacattntatatcctgccaactat

SEQ ID NO: 56842 - DNA, 425 bp, Zea mays
  unsure (1)..(425): unsure at all n locations
ntgttccagtgcacgcaagatcactaagaataactccaggtgtatgtctgaaggttcttgcgtctaagggcacaagcgccaacggtgcccaatgaaattgtcattgaggccatgatcaaggggcttcggctgggacctacgacccaatactttgctaggaaaccccctcagaccctggagaaattgcttcaaaagatggatgaatacatccgcgctgataatgactttcgtcaaagaagggagaaagcctacatgttctctgagatgaccaggggcttcggagggagaatctacccaaggcacgtcagatcaatccactcttcccagaatgacgacagaggaagtcagcaacagaggccacagtattcctcgcaagcttcggggcagcaataaagctatcttcggtcgccagctccaaggggcac

SEQ ID NO: 56843 - DNA, 374 bp, Zea mays
  unsure (1)..(374): unsure at all n locations
agcttctggccttttcgaatctggcctctacttgctatgtattgntctattctcgaacgcgcaggaggactgcacgtcattatattaagaaaggaaaaggtccaagaggaccaaagtacagtgcccgtatggcaaacagaacacttgaccacactctagaccctactcataatagcaggaagaccaaaacttgctagctgcttagccccagccctctcccaacaacttaactcattcagaaataagcttttaacaaaacacatggaagggttaacaccatcaaaaacagctttgtttctagtcagccatatgcaccaagaccccaaaataatgacactgttgaagcctttcttttgaatttggcacctttttag

SEQ ID NO: 56844 - DNA, 469 bp, Zea mays
  unsure (1)..(469): unsure at all n locations
tggttgacctatatgacaccaagccaggtttgatgacctanttgttatttacaaaaagtgttagtcctagatgacatctggtttgggtattttaagatactctaagaatctaggtgttgtttggttcacgaaatgtaacgtaaatgataacggtaatgattaccagcggtaataagtttgaataggacggtatcaacttatagtgtggtatctgattacggttgaacttaaacaaacatagtttaacgttgtcggttatcgttcacgtcacaaataatgtgaaccatacaacatcatagatgttatcgcagcacaagtttaaagatcgatcgtgcatttttactctttaccacaaaagagtaaaaatgaacaaaggctagcaaatgccatggcggccgccactttctgagaagctatatgccgtaaatggccggcagaaacaaaccataacaataatagtactagacat

SEQ ID NO: 56845 - DNA, 354 bp, Zea mays
  unsure (1)..(354): unsure at all n locations
agctntatgtggcacattgattcccataggttagaatctccttatagaggcagctactatctgagcccttgaccccttacgtacaacatggagtacttgtctgaaatctcccccaaacacaatagtcttcccaccaaagggcagaccagggcgttccatgatatcacgcatgcttgtgnccaatgcttcaattgattgtctcttagccattgatgcctcgttccaaataatcagcgacgctttttgtaacaacttctatgtcccactttgtttcgtgaaggtacatatagcaccatctataatattaagcggtattttgaatcgtgaatgggcagttctcccaccaggcattat

SEQ ID NO: 56846 - DNA, 320 bp, Zea mays
ttagacgaattacttttcaaacatctccgaaatcacactgtgtccctcttgtccacatgaaaatgctgatgatgctatgtatgcaaatgatgtgagatgtatgttatgcaaatgatattgtccgaagaacacacatccctgaataacacacaatctttttatatagcgctgattttcctgaagcctccttagagcttttcgctttactttagcgaacagcgttattttcgtgaagcctccttagagcttttcgcttttactttgcggaacagcgctattttcgtgaggctcagaaacttacctgcctccttagaacactt

SEQ ID NO: 56847 - DNA, 372 bp, Zea mays
cgatgacatgcctttctcttttcttctctgcttctcctttctcaccttgtacattgtaattgcctgcttagaacagatgatgtcatcagctcacccgaacaaaacaaggagggttaccatcaatggagggtaaaacacaacttcatgtaagcgttggatcctggaacttgccttgccgacatcaagtggttcatcagagtttctggcaagtagagagtttaagattttgtcattctgctgtttctccaggcttgccattcccttcccttcggcaactgggaggaactgcagaaacggcatcaatcagctagtgaacataattcacctaaaaggtacaaattcaaaaatcacaaccattcatatataaaaacc

SEQ ID NO: 56848 - DNA, 133 bp, Zea mays
gataaaacccatgtgtttgtgtcgttcgtttcgagaggaaaggataccgtttttatacacgccgcgatctgagcctataactatatgaacagtacccctgtgctgtacgcgcaatattgtaaccaacggcaca

SEQ ID NO: 56849 - DNA, 367 bp, Zea mays
agcttgtggaagctcaaaactcaatagttcatgaagttgtggtggtcaccgaggatgttggagtcacttgtgacttacttgatagtcctacaagtgaaccacaacctactaactctatttgtgataaatgcaaattttctcttgtgaatgataatattgctcgtgatgaatcacaaatctttgttgagaatgaagtattagtagagagagtgaatgctctaacccatgatctagagaaggcatatggtggaaaggctaaattgaatttcatattgggaagtcaacggtgctcacttaatcgtgagggtcttggatattgtcggcgtttcgagacaggggggtccctaagccgacgagtgagtgtgct

SEQ ID NO: 56850 - DNA, 463 bp, Zea mays
  unsure (1)..(463): unsure at all n locations
ggcattgatatggatgagaattggcattgccaaacaacaattgtgtggttgcgctttagaccatggtacccaacaattcaacaactaccaaaacttcatcaccattctgaccgatcacatctatagtggccttatccggatgagttggatcgatgacgtcatgacaaggatcctacgcatcaaggtcaccatgcgcctattcgggaacctcatgctagaccctagctttcccgaccagctagggaagcaggagcacaagaactggagtgggaggggtggactgggagcggtgcgtaagtctgctcctcaaaaacaacaagtcaggtgacgcgccggtgcttccctgcccaagaaggccgccaaggtcctggtcgttgggaaccacgctaacaacatgcagacggntcgtttgactttaatctgtactagcttctactgtttctacattggtttatctctatgg

SEQ ID NO: 56851 - DNA, 341 bp, Zea mays
tgcagcatgcaagcttaaagccatggagagtagcatatgtcttttatatacgaattgactcaagccttactacgggtgcataggtttcaccgaaatccaaaccttcaacttgggagtatcccttggccacaagacgtgctttgttccttgtcaccacaccatgctcatcttgcttgttgcggaagacccaattggttactacaacatttaggttaagacgtggaactaaatgccatacctcatttataatgaagatggtgagctcctcttgcatcgcaccacccaatccgaatatttgagtgcttcctctaacttgtgaggcttaataaaggaaacaaacg

SEQ ID NO: 56852 - DNA, 430 bp, Zea mays
  unsure (1)..(430): unsure at all n locations
tcctaaaggccatcaagacagcatacagaaccttctcctactttgttaattnttctctgataaactaagaacctcggatacaaaatatactaaggcctgtctcttaacttggccttcaagcttctcttgaacaagtgctgcacttaccgctgagtgcgaagctgccacatataataacaaaggagcccctggcgtaggtggagttaatgctgttagatctatcagatactgtttcagctcttcaaaggccttctgctggattggtccccattgaaagacttcggctgacttcagcacttcgaagaatggtaagtttctctttgctgatctggatatgaatctattgagagatgtcagccttcctgtcaacctttgagcccccttttttgtacttggtggctccattcgaagtatagcttcgattctactt

SEQ ID NO: 56853 - DNA, 312 bp, Zea mays
tcagcttctatatgagacgaaggccatgggtatttatctttaccacaacaacttcggttgttatggatttatcgctcgccccaacgcaagccacccggtgccaacatttcggaagagatggcccggagcttggatggaagaatggttttacgtgaaaaatgatttgaaagcgagggaggacattaaggaagtcatcatgcgccccatctggtcccccttcgtcctttgaaggccgaagatagaaattgatgaaacagttaaagcgtgtcagagggccttcagcactgtttgctcctttatcgggacaaggga

SEQ ID NO: 56854 - DNA, 402 bp, Zea mays
ttacttgcttcttcttcctgagcccctggcgtactattttcgatgaagtctgctaacgcctaagactgaattgaggatctatgcacataatcaatgctgaattcgttgagttctgcagagcactttccaatccttccagcagcttctctgttcctcataatatccttcaaaggctgtgacgaaggaacaattatatggtatgcttgaaagtaatgtcgaagcttcctggaggccattaagacagcatatagaaccttctccaattctatatagtttttctttgataaactgagaactttggagacaaagtatactgtggcttgctttttagtttgtccttcaagcttctcctgaacaagcgccgcactcactgcagagtgcgaagctaccacatacagcagc

SEQ ID NO: 56855 - DNA, 380 bp, Zea mays
  unsure (1)..(380): unsure at all n locations
tactccgcntatctcgaatagtttaaccatctctgacctaactntctccttgtgcccaatggcaaaccacttgaccctgtgctgtggggctcagtcggtcgaccattgttatgccgaccttcctgcggtggtcgatcgagaacgttgatcgatctatgatcatatggtgcattgtggtttaaatatttagggggtcgaacgtactactgttgtgctgtgtaataaattggtgtatagagtgcaatagtaggttctgcgtatgcatatccggactattcgaccaaggcgaccggacggtccgacacgacggtggactgtgcggtggtaaatccggactggtcggtttggttagctactatcgagcgccacatggtggtcgt

SEQ ID NO: 56856 - DNA, 308 bp, Zea mays
agcttggccactgtgccagggattgtctgctgtcattacgtggccaagccaacgtcgcacaggcggaggcggaggccctgctcctggcacatgcaagcatcgagccatctccagcggcaccggctgcagcagcactcctccaccttgatgagtcgaaagcacgcgctttcctcggcgacggctccagcaaagacatgatcgaaggatggtgcctcgacaccggcgccactcatcacatgaccggccgacgggagttcttcatcgagcttgactctagcgtccgaggctccgtcaaagttggggacgcc

SEQ ID NO: 56857 - DNA, 447 bp, Zea mays
  unsure (1)..(447): unsure at all n locations
gagagcaccacatttgtagtcgttaggcctcaccacagataagatacttgggagtctcctccctctctcggccactcataacccctactacgagtattgagtaacaaggtgccggtagcgcaagccaaaataaatcttgcacccactaagcacatcggacctggaaccctcacaaacaaatttacttatcggagctagttcaaaacaccgacatgtctcctattgaacctctatttaggcttatacttgacagggttgtactcacagttgtccttgcccttggacttgtgcattagaccactatgtccgtcagacatcagaattgattgccctgctcgcattntaatgagatgtgggctaacctcacaaaaaatatttctttgcgccccaaatatagttctttctagccctcttttttctttccacattcgaacanatgataataaa

SEQ ID NO: 56858 - DNA, 284 bp, Zea mays
agaaaaagcatgacaagcaagctgcggctgagatgaagctataaaaactgcagcaggaactctccgaccaggccagtggtattgctcgcattgagggaaacctcaaggcgagggaagcctccctagcgaaacgaacaactgacctcacttggcaggaggaagacctcgccttcaaggaggagatgtgggcaaggcagaacaagcttgctggatgagctcgagcttcgaggtaaaggagaaagtgaagtgtctataatggaaagtgcgggcgctggatgggcaag

SEQ ID NO: 56859 - DNA, 215 bp, Zea mays
cctgcgcgccacaaagacctggtttcattttggccgcgggcacctcggcagagcttgtgggctcactgtgccactgaccaattgacgacggacagtgcctctccgccagtccacacggatatagtcgtgcgccacgcgcgatgttttcatgtgctggagcgagtattgtgccggattaatgtatgagcgtcgagttcacttcggcgcccttttta

SEQ ID NO: 56860 - DNA, 226 bp, Zea mays
agcttatcggtagtataagcatttttatattatgctgcttcatcagatcaatcgaagcctatgcttctctatgaagacatagcagagcataaagtattggtaggatcccaggtatatgatgaacaggaaaaaactttgttaagattcctgtttaataacaaagatgtttttgcttggatagccaatgaacttttgtgtgtcaacagagatgttattgagcattcac

SEQ ID NO: 56861 - DNA, 389 bp, Zea mays
  unsure (1)..(389): unsure at all n locations
tctggtaaaatntcacatattttgaacaaccgagcgaatagttatgtccggtttaaggaaggtatgtaaaaatcaggaagtcgtatcctttctccttcgctttcttttttttgtttctggtttttttttgacgcaaccgaaggagaaaaacaaggaagcggcgttgactcggtttgttttttctgtttttttacgtaaccgaaggagaaaaataaggaagtggcgttgactcggtttgtggcgtgatcaaacggaatatggtggcggcgcgctagggtttgaatggtggaagaacacaatgcaaccagcaacaaatgacgtgaaagcacacaaattcaacaatgcagattattgaaagaaagtgcgaggctctaaagggtgctgggata

SEQ ID NO: 56862 - DNA, 427 bp, Zea mays
  unsure (1)..(427): unsure at all n locations
agcttcacctttctctcgagtagaacatatacttctttgttatcacacccatgctctttgggttgtcacaccgaccaccgattgtcactcgcagtgttggtaagaaccttgtaagagcgcggtaagacacttcataacttgtgttctaccaccatccttgataggtagtgtagaattcacacatattgcttggtgctttatttctggtttgtactaacaatgacaggaacatttcatctgaagctccgtgacatgatgagagctatgtgtgatgcactcaacatgaacatagaaaggctgaagagagtgttatgacttgttgaacaggtggagactcgtcgaccacaacctacaacttcttctgcaggtgattctattcgtgcttttccatcatatgatgatacagatgnctgaaattatattgagt

SEQ ID NO: 56863 - DNA, 438 bp, Zea mays
  unsure (1)..(438): unsure at all n locations
ctaagcttctnagggagaacacatcttgngactaacaaatgttcattttgataaatacagggtttgtagtgcatgtcaagcagggaagcaagttggtgcccaccatccacacaagaacatcatgacgaccgacaggccgctagagctactccacatggatttattcggcccgatcgcttacataagcatcggcgggagtaagtattgtcttgtaattattgatgactattcttgcttcacttgggtgttctttttacaggaaaaatcacagacccaagagattttaaagggattcttgagacgagctcaacatgagtgtggattaaggatcaagaaaataagaagcaacaacgggatggagttcaagaactctcacattgaggctttcttgaggccganggcatcaagcatgagatctcttctcctacacacctcaac

SEQ ID NO: 56864 - DNA, 432 bp, Zea mays
  unsure (1)..(432): unsure at all n locations
agctnggcaagaccaaataactcaaaacccaaatgtttatctataaaggggagtgaagaaagggttattaaattgggagcaaaaggtacaaagaaaatgaccaggatatgtcagaagtgtggaattgctgatggtcacaacagtaggacatgtttgtcaatggaggaaaatagacaaaggttggcaagccttgctggacgtaagagaggacgacctccaggatctaggaacaagggtggcagtaaagctcctgattggaatgagacaacaacatcaaaaaaacacgcaaatgatttcaatattaatgagtcagacagtgattaaactgttgtatgagatacgaataattttgtttttacattaaaccttgtatgtttggcaactgatttatatagaggtggatatcgaaatctaataaatggtgcgtatatt

SEQ ID NO: 56865 - DNA, 384 bp, Zea mays
  unsure (1)..(384): unsure at all n locations
ccctttggccaactttagatatctttggccaaggcatatgctttatattctgggacctcgaatcatatgacaaagggggaattgatgatggnaacttatgtcaccctancccaactagcacaaccctttttagattgcccactgaaatatgtaaggggaaaaatacggatccactatgcttattctcaaccaaacctaagcctacaatgataagcataaaccactataggccacgtatgaccaagaaaccctaagttactaactaacttagttttccttcctttagcataatgttgattaatcctgcataatcatgacatacatattcattgcattttgatagactgcaacctcgctgacggagagtacgtcctcgtgccggag

SEQ ID NO: 56866 - DNA, 331 bp, Zea mays
  unsure (1)..(331): unsure at all n locations
catgcaagctnttacatatttataacatatcacacatctatctcttattgtctctcatcaagcgcaatattatacaaaacacagattctcacgcatttttcaaggcttcatcatatattgcagcctcgacttcgccacttctcgccatcatcagactgaaagcgagaccatattagtaccctaccataaaaaagggagagaagaagaatggatagaacttcagtatacttctttaagtaacgccctcgctttgtcaccatcaactcctcttccaccctctgtccacatctgggcaacgaatctcgctcccacacttatagcttccatggac

SEQ ID NO: 56867 - DNA, 451 bp, Zea mays
tactcaagcttctcccttctctgctcgacagctttcacgtaaaactacttgtatgttcttccagtatgccacttggtgcggtacccaatcatagtagccttcgtatctttccgaatgcacaattatagcattcgaagtttttgtgcagacgatctactcttgccttggtctggtaatggcgttcatgggctgtgcaaaatccttcagcattggcacttcttttctgacttcaaagagcccatatgtatacaccaagcctagcactctttttagttattaatggtgagtatcggaataacattctcattcaagtgtttgttatttatttgcatttggaacaaattttgatttctcataatggatttcggatatataatatcatttcttcttaaatgataatgcaaatagataatataataattattactccccctataaatattttatttat

SEQ ID NO: 56868 - DNA, 450 bp, Zea mays
  unsure (1)..(450): unsure at all n locations
ntaccaaatggacgtgaagagtgccttcctcaacggaccgatcaatgaggaggtctatgtcgagcaacctcccggctttgaagatagtaagtaccctaaccatgtctataagctctctaaggcgctttatgggctcaagcaagccccaagagcatggtatgaatgccttagagatttccttattgctaatggcttcaaagtcggcaaggcagatcctactttattcactaaaactcttgacaaagatttgtttgtatgccaaatttatgttgatgatatcatatttgggtctactaacgaatctacatgtgaagaatttagtaggatcatgacaaagaaattcgagatgtcgattatgggggagtttgaagtatttctaggattccaagtcaagcaactccaagagggcaccttcattagccaaacgaagtatactcaagacattctaag

SEQ ID NO: 56869 - DNA, 351 bp, Zea mays
agctagttggtcgacctaatggatgcaaaccctatattttgcaagtgagtgttcaaggagaagcttaaatctaatgatactatagacaagtacaaggcacgactctgtggccaatggttatacacaaaaagatagcaaagacttctttgatactcacctattgccaggttgactattgtttgtgttctactcttgctggatggctcgcatggtattttcattcatcaaatggacattatgacaactttgcttaatgaagagctagaagaggttatttacatgacacaacctgatgggtttgtagtaaaaggtcatgaagacaaagtttgtaagttctataatatattatat

SEQ ID NO: 56870 - DNA, 385 bp, Zea mays
  unsure (1)..(385): unsure at all n locations
actctgagacaagtactatacttcgctgtctttatttaatacataaaaacagtatgcacgctgctatcttcaggggagactagcacggcggggcatattgcttaaccttgatcacccggatcaaaatttaccccgtcctacacacgctgagaagangcgcggagtaaacattgagcgacgactgcgggtgaataacaggccaatgaatcggaatgtgtcgtattgagccactattacagacctggatgcaaatctctgagacggcgcttgccttctcgttgaccacctctgcacgcatactctgtgagcgtactgtangcgcgaggggaggaacagacacgtgatcgttcagatggcttggccggtgcagcgagtttactagaca

SEQ ID NO: 56871 - DNA, 382 bp, Zea mays
  unsure (1)..(382): unsure at all n locations
cattctttacgaagcatgaaaagaagggaaggtgttttttcctccaaggctcaaaaagcggtctgcgtgtacgtttcatgcatcgcaaagaaataaagttacaacaatttacatattcgatccaatgtcacatacatcaaatgttacatagttttggtacaatagaagcttaatcttcctcttactgttccatacattccagcattttaaaatattattacagtaaaatctattcctctctaatgactctttctganacatcgttcaagagtttgtcgatgacttcgtcaataaatggagactgccatgcttataatatccagtgccttcttcatttctagatcagctaggggatcgtacgacctcgggggcagggataatt

SEQ ID NO: 56872 - DNA, 409 bp, Zea mays
tactgggcctgagtctaggctctgctgctagcagcactggttcattctgtgcaatgatggctcgaagagcaaggaccatgaagcccatgtgagatttccttgacagatttgagcaaacattgggctggaagctttgaggctttgtgtatctgagccatcgatgcacgtttcttatatggaacatcagaaaaaaagtggaaataacactttatgtctatatgaaaaaagaacttgtcgattggtagctaaaatttcagagggaacaatccaactttcttcaaaaaatagagacagtctcctataggggggtgaatagggcgaatctgaaatttatacacataagctcaactactagccgggttagcgtctgaaatataaaccagtgccagagagagggtgaaagacatat

SEQ ID NO: 56873 - DNA, 438 bp, Zea mays
  unsure (1)..(438): unsure at all n locations
agcttctaaagggagagcacattttaggattaacatatgttcattntgagaaagacaggatntgtagcgcatgccaggcggggaagcaagttggagtccatcatccacacaagaacatcatgacgaccgacaggccgcttgagctactccacatggatttattcggcccgattgcttacataagcatcggcgggagtaagtattgtcttgtaattgtggatgattattctcgcttcacttgggtattctttttacaggaaaaatctcaaacccaagagaccttaaagggattcttgagacgggctcaaaatgagttcagcttaaggatcaagaaaataagaagcgacaacggaacggagttcaagaactcacaaaatggaggcttccttgaggaggagggcatcaagcatgagttctcttnctcctacacttcacaac

SEQ ID NO: 56874 - DNA, 444 bp, Zea mays
  unsure (1)..(444): unsure at all n locations
tactgaaatagagcttattctgagagggtatcttacaagataccgaagatagatttggatagaatatcgcgacatatagagacaaaatgcagcgatcattttgagagaatatccacaaaagatagcacatcagtatagtctcgtaatggatcacgactactaactgtgataccagcgcgtgccgagcagctcaaccatgtgtgcaccataataggctctcggtttcgtcgcggcaccatcagtcattagtcatgacaccattaccaaacgtaaccaatgaaaaattcacgtggcataattagatggagcccatgagagtatggctcagaaaataagaatggtgaccggagtgaagcaaagattgttggcanaagagcatcacatgagaatttattcaactcagagaactattttatgatcatcacgggtattatcagccaaaga

SEQ ID NO: 56875 - DNA, 481 bp, Zea mays
  unsure (1)..(481): unsure at all n locations
ctataaaactcagcttcttagggagaacacgtgatatgtctaaccaatgttacttttgtaaaagatagaccttgtgcagcttgtcgagcaggtaaacaagtgggaggagcgcatcacaacaagaatgtgatgaccacgtcaagacctctggagctgctacatatggacctcttcagacccgtcgcctatctaagcataggaggaagtaagtatggacctagtattgctgatgacttttctcgcttcacttgggtattctttgtgcaggataaatctgaaacccaagggaccctcaagcgcttcctaaggagagctcaaaacgagtttgagctcaaggtgaaaaagataaagagcgacaatgggtccgagttcaagaaccttcaagtggaggagtatcttgaggaggaagggatcaagcacgagttttncgctccctacacaccacaacataatggtgtggtacagatgaagaacaggacgc

SEQ ID NO: 56876 - DNA, 276 bp, Zea mays
cactgtggcctgtgctcgtggcttcttttgttattaatgggcgtagaggtatgcagtgagttaacgggcctcggatagaaccttccccccaagcccccgcggattttataaaagctgaccggcggcgccctttgttggcgataactattattagtccggatgtgctcactcatcttcttgcacacctgatacctagtttgacgagggtttctatggaattactgaggcgaacgcccttgcggcagcccgttggtcatggccttattgagaatgtca

SEQ ID NO: 56877 - DNA, 450 bp, Zea mays
  unsure (1)..(450): unsure at all n locations
agcttgctggtgaggatagaaaggctaaagttttggcaggtttattttttccctcttttctaaaaaatttagaattggttgtatgttatttaaggcaaaatgtttttctattgtctaaaaaatgattaattctttcccaaaatatttatttcctagctttttatcctacttaaaacaaatcgaaactgtcattggcttgaagtcctgaacttgtcactcttgtccattttcctagaagggccaaatagaattgaacagttcacagtggattcaactttagtcgtgcccaatatggttagcctcctacatttattttctcattgtctactatatgtgtaactataaatgtcccatttgtaacatacctatactttctaagtcattcttggatattgtggattcacacatatcatatgacaagctgtgccaagtcttgngaacacacaatgt

SEQ ID NO: 56878 - DNA, 462 bp, Zea mays
  unsure (1)..(462): unsure at all n locations
tcatactctgctgcattgttagaggccgngaatagcaactgtatggcgtacttgaggtgttcgcctccaggtgcggtgaagagaatccctgctcccgcttcctgcagcttcagcgagccatcaaaatacattcgccatacttctgcagtttctggattatctggtacttgttgttctgtccactctgatacgaaatcaaccagtgcttgagttttgatggcggtgcgaggtcggaactcgatgtcgtgggatcccagctcgcaagcccacttggctattcggccaatggcttccttgttgtgaagaatgtcccctattggaaaaccagtgactactatgactntgtggtcgtcaaagtagtgacgcagcttgcgggcagttagaagtactgcatataatagcttctgaacctgaggatactttntcttcgaggggcctaanacttcactgatgaagtaaaca

SEQ ID NO: 56879 - DNA, 457 bp, Zea mays
  unsure (1)..(457): unsure at all n locations
catgcaagcttcggaatacaaaccgacttatattattatgaccttntagtccataaatgtttgagtcgctgttgtaaacttttatgaggggcataattgtaatttctcacaggctgtgtctcgtgcctataaatagtgaacagtattcctttactgttcacgtgttcctgtaattgcaatcgcatcattcgggaatcaatctttgccaaggcagagggataattggatctaatacttgaatacattaagttgatataatatgaaagtaatggtggtcatatattatttatttgtcgttgatgcttcatatttcgtattactttatataatctattagagctcaattacgaagaattaaccttcgtaattgtatcgtctttaaccttcgtccgaagttcattaatccttaaaggaataatgcttcattagacgaagggcattaacatttaacatttta

SEQ ID NO: 56880 - DNA, 406 bp, Zea mays
  unsure (1)..(406): unsure at all n locations
agctntaaaactaaagactcagggaatcttttctcgcaaaagctaaaaatcgagcgagcgagagcaagtgacaagagagcgtaccaaatgagctcgcggtatgctcttatttatacgctcggtgcggtaaaaatggaaagaccccgcctgtcagtgaatgttgctattctagcaaagggaaggtgttttttcggaccttcggcttaaagccttcgtccatgtcgcaatctaaatttattattttaacaaattaatattgcgaggggctactgttgggggccttcggcttccgaaggtcctcaaaaacatgatttaacagtgtttctagagtataatgtgtgaacaggtatcttcggactcgtatcagagagggagaagctcanaagatacgaaggttgacacagcg

SEQ ID NO: 56881 - DNA, 395 bp, Zea mays
  unsure (1)..(395): unsure at all n locations
tactatcatgtcgaagcatatattntgtttgacttgaatttcttatccaattattagatttaactgcgtgaaaaagatattgtttttataaaacaataataaattgttaaaataatatattttattatgatttttggatagtatttattcatatttttaatgaataacctatttaaaaatggaataaaagaaaaggaaatggaacaaaaataacacacgcagtattataaatgaaaaaacgagagagaaaacacacgcacagacatctacgttctatatttaaaaataagaaaataaaaaaaaccaagaaacccgatcgcctttctgaggacctccggtagcccttccttattctttctccttccgttttctcttgcaggtggaccccaccacat

SEQ ID NO: 56882 - DNA, 366 bp, Zea mays
  unsure (1)..(366): unsure at all n locations
agcttggtgtccacgccgaggtgagcggtactggtgtttattctgacgggagcggnggagccattctccaggtgacgacgctctgcgcgctcagcccgcagttgggcgatctcagcacgagccctacttagctcgtctaatgcatggtccagctccgtgtttagaacggtggctagggtgactatgctgctcaacctaggattgtcctcaccaacaggtgagacaaccacgcctcctgtgctcctagatggacggcgggggtaatacctcatgttaagaccatcggccaccccaccgaacactgagcagtagtgcgaaagcgcacgccatgcggaatcttgcatggccggctcagctgagtcccgc

SEQ ID NO: 56883 - DNA, 372 bp, Zea mays
ggctgtatattgctagccgttgtcaactgatagtgcggactgtactccgaagcggcaaacaatgttttgcccatagaatttttgggcagtcttcgatgttattgtggagacagcccttgcctcgatccatttggtgaagtactctacagcgactaaggcgaacttatggtttcccttatcccttggcaggggcccgacaatgtccaggccccagcgcttgagatgccatgtgtgggcgatcagatttgtatactgcgatgggctgtctgaccgatgagaaaacttctggtccgctttgcacgaccttgtgacccgatttgcgaccttatcattgcgggccagttaaagccttggcggatcaccttaacatct

SEQ ID NO: 56884 - DNA, 467 bp, Zea mays
  unsure (1)..(467): unsure at all n locations
agcttcngccttcggaggccgaaggtggaaatgaatgtttctgccgaagaatgccagagggccttcggcgtcatctgctcttttattggaacaagagatttagtacaagaacatattgccttccgggtgtggccgcttgcggagaaatgggaaatgcctcaagaaactataaaagagaccgacgaaggtgggcttgtgagactgaagtacaccttcaagtttggagataaatntactgagccagatgacgactggctaaagagtattgaaaatttaagtgacgaattgcttggtgcttattcgaaggccgaagataccgcgatgtcagcagccttcggaggccgaaaaaagaagaggctgaatcgggtatttgatgcacatgggtttgttaccctgactattgtaccccgtccgaggcagaaaagaaagacataacttctgcaaagaagaagctgaactacttctac

SEQ ID NO: 56885 - DNA, 454 bp, Zea mays
  unsure (1)..(454): unsure at all n locations
atatgtgaagagacaatcatgcactgatagtgtagagatggcgagagtagcatgtaccctcctggcacagcgcacgcctggtaggtaatgtgctctcgggtggcgcggacctgttcatgtagtggaggactccgtgggaaaagttgacatatgcaagggttaagtgctacatatgtcgtgtggttagagatccccagctgggtataatcggttcgaatcgtcgttgctcctcggttatggagactcatcctggtgaccatcatcgtagttagcaagtgaaatatgagaatgaataaaatgcagctagtataggccaagtgctttaactagactaggcaaatatagattcaggtaataacctaactagtgaaataaaacttggcttaaggatcaactggtagcaagcttttctgcanaaggagtctntgatcattgataaaccttaccttgattc

SEQ ID NO: 56886 - DNA, 388 bp, Zea mays
  unsure (1)..(388): unsure at all n locations
agctngaagccatggtaagtagcatatgctaattatatttttattgactcaaacctagctacgggtgcataggtttcaccgaaatccaaaccttcgacttgggagtatcccttggccacaagtcgggctttgttccttgtcaccacaccatgctcatcttgcttgttgcggaaaacccactttgttcctacaacattttgattaagatgtggaactaaatgccatacctgatttctagtgaagttgttgagttcctcttgcatcgccaccacccaatccgaatcttgtagtgcctcctctaccctatgtggctcaatagaggaaacaaaatagtaatgctcacaaaaatgtgcaacacgagatgtagtggttacccccttatgaatgt

SEQ ID NO: 56887 - DNA, 469 bp, Zea mays
  unsure (1)..(469): unsure at all n locations
tctgaagggagaacacattctaagattaacacatcttcatttttataaatacagacatttgagcgcatgccaagcacggaagcatgttgggactcatcatccacacaaaaacatcatgacgactgacaggccactggaactcctacacatggacctattcggcccgatagcttatataagcatcggtgggagtaagtactggctagttattgtggatgattattctcgcttcacttgggtgttctttttgcaggaaaaatctcatacccaagagaccctaaagggattcttgagacgggctcanaatgagttcggcttaaggatcaagaaaattagaagcgacaacgggatggagttcaagaactctcaaattgaatgatttcttgaggaggagggcatcaagcatgagttctcttctccctacacaccacaacacaatggtgtagtggagagaaagaatagaactcta

SEQ ID NO: 56888 - DNA, 369 bp, Zea mays
agcttgtgaaggttcttcatccccacatgtgctaagtttttatgccacagccagcccatgctagtcttagcaattaagcatgcatctagaccggcctcttcttttgcaaaatcaactaagtaaagtttgccggctaatagacccttaaaagctagtgaaccatcacttcttctaaagacagacacatctacatttgtgaatagacaattatatcccatattgcataattgactaacagataacaaattatatccaagagactcaactaaaaacacattcgaaatagagtgctcatttgatattgcaattttgcctaagcctttcaccttgccttgattcccatcaccgaatatgattgaatcttgggga

SEQ ID NO: 56889 - DNA, 449 bp, Zea mays
ccattttctaattaccaacatatatctcattttaccattttttggatacttgcacgacgcacagctattgtaatacatcacaagtacattcaaccccatcgagtaagcaccagaacatttccgaccaattcccgagactatgatgacaagggcatcgaccgtcatacgacataaatcatgacaagctgataggcattatcaactaatcgtttcaaaaaattagacttacttttcactttgccactacaacaccctttagacgcacgagcatcgggagcatccttcacccgggtatacgacagcaatctaaacgttgtgttacacaagacatacatctttcttcgttgcgagtataaccatattacgacatatacccgcacacctcagataaatatctcatgccaccactactatatcacaccacgggacgcacacacctacgtgcacta

SEQ ID NO: 56890 - DNA, 385 bp, Zea mays
  unsure (1)..(385): unsure at all n locations
ctgcaactgagcggacctcanaactattgagtttcaccttactgggagcttattctactcgaattgtaaggtataaactcttatgtctgcctctttgactttttagtttttaaatttctaggttttatggctaacttttgtttttctataaagcttactgctgagtaaagctttgaaacttcaacaagaaaatgaagatatgaagaatgaactcattatcaataacctggagaaaagggtgaaagaacttgaaagttcactatcaaagaaatatttgaaaattaaaaatgtcgaaacagacctggccaaagctcatcttcggatcaaggatcangctgctcacatttgtgatcaagataacgagcttataaagtgcattcaaaat

SEQ ID NO: 56891 - DNA, 271 bp, Zea mays
cataaatagtcagcttcgtagcagtcaatgaattatgacaacactctcttcgtattttatacaccttccccactgtaagagcgtcttggaagaaaagagaagaacttgttccactcacaaagaagcctgagaaaggcagcgaaactaagctagggaatgtatagccctgcttgagatagctcgagctccaggaaatttggtggagttggtggagcaaggtattatgtgctctcaaaaatcataaagctagagccttaaacctttacaaaac

SEQ ID NO: 56892 - DNA, 489 bp, Zea mays
  unsure (1)..(489): unsure at all n locations
gatccttagagtcacccgccgcatgcaagcttctaaagggagaatacatnnngtgacttatctttgctcactntgagaaagataggatttgttgcgcatgtcacgcaggaaagcaagttggtgttcatcatccacacaagaacatcatgacgactgacaggccactcgagctcctacacatggacctattcggcccgatagcttacataagcatcggcgggagtaagtactgtctagttattggggatgactattctcgcttcacttgngtattctttntgcaggaaaaatctcatacccaagagaccttaaaaggattcttgagatggctcaaaactagttcggcttaaggatcaagaaaatccgaagcgacgacgcgacggagttcaagaactctcanattgaaggctttcttgaggaggagggcatcaagcatgagttctcttctcctacacgccacacaaattggtgtagtggagaggaagatta

SEQ ID NO: 56893 - DNA, 401 bp, Zea mays
aggaaaacagcttctttgatcatccgaagcccatgctgctgtgtgaggatataccacagcacaacgtgctattgggctcgcaattatctgaagatcaagagaaaaccttgataaggtttttattcaacaataaagatgtttttgcatggtcagccaatgatctttgtggagtgaatcgggatgttattgaacattcgctcaatgttgacccatccttcacaccccgcaagcataggcttcggaaaatgtctgatgacaaggccgaaggggctcgcaacgaagtaaaaagactcctaagtgcacgagttatcagagaagtgaagtatccagaatggctagctaacactgctatggtaaagaacgccactggaaagtggagaatgtgtatcgattcacagatc

SEQ ID NO: 56894 - DNA, 389 bp, Zea mays
agctctgattcatggactgaacatttccatattatttggcatcaagagactgatggtatatggagattctctagtggtcataagtcagataaataaagaatgggattgctctaatgattccatgggaaaatactgcactgttgtccgaaaactataagacaaatttgagggtatggaatttcatcatgtggagagagaccgcaacacggcagctgatgcattgtccaagctaggatccagtcggactcaggtcccacctggagtttttgtccaagaagtactgcacccgagcatttcactagatcgggtagaggaatgcaatactctgagccaaccagagtcagattctaatgactggagggagcccatcatcacgtacataaagaatg

SEQ ID NO: 56895 - DNA, 317 bp, Zea mays
  unsure (1)..(317): unsure at all n locations
cgcagggtgcacgtttatcgaccccctgtagcgcacgcagatgtgtggagtcgagcacaggcatgtgctccatcatgcaacgctgtgcctccgccactanaaggaacctataacatgccacacacgatcatcttgtgagtgtgatgaccaacctagccttactaaacaacaggatcattacacctttagcattggtgccaagatgggagtcggacattataactcttcatatatgtcacaccctgggttataagagaaaccgaatgcgaaccatgtatgtgttatgatccgaaatttacgttacataattggacatc

SEQ ID NO: 56896 - DNA, 422 bp, Zea mays
atccttaaagtcacctgcggcatgcaagcttcggcatagcccattccttcatatttgtgtttactctgaaagccagaaattcttgcaccaaattcctagtgccaatgtgctctgcaataattctgaattcatccaacgccgtttgggttggaccttctggtgtcatattgcactgaggtctggtttctccgaagattagttcaagcggactctgcacaagcttctccttgtcgtcatcaattttgacgtagaaccattccgatttccagcctgccggccacttgcttcgatagctgatcacaaggaaatttgtagtttttcgatatgcaaagttgtaacaaccaaaattttcatgcagcccatcctttctggccttagtttggtagtggagctcgtgtactcggcagaaaacttcagaaatg

SEQ ID NO: 56897 - DNA, 399 bp, Zea mays
ctaccatattcatacgctgcagctacaattgccatattcatacgctgcaactgcaactaccatattcatatgaatactagcaagtaacaactaccatatttaggttgtacgtgtctgcaactacttgactctaggtgaatatccttgcatattctgatattcatatgaatactagcaagtagcactcaccgtgtttgcaactaccatatatattacggccgtctccaagaatatggggctccagatcgaactcaacgggaggccctaatatatatagaaatttatatgtgtacaatatagtaaggtatgctctcacttacttaaatatattggtctatattaaatactaatgttaagccatataagtcaaggtatccctgtattaatccaaagaaaact

SEQ ID NO: 56898 - DNA, 384 bp, Zea mays
agcttcaaggcacgtggcatccgatcgacgatctgtttatccctgtgaacttatctgagccggccgcaaagcaaaggggtacagcggccagccgtcgttgttatccccaggcgaagatcttttacccagaagcgttattcggtcaccggtgagcacgaatcacaacggcggcgtgaatccgggcacatggtcaccgacggtgagcttctctacgctggcgtcctgatccagtcattgtaccatcgcgaggcttcatcagttggtctgacaaaggatctttcgaagcatttttcttgaatttttgaatgacaacttactaatcgggttgtagcaaaacttgtgccctatatactaactacaattctggtacagagatcatactca

SEQ ID NO: 56899 - DNA, 461 bp, Zea mays
gcttgagctggacttgtgcttgacaatgacatcttgtatatttcttgcatataatagcctgaacgtatgagaactgcgtgtttggaaattctataatttgccaatcattcctttattcttataccaactcttctacatatagggtttaatactaagcaacacgttgagagcgcacaagaatgccgaagacgagagctatgatattgctttcaacaacctacgatcagaggttattaagctgagatacgaagctctggaataggataaaattctgcttacattggtggacaagataacataggacgaagctgcctcaaaggcccaggctatagcccacacacgagatattaaagatcttcagaaacagctagctagagctcaagaagaacgtatacttgaagagacaatacaagagcttagcgatcaatgggccaatcatttagaaataaatgttatagagc

SEQ ID NO: 56900 - DNA, 422 bp, Zea mays
  unsure (1)..(422): unsure at all n locations
agctttcagccgggccatacgactggcaccgttccctacccggntctgaaccccgactaccatcaccaagtactcgggggagtcaaagccggagctatggctcacagactaccggctggcctgccagctgggtggaacgggagatgacaacctcatcatccgcaaccttcccctgttcctctccgacaccgcccgagcctggctggagcatctgcctcctgcgcagatctccatctaggacgacctgntcaaagccttcgccggcaacttacagggcacatacgtgcgccctgggaactcctgngatctccgaagctgccgccagcagccgggagagtccctgcgggactacatctggtgattntcgaagcagcgcaccgagctacccaacatcactgactcggatgtcatcggcgcattcc

SEQ ID NO: 56901 - DNA, 296 bp, Zea mays
  unsure (1)..(296): unsure at all n locations
acatagaaactcagcttgagaactctctcacatactctggaaaagactgattactctgtagttctgggtactcatttctaatatcttccaatatctcttccattcggtctacatcctgggccccatccgactcaatagtatgggccacctctccatgctcatgccataccaaatagttcggcataaagccatgtttgaaaacatgatacgagagcttcactttnttcaactgaaccaagttctaacattttatacacggacacttcaataaacgagcattaccagccaatgccagt

SEQ ID NO: 56902 - DNA, 431 bp, Zea mays
  unsure (1)..(431): unsure at all n locations
agcttgcccgagctgggcttcnggcgagtcttggtgcgccagttgattgaggaggccctcgtgcgaggcgtgaattcgtctgggactactgttcccactcgagcctgngctcgggcgaggcgagatcacatcccttgagtagacgaagcctttacctgaatcgtgtccatcagtctctgcagcttgtgctgatggtggttaccagtcgtgtttaggagtgttgggggtacccctaattacggtacccgacaatatttatttgttagaatgataaattcggattgcgatatggacgaaggccttaatctgaaggtccgaanaaacaccttncctttgctagaatagcaacagttaatgacaagcggnngccctccacttgcaacgcactgggcgtataaataagaacacactgcgagctcattggcacacta

SEQ ID NO: 56903 - DNA, 286 bp, Zea mays
ctcagcttgtcatacctgtcaaagcaacagcacatgccagcacagcatctacagaccataccagtaacttggcctttcgcatgctggggattggatatgatcggacctttcaagaaagctcaaggaggttatacccacgtattggtggcaattgacaaattcactaaatggatagagttcaagcccattgcttctttaacctctgcttaggcccgggaattcatacaggatataatattcagattcgggataccaaacagcatcatcactgacttaggatccaact

SEQ ID NO: 56904 - DNA, 387 bp, Zea mays
attactggcatgcaatctcgacatgtggagtggaagagattatgatttgagcatccaataccggattgatagctgtgagtggaaagatggatgtcctaacacgaacggagtcatgttttctccacaagtgccgatacctctgccctcgaatgcagaagatgattgtgattgtatcatatcaaaccctgctcttgagtctatatcgataagtgccagctctggcaacctagtttgaagcaagcgccactttatcgcgtgtacagaactattctcagaggatgatcctcgattctctaaacctttcgcagcgcagcctatgaggtaaggaaaaagaacctatgtgctatctgtcatttcactctaaaagatgtttctgcagcaatctac

SEQ ID NO: 56905 - DNA, 372 bp, Zea mays
  unsure (1)..(372): unsure at all n locations
tctatagggagaaacacatttgggactcacaaacgttcatttttgatatatactatggttgtagcgcatgtcacgcanagtaacaagttggtgttcatcatccacacaataacatcatgactactgacaggccactctagctactacacatggatctattctgcccgatagctgacataagcatcggcgcgagttagtactgtctagatattgtggatgactattctcgcttcacttgggtgttctttatgcatgaataatctcataccccagataccttatagggattcttgagacgggctcataacgagttcgccttatggatcaagaatataagatgcgacatctgtacggagttcaataactcacaaa

SEQ ID NO: 56906 - DNA, 435 bp, Zea mays
  unsure (1)..(435): unsure at all n locations
tntaaagggagaacacgtgataggattgactaacgtgctattctgaataagatagaccttgtgcagcttgtctagcaggttaacaagtgggaggagcgcatcacagctagaatgtgatgaccacttcaagacccctggagctactacatatggacctcttacgacccgtcgcctatctaagcataggaggaagtaagtatggtctagctattgttgatgacttttctcgcttcacttgggtatactctttgcacgataaatctgaaacccaagggaccctcaagcgcttcctcatgagagctcaaaatgagtttgagctcaacgtgaagaagattaagagcgacaacgggtcctagttcaaaaccttcagtggatgagttcttgaggacgaagggatcagcacgagtctccactccttcacccacacaatatggg

SEQ ID NO: 56907 - DNA, 414 bp, Zea mays
  unsure (1)..(414): unsure at all n locations
tatatatcacattcaaggccatagaaatattacacactgtgtctagcaaatgtcacattctaaatgactttacaataggagctaatcttctcttaagactgcttctgcagcttcatttagtagctgatcaacaactttgtccatgatagcttcggccatttttctaatctcgtcatcactctttacgttggggtccgctaatggcttggcgggctctgaaagaggagaaggtgtggctatgttacaaagtgtaaacatattataaagttacaacaaaaagccaaaaactaatagttaatacctattcgcccttcgagattcgcactcttctcagtggcctctgctacatttctagcatcatgaatacctttntcgcttttcgtatatttcttgaccatctcccgtcaccattct

SEQ ID NO: 56908 - DNA, 339 bp, Zea mays
ttgtagctcctagcgctatattctttatgtccctgagcccatatgtggggacccaagacctttgtgcatgctcaccttcaactataaaatgggaggcatgcgatgttacaaggagacccaatcttaagcttcactcagatactcttcaagctcacgagcaatataccacacagtagagtagggtattatgctccggcgagccgaaccactctaaatccttgtgttcttatgttcttcccattttcccgactaacaagcgaaacgcctatgcccctcctcatcttaagatttatggtgggtgcactccgccacccggctggagattgctctccgacattt

SEQ ID NO: 56909 - DNA, 408 bp, Zea mays
  unsure (1)..(408): unsure at all n locations
cttatcttctgattccttcgaaagtacgaagagctcttattttatcgatatcttctccctgtcggacctttaattatactatcagagactcttatgtcactgtaatgtcgtaatggcgctctagaacgcattatgtaattcccctccaccttggttctggggcgcgaggggatattcnggttagggtcacagtctttacagatcccagcgggagtcaagttntccagtgggcactgggagaataaatcccagctaggagatatataaattcacaagtatgaatctggaatttaaatgaattcatagttgccagcgtggcaattgtattggatggaaagccattggcagagggattataattacaaacatgaacacattccacaataaacacactgcattctgtagcgt

SEQ ID NO: 56910 - DNA, 462 bp, Zea mays
  unsure (1)..(462): unsure at all n locations
tcaccaactatgattacgcatgcgaccactgtttgcatgtcttctaccaactcccgaagggacgtacaatacgacaagagtacatgcctcacagtattgagccaactccagtactccaagcagcccctgataatgctattaataggatacgttgcggcatcaagagggccagcgaacacttcacggttgtctgctccattacgatattggcactatcttcaatcaaccctagagactggagattcttccatctccccctcagcttgtattccctactgcaagcactcatgtgcatgtaatataagtctcatccctcttctgctagaagtaaggccttctcttggccgaaccaagatatagacttgtgtaatcttgaatcacccatcccgggtaaggacacataacattatttccntggttggtaagcccttggtccatacacgacagtacagtgctgacata

SEQ ID NO: 56911 - DNA, 447 bp, Zea mays
  unsure (1)..(447): unsure at all n locations
cttttgcaactaatctggctctataccttggagcatcaacttctgtatataatatcttgagtctgaacacccacttacaactaacatttttgcgccctttgggcgacaatattaattcccaagtgtggttcttatgcaatgactccatcttctatgtcagagcctaaacctaacaagcttcctcaggactactaactacctatttataagtactaggctcatcatgctcaatatcctatgcaactgtcagagcgaaagtagttgtacctctgcctctcacaactgggtgacccactctctatatcgatttggaggctatttctgtctttgaatacgatgtacaatacgataatctgaaccctttgaaacttcacctganaatatatcatctaactgaccatcaattgtatctgactcatcatctgcctcacttgtgtcattatgaac

SEQ ID NO: 56912 - DNA, 332 bp, Zea mays
ctgccgtgccttgggtgcggggaacgtacatgaacctatctcttgatgccactccttttgaccaccaggagtacatcctccccggctgataggcaagggaataactacaaacgcgctatgaatacatttctaacagcgcccaagcaaaaagagtacagacttcaatgaaccgccctaaaatctattatgaagagaaggcggcacgtcgactgatttacgacttttggtgggggaagctgttacccaaactacatcagctgttgatcaaagccttctctatatggacaaggtaggatacttgtgttgcgaaacatgatatatattatcagatg

SEQ ID NO: 56913 - DNA, 380 bp, Zea mays
tactcacttgcccatgtcacaagtcttcattcaggtcttctatgtattttctatctggtattgccccgacaaaaggaggaatttatgtctcactgccagtggactgagatcaactaaactgcgggtccaaagataactgaccctcatctttcccatcatctagctcgcagcctctgctattctcagcggctaacaatattactgaagctacactgcctgcagatgctgataaaaagccacacgatgggaaaactctgcccaagctgggttctctttaatcaagaaatctaaccttaaatgcataattgcttgttacctagatattaattctgattaaaagcacggtgattcatgggtgattgcatggtcacacccacact

SEQ ID NO: 56914 - DNA, 458 bp, Zea mays
tctgacgtgtctcggaatgaattccatgctctagtattgtatgtgtatgaatggagagctagggggtagagaatggatgcggatggggctgtatttataaccaccaactacttgctagccgttcctccttttctgtcgaccgcatacggtccacacctctggtccggacggtctcgccccgcacattaacgactagaatcgcaacggacagtagtaacggctatatcaacgactatagtgcatttaatgcattgccagatgttagataaagcagcctgggacggtctggacgtgcaccccggatggtcagcgaagacgctgataatgcatgttactgaacccatcaactttgtgtattcctggttcttgaacggtcggccgtccgcgattgagccgatggtccgagcttggtctcgacagtgcttgcttctatttgaatagtccacacgctaacgcta

SEQ ID NO: 56915 - DNA, 382 bp, Zea mays
gtaggtgaatagtctaatatgttctcaagaaagttgaactctctttatacccacgtgataccagataccctaattggaaccctgtataaacctaataccaaaccctatggacccatgtgcataattagtccactgttggacttaagtgcgaaaaccatgttatataagtaccttaagtcatctggatcacttatatgtgaatattgcaagcccaaccctaatttttggactcatttgcaaaaatgaccctaaatgagatctcatgttaagtctgaacttcagagatatggctcaactttgtagtcttagatctctcaaattctagggtgtttgccctaagtcaccacatcacagttgtataccatactaatgagtacaactt

SEQ ID NO: 56916 - DNA, 429 bp, Zea mays
  unsure (1)..(429): unsure at all n locations
tncatattgtcaatagtgcattcatatgaacttttacactctagttatgtctgtantactgtggctgttcttgtntgcctgacataaatgaacgggtctgttgactggtaagtttcttctagtaaatggcagaattggctcttccaactatagagacttttgtataggataaaagttcttactttcagcagactctcataatttttgtgtgagcagtctgggagatatcgaattttgaagttaactatgctgttgtctgaaacagatccagtcacgtatctcgtcagatttttagaacttatagatgacaaacattaattatccattaaataccgaagatgtagggtattttgtgtagaacctctacagtatgtgttgatatcaccaccattatatcttaaagaacaaaactaacaacaacactgctgt

SEQ ID NO: 56917 - DNA, 412 bp, Zea mays
ttaccaaatggacgtgaagagtgccttgctcaatggaccattcgaggaggaggtctctgtcgatcaacctacgcgctctgaagaccgtgagtaccctaaccatgtttataggctctctaaggagctttatggactcaagcatgccccaagagcatggtctgaatgccttatagattcccttagtgcaaatggcttcaaaatcagtaaggccgatcctactctattcactaagactttagacagtgatttgtttgtatgccaaatttatgttgaagatatcatatttgggtctactaacgaatctacatgttgaaaacttagtacgatcatgacacacatattccagatgcctatgatgggaggagtcaagtattttctaggatgccaagtcaagctactccacgagggcacc

SEQ ID NO: 56918 - DNA, 447 bp, Zea mays
  unsure (1)..(447): unsure at all n locations
aaaactcagctngactctcggaatcaaacgaagctctcagttgaagcctacttcgtcagtaaaaagcttcggaagataaagtacttagttcccataaaaaattcagaattaaatggccagagtgcgttctaccgctagggttgagcgtgaaggaggcgaagctgaaggatcggagactgttcccatctccgaagcgatgcaacgatccggactggtaacctcggaaggaatccgtaccgctgagacagagcagactgtccccatctccgaagttgccgccgacgcggaagaaggaaatattgaggaaactgattccgaagatgattatcatattgccatgccaagtaagcccagccacttggacttcggaaagtcaactgtctctaaggctgatctctccaagatggtgaagtcgggttatttcagtgagagtcagaagaagctact

SEQ ID NO: 56919 - DNA, 371 bp, Zea mays
ctcctctgtatgtgctacatttgattatattataaccaaagatacaaacacgggctgttgaatatatcctgcatcaacaggtcgtggctatactaccccactcgatgtatctctgatgctgcatccttcgtcttttcgtgcaagacccaaatacaggctctatcaccgtatctattatagtttgatcaacaaatcgactatctcatctttggtcatgtcaacatctgagttgcacgatcatgtcacaattatggtccactataatgacacaagcatgacatgattgataaatttatcaagattcagaataaacagttgatgattaaacaatatataaaatattttctatatataagcctctgcataacaat

SEQ ID NO: 56920 - DNA, 406 bp, Zea mays
tcgagaatactattgagtatcaccaatgtataggcatggatgtaattgtacatgggttgtgtcccttgcctataaatatatgaacatgactcctgtactgttcacgctgactttgcatttgctttattgcgcacgcttgtactcttacttttcgtcaagccgaaggtacatatataatttgttattctggatattggaaatgcagataaaaataacctgatgataatgtctatatgatatattgcacttcatatatgaaatcgtgcttattatttattatgcctatgaaagttgctccttacaaccttctgtcggaattcattatatccaatgggatattaagtcttgtaagacgaaagacctttatatataatatattctatgtggcttgattcaactctaacat

SEQ ID NO: 56921 - DNA, 486 bp, Zea mays
  unsure (1)..(486): unsure at all n locations
tcatgaatgataccttcggcgtcacgtacgggcagcttcattcgaagctgtctctttctgcaagaccttcggcgacgaatcatggtcccaacagtagccccttcgtggtgctagatcgtttttcgtaacgagcttgatccgtgaataaagtatcttatgcttcaggaagccgaaggtccaaaaaacaccttccctgagctcgttgtcgagaaacgatagcggtcccaccctgcagggttactatntggtctctgcggtccaccgcgcagcgggtgtgagcagctgtttgcctggtgtaaatatcctgatgattcaccttcttacctgcagtactatataaacagacgggtaggtgtgatagtaccacagcattcattgctatagcactgtnttgctgccacaatttaaccatagccgaacttgactctccaatcaacgaactctagttaaagctacttctcagaagataaactctggagagaagtt

SEQ ID NO: 56922 - DNA, 464 bp, Zea mays
tatgaagaatcttcatcccaacatgggctagtcggtggtgctagagtcaacccatgttagatctagcaattaagcaagtgtcgagttcagctctatcaaaatctaccaagtatagctgaccctctaacactcccttaaaagctattgaatcatcacttcttctaaagacagtgacacctatatcagaaaagagacagttgtagcccatttgacataattgggaaacagaaagcaagttgtagtctaaagaatcaacaagaaaaacattgtaaatagaatggtcaggagatatagcaattttacccaatccttcgaccaaaccttgatttccatccccgaatgtgatagctcgttggggatcttggtttatctcatatgaggagaacatccttttctcccctgtcatgtggtttgtgcacccgcttgcgagtatccaacttgagcgcctcgatgcataaacctac

SEQ ID NO: 56923 - DNA, 487 bp, Zea mays
  unsure (1)..(487): unsure at all n locations
tattgatagtcgcctagagggggtgggtgaatagggcgattctgaatattacaaatataaacacaactacaagccgggttagcgttagaaatatgaacgagtccgcgagagagggtggaaaacaaatcgtaagcaaataggaagtgtgacacacggatttgttttaccgaggttcagttctcgcaaacctactccccggtgaggaggccacaaaggccgggtctctntcaacccttccctctctcaaacggtccctcgggccgagtgagctctctcttctcaatcaaacgggaacaaacttcctcgcaaggaccaccacacaattggtgtctcttgccttggttacaattgagttgaatgtaagaaagattgaaagaatagcacgattgcataagccaagcgacaagagctacatataacacacggatcactttctctctcaagtcactaatcactaatgatctctcttctcaatngtgaaacttgg

SEQ ID NO: 56924 - DNA, 364 bp, Zea mays
ttatgcgaaagatgcacgagtttgatgtctcttacttgagtccaataggcagatgacttgaagacttgacttcgctaggagacgtggaaagacatatcgactcaggccttgccatgttgattacgtgagagccctagatgaggagcttctgccaatgtggtcccaacggaagagacccggaagcgtagtggaagctaaacttctgcaagaagagtttacactcgacctaatgaaaagacttcatctaatatgagtaatggttgaactagtatattattctccccatcccgaatagtgaagctgaaacggaaatgtctcggaagaagaaatgttaatccagctatacgtgtacggcattgcggtg

SEQ ID NO: 56925 - DNA, 415 bp, Zea mays
  unsure (1)..(415): unsure at all n locations
taacacgccgagatgagcttctttgaagatttctgttaaaatatccctcgtggagaaaatgaatatgctgatttattagccaagtcagcagcacaggggctgcccttaccttcggaagtatttttcgaaacaatataagcaccttcggttgagcttcttgaaagagcagtcctcaacatatccnctgtctatagtgaagactggagaactgagatcatctctttccttcagggtaactttctttcagatgacgaagcttataacaggaggatagaggcaagagctcgaccatatgtcataatagaaggggaactatacaagcgtggnggctgttctccgttactcaagtgtttatccagagccgaaggtatggaatcgatgaacgatatacacgcaggcctgtgtggatctcaca

SEQ ID NO: 56926 - DNA, 324 bp, Zea mays
  unsure (1)..(324): unsure at all n locations
tgagggctacatttatatcctgctaattatcctgagcatacaattaggagaattcatgctangaaacctcatactgtttcacatcatgcttttatgtataagaatgagacttctagctctatgcaatcaacccatgttaaattgcctaaaaagaaaactcctactgcatcaaatgagcctaatatctcatttaagacttttgatgcttcttatgtgctgactaacaaatcaggcaaagtagttgccaaatatgttgtgggcaaacaaaagggtccaaagactcgtgtttgggtacccaacgtgcttgtttctaacgtcaaagga

SEQ ID NO: 56927 - DNA, 273 bp, Zea mays
agtggtatgcaactcctctatactcccatactctcttgaagtagcttatcataactaatcgaagcgtggtttggcgggctctggtgtgaatacctgaaaagtcccctatgcgatagacgctaattgcgtagtggattgctatgcggcctccaacttacgagagctgagacttcattagtagaaacctattgtatgtgtcacaaaggctttctttctcttgctttctacagaaggataacctaatgaagctatcagtagttagtctatactctt

SEQ ID NO: 56928 - DNA, 405 bp, Zea mays
tatgaagaatcttcattccaacatgggctagtcggcggtgctagattcagcccaagttagtcttagcaaccaagcaagtgtcgagttcagctctatcaaaatctaccaagtatagctgaccctctaacactcccttaaatgctattgaatcatcacttcttctaaagacagtaacacctacatcagtaaatagacagttgtatcccatttgacataattgagatacggaaagcatattgtaatctaaagaatttacaagaaaaacattggaaatagtatggtcaggtgatatagcaattttacccaatcctctgaccaaaccttgattcccatccgcgaatgtgactgttcgatggtgatcttgatttctctcataagaggagaacattttcttctccccagcat

SEQ ID NO: 56929 - DNA, 497 bp, Zea mays
  unsure (1)..(497): unsure at all n locations
ctcttctttaggctacaagaggcctgcagtcattctatctatgtacatatttaagggagaatgttnggactctatntttgctaacattatatgttatttcttaaattcttaggttcttcttcttctttttgatagcaaccaggtattggtggtgaggtcgtgccgcaccaagataatacattcctttatacggaacctcgtacatgcacagggttgtggcttgcacttgaagatgcaacaatcaacaatggttgcctgtgggcaattccaggatcacataaaagtatttttaacacaattactttatgcctaagaacgtcttgaaaggcaggactgtctaagtttaatttttaactctcgtgttntgtatagagggtttggtgagacgtatggtcagagatgaaaatggtacacatnttgatcggtccttcccagtctatgatcagaaagaatttgtaccgctggaaggtaaatctggtgctttgtggtatacatgg

SEQ ID NO: 56930 - DNA, 323 bp, Zea mays
  unsure (1)..(323): unsure at all n locations
ctatgcgaagcaaacccacctgcccgctcangctctgcagacaatacccatcacctggcccttcgctgtatggggtctggacctcgtcggtcccttgcagaaggcgcccggtggctacacgcacctgctggtcgccatcgacaaattctccaagtggatcgaggtccgacctctgaacagcatcaggtccgagcaggcggtggcgttcttcaccaacatcatccatcgcttctgggtcccgaactccatcatcaccgacaacggcacccagttcaccggcanaaaattcttggattttgcgaggataccatattcggtggact

SEQ ID NO: 56931 - DNA, 392 bp, Zea mays
  unsure (1)..(392): unsure at all n locations
tcagacaanatcttatgccaatgcttaggattatcagatattcttctttttatcaagttgatcaatgtcctattactagactcggcctgtccattggcctgagcatagtatggagatgaattaagcaacttaattctatataattcagcaaattcacgtacctcctttgacataaaagaagtcccttgatctgtagtcaaggtctggggaatgccgaatctatgaataatatgctcagttatgaactcaattacctccttgtgtgtcatgttcttcagagcaacggcttcagtccatttggtaaagtagtcagtggcaactaatacgaaccgatgccccttcgatgatgaaggatgaatttctccaatatagtctaatccccatcttttaac

SEQ ID NO: 56932 - DNA, 391 bp, Zea mays
tcatcggcccaggagcatgggactttccatgccgatgaggcgtatcatttgtggctagaaccttgccaggtcgtccactggtgggaccaacccccgagtctggctgccgatgccatgagtctggctgatgtcctcggaggacagctggctgacgctactgagcggtcggtcaagccgtctgctcgggccgaattcctggaggaaaccctggcggtgatggtccatgcgcggtgctgacatcttcctttgaggtggagatcctccgaacgagtcgctgaccgaggccgggtctgattccgccgaaggtggagtcgacgccgagggtgctgctgctccccctgttgatgtctgaacctgcaggaacagtttgtctgtattgagcgtattgttt

SEQ ID NO: 56933 - DNA, 379 bp, Zea mays
ttacatctcctaacaactcgttgcgtcattcttcggcgtttgtcttattatcctgacctgataacctacccgactaatgttctggatgctgcgtgctctccacactgtcctgcatggacttcctacagaagatacttaccggtggacaggagaacactctttatgaagacgcctgacgcgcctctcctgtataatacctccccaatgagtgtatagtgagctgattgtctggcaatgcgctctgccgagtacttgtcgccaggctcctcttcattctttatatattaaaacatccgctgcctcctatcatcaaagtctgaaccgggttgatctatgataaagcactcttctatgtgtatcgtcgagatacttggttgga

SEQ ID NO: 56934 - DNA, 332 bp, Zea mays
ctagttctcttgtgtttattatatatatcactgagatctaaccttcttcatttctcttctaatgctgagggtattctctagattcgcgtgtacaaaatcctatgggtattatattctgattcaaagatgttcatcattcaaatatttatatcccccggtacctaaacacgaaaatacgtgaggttcatttctatctcttttctcttttttagaaaaatccaaaatcacgtgctatcctaaattttcataatatttatatggctcagaatctcactcaacatattatttatatagtagaacattctgaagctgtttctactattaagtagaat

SEQ ID NO: 56935 - DNA, 330 bp, Zea mays
acatgatactagctttaatctaaaccctatcaaaaattggtgattttcgttaaagacaagaagaaataaataagaaatgggaaatatcctctcccaggctatactcgcgccgcccctcccctcagattatgtatatctgccgcacactcttccttatcttctccaggcgacactcttcttactctccgcgctgtgcgtacttgctccctcagcacccctgctcccatggcgccgcgtcttcctccctgctccagtccggctccaagcactgcgcccctctccagccaatggccgcgtcgtcctgctccggctcatctgcgcgcgtcacat

SEQ ID NO: 56936 - DNA, 484 bp, Zea mays
  unsure (1)..(484): unsure at all n locations
gtacctgagtctttcttctccatcggcacaatattggagacctactctgtgtatctgcaaggtctactaanaatagcttctatcatccggcgaatttcgtcctttatatgtgggagaaagtctggacgaaatgttctagctttctgcttgaaaggtctgaaaccggacttaatgggcagtcgatgctccactatctcatggcttaaccctggcatctcagtgtaggtctaagcaaagcaatcagaatattccttctatagaccgatcatgtcatccctaagattggtctttaaggtcttggtcacaatagtcggcctcggagtttaccataccctgtatcgatcttctcctatggatcatccgatgtagacacctgtcctaatttgccgaggcctctgaattcctctattatgtctcccacaggtgaattagatgatctctgtgtgacggtggactatccagtctcgagagtcagatcgttcgt

SEQ ID NO: 56937 - DNA, 444 bp, Zea mays
tcgcatctctgaactaactcggctgcatcattcttcgccgtctgtcaatagaatcctgacctagaaaccttcccgactaatgttctggatgctgcgtgtactccacactgccctgcatggacttcctccagaagttgcttcccggtggacaggagaacgcacttcatgaggacgcctgacgcgcccctcctgtataatacctccccaatgagtgtatagtgagctgatagtctggcaatgcgctctgccgagttcttgtcatctggttcttcttcattctttatatacttaataatcgagtgccttcagtcatcagagtctgactcgggttgacctatgatgttgcactcttctatttgatccgtcgagacgctcggctggagaatttttgcacgaagacccgcgcggcacttgagttcgaccggatcgagcttggacagtaca

SEQ ID NO: 56938 - DNA, 403 bp, Zea mays
  unsure (1)..(403): unsure at all n locations
ttccatgttgtgcttgaacattccaatccgagcccgcatctgaccgtggtgaccgtcacaagttggtggtcttctgcagttcgaatccagcatgatcatatactcttccctttcggncttctccctgattcctaagcaaaacaagagtgcacgggtctccatggtctaaatatgatggacatgaactcacgagtgtaatcacctgatggttgagtagacgagcacgagcgcgagtaatgggaccagaaattgagacttgtattggtatagatgcatcagtagtgtggatgtcttcatcacctgatggttgagttgacgagcacgagcgcgagttatgggaccagaaattggacttggattggtataatgctcaacaggtggatgcttatcaaacggaatggtg

SEQ ID NO: 56939 - DNA, 461 bp, Zea mays
  unsure (1)..(461): unsure at all n locations
ctagngataagngagagagatatgttgagttctattgagctcttgcgcttggattgcttctttctctcattctttcttgcgatcaactcaattgtaaccaatgcaagagacaccaattgtgtggtggtccttgcggtgaagtttgattcccgtctgattgagaagagaagcttactcggtccgagggccgtttgagagaggaaaagggttgaaagagacccggtctttgtggccacctcaacggggagtaagtttgcgagaaccgaacctcggtaaaacaaattcgcgtgcacacttatatttgcttgcatttgtttgcaccttctcttctgactcganatatttcaacgctaacccgacttgagttgtgataaagtatgaaatttcagattcgctgtttcaccccccctctatgcgactatcacatgttctccctttagaagttatgaatgttcttatcc

SEQ ID NO: 56940 - DNA, 468 bp, Zea mays
  unsure (1)..(468): unsure at all n locations
acattgctttggttcccttgttggaacccaatgccatccttaatgccagtgcgtcgtccattatagagcatgcttctagaanattaaaattttcattttctagctcatgctcggcaattttagtagttaatttagctatgtgatcattttgttgtttaatcatagcaaggtgatcatcaatagcttcaagattaatatctctacatctagtgcaaatagtaacatgctcgtcagtagatgtagagggtttgcaaacattcaattcatcaatcttagcatttaacatggcattctcatctctaagatagatcattgcatatgctaagctccttagaacagatttcacatttttctacttctaaagcataaacattcttcaatntaacacatttttttgttntcttaacaagcaagtcctcttggcattccaagagatcatccttctcgttaataagttcaattaattca

SEQ ID NO: 56941 - DNA, 451 bp, Zea mays
acatgagctagacggcggggctctagtctacccatgttaggattagcaattatacaagtgtcgagttcagctctatcaaaattaataagtatagctgaccctctaacactcccttaaatgccactgaatcatcacttcttctaatgacaagaacgacctatatcccgtaaaaaggcgagtgtaacccactttacataattgtgaaactgaaagcaagttgtaatctaaagaatccactaaaaaacatttgagatggaatggtcaggtgatatagcaatattacccaatcctttgaccagacacttgatcccatccccaaatgtgatagctacgtggggatcttggtttctcgaggaagagacatctcttctccctgtcagtggttgtcacccctatcatgatcacttgagccgcgatgataacctccaaaaattattttgatttagaccaa

SEQ ID NO: 56942 - DNA, 313 bp, Zea mays
ttcctttgctgatatgcaactgtgtaatgcgggtcactctcttcgacgattcttgcaactgactgcgctgattgtacatctccttcatcgttaaacgggggctcctcatcaagatggtcagcgagatgctggaatctctggacaatctgtccatgttgtctcgagaaacagcaaggatgcgtttttcttcctacaagcaaaaatcaactcattcagaatccaagagcatgatatagcgaagcactggttcgtaagctaccctctcagagtcgagctgagcatgaagagaacaactcatagcgttgcatcattc

SEQ ID NO: 56943 - DNA, 277 bp, Zea mays
tcttggccctatgaacttcactattgactcccataccctatttgctagagaacacgaaggaaaattgatccacacatacataatatactcttattgtcctgcatttctgaacattaccgagcattctgattatatatggcttgatagaaacaaagaaagattgaagtgaaaagcaggacttcaccccccacctgagaacctcaggagggaactgcttatttgacatctgggagagagcctgatcccttaacacaaagaagcccgatgcatttcccct

SEQ ID NO: 56944 - DNA, 366 bp, Zea mays
  unsure (1)..(366): unsure at all n locations
tcantccgtcntcctgtagctacatcatcctgcacatatttttcataataagacacgtgcacacttcacggataacgtaaagtaacatatattagtttttcaccggcttgacgtggcttcaagcttcttcaccaatcatatttcgcccgccatttaccctaatactgggcataaatctagttccaaagcttgggctatgcttgtgatgtcaaccaaatctgctggagacaagctgaaatatggcctaattacaattattccgagcgtacaacaatcttcaagaaagctgaaactgtagcctcagaaactagcaaggcgcagaagtcaacatgcccagccataactatatcaagtgcatcaacctcg

SEQ ID NO: 56945 - DNA, 460 bp, Zea mays
  unsure (1)..(460): unsure at all n locations
tcggtattacaaaccgacttaatagtagaatgaccctctatttcatatgtgcctatgtcgctgttgaaatactttgtgaggggcataattgtaatttctcacaggctgtgtcctgtgcctataaatagtgaacaatattcccttactgttcacggttntctggttgttgcaatcacatcattcgggaaacaatctttgccaaggcataggtataactgcattcaataattcaatatactaagtaaatataatatggttcatttatgattcatttacctttgatactctctattntatgttatcttatacaatctattaaaattcaattacgaagacttaaccttcgtaatcgtattgtcatcaaccttcgtccaaggttcattatcctcaagggaataatgcttcgtggacgaaggaccgttacacttaacattntatgtngccttgttcttaattcata

SEQ ID NO: 56946 - DNA, 433 bp, Zea mays
  unsure (1)..(433): unsure at all n locations
acatgcatcaggcttaatgcataaaggttgagtaaaatcacgcaaggccaacacttgtgcactgcaaagggcctgcttgatggctgcaaaacaaacttcatgttctgaagtccacacaaagagcactcctttttcaacaattcattcgaaggcttcgtaataacagcaaaatacttgacaaattatttataataaccaacaagtcccgaaaagcttctctactgcttcacattagtagggctaggccagcntaaaactggtccaatctcagcactatcagtactcactccaacctcactaatgacatagtccatataggcaataaatctctgagcaaaggacatttggcatgttaatatgccaatgctctgctgaacaactcagaaactgatgcaatgtctccacatgatcctcatagagtgtactatacacc

SEQ ID NO: 56947 - DNA, 404 bp, Zea mays
  unsure (1)..(404): unsure at all n locations
tctaaagggagaacacgtgataagtctaactaatgttacttttcataaagatagaccttgtgcagcgtgtcaagcatggaaacacgtgggaagctgaaaaggaattaagcttacacctatttcctaattaattatagggggtgaattgcccaacacaaataattggactaactagtttttctctagtgataagatatacaggcgccaaaggttctcacttagccaatataaagaccaagaattgggttcaagaaagagagcaagggataaccaaagtgtgccctggtctggcgcaccatactgatcggtgtgccaccggacagtgtccggtgcagcangggacttcacgccgaactgctcaccttctggaaaatccagacgcgctccgctataattcaaccgac

SEQ ID NO: 56948 - DNA, 346 bp, Zea mays
  unsure (1)..(346): unsure at all n locations
gntggaaaagataaaattctgcttacgctagtagataaagtgaataaagacgaagctgcttcaaaggcccagaccgaagcccaaaaacgcgagattaaagatcttcagatacagctggctagagctaaagaggagcgcgcgcttgaggaaacgaaacgagaacttagtgattntatggtcagcaaattggaatcaaaagttaaggagcttcgcacatctcagaggaaatgctatgtcaaatctgtagaatggtgtgaataaaataaatccagcttcgccagcgtatgcgccttttccagcgaagagaatttctctcgaggcaatcccgaaggtccgctggaatgga

SEQ ID NO: 56949 - DNA, 504 bp, Zea mays
  unsure (1)..(504): unsure at all n locations
ctcagcttgttcgattctacttcttttgcagactacaatgttttatctctattaattacaacttcaacaatccggttgcggcccgcggcggcacatcatgagcagacatagacaaaaatattgtataaacagtataagctggtatagattaaaactaagcgaacagactctgatttttataagtcggagcgctcccatataagcttggttcggtttctactgcttgtacagactacaatgttttatctctattaattacagctgcaataatccgaacagttagcattaatatgaagcaaatgtagaacgggtgagggaacatttggcctccttcagaagcgaaggattntcgaggattagaatattataggaaagttttctatgtggctctctaaacgaatgattgagtcgctataaactttataattctcttatagaatggattattatagtgagattttggaggatttaatatanagttaagcttttgacatttttctatgg

SEQ ID NO: 56950 - DNA, 491 bp, Zea mays
  unsure (1)..(491): unsure at all n locations
tactcaagcgtgtaaatggatagcacatgttgagactaacatatatcattttgtcatatacatgatctggcgcgcaagacaagcagggaagcgagttggtgttcatcatccacacaacaacatcatgacgaccgacaggcgcgttgagctactccacatggatctattccggtcgatcacttacataagcatcatgcgggagcaagtattcgtcttgctattgtggatgaatattctcgaaatacttgggcgtgtcttttgcatgaaaaatcacaaacccaggagaccttaaagggattcttgagatgggctctaaaaggagtctgtatgaggatcataaatataagaagcgactaccggacggagttctagaactctcagattgaacgctatcttgaggatgaaggcatctaacatgagcattattcgttctactcaccacaacatatagggtgtgantggagaagaatgataaaaatctacttgacatg

SEQ ID NO: 56951 - DNA, 337 bp, Zea mays
ctaagatactcaagctctgacacctcgacgtaccaagatgttgcagctaccattgtctatgatggtatgtacacagtcagccttgacgatgatgaacatgttaaataggttgtggcgctgtctgttgtcttcgtcactaaccgcaggactcaaagctcattgcacaattaaagcctgatatgtctagggcgctgctgtaccaataaccttttcataaccaatcataagtcttctgcaatgttagctccaaccagatctttagtcttcaacatcagaagcactaacatacccaccatcaccaattgcaatgtatgcccgtctgctggagcaatctcgc

SEQ ID NO: 56952 - DNA, 427 bp, Zea mays
  unsure (1)..(427): unsure at all n locations
aactatgaaactcaactactatgagggatctttagacacaagtatactagtcatgttttatgtaagctacctgcatctagagatgttactatcctagttcaatcacttgtgctatactacacgctttttattattcactcaggtcactggattgctacgcgtacggcagtgaccaattcttcatgtacgngaaggtacggcgatccatatcgattatactcagctgaggatcaccaatcgcacgacatatgtatcacttaacccttgcatatgttaactcgccaccagggttcttaagaccagatcaggttcatgccaaccgagagcacaaatacaccaccgtcctaaccttagccacggaaggtacacgctactcatcgcatctctacactcccattgcggggtatgctattctggattaggctgg

SEQ ID NO: 56953 - DNA, 463 bp, Zea mays
  unsure (1)..(463): unsure at all n locations
tcgactccatctatatagnggattgctcttgaatctatcctatttccttcggcctttctggcagcctcctgacttccatgaatagcaatgggcccttgctccgaaagtatcttcatgcatagatatgctgggtgaagtattgcttcgaaagcattaagtgtcccttgactaatgatttcattgtaggggtattccatgtcaacaatgtcaaaaacaatctgttcagtccttgtattgtgaacaaagccgaaagtaactggcattgtgattttgccaagtgctacgatctgccttcctccgaagccacatatgggatgtgtagcatcgtgaatcttatcttctggcttatgcatttgtctgaaagccttagcaaatatgataatcgcagcactgctgtatcaaccagaacattatggaccagatcactcttgatgacacaagatatgaccataacatcattgtg

SEQ ID NO: 56954 - DNA, 443 bp, Zea mays
cttctcacttggctctaagccctggctcttcacactccagattaatattccgattcttaatatggcttcaaggtgaagttgatgaaagtaaacctgatatattttcagaacttctaccacgaacctgcttatagggaatcataacccaccttttaaaaagcttccgaagataacgacttcattatctttgggagtcggcacagtcttttctccatcatttgccctcacgatggatatatctcgaatatatcttcccctcatgttgtcaaagtgactttgcccaatagttgattctccgaatactgaataggctggtcgccattgtcgatcttcggaatcctcacccccactgtctgcatcataactatcactgtcatcaagattttcaaataagcgcttcaagatctccctacgtaaattctcttgatttgttttgctattga

SEQ ID NO: 56955 - DNA, 355 bp, Zea mays
atcttaggaacgtatcacagtactcactagcagccctatattccttcgtataattaccatcataaaagggctccacacattgcatgaatgactccacctacactttgaatcacgagaagattgctggaggcgtgggactatagtatggattcaacatatatgcagcctcgcgcagcagagaatacagtgtatctttcatcttattaggaacaatagtcatcacttctatgtattatattcaacattccaaatgcctctagatcttcctcttgtctgagaagtctccgtacacataacccaaaatggctgccatctcatcaatcaacataaaccttcacaacggctcaagaccttc

SEQ ID NO: 56956 - DNA, 438 bp, Zea mays
  unsure (1)..(438): unsure at all n locations
ctcggctttgaacacaatctnttagtgcatccgaagatgtctgtagattagaacgctgctcccgagatgaagcttattctctctgaatagaagaacctgtgtttcttatagcaatgtcgaagaccaacacagaaaatatcacccaagagattttagaaagtttatctgaagatactggtgacaacgacagttatgatgtggacagtggtggtgaagactctgaagatcgcccctggcgaccaaaccattcaattgttggaagtcagtatcaaaaaaatcatctgtcacatagggaagatacttcggattatcattgtagggtcacgaagagaaaacttgccaccctgagaaaagaagtctaggtccagcttttgaagctgacaccattccctgacaactttgctaaagtgtgaaatttcaagttacttaccaaatacc

SEQ ID NO: 56957 - DNA, 470 bp, Zea mays
  unsure (1)..(470): unsure at all n locations
tggagcatcgattggggagtctattggtgtagactcctccttctcttcttccgttgctttgaatgcaacgggttgcaccttgtgtgtagaggtggcaccttgctccaagttgacaatgtgtttggagtctttgatcataagttcaaagctcacaaacttgccaaccacttcctcaagagacatctgtgtatatctagggtctnctcggattaattgcacttgagtgggagtacgaaaaacaagtgaactaagaataaccttgaccgtctcatggtcatcccacttggttctcccaaggttgcgcacttggatcaccattgtcttgagccaattgtacatagcatgtggctcttactctctgttgaggacgaatcgaccgagctctccctcgatcgtctcgcgcttggtgatcttggncacctcgttcccttcttgcgccgttgttggcacttgttcttaaagcttcaatc

SEQ ID NO: 56958 - DNA, 347 bp, Zea mays
taacatgctctcataagtgcataaactgtcatgagcattacacttatactatgacacaatgcacttcacattctctatgatatagatatgatctcatttacctaataatgtgcacttggcatttaagaccataattgaattcctctcaaagcacatatttagggggagcaatctatatcatataaaaatctgttaagcttaattgacatatccttttaatcatatctctttcctttggtacattcgcatatttcttatctctattgtgtgccaagactaagactaatatgtcttcatgagcatctcatgtattaagtcttatattgaaacggaaatggagtattttg

SEQ ID NO: 56959 - DNA, 473 bp, Zea mays
  unsure (1)..(473): unsure at all n locations
ncataacactgcgcttaaatttgcgataattaaacagagttgacttaactacaccccatatcagttaagcttcataacattcgcttaaatctgcgaacaattaaagatgtcaaaactacaccccagatcgcattatcaaagcgattcccagatcctagatcataacaagattattgatgcatataaaccagcatatacatctgataactccattggtacactccaaggaacaaagacaaacagacatgaacagatattttgctatctccgcgacaaaacaaatttgtgaaaaaaaagtacttattacagaaccatgaatggactggataaatatgaccaacgtgcccctggcttgcaatataccggcaatgcttgggtaatatgttcaaagagcatcaatgagaagcttttccgactttgttctttcatcaaacctgaacagaagcttattgcatgaattgcactctctaata

SEQ ID NO: 56960 - DNA, 438 bp, Zea mays
ctctcaaaggagaacacgtgatatgcttatctattgttcattctgaacagacagaccttgtgcagcttgtcaagcatgctaacatgtggcaagctctcatcacaccaataatgtgatgaccacatcaagacctctggagatgcttcacatggacctcttcggacccgtcgcctatctaagtatatgaggaagatagtatggtcttgttatatttgatgactattcccgcttcacttgaggatttcttttgcaggataaatatgaaacccaatggacccttaagcgcttgctaaggagagctcaaaacaacgtcgagctcaaagcgaataagataaggagcgacaatgtgtccgagttcaagaaccttcaagtggatgaataccttgaggaggaatggatcaagcacgagttctccgctccctcacaccacagcaatat

SEQ ID NO: 56961 - DNA, 423 bp, Zea mays
  unsure (1)..(423): unsure at all n locations
ggacacttagaaactcaacttggtcatttattgctaactgtcccgacaatgatagcgatcttgatcaatggaacaagacggagatgaagaatatctataataaagcataaggcgacgcgcatctaagcaaggagtgggattcagattgctcctcttccgactccgacaatgaaggacttgtcggggaccataattaggggtaccctcaagacgcctaattctcagctggtaacccccatcaacataaagcttcgcacgcctgatgggtacgattaaatcatggatcagtccacacgagtgactcgatcacgcttcacccgagcctagcctcggtcaaaggcagccgacctctagagacttacgtcatccgatgcccctctgtttacagcggacacatcaccggctcgnccgaggccttggctt

SEQ ID NO: 56962 - DNA, 416 bp, Zea mays
  unsure (1)..(416): unsure at all n locations
gctcgaagccgtggtaagtagcatatgcaagtaatatgcgaattgattctagcctagatacgggtgcataggtttcgccaaaatccaaaccttcgacttgtgaatatcccttggccacaggtcgggctttgttccttgtcaccacaccatgctcatcttgcttgttgcggaagacccacttggttcctacaacattntgattaggacgtggaactaaatgccatacctcattcctagtgaagttgttgagctcctcttgcatcgtcaccacccaatccaaaccttgtagtgcttcctctaccctgtgtggctcaatagaggaaacaaaagagtaatgttcacataaatgagcaacacgagatcgagtagttacccgcttttgaatatcttcgaagatggtgttcatggggtgatct

SEQ ID NO: 56963 - DNA, 453 bp, Zea mays
agatactcagctcgcggttatatactcttctcctgaccctgcgttcattaacgagaagctgatacgcctggactgattgatgaactatgcacataatctatggtgaattcattaagctctgcacccatttccaatccttacatagcctctctgtcctcatgatgttcttagaggttgcgaccaaagaacaattatgtggtatgctcgaataatatgccgaatcgttctggaagccattatcacagcatataataccctctccaattctgtgtgatgtttctttgatggacttagaactttagagacgaagtatattggagcttgcttattaggctgaccatctaagttcttctgtaccaatgccgcactcactgcaaaatgcgaaagctgcacacatatgagctataggaaccctggcgcgggtggaggtaatattgttaaatcaaatcaaaa

SEQ ID NO: 56964 - DNA, 505 bp, Zea mays
  unsure (1)..(505): unsure at all n locations
atcctgcattacggaccttaaaactcagctttaagccgaagtgagatcttcgtnaaatacttgccgataccaatgaaaatgtgcggtcgcaaaggctagccaagatattattaaatggtggaaaagcaagctagagaaaaatattgaggagctttgcgaatccaagaaaagatgttttgaaaaaaccttggatagcgtgaataaattgaaaactagcttttccaaagtgggtgcttattcttctaaggagaattttatctgaggcgaccccaagggcgttattgagtggattagcggggaagccgaagctttcgaagaaatactaagcgatcatggggatatttgcgctttctccggtgcccagggatatacagctattctggagaaagctggatgcgatcatgtcaaagctacaacccacatcgaagccgncttctccatagacgacacanaagacccttcagacgaagccactctggtgggtggataatttattctgatgtct

SEQ ID NO: 56965 - DNA, 456 bp, Zea mays
ctatctccctatatttgcatccaatataagcccaatcttatctgaggtcggatgcattcggagcgaccattttagtgcataactcgcctggactccgaggtggagatgaagttgagtcagacttacttctctcttggtgtgaacatcctagcttctccttcttgatattttggcctttctcaaggacttgttggtcctcctcaagggtcctaatcataagaacatccatggcaccaagcataagctctaaaacataattgactaggttagaacgaacatggagatttagctatcgtgcatgtgctcgtgttgtcgatccatgcatagttggattggagtgatgtctcatccattgttattagattcaacatgagtgtaatctctcaagcttagatctctattctacagaggataatgtggttgtaagcatattttcttcaacactttaggctgcat

SEQ ID NO: 56966 - DNA, 497 bp, Zea mays
  unsure (1)..(497): unsure at all n locations
ttatcanatggacgtgataagtgccttcctaagtggaccaatcaaagaagaggtctatgttgagcaacctcccggctttgaagatagtgagcaacctcccggcttctctaatgcgctttatgggcttaagcaagccccaagagcatggtatgaatgccttatggatttccttatcattaatggattcaaagtcggaaaggccgatcctactctattcactaaaactcttgaaaatgacttgtttgtatgccaaatttatgttgatgatattatatttgggtctactaacgagtctacatgtgaagaatntagtaggatcatgacacaaaaattcgagatgtctatgatgggggagttgaagtatctcttatgatntcaagtgaagcaactccaagagggcaccttcctaagccaaacgaagtatactcaagatattctatgcnagtttgggatgaaagatgccanacccatcatgacacccatgggaaccaatgggc

SEQ ID NO: 56967 - DNA, 263 bp, Zea mays
  unsure (1)..(263): unsure at all n locations
gcactgcgtgcccttaggaacgaactctgagcattaaacttacgctgcgctcccttacgaacggctgttgggagcttcattgtgctctgcatccccttagggacgactttcgagctcctccatgtgtactactttttctgcactcgatggcgcatgctcagactataacattacataagatgggggagtttgcctcgtggagccgaataaaaagganaaattacaaatatggcccattaaaaccttctcccctttggaaagaa

SEQ ID NO: 56968 - DNA, 157 bp, Zea mays
gagcaaaggagggatgacacaccaagggaccacctcaacccaaagcaagtcgaaagttgagacagcgaggccggaagaagaaaatccacgcgaagacaaagaaaacaaaggcgcaccgtaggaaaaggcaggaagggaggatgttagaccacagcgc

SEQ ID NO: 56969 - DNA, 189 bp, Zea mays
  unsure (1)..(189): unsure at all n locations
tctctggcatggcagtgaacatagtgacaccgagggtgagggttgcaaccaaaactgaacaaaatctatagtgctcgtattcgtggttcaacttaccttataccaagtggctgcccggtcgttctcagccgggtttcactgaaacttgcccaaacctttntctgagtagatctcctttaactcaccttc

SEQ ID NO: 56970 - DNA, 220 bp, Zea mays
tatcactaatggattcaaagtcagaaaagccgagcctacactcttcactaaaactcttgaaaatgactcgtttgtatgccaaacatatgttgatgatattatattggggtctactaacgagtctacatgtgaagaatttagcaggatcatgacacaaaaattcgagatgtcaatgatggtggagttgaagtacttcctaagatttcaagtgaagcaactc

SEQ ID NO: 56971 - DNA, 231 bp, Zea mays
  unsure (1)..(231): unsure at all n locations
cccgggatactaggctaccgccattatcaatcgagtcatggaatggacttcgtgacaaattcctattgaatttccaagggtacagaccagacacagatgccttggccgagctatcactctacaagcagcaagagaaggaaactcttcgagaatactacaagaaagtcctcacgctcaagtcgcagntgccttccatcgacgaccacatagcaatccatatgcaatcagcgg

SEQ ID NO: 56972 - DNA, 143 bp, Zea mays
  unsure (1)..(143): unsure at all n locations
gacagacacatctacattcgtgaataaacaattatatcccatattgcataattgagtaatggataacanattatatccaagcgactcaactaagaatacattagaaatggagtgctcggatgaaatagcaatctttcctaacc

SEQ ID NO: 56973 - DNA, 201 bp, Zea mays
aaagacagacacagggcagagtctgggagaaccttatgcatatcttctctacactatcttcgtttcacttttcactgcctatttatttctctttgctcttccactggaggattctatcaaagagtattaccatcatacagaggaggaaaccaaacactatgaaccatgtacaaaagtattcaacccaagaatcaccaagca

SEQ ID NO: 56974 - DNA, 196 bp, Zea mays
gagccacagacgcaaagcagagctgggtgccgatgctgagagcacctagagggggggggtgaataggtgatcctggaaaaacttcaaacttaagccacaaaaacttgttaagtgctagcacaattattgccaagtggctaaggtgaagtctcaacaaaacacagtaccacaagagaatcatgcacagagtgacaca

SEQ ID NO: 56975 - DNA, 156 bp, Zea mays
gaacacaccggtgacagcgacagctatgatgtggatagtgggggtgaagattccgaagatcaaccttggcgaccaagccatgcgggttttgggaaatcaaggattaaacaaagccatcttgtcaatatgaggggtagatattttcgggacttctct

SEQ ID NO: 56976 - DNA, 231 bp, Zea mays
acacctacacgggcgaaaaaaaaacagctggagcccattttgcataattgagatacagaaagcaaattggaatctaaagaatctacaagaaaaacattggaaatagaatggtcaggtgatatagcaattttaccaagtcctttgaccaaaccttggattccatccccgaatgtgatatctctttggagatctctcgttttctcggaggaggaagaacattctctctcccct

SEQ ID NO: 56977 - DNA, 229 bp, Zea mays
  unsure (1)..(229): unsure at all n locations
gagccgccacacaacaatatcaaggtcaacaggttttacaccattcaaactattgtgtggtgacgaagcaatcaccccagaagaagctaaggcaggatcaataagaatagtggcttcggcagaagacgaagctgattattctgtggcaaaagatgttatagaagggattaggctctatgtcgtggaanatatcaataaataccaagccgatataataaaatggcgtgac

SEQ ID NO: 56978 - DNA, 75 bp, Zea mays
  unsure (1)..(75): unsure at all n locations
cccccccagacggcctggtggggggggggggcaaacccaccccaaaaacggccatattntttttttttcttttaa

SEQ ID NO: 56979 - DNA, 136 bp, Zea mays
gggcacaagagcgcgaacagcgccgtggcgatgatcgacggcgcccagaccctcatcgcgccggctgagcaggcacgccccccccccctgctgtgctcaacgggcaagcagcagccaagcacaggagatggagaag

SEQ ID NO: 56980 - DNA, 135 bp, Zea mays
acagccgcgaccaaacccgaggaaaggacaagggcctcgggtcggacccacaacttaagatgttggcaggaaagccccacaaaccctagagaagcctcttcagaagatggatgaatatatacgggctgataatga

SEQ ID NO: 56981 - DNA, 276 bp, Zea mays
atggagagctaaccgaactaacccttaacaggagagcagtgcctttagaagattatgttgtacttgatttgactttgaaagaatcagccacatgtaagcttattgtgtcatccgatcactaagtttaccttttgaaccggccactaataaaactaatatcttcttgatttagtcatagtgtgaagtcggttctgaaaaacgttgagccttcaaggcacaagagaattttatactctaaaggagcagcggggcgtcaccgctgacatgccccgccgg

SEQ ID NO: 56982 - DNA, 209 bp, Zea mays
  unsure (1)..(209): unsure at all n locations
actcgcttcacttgggtattctttctacaggaaaaatctcaaacccaagagaccttaaagggattcttgagacgggctcaaaatgagtccggcttaaggatcaagaaaataagaagcgacaacgggacggagttcaagaactctcatattgaagggctccttgaggaggagggcatcaagcatgagntctcttctccctacacacctca

SEQ ID NO: 56983 - DNA, 195 bp, Zea mays
gatacaaaaaaacatgctcgatctgctagccgaggattcatctgatactgctcctgatggtacattggcagtggtgccccttccagaggttaatgcgaccttggacgtctcgaaacctgtcagtactcgcccgaggcgccctagccgaaccagtcagcccgagccttctgcagatgagcagaagaagaaaagaag

SEQ ID NO: 56984 - DNA, 248 bp, Zea mays
cactaccagactaaagctagaggagatggtctacatcagaattttggctgtacaactttgcttatcgcaagactacgaagcttccagtgataagctaccgaagcaaatggccagccggatggaagactgaatggtcttatgttaaagatgataaagatgaagataaatcggtccagagatcgctagagctcaacctcggagagacgaaggcccgatgcaacatgataacgggggagcccgagccagaa

SEQ ID NO: 56985 - DNA, 235 bp, Zea mays
  unsure (1)..(235): unsure at all n locations
gcttgcggtgtcgagccgaggcgttcgccacttgcccaccggagatcatgaagcagtcgcggacctcggggaactcctctgccttgagatcctccttcttggcgttgatgtgggccctgccaccctncagaggtggcccggccttgagaaagtggtgccgaagcatgacacactcctcaagggtgagcttgacgggtccctaatgataggggcaccggctcttgagcatcttatc

SEQ ID NO: 56986 - DNA, 207 bp, Zea mays
atccttttaacgacagacacaactacatttgtgaatagacaattatatcccatattgcataattgactaacagataacaaattatatccaagagactcaactaaaaacacattagaaatagagtgctcggatgaaatagcaattctacctaacccttttaccttgccttgattcccatcaccgaatattattgaatcttgggaatcc

SEQ ID NO: 56987 - DNA, 449 bp, Zea mays
agcttcatctaaatgatatattacctcttatgatactcttacaggctctctccttagaaaatcatcgtcacgtcatcatatttatttatgtggtggaacatttaatgaaagggaaaatgaaactaacataaaatcatcgcgagaaataccctaatacgtatgtattgttacttgtttaagatgacttgttaccgtataacaattacatgtggattgcagtgtataggaatgaatcgagatggatgttaactatttataaatttaaaccgacttaatatcattcaatccacttggattaacgctgacacgaacatgacttaaatggaaacaaagagaaacaacttctagcgatgtgcttcacaatatgtaaatagtgtttgtatcctatattatgttgtactatcgatggcatactacattattacgaccacaccgccatgtacatgctc

SEQ ID NO: 56988 - DNA, 451 bp, Zea mays
  unsure (1)..(451): unsure at all n locations
agcttctaaagggagaacacattgtaggatttacaaatgtgtcatttgagaaagacaggatttgtagcgcatgccaagcagggaagcaagttggagcccatcatccacacaagaacatcatgacgactgttgggggccttcggcttccgaaggtcctcaaaaataggatttaacagtatttctggagtataatgtgtgaacaggtaccttcggactcaagtcaacatcacagcagaccagaataatacgaaggttgatatatcgccgaaggtgtgagcaggaaagcttctgcgtggcagcaaaaagtgaaaccgacttaaagatgaaaaggctattcagacctcgatagattactatagaattattatcaaatgtaaagggcatgaatgtaattntgtatgggttgtgtcccgtgcctataaataggtgaacagtaccccgtactggtcac

SEQ ID NO: 56989 - DNA, 402 bp, Zea mays
  unsure (1)..(402): unsure at all n locations
agctttcatccttcttctttacaaacagtgctggacatccccaatgcgaagtgcttgggcgaataaatcccttatccagcaactcttgcaattgcttcttcaactctgccaactcagcgggtggcattcggtagggcctcttggaaattggggtcgttcctggttgcaactcgatggcgaattcaatatcccggtctggtggcattcctggcaattcattagggaagacatctgcatactcacagaccactgggatcctcttcagaggtaactccgtcatagagaaagcacatgactgagtagaatcccgactatgcagaattaaagtgaaattcccgcagaacggagaattaactttcacggtacgactggctacatcaagcacnaacttgtgcaaggtca

SEQ ID NO: 56990 - DNA, 382 bp, Zea mays
agcttctacggcccacgcggttgcctgaacgtcgacgtatcccgagctccgcagcagcagatggattttcttctctcccgatcgacacttccttacttgatatcggtttctctgattctaagccgcagctagcgctcggatgggttccgatgaggtggtcaaggcctcatcatttattcacagggattggctccaaccgaggcagcaatcgtcgacagtgaagtacagattctacggcatgcgagagctcgggtttggtacgatatggtgaggattgaccgagctggcagcctggccccacacaccagattgcaagcaagcatgcgtgcggctgacgcaaggatggggactgacgggtggggcccacttgtcggcgcgacac

SEQ ID NO: 56991 - DNA, 453 bp, Zea mays
  unsure (1)..(453): unsure at all n locations
agcttgagaggattttttcacggttcaagctcgttactaaaaacgatctagcgccgcgaaaggggctactgttggggccatgcttcgttgcgccgaaggtcttgcgtgaagaagcagcttctgctgaaatcgtccccaggaaatggccgaaggttcctttttatagagcttcggcgttgcaaaccgacataaagatagaatgacctttntatccatagaggtctaagataatgttgtaaacttttgtaaagggcataattgtaattcgtcacaggctgcgtcctgtgtctataaatagatgaacagtacccccgtactgttcacacgaacctgtcatttgccttcacatcacacttgtattcttcaagaccgaaggtacatttgtaaattggagtcatntacattcgtttataataatagaaatggagatgaatttatgataacatttaagta

SEQ ID NO: 56992 - DNA, 417 bp, Zea mays
  unsure (1)..(417): unsure at all n locations
agcttatcacaagcggtgctatactcatcattggatacggcgagtaagttggaggaggtcttaccatgaatcacgtgagcaggagcacagtccacagcgtagggcggcatgcggtggttcccccactccggcaagggattgccgatgcccangtctccatcctccccatgccatcaccgcaaatacaacccagaacccaaagcgagccgcaccggccatacgcccgaccctggcgagggtgcctccaggattcacccgcggcggcggcaactctccctttctctcggtgtgcggcgaagctaggcgatggcgcgctcggctatggcttgtgtaccgaggaaaggcatangtcttatangaggcgggtctggngttggttgcgctcggtctgcggaagtcgcgcgcgtgccgagttct

SEQ ID NO: 56993 - DNA, 443 bp, Zea mays
agcttccccttcgataaaagagagtccatatttcgaaaagcttcccggattcttaacttgcattgaaggatttctgccttggctcgttcaagctccttctcgggtcttattttttccaaactgcaaatttatacaatcaacacagtacatgacaagaggccaagagggcacacttgaagtctattaatagaattacagaaatgcatggtggaatgtgagttgcaagatattcccaaaatattgtaggcagatatagaacattcaatgcagccagtatgtgaccaagatctgttctatttgacattttgacataccaccctagcaaaaaaactgtgaatatggaataacagttacataaaaaagaaaacaaagttagacacctagtatatgaggatattgtacttgtacacattgtatcctacctagtagcaactaattatata

SEQ ID NO: 56994 - DNA, 444 bp, Zea mays
  unsure (1)..(444): unsure at all n locations
agcttctaaagggagagcacattttatgactaaccaatgttcattntgagaaagacaggatttgtatcgcatgccaagcaggaaagcaagttggctctcatcatccgcataagaacataatgacgaccgacaggccactagagctcctgcacatggatctattcggcccgatcgcttacataagcatcggcgggagtaagtactgtctagttattgtggatgattattctcgcttcacttgggtattcttcttacaggaaaaatctcaaacccaagagaccttaaagggattcttgagacgggctcaaaatgagttcggcttaaggaccaagaaaataagaagcgacaacgggacggagttcaagaattctcaaattgaaggcttccttgaggaggagggcatcaagcatgagttctcttctccctacacgccactaacaaatg

SEQ ID NO: 56995 - DNA, 426 bp, Zea mays
  unsure (1)..(426): unsure at all n locations
agcttcacgaagaggaaccttcggctatcttatacaaacagcttcatccgaggattacttctttctataagaccttcggcgacgaagcacagacccaacactttccttaagaaaaaggttaccaaattttagaattattgctcttgcgcaaagtagaagataggaaaaattggaaatttgttgtttgatattcttcaagtatagtggtagtagaaagcccctctttggctagaaactttagaaaatcgtaataaaataactaataaatattagtggctgaaaatttgtacaaagtcatgttataacatctaaatgccaagaaaaataagtcttaaagaataacccaatgttaaaagagagtngtagttcaaaacaccccctttgccctaacacttgataattttataaagacagaaccactcactt

SEQ ID NO: 56996 - DNA, 416 bp, Zea mays
agcttagtcgccggctggagaggtgaggggctcccgagggagccatcgccggaaacgcccgacgacgacgacaatgatgaagatgatgacgaggaagacgacatgggtgtccgccttggactcagccctggcttggggttaggccaggagccgtcaagccagcccccgagcgggctgatgccgtcagtccctggagtcgggacgccggggtcccgacccgaggggcgggggcaatccgagagggtacttgacccctcggctggaggagttgaggcgaccccggggagccaggccgaggcatctgctccccgagagccgccgcccacgcggacagcgcaggggagcgaccctcatgtcgccgtggcggtgcctgggcagttcgccccccaggcgttcagggcgcccaaagcaagggt

SEQ ID NO: 56997 - DNA, 444 bp, Zea mays
  unsure (1)..(444): unsure at all n locations
agcttgtccggtttgctctggaggaggtggttccacaaccaagggaggatgaagtcgttgtttttaagagcttcttcagggcagggctttgattccctcttcatgagatgattggagaggttttaaagaattttgagatatactttcatcagttgacacccaatgccatcgttaggcttagtgtctacatatgggctctccgaagctagggtatgagtcctaatgccaaagctttctgccgggtgcacgagctgcactatcaaacaaaggccagagcagatggtcttcataagaacttcggctgctacaacttcacatattggaaagatacgaaggccccggtaattggctactgtaccaagtggtcgaccagttggacaagcgaacggttttatataagagcagacaagaagaanagggagaagctaatgattatggtcatga

SEQ ID NO: 56998 - DNA, 428 bp, Zea mays
cactctatgctactggtactataaatgagatgtgaaccgcgttcctcggtctgacactatcttctttggcataccatgaatacaaacgatccgagacatgtattgctctgtcaatattgcactattgtagctagtctaaactggtatgaagagggctgacttggtcaagctgtccactactacccaaatggaatcatagctgggtcgagtgcgaggccacccgactatgaaggccattccgatctcattccattttcattgagaaattttcaacaactgcaacaaacatgtgggcctctgatgctttgccttgattctctgacaactgtcacattgttacactttaaaaatcattaaataatacacttacgtaataaatgatattattggaaattaattttttataaggcttggtattaattaccttt

SEQ ID NO: 56999 - DNA, 445 bp, Zea mays
agcttacccatgacgaggcatgtgaccagttaaagggtcctcggtcatcaagcctgcatcgagacggtccttaatcgactcagacggagacactacaccgagactctcttctcgtgcaagtcacccgcctggtctcagcttaatcatttcaacccaaagtttggtacctggcagaggtacatcttttccgatgttgaacccatcaaggccttgatggatccatcatcaagttttattttcgaaaacatcccacccactttgccacatcatctttcgtgaaaacaaaacattttgtttttctaaagcagggctaagcatcaaaaatcttttgtaaaacagtgatcaaggaaggtaatcaaattcaaggaaggtaatgtaggaattgttttagcaatcaactcctatcacctaatgcatcaagcaagtgaaaaagaattttaaaaca

SEQ ID NO: 57000 - DNA, 442 bp, Zea mays
agcttaacatctttgtctgtgtcctcatcctgtttctatggtattcaatgctgaagctcctgcaacacttaataacaaactaccaaccgatagttaagtgtgtttctgaggaccttctaaagacaaatgccccctacagtagcccctcgcagtattagtttgtttctttgtaacaaactcaaactgcgaaatgaacagagatctcatatcgaaggtctgaaaaacaccttcccgtcgctaagatagcgaaactttctgagttgtgggggccacattgaagtggttttttgtgtataaatatgacgatcatcataaaatatttatcatgctatttgagctgtcctactgcattctgagccgttgaatagcatttgtttctagctttagttgctcctttagtctaaacggagatgcacgaacgtaagaagagtgaggatcttgc

SEQ ID NO: 57001 - DNA, 432 bp, Zea mays
agcttctaaagggagaacacgtgataggttttactaatgtgcaattcgaaaaagaaagaccttgtgcagcttgtcaagcacgcaaacaggtgggaagctctcatcacaccaaaaatgtgatgacaacatcaagacctttggagatgcttcacatggatctcttcggacccggcgcctatctaagtataggaggaagcaagtatggtcttgttatagttgatgacttttcccgcttcacttgggtattctttttgcaggataaatctgaaacccaagggaccctcaagcgctttctaaggagagctcaaaacgagtttgagctcaaggtgaaaaagataaagagcgacaatgggtccgagttcaaaaaccctctaagtggaggagtacctcgaggaggaatggatcaaacacgagttttccgctccctacaca

SEQ ID NO: 57002 - DNA, 376 bp, Zea mays
agcttcccaaccttagcaattaaattggcattctcatttctaaggttggaaataatatcatggcaagtgcttagctcactagttaatttttcacatttttctacttctagagcataagcatttttcaccttaacatgctttttgttttctttaattaggaagtcctcttggctatccaagagttcatccttatcatgaatagcgctaattaattcatttaatttttctttttgttgcatgtttaagttggcaaaaagagtaagcaagtcatcctcattatcactagaattagcctcatcgctagatgttgcatatttagttgaggaatttgattttaccttcttccttttgccgtcttttgccatgagacacttgt

SEQ ID NO: 57003 - DNA, 446 bp, Zea mays
agcttataagtttctagatgagaagtggtcacccaagtttcgttgatgaagcaccagaagactaatcaaggaaggaattcatgtgggagttcgcaagagaaaggtttgcgtgttggcatcgatgcttcatcaataagctaggtgccaagcgaaagctagaagcctgaagatgatctttgagtagccagaatcagcgtttgcaatcggcaaccagatgcttctcaaaggccagattttgtgtaagctccgtctcctcgaagagtctgcaaagtgaagatatgtagctgaagtaaagctatacccataacccttctaagctgaatctcgaggacgagatttcatttaagtggggtagaattgtagcatcccaaaaattcaaatcttggaaatttctcacactcgctctaaattcaaaatgaatttcaaattcatttcaaatgtttgtt

SEQ ID NO: 57004 - DNA, 445 bp, Zea mays
  unsure (1)..(445): unsure at all n locations
agcttcgcacctctgaactaactctgctgtatcactctntgctgntcgccaatagaatcctgacctaaagactttcccgactagtgttctggaggctgcatgtattccacattgcccagcatggacctcctctagaagttgcttcccagtggacgggagaatgcatttcatgaggacgcctgatgcaccccttctgtataatttctccccaatgagtgtatagtgagccgactgtctggcaatgcgctctgccgagttcttgtcgtctggttcttcttcattctttatatacttgatgattggccttctccagtcatcagagtctgactcgggttgatctataatgttgcactcttctgtttgatccattgagatactcngctgcagtatttcttgcacaaagactccgggtgggacctgagctcgactggatcctagcttggat

SEQ ID NO: 57005 - DNA, 352 bp, Zea mays
  unsure (1)..(352): unsure at all n locations
agcttgtatttcgcctcaacatggcctcgtttgtgattggcgcgccgtttcaatgctcctgctgacgcactcaccgtcaattaaccttcggtcacgccaactgccatatctgtccccgcgactgactgacccgtggcccccacgcctagtggtttcgtcgggccacgcgcggngcgcctcgataccactgcattggtttaaaaaattttcttctgtcttctgccgtggtcccgaggaggcgtagtaccggcgcgagcggtggttcgctctttccgcacccggaatctggcacccaaggagtatgactcgtgggcctgggcccccgtgtcatagactgggctgttgtttcttg

SEQ ID NO: 57006 - DNA, 402 bp, Zea mays
  unsure (1)..(402): unsure at all n locations
agctntaccaaatggacgtgaagagtgccttcctcaatggaccaatcaaggaagaggtctatgttgagcaacctcccgactttgaagatagtgagtgccctaaccatgtttataaactctctaaggcgctttatgggctcaagcaagccccaagagcatggtatgaatgccttagagatttccttatcactaatggattcaaagtcggaaaggccgatcctacactcttcactaaaactcttgaaaatgacttgtttgtatgccaaatttatgttgatgatattatatttgtgtctactaacgagtctacatgtgaagaatttagtaggatcatgacacaaaaattcgagatgtctatgatgggggagttgaagtatttcttatgatttcaagtgaagcaac

SEQ ID NO: 57007 - DNA, 362 bp, Zea mays
  unsure (1)..(362): unsure at all n locations
agcttgaagccatggtgagtagcatatgcaattaatatacgaattgactcaagcctagctaccggtgcataggtttcaccgaaatacaaaccttcgactcgagaacatacccaggccacaactctggctgcgtttcgtgttctcacactcatgcaagtctcgcttgctgccgaagacccactcggtatctacaacatctcggataagacgtggaacaagatgacatacctcattcctcgtaaaggtggagagatcctcttgcatagccaacacccaatccgaatcccttaatgcatcttctaccctgtatggctcaatagaagacacaaaggagtattgntcacaaaaatgagcaacacgag

SEQ ID NO: 57008 - DNA, 447 bp, Zea mays
agctttctccatcttgctcccattattatgaatattataaatctcttggagatgaggatgttggagataaatgatggtatggatttgatattttgccatcatcattggattgctttggccaaagagttttgtgattaaaatgaatctcttttattctcccatgcttcaaattcttgtcagttttcatttcctttgatcatatatactattgtcagatggccaaggagtgctatgaatcatatagacacttgtcatctttataccatactgaatgcttcataatttttttatttataaggaattatgctgagctggttgtccagtgacgatcatctagttgtggcatttgaggggaactggttatattggcaagagtaattaccatagtacctggattgattcgtataagtaatatgtaaaggtattggagtgtacgtacagaatgtg

SEQ ID NO: 57009 - DNA, 427 bp, Zea mays
  unsure (1)..(427): unsure at all n locations
agcttatgactggagaccttgtttcattagatggcatggttcggcgccacaatcacctgcgcattgcgcagtaccatcagcatctggcggagaagctggacctggacatgtcagccctggcttacatgatgaaggaataccctgngactgaagaagaaaagatgcgtgccgctgttggcaggttcggcctgtcaggaaaggcgcaggtgatgccgatgaagaatctttctgatgggcaaaggagccgcgtcatctttgcatggctggcatataggcagccgcaactgctactgcttgatgagccgacaaaccatctggatatcgagaccattgactcactggcagaggcgctgaatgagtgggatggtggtttggtcttggtgagccacgatttcaggctgatcaaccaggtcgctcaagagatctg

SEQ ID NO: 57010 - DNA, 389 bp, Zea mays
agcttggtcaaggggaagattggaatggtgtccaagcttcaaacaagattgattttcatctcaagagtgtccaaggtcaagaatgaagctgcaatttattatttttttttcaaaacagacaggataatctactatcattataactttaaaagtgccatttaaattacatttgcaatagataactaaaattgattgagtatccttgcctcaacaaactctaaaaacttaaatagacatgtcacacaacaatttccattcctctcgtaatgcctactttccgtacacgactaaacatctccagagcttgtaatgtgcagcaataaacaagtgcttaatacatttaacagaaggcatgcgttcggcatatcgataggtgtcaacattcacct

SEQ ID NO: 57011 - DNA, 279 bp, Zea mays
  unsure (1)..(279): unsure at all n locations
ctttcgtagcatgaaacaaatgtctattgaacctcatttntatgctatngggttcttctagccttactacccaaatatggtccaggattcaaaaaggaggaaaaagaagaagatgacgatgaagcgtagcaagattctaaagaaatggtctaaggctacactttctcatacattagaagagattttgcaggtaaaacaaacctctctttttttgaagtcttgttggtttagctatatattgtttgacttagttaatgtcgaatttttgtaggctgcacc

SEQ ID NO: 57012 - DNA, 401 bp, Zea mays
agcttgtgagattagtgttatgcattacatggattcattgttggtttaacctttaggtcttaatgacataaatagaattaggtatgtaattatggataacacttaaaggataatcaaattcctaaataagagtagttcatcttacaatttaatcttttcttgtttaattactacttaaccttttttgagctacgttccaaacacttagagagtaatcaattccccaattaggattagtccattttataacttgatctcattccccaatacttaataccatacctttttgagttgtgtgccaatgtttgtacatgtgtgatgtgatgttcatttttacctttcaaatgtattgaatgtatgctcgctttacttaaacaacaagcagctcgtggttcctgagt

SEQ ID NO: 57013 - DNA, 416 bp, Zea mays
agcttgtgaaggttcttcatccccacatgtgttaaacggtgatgctccagccagcccatgctagtcttagcaattaagcatgcatctagaccggcctcctcttttgcaaaatcaactaaataaagtttgtcgtctagtacacccttaaaagctaatgaaccatcacttcttctaaagacagacacatccacatttgtgaataaacagtcatatcccatattacaaagtttactcacagacaacaagttatatccaagcgactcaactaagaacacattagaaatagagtgctcggatgaaatagcaatttttcctaaccctttcaccttgccttggttcccatcaccgaatatgattgaatcttggggatccttgttcttgacgtaagaagagaacatcctcttttcccccgtcat

SEQ ID NO: 57014 - DNA, 449 bp, Zea mays
  unsure (1)..(449): unsure at all n locations
agctngacaacaccatttaacatcttaaataaaatatctgagatcaagtatatttaaatcattcctcaacatgcaaaagcgggttttatcaagtggctgagtgaaaatatccgctaattgatcttctgacctcactccttctaaaatgatatctccttttgcaacattatctctaaggaagtgatgacggatatcaatgtgcttggtgcgagagtgttgaacagggttattagcaattttaacaacactctcattgtcacacaacaaaggtaccttttctagaactacgacatattctaaaagagtttgtttcatatataaaatttgtgtgcaacaagcacccgcggcaatgtatttcgcttcggcagttgacaaggcaacactattntgctttttggatgtccatgatactagtgatctcccaagcaaatggcaccctccagaagtac

SEQ ID NO: 57015 - DNA, 421 bp, Zea mays
  unsure (1)..(421): unsure at all n locations
agcttaccacatttgaagcatgagcgcttgccctctgtcttggtcttgcttggctgccccttgcgaccctttagcgccgtcttgaatcttttgatgatgagggccatttcttcatcattaaatctggccgcctcaatttgtgccaccatgctaggtagcgcctccttgcttcttgttgccttgagagcaaggggttgaggctcggtgattggaccattcaatgcgtngtccacgtacctcgcctccttgatcatcattcgcccacttacgaattttccaaggacttcttctggcgacattttggtgtacctgggattctcacgaatattattcaccaaatgaggatcaagaacgggtaaggaccttatcatcaatcggacgacgtcgngggcccgccatcgcgtgctttcgtagcttctta

SEQ ID NO: 57016 - DNA, 384 bp, Zea mays
  unsure (1)..(384): unsure at all n locations
agcttcacatgtctcgtatgatttataatctaacgaagntaaaagtccatcagaatgagagcttcttcatgcgattctcacttatatgacccaaacgacagtgccacatgtaggtaggatttaaatcattaggccgaggccttttagcactaatattacagataggtgcatcatcaagatttaaaatgaataacccattcataatggatgcaaaagccacaaacatgccattcttagagatcacacaaccattgttttcactcgcaaatgaataaccatccttcatcaaacatgaaggagacataatgtntcgactcatactaggaactagataacaattatttaacttcaaaataaaatctaatgtgaggtggagttgcattg

SEQ ID NO: 57017 - DNA, 372 bp, Zea mays
  unsure (1)..(372): unsure at all n locations
agcttcngcatgatgacagtaaatgggaactctcttaaagatgaaaaggcaaattagacctcgaagaattactatagagttgttgataaatgtaaagggcattaatgtaattccacacgggctgcgttccttgcctataaatagatgaacagtactcccgtactgttcacgctgacttggcattcactttttgcatcacaccttgtacctttattttccgtcaagccgaaggtacatttataatttgttattctggatatgataatgcaaataaaactaaatggagaatagtatttattttattcttcatatttggtatataaattcttccttatcatctatcgtgcttacgaaggttcttttcttcataac

SEQ ID NO: 57018 - DNA, 414 bp, Zea mays
agcttggtgccaatggagaagaataaattctttaagtcttggctgtcaaactgcttgccgttgtcaaccgttagttcggacggtactccgaagcggcaaacaatgttttgccaaaagaatttttgggcagtttttgatgttattgtggaaacagcccttgcctcaatccatttggtgaagtactcgacagcgacgaaggcgaacttaaggttcccctgagcggtgggcaggggcctgacaatgtcgaggccccagcgctggagaggccatgtgtgggcgatcagctttgtatactgcgaggggctgcctgaccgaggagaaaacttctggcaggcttcgtatgaccttgtgacccgatttgcggcgcagatcattgtgggccagtaaaagccttggcggatcaccttatcagct

SEQ ID NO: 57019 - DNA, 363 bp, Zea mays
agcttccgacgatgtgttgtcgttgataactgcataagtccgcttccagcttcagtaagccaatgcttttggaaagggttctaacaattttggcctcggtgcggctccgaaggcatcttagattcccttcgttgaccccaccaaatagcatagcccctgatttgtatccgcaagatatggcatattttttcaactcctctttttcggtgtttttaattcttgtccgagcagatcttgaaagttaaaatttccttcttctgaaatttcatcaatctgctctttccccttttcagttgccgtattcactgcagccacactagcttcttcttcagccattttcaggagtatattgtcaataacctc

SEQ ID NO: 57020 - DNA, 427 bp, Zea mays
  unsure (1)..(427): unsure at all n locations
gcttgttcagtttttaggccaccaatgaaaatatgatattgatgttatacactatagtagacaaaataaatacatgtttatgcataagggngaagaagttgctttgcttccattaactcccactgaaatttaacaatatgaaaggaacttgttgagaaaaaagaataaacatgttttagattctagagtaacataaaatgaataatcaactagcattaaattgaagngatgtgtttaactcgctactaaattccccctactgaaatagatgttcacgtgagcaccatatacttttaattttgaaaaagggtcatatgttcaattcatcgcactcttatttctatgcctataattaatacaaacggtttgcggaagcatgaagatactaccgccactataagactattatgattgatacatttgcaag

SEQ ID NO: 57021 - DNA, 423 bp, Zea mays
  unsure (1)..(423): unsure at all n locations
agcttctaaagggagaacacattctgggactaacaaatgttcattntgagagagacaggatatgtatcgcatgtcaggcagggaagcaagttggtgttcatcatccacacaagaacatcatgacgatcgacaagccgcttgagctactccacatggatttattcggccttatagcttacataagcatcggcgggagtaagtattgtcttgtgattgtggatgattattctcacttcacttgggtgttctttttccaggaaaaatcacatacccaagagactttgaaaggattcttgagacgggctcaaaatgagttcggcttaaggatcaagaaaataagaagcgacaacgggacggagttcaaaaactctaaaatgaaggcttcttgaagggagggcataagcatgagttctttctcctaca

SEQ ID NO: 57022 - DNA, 408 bp, Zea mays
  unsure (1)..(408): unsure at all n locations
agcttctcctgtccggaataatctacggtatttcggacagncgatctagaatagttgtagatgaacctttgacacctgtagaacatataatttagagcaaactagttagtccaattatttgtgttgggcaattcaaccaccataatcatttatgaaaaggtttgaccctgttttcctttcagtatgtccctgcagaagacgtccaggggaaccgtcgttcgccctgaggctanttttgccaactcatccgcagtctcgttgtaccgtcgtgcgatatggttgagctccagcccgtagaactcgtcttccaggcgccgaacttcgtccaatatgcctccatgttccggtcgtaggagagggagttctttatgactnggtcaatgacaagctgcgagttgccacgaacgt

SEQ ID NO: 57023 - DNA, 343 bp, Zea mays
agcttgtattgcaccccatgtcccccgatgctattttgaaggatgaagttgctagagcttgcaaagagaaaaataaatctgttcataataaaaatctaggtgctgcaaaggagttggtacaacataagagtgacaattctaaatctactcaagtgaggaagacagaaatacaactgaaaagtgcttgttttcttgcttccaaatctgatttgcttgaattaaatgatgttgcttcaatctgctatgtatttatttgcaaggatgctttgttctcacttcacaacataccatctactttgccttctactgtcactaatcttttgcaggaatatgctgatgtatt

SEQ ID NO: 57024 - DNA, 428 bp, Zea mays
  unsure (1)..(428): unsure at all n locations
agcttcggcgaagcccccgagcaactcgcttgggttgtaacaccagcctacgcctgngacagtgatggcggcttctctccctttctctctcccctctgcttgattgatgaagctctgctccacccgatggcttcggtgcttcctcaatggtcaaggggggtcaacctatataccccagaggcgcaagcaactaggtccgttcgattcgacctcaaacaaactctccacttcctacgtgcggcgcggcgagatccggggaagaagcttctgcccaccgggcccacacgcaagtgatggcaaggagacgtagtcgtgcggggaggctgccaaagtgggcccgatctaagagatttcgtcccagcatgtttgggtgagtttcttttctttttttctgatttatttttcctatttcacttttaaatcaacgt

SEQ ID NO: 57025 - DNA, 403 bp, Zea mays
acctgaggcatgcaagcttgtcgaagccattcttgcttccccgactgccacctccgcgacgccttctgatcccaggcgtcctgttgttcacgtcgcgacagcgtctgatccccggccgtcgctctcatcgaagctctgcgcccacgccacaatatgacgtcatggttgaacttctacgcgtagcgacattgacctcctcgctgcctggtgccgtagccgcgagtcgaattccctgcataacgccttgaagatccctcccccgtcgttgttgctctgacgatggtacaaaaaggcagaattacaagatacccgagcagctattgttaataacatgcacatcccttcgataaatttcttattataagtacacatttacgagttaaatgaaataaataatatttta

SEQ ID NO: 57026 - DNA, 444 bp, Zea mays
  unsure (1)..(444): unsure at all n locations
agcttgtgaaggttcttcatccccacatgtgctaagctgtgatgccacaaccagcccatgctagtcttagcaattaagcatgcatctagaccggcctcctcttttgcaaaatcaactaaataaagtttggcgtctaatacacccttaaaagctaatgaaccatcactttttctaaagacaaacacatctatatttgtaaatagacaattatatcccatattacataattgactaacagatagtaaattatattcaagagactcaactaaaaacacattaaagatagagtgctcatttgatattgcaatcttgcctaaacctttaccttgccttgggtcccatcaccgaatatgattgaatcttgggaattcttgttcttgacgtatgaggtgaacatcttcttctcccncgtcatatggtttgtgcattcgctgtcgataatcc

SEQ ID NO: 57027 - DNA, 406 bp, Zea mays
agcttgctttgagaatacgatgtcggtattaacctcttcaataccaagaaatctttcaataactcgacctcgtgcattaacatacctcaatataacagccatttgttcctttatagatgcatctcgggcctcatcaacaagaactgaaaagtttctacctccaatatcttcaataatagctttgctggttaaatcagcacaagctttgcacaagtctttttgaattgacggtgaagtcatttaattagtacggagcaaatgtgcaacatttttatccttgctcttataccattctatcatctctaaaaaaattcccttgttgctcgaggaagaggactcatcatgtccgcgaaatgcaagagccttgaagcaaagaaatctgataacttcaagtataacaatcata

SEQ ID NO: 57028 - DNA, 412 bp, Zea mays
  unsure (1)..(412): unsure at all n locations
ancttcgatacatggattaaatatttttttttactgggcgccaatagagtgatggcatatagagattctatggttatcatcaaccacataaacgacggatgggattgttcatgtgattcaatgggaaaatactgcgccgccgtccgaaaactggaagataaaatctagggtctggagtttcatcatatataaagagatcggaacacggcggccaatgtactgtctaaactcggatccggtcggactcatgtaccgtcctgggttttcgtgcaaaaaattctcagccgagtattttacggatcaatagaaaatgcaacatatagataaccccagtagactctgacattggaacagccgattttaagtatttaagaatgaaaagaaccagatgacagaactctgcaaaccattg

SEQ ID NO: 57029 - DNA, 437 bp, Zea mays
  unsure (1)..(437): unsure at all n locations
agctntatcaaatggacgtgaatatgcctttctcaacggaccaatcaaggaggaggtctatgttgagtaacctcacggctttgaagatagtgagtaccctaaccatgtatataaactctctaaggcgctttatgggctcaagcaagccccaagagcatggtatgaatgcctaagagattttcttatcgctaatggcttcaaagtcggaaaagccgatcctactctctttaccaaaacaattgcaaatgatttgtttgtatgccaaatttatgttgatgatatcatatttgggtctactaacaaatttacttgtgaggagtttagtaggattatggttcacaaattcgagatgtctatgatgggggagttgaagtatttcttatgatttcaagtcaagcaacttcaagagggcacattcattagcccaacaaagtaca

SEQ ID NO: 57030 - DNA, 447 bp, Zea mays
  unsure (1)..(447): unsure at all n locations
agcttcagctccatctatgttatggattgtctttgagtccgnccagtttccttcggcccttctagcagcctcctgacttccatgaatggaaataggtccttggtccgaaggtatcttcatgcaaagatatgctggatgaagaattgcttccaaggcattgagagtaccaccaccaatgattgcattgtaagggtattccatgtcaacaatgtcaaacacaacttgttcagtccttgtgttgttaatgaatccgaaggttactggcattgtgatttttccaagtgctacaatctgccttcctccgaagccacaaaggggatgtgtggcatcatggatcttgtcttcgggctctcgcatctgtctgaaggccttagcaaatatgatatccactgcgctgcctgtatcaaccaaaacattatgaaccacatatcctttgatcacacaaga

SEQ ID NO: 57031 - DNA, 432 bp, Zea mays
  unsure (1)..(432): unsure at all n locations
agctngaagaaggcctttcggctatgtctaatgatgatcttgctgatagccttgcgtacaacagtataaaggtatataaattaactttaaagctggaaatgaagtatttcaatgtcatgcttaattctttctttttctttgcagggcttgattcttagcaatgccttaagggcacaaaagagcgtctaagacgaaagctgtacaatagctctcaacaaccttcgctcacaggtaattgagctgagaaacgaaggtctatagaaagacaaaattntgatttcgttggtgagtaaaatgaaagaagacgaagctaaatacaatgctcaggccgatgcccaaaaagccgagatcgaagaacttctgaaaaagctcgctgaagctaatgaaaactatgcagttgcaaaagctatcaaagaaatcagtgaatggaca

SEQ ID NO: 57032 - DNA, 443 bp, Zea mays
agcttctctgttaaaagagcaaaataattctcttgtgactgcccccaattaaatgaaacacccttcttggtcaactcatgtaatgcgtcagtgatggtgctgaaatccttcacgaaacgacgataaaatcccgcaagtccaagaaaactccgtacttgtgtcaccgtcgatggcgttggccaactctgaatagcatgcaccttggcctcatcaacctcaataccatgtgtagtgacaacatagccaagaaacgatacgcgttcggtgcaaaaggtgcatctgtcaaggttagcaaataagcgcgcggcacgcaaagcatcaaaaacagcacgtagatggtcaagatgttcagataaacaagtgttgtagatcaagatatcatctaaataaaccaccacaaattttccaatatatgggcgcaaaacctcgttcatcaaacacat

SEQ ID NO: 57033 - DNA, 374 bp, Zea mays
  unsure (1)..(374): unsure at all n locations
agctacacaccaagagtttgctgtttaaatttgaatccatttggagcactagagctacagatccaacaataacaagcaaatcaatcttgttttctctatttaacatgttttaattaacacaccaataaaacattgaacaacagatgtgttttatatttttcttagctagagtatgacaacatctaaccaacaaaacaagtttcattatttttggatttttataattaaaactatggagagaagcaagttcatttattttctaaaccagtttttaaatacgaatttctacagaaaaacttttccactaaaacataccaacatatagatccactagntaaagcatttcataatgaagccaacaaaacaaattttac

SEQ ID NO: 57034 - DNA, 427 bp, Zea mays
  unsure (1)..(427): unsure at all n locations
agcttatgaagaatcttcatcccaacgtgtgctatncggcgatgccagagccaacccatgttagtcttagcaatcaagcaagtatcgagttcagctctattaaaatccactaagtctagctgaccctcgagtactcccttaaatgctactgaatcatcacttcttctaaagacagtaacacctatatccgtaaaaaggcagttgtaacccattttacataattgagaaacagaaagcaagttgtaatctaaagaatctacaagaaaaacctttgaccaaaccttgatttccatccctgaatgtgatagctcnttggggatcatagattttcttgtaggaagagaacatacttttcttccctgtcatgtggttggtgcacccgctatcaatgaatcaacctgagccccctgatgcatatacctacaaa

SEQ ID NO: 57035 - DNA, 372 bp, Zea mays
agcttctttaaagcaggattaagatttcctttttatgggatgattgctgatgttttgaagaagtttggtgtttaccttcatcagttgacccctaatgctatcgttagattaagcgtttatatttgggctcttcgtagccagggagtggaaccgttcggtgagggtttctgccgagtttatgaattacactaccagactaaagccagaggagatggtctacatgagaattttggctgctacaactttgcttattgcaagactacgaagtttccagtgataagctaccgaagcaaatggccagccggatggaagtctgaatgggtttatgttaaagttgatgaaaatgaagataaattggtctagagcccgcta

SEQ ID NO: 57036 - DNA, 418 bp, Zea mays
agcttgtagccgaagttgaaaagagttcatttttgctaaaatccttgaaggagcttcaggacaaatgtctaaacttcggcaaccggtgcgtgcaacggctgaagcgggtctttaactcagttggagctagttctgaaaaatttgaaccttcggttgaagaccaaccaggcaccttcaaacatattgagggcgaagttgatgcgcttgacgaagttatagctgggcacgacgacttctgtgccctgctagcttctcgcggcacaactgttgcttttatgaagactggttgcacgcatgggaagatcgtaaacaggccaaacttcaacctatcaccagcggatttaactgacatcctcagcctggcccgaagcattggaaatagatttataacacaaatctggacgaaggggggcaaaac

SEQ ID NO: 57037 - DNA, 382 bp, Zea mays
  unsure (1)..(382): unsure at all n locations
catgcaagcttgaaggacaattgaataagcaggctctagtatacttcgtctctgaagatcttagttcatcaaagaaaaactatatagaattggagaagatgctgtatgctgtcttaatggcctccaggaagcttcgacattattttcaagcataccatataattgttccttcatcacagcctttgaaggatattatgagaaacaaagaagctactggaaggattggaaagtgggctgcggaactcaacgagctcagcattgattatgtgcatagatcttcgattcagtcccaggcgctagcagactttatcgctgactggacgccatgggctcangaggaagaactaattcaagatgtcgaagctttgatagtgttctgcga

SEQ ID NO: 57038 - DNA, 456 bp, Zea mays
  unsure (1)..(456): unsure at all n locations
agcttaagagactntnttcacggatcaagctcgttacgaaaaacgatctagcaccgcgaaaggggctactgttgggtctatgcttcgtcgccgaaggtcttcaagggagaagcggctttcggctgaagctgtttgcatgagatggccgaaggttcctttccatgaagcttcgacagtataaaccgacttaaagatagaatgactttttaatccatgaaggtctgagtcaatgttgtaagcttttataaggggcatacttgtaattcctcacaggctgcgccctgtgcctataaatagtgaacagtattccgttgctgttcacgcattctagtattttgcaattgcatattctggaattctccctttngccaaggcagaggtattattgtattcagtaaatataatatgaattgtctatgatttatttaccccctttctgtaccttctattttatgg

SEQ ID NO: 57039 - DNA, 371 bp, Zea mays
  unsure (1)..(371): unsure at all n locations
agcttctcctggacaagtgctgcacttacctttgagtgcgaagctgccacatataataacaaaggagcccctggcgttggtggacttaatgttgttagatctatcaaatattgcttcagctcttcgaaggctttctgctggattggtccccattgaaagacttcggctgacttcagcacttcgaagaatggtaagtttctctctgctgatctagatatgaatctgttgagagatgacagccttcctgtcaatctttgagcccccttttttatacttggtggttccattcaaagtatagcttcgattttgcttggattagcctcaattccctttngtgaaactaggcaaccaagaaatttccccttctttac

SEQ ID NO: 57040 - DNA, 366 bp, Zea mays
  unsure (1)..(366): unsure at all n locations
caaaatcaactatgtgaataggtcaatctatataaaacaagtgtttatgtgactatataagtgtcattcagagagcaaatgacggatcacgttttctcttgtgacatcgatttggcacggctacactgtaaaggtgaacagtgaactgcagaaacccataataacaacaataataaatggtgcctcaatatcaaaatgtgtgcacaatgttcccataaaacgggcacaggaaaatggcagcagaggaaactcaagacgagagaacatgcagcacgcattcgcgaaattcaggtgtcagtggtaacaacaccacactgatatgcacaagtacagtttaatcttctacgtgcaccgattntattgcac

SEQ ID NO: 57041 - DNA, 399 bp, Zea mays
  unsure (1)..(399): unsure at all n locations
agcttccacgtgttcgacgcgagctggcattctgnggcgcgctcanagcacgcccgtgcgtgaacccccgcgcacccgcggccgcccgtgaccatgcccgcgccacggctataaaacccgccccagtgcttggctgccttccccgttacctcctccgtactacgccggactcgcccgagccagccattaactccagcgacctccccgcgacccgccagtgccgcccgagagcaaccaccgtggccaccccctctcccgtcctcctccgttcgatccaagccctcagggggcttcctggtgaagccgtgagtcttgctcaagcttgacccggggacccgcgtcaccggtttagcccaatcgtgctcaccggagttcaagaacccgccggcgcacgtggac

SEQ ID NO: 57042 - DNA, 421 bp, Zea mays
  unsure (1)..(421): unsure at all n locations
agcttgattaaagagatattagcgcaagtttatctagtctatgaggcgagctcttgtgaacacaaataatcacagagaggaacaacacaagagacacgcgattttttatcccatggttcgcccaagtaacacttgcctacttccacgttgtggcgtcccaatggacgagggttgcactcaacccctttcaagtgatctgatgatcaacttgaataccacggnctttttctttcaagtgttttcccgtttgcgaggaatctccacaatttggagcctctcgcccttacaatagatatcacaaagaaagcatatagtaaggttgggaagagcaacacacacaagactcaaatacgccgcacactcacgcacacaagtgaagactcgagctcaaatgaccacacacggagttcacgactcgaat

SEQ ID NO: 57043 - DNA, 450 bp, Zea mays
  unsure (1)..(450): unsure at all n locations
agcttatgaagattcttcattccaacatggtctagtcggcggggccagagccaacccatgttagtcttagaaattaagcaagtgtcgagttcagctctatcaaaatctaccaagtatagctgaccttctaacagtcccttaaatgctattgaatcatcacttcttctaaagacagtgatacctacatcagtaaaaagacaattgtagcccatttgacataattgagatacggaaagcaaattataatctaaagagtctacaagaaaaacattggaaatggaatggtcaggtgatatatcaattttacccaatcctttgaccaaaccttggtttctatccccgaatgtgatcgctctttgtggatcttggtttttctcggaagaggagaacatcttcttctccccagtcatgtggtntgtgcacccgctgtcgatgatccaacttgagccc

SEQ ID NO: 57044 - DNA, 388 bp, Zea mays
  unsure (1)..(388): unsure at all n locations
agcttcanataaagatgtgtaaatccaggattatataatttgtgactctatcagtgtcctatattgaaactgcattatgctttattagaattgaagttttatatgttgttagcgccctggcaaaagaatttttgcatgttgcagagctgcattttctctatgttgcagtactattctgcaggtcaatgaatcataaagtgcgggtctttctacaagtgtttattatactatactgtattgatttagatctgaacattttgcagttgcgaagagaatctcaaataaacaacctatcgagcttaaatttattcatcacatcctttttgggaggcttgaaaagggtatttagtatatttatgtggtgctttcgaactaactaatgcaactt

SEQ ID NO: 57045 - DNA, 395 bp, Zea mays
  unsure (1)..(395): unsure at all n locations
agcctagtgtttacaagaataaaagtgggatttttgttngttttctgatcttttatgcggatgacatattattgattgggaatgacattcctatgttggagtctgtcaaggctctactgaaaaagagttttctattaaggacttatgggaagccccatatatgttgggcataatgatctatatagataggtcgaagaggcttataagattaagtctaaatacatacattgacaaggtgttgaaacagttcaacatggaacagtccaagaaaagggttcttacctatgtgtcacacccggttttagaaggcaaaccgaatgcgaaccatgtacgtgcaagatcagttattacgtacacagcattacatacatggacatattcacacagtgctcaat

SEQ ID NO: 57046 - DNA, 459 bp, Zea mays
  unsure (1)..(459): unsure at all n locations
agcttgtggaggaccagatcatcgaagcatataagtttctggatgagaggtggtcacccaagttacgttgatgaagcaccagaagaccaatcaaggaaggaatccatgagggagttcacaagagaaaggtttgtgtgttggcatcgatgcttcctcaataagctagctgtcaagcgaaagctgaagcctgaagatgatctttgagtagtcagaattagcatttgcaatcggcaaccagatgctcctcaaagtccggattttgttgaagttccatctcctcgaagattctgcaaagtgaagatatgtagctgaagtaaagctatacccataacccttctgagttgaatctcgaggacgagaattcatttaagtggggtagaactgtagcatcccaaaaattcaaatctcgaaaatttctcaaactccctctaaattcanaatgaatntcaaatntcattt

SEQ ID NO: 57047 - DNA, 435 bp, Zea mays
  unsure (1)..(435): unsure at all n locations
agcttctaaagggagaacacgtgatatgttttactaatgttcaattcgaaaaagatagaccttgtgcagcttgtcaagcacgcaaacaggtgggaagctctcatctcaccaaaaatgtgatgacaacatcaagacctttggagatgctttacatggatctctttggacccgtcgcctattctaatataggaggaagtaagtatggtcttgttatagntgatgacttttcccgcttcactagggtattctttttgcaagataaatctgaaacccaagggacccttcagcgcttcctaatgagagctcaaaacgagtttgaactcaaggtgaaaaagataaggagcgacaatgggtccgagtttaagaaccttcaagtggacgagtaccttgaggatgaatggatcaagcacgagttctccgctccctacacaccac

SEQ ID NO: 57048 - DNA, 435 bp, Zea mays
  unsure (1)..(435): unsure at all n locations
acctgcngcatgcaagcttatcatcagatgggtattatatttgtgtattaaaatcctatgaagagatggcatctggtccaaggacgatgatgatgtgggagaggttctttttatacctttgtcctaattttttatgtgtggcattctacttcttgagaagttttgtggatctgtgttgtgtactagagacaatgtgcgtctaagacaacgagtctagcctctatctccaatggtgagtccgacggggctacattggcggaagaaagtgactattcataggattaggtggatagatataataccttttatacctttgtcttgattagtttggaactggattacagcgttaatccttgtttacattgtgggttgtgtgacctaaatggttaatactcattagatcctggtgtacgacatgtacagtatgctacgctt

SEQ ID NO: 57049 - DNA, 398 bp, Zea mays
agcttcggcctctctatttcttctctggccctcagcatccttgttcagctgcgcatagtcaggatattcgaagcccagtgcatcgagcactcggttcagccttcgcttcggacgggtaccgaaggctgctgtcatcagttgatcttcttttttcgaataatttccaagaatttcattacacatcacctcaactgtgtccagccactcttggcagggcttcttaaaatatttcttgaatttgaagtggtaaggaagccggacaagatccccttccttcttctccccctttaactttggcatttcccattttttcagagtagggaagactttgaatgctaaaaattcttgaaccagatccctggtaccaatatgctctgcaatgattctgaattcatcca

SEQ ID NO: 57050 - DNA, 452 bp, Zea mays
  unsure (1)..(452): unsure at all n locations
agcttgtgaagattcttcatcccaacatggtctagtcggcgatgccagagccaacccatattaatattagcaattaagcaagtatcgagttcagctttgttaaaatcaactaagtatagctgaccctctaatactcccttaaatgctactgaatcatcacttcttctaaagacagtaacacctatatatgtaaatagacagttgtagcccattttgcataattgagatacagaaagcaaattataatctaaagaatctacaagaaaaacattggaaatagaatggtcaggtgatatagcaattctaccaagtactttaaccaaaccttgatttccatccccgaatgtgatagctctntggggatcttcgttnttctcgtacgagaacattcttttctctcctatcatgtgattcatgcatccgctatcaaataatacaacttgagcccccgg

SEQ ID NO: 57051 - DNA, 449 bp, Zea mays
  unsure (1)..(449): unsure at all n locations
agctttaaagtcgctcctaaagggacgcattctaagttacgaagctccaaagtcattcctaaagggacacagagtaagttacgaatcttcaaagtcgttcctaagggaatgcagagataaaataccacctaaatcaaaggtgaagaagcttcaaagtcgttcctaaggggatgcagagcttaaatgccacctaagtaaaaggtgaagaagctccaaagtcgttcctaaggggatgtagagcttagctccaaaatctatcccaagggattgcagagctgtaataccacctaagtaaacggtgaagagactccaaagatattcctaaggggatgcagagtctgggtgtgtttttggcatatatttgcatatntcatcacatcatcttttgcatgcatacaaacatacattagacattcgtaggctcatcatcatgacataaagcatagaca

SEQ ID NO: 57052 - DNA, 420 bp, Zea mays
agcttaaagccatggtaagtagcatatgcaattaatatacaaattgactcaagcctagctacgggtgcataggtttcaccaaaatctaaaccttcgacttgtgaataacccttggccacaagtcgtgctttgttccttgtcaccacaccatgctcatcttgcttgttgcagaatacccacttggttcctataacactttggttaggacgtggaatcaaatgccatacctcattcctcgtgaagttgttgagcttctcttgcatcgccagcacccaatccgaatctttaagtgcatcctctaccctatgtggcccaatagaggaaacaaaagagtaatgttcacaaaaatgagcgactcgagatcgagtggttacccccttatgaatatcgccgaggatggtgttcacggcgtgatctctt

SEQ ID NO: 57053 - DNA, 400 bp, Zea mays
  unsure (1)..(400): unsure at all n locations
agcttgtgaagggtcttcatccccacatgtgctaagcggcgangccacagccagcccatgctagtcttagctattaagcatgcatctagaccggcctcttcttttgcaaaatcaactaaataaagtttgccgtctaatacacccttataagctagtgaaccatcacttcttctaaagacagacacatctacattcgtaaatagacagttataccccatatgacataattgactaacagatagtaaattatatccaagactctctactaaaaatacattagatatggagtgctcattagaaattgcaattttacctaaaccttttaccttgccttgattcccatcaccgaatacaattgaatcttgggaatctctattcttgacgtaggaggtgaacatct

SEQ ID NO: 57054 - DNA, 179 bp, Zea mays
agctttatgacagactagtagaagatgaagattgttcacagctagcatatggtggtcgattgtaagcttcccgccctaatcttcaatgctatttgcatggtaataacttctggtggcctcttatgggatattcttgaattggctctgtagtcacctcaatcggttttctttacatattc

SEQ ID NO: 57055 - DNA, 430 bp, Zea mays
agcttctctttctcagattgtacctactatggtgcagactagccaacaagagtatgtgaaagggaaatgtgcccttgggccatttctaagtattttggtgattgagtgccaacacaggtgcttaaatgtgaatctatacccttggatgaacaaagtgcaaatcaagagtaaaggtatgtttctaagccttagtacattgttttgaagactaatgtattgtgtctaagtgcttgaaacaggagaaatcgagtcaaagaaaaattggatgtgtacagccaagaggctgttcggtctggagcaccggactgtccggtggtgcaccggacagtgttccgtgcgccaagctgtctctgtcgaaaaggcgctctctggaatttgtcgaccgcgtacggctaatactcaccggactgtccggtgtgcacccggactg

SEQ ID NO: 57056 - DNA, 389 bp, Zea mays
agcttcggctatgactatatatttggcagcttaacagggcagtagcaatgaatgttgtggtaacttcacacatacccgtctgtttatatagtgccgcaggtgggaaggtgaatcatcaaagtctcccgcaccgaacaaacagtcacccacactcgctgaacggtgggccacagggtccgagaaggtgaatcgctggggcgtgcgtaattgctgcaagatggggccaccgcgcgcgacgattattttaatcgtttctcgccaacgagctcagggaaggtgttttttggatcttcggcgtcccgaagcctaaaagactttttcacggatcaagcacgttaagaaaaacgatctatcaccgcgaaggggctactgttgggggtatgcttcgt

SEQ ID NO: 57057 - DNA, 381 bp, Zea mays
agcttgtgaagattcttcattccaacatgggctattcgtcggtgccaaagccaacccaagttagtcttagcaactaagcaagtgtcgagttcagctctttcaaaatctaccaagtatagctgaccctctagcactcccttaaaagctattgaatcgtctcttcttctaaagacagtaacaccagtatcagtaaaaagacaggtggagcccattttacataattgggatacggaaagcaaattgtaatctaaagaatctacaagaaaaacattggaaatagaatggtcgggtgaaatagcaattttacccaaacccttgaccaacccttgagttccatccccaaatgtgatagctccgtgggggtctttgtttttcttatat

SEQ ID NO: 57058 - DNA, 462 bp, Zea mays
  unsure (1)..(462): unsure at all n locations
gcttccacaacagttcagagtagattgggtaatatcccgatctccgattattccgggtaccacaaatatattaggtatttgtagaaacccgttgtagcttaggggtgaacgattcttcagaacccgatatatttaattacctcgaattactcgacctgtatttcttgggtaatccaaacacccacccctagttgaaacagtctctcacaatgaagaagttcattcaacatggtttcatagataacatgaaaaaacaaaaacaatatgtctaagtagtagtgtaagtatgggttcatccctataaaacttatttcatctctttcttcattaattgcttggcatatcatctaaattgctggcatggcacaccatgtaatgagaataaaatctgtcgtggtttggaaactggggacgataagaaattgtgttggcangggtgctagtatggactcactccgaatg

SEQ ID NO: 57059 - DNA, 397 bp, Zea mays
gcttgccttcgcctcagtgtaccacccacaatccatctgcgtcgtggagcgcgccaatggtaaaattttcacagccgtcaagaagatgctcctcgacgacaagaagggcaagtgggctgacctattgcctgaagcggtctgggcactgaacactaccgagtgcagggcgactgggttcacccctttccgcctgctatatggatcggaggccatgaccccgcaagaaataaaacatggatcaccacggacaatcacttcagtcgttcccgacgtagacgagcctacttctaaggacctcatcgacggagaccgtgtcttcgccctatataccctaaacaaataccaagctcaaacaaaagcatggcgcgaccacacagtcgttctgagagaattcagc

SEQ ID NO: 57060 - DNA, 143 bp, Zea mays
aattttagcctctcaatttccttctgtgagctcttggaatgtgtcaatatttggtcctgcgaaatctagctcaaaacaaggaatgtttgtcgacggacaacaaaccttagcccatggttatatagtatcaatatgaacacctt

SEQ ID NO: 57061 - DNA, 391 bp, Zea mays
  unsure (1)..(391): unsure at all n locations
agcttaaagaccaactttagttttcttttctgtcaaagaagntattgaatcttgctaaacctgaccttgattcccaaaggccaacatatccttgatagtcttttctttagtcgggtaagacttgcgaaagtaccttcatactctaggctctttgaacccaagttgttataggtgaagagtctacagggttttgctgttttttgcaccaaagtgattctaaagtatgaggatgagacttaagtatgaactcgtggaagttgttaccttccaattatgaataagtggagcactcggcaccaataatgtaataagtgaaagtccctatgcccagacagatcttatgtccctaaaggggtaaaggcaatatattatactataaattaaatttact

SEQ ID NO: 57062 - DNA, 442 bp, Zea mays
  unsure (1)..(442): unsure at all n locations
agcttctaaagggagagcacattttatgactaaccaatgttcaatttgagaaagacagggtttgtagcgcatgccaagcaggaaagcaaagtggtacccaccatccacacaagaacataatgacgactgacaggccactggagctcctacatatggatctattcggcccgatcgcttacataagcatcggcgggagtaagtactgtctagttattgtggatgattattctcgcttcacttgggtgttctttttgcaggaaaaatctcatacccaaaaaacattaaagggattcttgagatgggctcaaaatgagttcgacttaaggatcaagaaaattagaagcgacaatgggacggagttcaagaactcacaaatttgaaggctttcttgaggagganggcatcaagcatgagttctcttttcctacacgccacacaaaat

SEQ ID NO: 57063 - DNA, 435 bp, Zea mays
  unsure (1)..(435): unsure at all n locations
ttctaaagggagaacacgttatttngtcttactaatgtaaccttcaaaaaagatagaccgtgtgcagctggtcaagcaggtaaacaggtgggaagctctcatcatgccaaaaatgtgatgacaacatcaagacccctggagttacttcatatggacctcttcggacccgtcgcctatctaagtataggaggaagtaagtatggtcttgctatagttgaagatttttcccgcttcacttgggtattctttttgcaggataaatatgaaacccaaaggaccctcaagcgctttctaaggagagcccacaacgagtgtgagctcaaagcgaaaaagataatgagcgacaatgggttcgaatacaacaacctttcagtagaggagtatcttgaggaggaacgaatcaatcccgagtttcttgttcctacacaccacaac

SEQ ID NO: 57064 - DNA, 412 bp, Zea mays
  unsure (1)..(412): unsure at all n locations
agcttggtgccgatggagaagcatanatccttgaagtcctggctgtcaaactatttgccattgtcgactgtgaactcagacgggacttcgaatcggcaaacaatgttttaccagaagaatttatgggcagtcttcgacgttattgtagataatgcccttgcctcgatccacttggtaaaatactcgacggcgacgaaggtgaacttgaggttcccttgagccgtgggtagtggcccgacaatatccagcccccagcgttgaagtggccatgtgtgggcaatcagctttgtgaattgcaaagggttgcccgaatggggagaaaacttctggcaggcttcgcacgacctcgagactcgattcgcgatgcagattatagcgggccagtagaaccctcgatggatcaccttggtag

SEQ ID NO: 57065 - DNA, 432 bp, Zea mays
agctcttccttgtcgtcatcaaccttgacatataaccactctgatttccagcctgctgcccacttgcttcggtagctaattacagggaactttgtagttttccgataggcaaagttatagcaaccaaaattatcgtgcaatccatcttttctagcctttgtttgataatgcagctcgtgaacccggcagaagctgtccgcaaatggttccactgcttggcttcggagtgcccagatataaacaataagcctaacgatagcgttaggggtcagctgatgaaaatagataccgaacctcttcaacacctctccaatgatcccatgtagggggaatcttagtccagcctttaaaaagctcttgaaaataacaatttcatctttctcccgggttggggtagtctcttctcccccgaagcgcaaaagcttcttctga

SEQ ID NO: 57066 - DNA, 328 bp, Zea mays
caacttttgccaacaaccgcacgggcaacattttgacgtaccgccacgtgatacagctcactatcatccgaacatacttggcgcacctccaaagtacccgctcagacgcgaaaacacagccgcgacaaatgcggtggaattcccctaaaaggtccgaacgttgcaacacctattactgaatcaactcccaattcatcaagctaggctacatgagatcttatgccagccatataatatctgtgttagatccgcttacccgctcatacacgacagatctcgtcatatgaccactaatcaggatgcacccgaccccaatcaataagctgat

SEQ ID NO: 57067 - DNA, 439 bp, Zea mays
  unsure (1)..(439): unsure at all n locations
agctngcattgcatatttaaatatcttgtattgcatctagggcttgtctaacctagttaagataaccgccaacaaagtgagtgaaaaagcttaacttgggctcaaacttgacaagtcctagcatttaagctttttggtacttaaaattttattcactatacaattgttggttcttgaaatatgcatgtggtactgcacttaggaggagtattcaaaactcaattcgttcatgaaacctctagtgcaaaaccgaaatgcaaatctcaccatttgactatttttctaaaaactatctagcctatggaaaaatattatgaaaaatatgagagaatatgtgagggtatcaatacctgtcccaacaggtgttcttttgtgtgcttataagttgggatnntggttggttcaaaatttcctagaaaatattaaaaatccctatgtc

SEQ ID NO: 57068 - DNA, 448 bp, Zea mays
agcttggaaattgaaactaggtgttcactacttagcatctatgtctaaatctttacacctagtacaaattacaacatgttctacacaagaattaaatttatttgctacttctaatttagcatttaaatcattgttgacactttttaaagtagaaatggtttcatgacaagtagatagttcaaaagaaagcatttcatttctcttaatctctaatgcaagtgatatttgtgcttctacaaatttgtcatgttcttcatacaacaaatcctcttgcttttctaaaagcctattcttatcattcaaggcatcaatcaattcattaattttatctatcttagatctatctaagcccttgaacaagcatgaataatctatgtcatcatcatcactagactcattatcactagaggaagcataagtgaagtcttgagtactcaccttcttcttc

SEQ ID NO: 57069 - DNA, 442 bp, Zea mays
  unsure (1)..(442): unsure at all n locations
agcttctaaagggagaacacgtgataggtttgactaacgtgcaatntgaaaaagatagaccttgtgcagcttgtcaagcaggtaaacaagtgggaggagcgcatcatagcaagaatgtgatgaccacatcaagacccctggagctgctacatatggacctcttcggacccgtcgcctatctgagcataggaggaagtaagtatggactagttattgttgatgacttttcccgcttcacttgggtattctttttgcaggataagtctgaaacccaagggaccctcaagcgcttcctaaggagagctcaaaatgagtttgagctcaaggtgaagaagataaggagcgacaacgggtccgaattcaagaatcttaagtggaggagttccttgaggaggaagggatcaagcacgagttctccgctccctacacacctcagccaaat

SEQ ID NO: 57070 - DNA, 439 bp, Zea mays
  unsure (1)..(439): unsure at all n locations
cagcttcatcatctgaaataaagttaccctgatagaacgagatgatctcagttctccagtcttcactatagacaggggatatgttgaggactgctctttcaagaagctcaaccgaaggtgcttttattgtttcgaaaaatactttcgaaggtaagggcagcccttgtgctgctgacttagctaataaatcagcatattcattttctccacgaggaatatttttaacaaaaaaaacccttcaaaggaagcctcaatcctttggaccgtgtctaaatatttttcaagcttcggatctcttgctttataacttttatcaatatgaccagaaataacctggaaatcaattntaagaaaccgccttctgattcccatcgcctttaacttccgaagacccaagagcaaacntcgtactcacaatattatttgccaactgaatcaa

SEQ ID NO: 57071 - DNA, 397 bp, Zea mays
  unsure (1)..(397): unsure at all n locations
agcttgatggtcaagtcaagaattatgtctttntatatattgtatctcgaggtcttagtatatcaaagaaaaactatacagaattagagaaggtgttatatgctgttttgatggcatccacgaagcttcggcattactttcaagcatacaatattggtgttccttcttcgcagccgttgaaggatattatgataaatagacaagctactgggcggattggaaaatgggctgcagagctcaatgaattttacattgattatgtgcatagatcttcgatccagtcccaggcgttagcagacttcattgctgactggacgccaggggctcaagatgaagaaacaaataaagatgccgaagtatggacagtggtttgcgatgggtcttggggaaccttcgg

SEQ ID NO: 57072 - DNA, 381 bp, Zea mays
agcttcgtgactgaaggtgctgcatcttggttgttgtactaagccatcgtcacaacagtggaagtgagttcaccggaggtgggcgccaatgtgggtcacttgttctcagatgctatgaaccaagaacaaggcaacacaagtgttaatggttaaaagaccttcgtccttcgaagcattatctctcttaagatataatgatcttcggacaaaggaaatgaaggatatatcttcatcatttccataagcaaggatgtaaataaggacatatgaaacgcaaagggaatataaataatcattttaaatcatcagattattcatattctttattatataaacatgaacaaatatcaatgatattaatattacttttgtacctttggc

SEQ ID NO: 57073 - DNA, 346 bp, Zea mays
agcttcaacaacttcaacactcttttttggaattgtgcctgaaaacttaattgtctccaagacgtctaatacaattaccattcttttccttgttggggtcactgatggccccttttggttatttgctggttcaatatttactgcaggactcaaaacttctaatgttgtttccttagtcggctttttcgcttcttccattttttctgaggatggtgcttcagccatctcttgaatttctggcaacaaagttggctgttcaacttccgtggccgaaaaagcttctccggtgaactcatgcacccaaactggttcaatataacgcgggcgaatgcgaaaaacctttatc

SEQ ID NO: 57074 - DNA, 297 bp, Zea mays
  unsure (1)..(297): unsure at all n locations
tcgattgatcgggagaaatagtcgggaggagatgtggggaaatctgggcatagcaatgatagagatgtggggcggtacaccgtggtatgtggggagggagtggttgctatcaacgtcgggaggagatgactcacgaaagaagaatctcgtgctttaaaagggtagagaaatgtgtcaaaagtctaatggagaaagtggctttggncaacccttatagcaactcttagagactagccacatcattgtataaatgtaaatttggcttatattataagaaaaacatattcaatagactct

SEQ ID NO: 57075 - DNA, 438 bp, Zea mays
  unsure (1)..(438): unsure at all n locations
agctaggtattcttttgaaggggttntgtgcatgctacggntgtccccttctcaagctttttcaccatattatcacggttatcttgagaagggtgagcatgatactttcccttcaaaagagttaagctccttctttgccttccaacttcttccttgagctctttattttcttgtgtgatagaaatatcactagttcctgaaatttctagctcaatggacgattggctttcttgagagcaacatttgttagcacatgataatatagtttctacttgaatacatgtgcatatgtgaggttggtatgatttcaaattagttaacacaacctcatgagccatttctaacatgatatgtgaatccataatattattatgagagcacacaagcatattatgtgtttcttgcaaagctagaatttcaatatttagcctctctatc

SEQ ID NO: 57076 - DNA, 374 bp, Zea mays
agcttcgcttgtggagatcgtgaccgtgatttcggaagccaaggaagctctgtcatcgaggttccttgactggttgagcggcggcgccaacgagaaccactacaacgtgtcgctagactatggcaccctcgtcgtgactgactggagccatgtgggcttcaacgaggtggactacgggttcggtgagccgagctacgtgttcaccctgaacgacgacgtgaacatcgtcccctccgttgtgtacctgaagccgcccaagccgaagcagggcatcatgctggtcctgcattgcgtggaatgccatcactctgccgtgttcggcgaggagtcgcagaaacatgcatagagtgagtgtgatctacagtgggaatctg

SEQ ID NO: 57077 - DNA, 442 bp, Zea mays
  unsure (1)..(442): unsure at all n locations
agcttctaaagggagagcacattttgggacttaccaatgttcattntgagaaagacagagtttgtggcgcatgtcaagcggggaagcaagttggtgcccatcatccacacaaaaacatcatgacgaccgacaggccgctcgaactactccacatggacctattcggcccgatagcttacataagcatcggcgggagtaagtattgtcttgtaattgtggatgattattctcgcttcacttgggtgttctttttgcaggaaaaatctcaaacccaagagaccttaaagggattcttgaaacgagctcaaaatgagttcggcttaaggatcaagaagattagaagcgacaacgggacgaagttcaagaactctcaaatagaaagttttcttgagtaggagggcatcaagcatgagttctcttctcctacacgccacaacaaaat

SEQ ID NO: 57078 - DNA, 446 bp, Zea mays
  unsure (1)..(446): unsure at all n locations
agctngcttcggtcgaggagtcttttatacctttaaacataaggcagnctcggtttgcgccaaggatttcacatgttcgcagcctcttctttccaagatagcggcaatccccctagcaccctagaacgcgcatatgtcctcatggccactcaaaatttcttcaaaagcttcggtctcgccgctgatctagtcgattggaccttcgggatcgcccagtacgaagttgccttcattcgaatatgcgtcgacgctagcgaaactagtcttaattntttccacacatttcatggagttttcataacatctttcttttgaagaccgaagttctgcagttggtttctcccaatggattttccggtaatcgctggcatctcggtcagcttcggcaatggcacactntaatttcgcttcagccagctgtttntgaagatcttcaatttcgcact

SEQ ID NO: 57079 - DNA, 381 bp, Zea mays
  unsure (1)..(381): unsure at all n locations
taatgaaagtgcattatatatcctgctcactatcatgaacataaaattacgaagattcatgctcagaaatctcattctggtcctcaccatgcttttatgcttaagaatgtggattctagatctaagcattccactcataataaaatgcctaaaaaggaaacttctactgcatcaaatgaacataacatttcatataaaacttttgaagcatcatatgagcttactaacaaatcaagcaaaatagttgccacatatgttggggggcaaacacaaaggatcaaagactagtagttgggtacccaatgtgctagtntctaaccggaaagacccaagactgtttggtaccttataacaatgccaaactgtgttgcatgttatgca

SEQ ID NO: 57080 - DNA, 342 bp, Zea mays
  unsure (1)..(342): unsure at all n locations
gcttgcttacttggtaagatgaccagtgcccttttnttctggttaccacagacgtcgtccgatttattggaactcatacatatactggtgtgtgcggaccactagacccccacagcttggggaggattcccatacttcataaccttcactgatgaatttagtagatatgggtatgtctacctaatgaaacacaagtgtgaatccttagaaaagttcaaagacgttcagaatgaagtagaatatcatcgtggcgacaaaattgaagctctgccaccatactcggtggtgaatatatgagtcatgatgttaccaatcatctaaagagttgtggaattgttccac

SEQ ID NO: 57081 - DNA, 403 bp, Zea mays
  unsure (1)..(403): unsure at all n locations
taagcttgctcctcaaccaaagaactggttctgagnttttctgttttttaangtaaccggcatgcagatatgtctgagtggatattctccttcagttggcacaatatcgaagaaaggagtgtctgactcatggagctctttgagtgcgactcccaagcctaagagtgtccggcggaaggtgacgttgatgctgctttccccgtccactaacaccttctataccatgctttctcggatcacccgatctactacgagtgggtatttgcctcgatgatcgaagttgagccattgatccgcccgagtgaaggtgatcgggtgttcggaccatcgataccgggcaggaggactggtggccgccaccagtatctgacggtcgttgagcttctgctgcctcttgctctct

SEQ ID NO: 57082 - DNA, 361 bp, Zea mays
gcagcatgcaagcccatactccgctgctgtggcggatgccagatatatcatctgtttggcataaccgaagtgcccgcctacaggcgccgagataaaaattcctgctcctgctctctgcagcttcaacgaagccgccaactacattcgccatacttctgcagtctctgggttatatggcacttgctgttcagtccactctaatacaacaacaactagtgcctgagctttgatggcagtgcgaaggcaaaactcgatatcatgagatcccaccttgcaagcgcacttggctattctgtcaatggccttcttgatatgaagaatatcccctattggaaaccagcgctactatgactttggggca

SEQ ID NO: 57083 - DNA, 488 bp, Zea mays
ctaagcttgacaacgaggagatggcgctcgtcatcaagagcgtacgcatattctctatcataggagggggaaagatgacaagccccgctccaagaaagattgctacacatgtggtaagcccggccattttattgcaaaatgtccactgtctagtgacagtgacaggggcgacgacaagaaggggagaagaaaggagaagataaggtactaccataagaagggcggtgatgcccatgtttgtcgcgagtgggactccgacgaaagctctagcgaatcctccttcgacgaggacgccgccaacatcgccgtcaccaagggacttcttttccccaacgtcggtcacaagtgcctcatggcaaaagacggcacaaagatgaaggttaaatccaaatcctccactaaatatgagtcctctagtgatgataatgctagtgatgaggacgataatttgcgtaccattttgcaacctacacatgtacaaaaggaaa

SEQ ID NO: 57084 - DNA, 385 bp, Zea mays
  unsure (1)..(385): unsure at all n locations
gcttattccagtgcacccaggaccacgaagaatacctttaggcgtatgtccgaaggttcctgcgtctgagggcacaggcaccaacagtgcccaatgaaattgtcattgaggccatgatcaagggacttcggccaggaccttcagctcaatactttgccaggaagcctcctcaaactntggagaagctgctccagaagatggacgagtatattcgagctgacaatgactttcgtcaaataagagaggaagcattcaggttctctgaaatgaccaggggatttggaggaagattccatccgaggcacgtcaggtcaattcacaactctactcaaagtgatgatagagggagtcaacagcaaaggccacagtactcctcgcaagcttc

SEQ ID NO: 57085 - DNA, 475 bp, Zea mays
acctataaaactcagctggatagaatatattggatagatagtaggacgagcacgatttacctatgacgtgaagccttaagaggatagaagggtagctaggtggctaagtgattaggccctaccggccaccttaaaggatgggagttcttccctatcccctttacattggtgaagtcgttcaggacgagcatgcatgcattcttaaattaaacaaatggatatttgagtaaagacttgaaaacaagatgataaccaactaagttccccagtactatttaatttaactagagaaaggctgagtcttattttcttgttctttttatatttctttttcttttacttacacttaatcatacacagatgacttcccatggatcctcagatgacggaaatgcactgtcccacactgacgggcttgcacgagagggctttccccgcattttgtgggatgtacttcaggtggccggatacatga

SEQ ID NO: 57086 - DNA, 367 bp, Zea mays
  unsure (1)..(367): unsure at all n locations
agctgcaactgcgctgattaccggggatcaatcttcttctattacatccagggggggctgccgcgaatcaattccaccacaccaccaaggaacctttttctctacttgaaaggcttttctcttcagctcccccatcttaaagttacaagtattacacacatanatcattatatatattttgacgcctaagcactatttgttgatactagacaaagacggagtacgagcgatctctgtagatttcccttgccttccccttcatcaaaaaagctccagcgtggcgttaatggccctttcgctcggctagaaaagggaactgggactcatggctgaaaggggggggtgcagataatacagcgtgtttatt

SEQ ID NO: 57087 - DNA, 446 bp, Zea mays
  unsure (1)..(446): unsure at all n locations
ctaagctgagaatangcccggaggagcagtgctcgaggagctcattcctctgtctcagatcacagtactaaaccaaactatgtcaatgcctactaccgcgctcatagctgcaaagccagatcaaggtgcttcggacttgtcagctttcccctangcgaggaacctgatgactgggctctggaattcaagcctgggtgagcagagctattttcggtcgcggtctatggatcctggcctgcgctttgcacggggttcacagatgcctttccaacatctncgttctgtcctgctgttttaagactatcagcagttactgggtgcctatggatatagccattgactttgccattcatgccagaaaacatcccaagcacttgggcgtgcgtcatatgaatgcctgatccatataacccttgccccgcgtactgacttcatggcgttgacat

SEQ ID NO: 57088 - DNA, 376 bp, Zea mays
aacttaagcagcgtcgctcaacttaacattgtatggcctcttctttgagaactgcttctcgcgaggtatccccttgcgtagctggtctaggtacaccctagcgctgataggtcttgaagaagaagatgattggtatgacttgctgattatcctgtgcatgcggttataatcccctatgctaccactttacaacttcactactctacttctggactattgagctaccactctcacaatcttcattaatctatcttaacttatccagtattatttattttacctatcccctggtgtgcttcctcctatagccagaactcccctctgagacactgtctcactgctaactacctgaccataagtaaccttacattggttc

SEQ ID NO: 57089 - DNA, 444 bp, Zea mays
tagccgcacaacagacaggagatggtgacggcgagtcccttattgacctccagcccaccgacgacaaagatcttttctctcgcaatgttatccacccaaccgagcacgaattctaacgccggcgacacgtattgctgtggaggagtgatcgaccgcggagaagtgctctgaacccaagcaggttactgtaccatcgactaaaccattcagttggcctgacagtctacgcttgaactccattttctctcaaatctttgtggcatcctgtccaaagatctgcatcaaagctatagagccacaatccaactataactttgctacatacgagtcctacacaaagtcattggatcctacttagaactaagcttgaaactcatggcatctgtctgtcagtcttgaatttagacataacaagactgacagcgcacctcgaggcgttaatat

SEQ ID NO: 57090 - DNA, 451 bp, Zea mays
  unsure (1)..(451): unsure at all n locations
gcttgtccaacgcagccacctgcatatctgttttgattataaaagaaaccggntaacatcacgacagccattcttgaaaatgcgtaatgttcactcgattttacaaaaatataaaattttaaaaaaacagtcagaagtcaaacaacgagactcactttagttttaaaacaagcatctctttgcttcaattggggacttgtcatattatgaataggcagacattgtgcgaagttattagtggtttcaaagacagctaagacaatatgctttccgacaaaaaaacaaaacaaaccattatcttgctaaaattacaaaaaagagtaatgttttgcataataaaagtgcataacagaattgaaactgtgtagaggtactttatctccttgttagcctgatcanagccaaatccatattctagataagcacgtattatcacaacacagaagttcaa

SEQ ID NO: 57091 - DNA, 367 bp, Zea mays
ctaagctgatcataattcaaatgtaacattaatcccaaaactatgtatatcaatagctagactacccaatagttcatttgtttgcaaggttagggcgaacaaaactatgtaacctattatgtcccatcaaatgagcctgactatgtcacagtgattatagagaatattattaggtaaagaagagtgatcaagggcacaacctgccttcaacgagctcctactcagaatcttcaacctgcaagcttcgtgttcctcggtcacttgctcatctactcgcaacaatacaaacaaacaatatagggacaaaaattaacattataccaaacatagaaacaatccatgtaataacattctacacgtcgcaacg

SEQ ID NO: 57092 - DNA, 426 bp, Zea mays
  unsure (1)..(426): unsure at all n locations
attgggcctggtcgaagccagagaccttctgggcttgcgacgtcgccgcggagctgcctcaccccgtgaacggcgcgcgccgactttcttaccgctggtatggcctcccttatggaattcgcgatgcgcgcctctctacttttctggagttcacgtgtgggttggggcatcaggccgaaatcgagcaggatctggcatgctcgccgccatgcggtgttttcgcgccgccgtgtctgggcatagtcagagggaagaagaggatactccaaccgttgatacggttgtcgacggtcgagatcgatggtagaatacccctcttcgcgcgcttttgatcgtggccgttgggtntgatcggacggatccggatggctgcgtctggttagaatccttcgccgtggatggtaatcaatcggccaccgatgcata

SEQ ID NO: 57093 - DNA, 428 bp, Zea mays
  unsure (1)..(428): unsure at all n locations
tgacgcacgagcgagtacaagtcaacgtgaacagttctgtggtactgttcatctatttataggcacatggcgtagcctgtgtgaaattacattcatgccctttatgttcactattgacttaagaacaatctgttcgggactggatagccttttcctccttaagtcggttcctttttctgctactaagccgaagctcccttgtgcgcagcttcggcgctggttcagccttcgttctgaccctgctctccatattgtgtacagcttcatcctgagtccgaaggttcctctacatatattatgcttgggaaacattgttaatcatgtttttaaggaccttcggaagacgaaggccccaacanggggatatcaaaatagcttatgtaacaccaagaaccaattagccgatatctntaccaagccactagatg

SEQ ID NO: 57094 - DNA, 394 bp, Zea mays
  unsure (1)..(394): unsure at all n locations
agcttgtcgccccgcaagctccctggtgtggatgttgtttatacccgnggggacggaaccggagttccgtttgtgatggcaccttgaatgtcggtgtcttgttcattgtggctgtcggggcctgaacatgtatgtattttnggcacagagccgctgttttttctcatttcgagcactaagactcgcctgtcggctatctgaaccgcttcaccaagcatgagtcgcctcgtgcaaaggtgacgagtgaggtatccgtatcccggaggcgtaggagtccctcggcttggttggccttgttgtccgaggcttctcttgcttagttaacgggaccctcggtcgctcttcgacgagccgaagccggaggtagcggtgtcagcacggacagaggcggagt

SEQ ID NO: 57095 - DNA, 394 bp, Zea mays
  unsure (1)..(394): unsure at all n locations
gacctataaaactcaagcttaacattgtgtatgagatgtgacccatgcctctccttctgtaaattctgntncaaggacacatttaagcttaatatgatcagattcaacttgaatctcagacctatggattcctcttggctttgctctctgtattatctttctattgtcctaagcctcctccatactttatcttttctttcttccctattttgaacatgttttggtatcattaatgaacaattactgaggggggtttctcctatagtatctttgtaaaaaaacattatctttgagaacacaactctataagaaattgtgaacaagtaaatggtgagtgggtctataagataatatactgatatagaaatttgagatgaaattatatctctagaat

SEQ ID NO: 57096 - DNA, 445 bp, Zea mays
  unsure (1)..(445): unsure at all n locations
agcttctnagggagaacacgtgatatgtttgtcttacgtgcaattcgaacaagatagaccttgtgcagcgttgtaagcaggtaaacaagtgggaggaacgcatcacaacaagaatgtgatgaccacatcaagacccctggagctgctacatatggacctcttcggacctgtcgcctatctaagcataggaggaagtaagtatggtctagttattattgatgacttttcccgcttcacttgggtattctttttgcaagataagtctgaaacccaaaggaccctcaagagctttctaaggagagctcataacgagtttgagctcaaggtgaagaagataaggagcgacaatgggtccgagttcaagaaccttcaagtggaagagtttcttgaggaggaanggatcaagcacgagttcttcgctccttacacaccacaacaaaatggt

SEQ ID NO: 57097 - DNA, 402 bp, Zea mays
  unsure (1)..(402): unsure at all n locations
tctacgggtcaccctanagcataccctacggggcatgcgctcgctactggtntctctctccccccaaatgcccgaattttttgtttttagccccttttgtgacaaaaatttacgtttggacccccacaaattttatttgcaagtttggacccgatgctcggcgcgttataaataaaaacacttctacatttgtgaatagacaattttatcccatattgtatatttgactaacagataacaaattatatctcagagattcgactaataacacattagatatagagtgcgtggattgaataacaatcttacctaaccctcttttcctgccttgtttccgatcaccgaaattattgaatcttggaatgcctgatttgatgaggaagtgacatcttttatccccgt

SEQ ID NO: 57098 - DNA, 394 bp, Zea mays
  unsure (1)..(394): unsure at all n locations
actcagctataagttctaatggaagtggcaccctttttttttgtaagccaggacgacaatctagaaggaatccatgtgggagttgcaccaaaaggttgcgtgtgacatcaatgcttcctcaataagctagctgcaagcaaaagctagaagcctgaagatgatctttgagtatccagaatcagcgtttgctatcggcaaccagatgctcctcaaaggccacattttgttgaagttccatctcctcgaagagtttgcacagcgaagatatgtagctgaagtaaagctatacccataacccttctaagccaaatcttgaggacgagatgtcctttaagtggngaagatttgtagcatcccaaatattgaaatattgaaatcttctcaaactcgctct

SEQ ID NO: 57099 - DNA, 384 bp, Zea mays
  unsure (1)..(384): unsure at all n locations
agcttcagaggacgaggccttcatgtttcataatttagttggagaaanattgtcaaaacccgaaatagaagagcttaaagagtatgccaaatcttgcgggtataaaccaggagcactcctcttcggaggtattgatgatgaaaaattagattgtatccgagatcaaactggagccaaagttatcggtactctgtcaaagagtatcggtttttcgaagctagaaacggacattagccgctaccgacgacaacatatcgttggtagtttattttattccaatttcaaggtgaactacttttcccttaacttttattgtttttaataatgaaaacatgtctaacgaaggttgttttcgtgcagagtatgctgttgagcaaagctttg

SEQ ID NO: 57100 - DNA, 305 bp, Zea mays
cccagggaagaattggctgaattgccgaaggctcctgcatcccggtcagtcgaaacacccaaacatggtgcagaagccaaaggataggcggtcaaagagccagagctaggggaaacggtagggctgccaaaaatcttgagcctgctagcggagccagaattgccgaaggtatcaaaggctcctacagtaactcccaaaaggagaaggatggctagcgtgctggacgccgtcctataatcgacaagggcatcgactcctgcccctgctaaagagactaccgaagctgctacagttcgcgttgaaat

SEQ ID NO: 57101 - DNA, 320 bp, Zea mays
  unsure (1)..(320): unsure at all n locations
ttggtcgngggtgctaacataagcaatttcaatatcccccctttggtggtgatctctcagaaagtgataccagatatctatgtgctttgtgcggctgtgttcgacaggattatccgccatgcggattgcactatcattgtcacataggagagggactntgctcaacttgtagccatagtccttaagggtttgcctcatncagagtaattgtgcacaacaatgtcctggcacaatatactcggcttcggtggtggataaagctactgaattttgtttctttgaagcccaagacactagggatctccccaaaaactgacaat

SEQ ID NO: 57102 - DNA, 507 bp, Zea mays
  unsure (1)..(507): unsure at all n locations
gacctataaaactaagccttanggatatggtgtgttggcttcaataccgaggagatatctaatgcacctgtggtatgttcttgtatgagtgcaatttaaaagtttatgttgtccagcacaacttatgcctcgtttcttttcattggttccaaacttccaaaagtatagtattatcatcaacactacaagttgcatgggttctcttacatattttattttgttataagtaacattgggtcagttaacaagaatatatgtataatattgtgatataaaacctgcaccatacctgttaattaatcgacgtcatgttgttcactagagatctgttttcttcggtctgcagcaaaccattcggtggagaccttggagaagggtttactcactcagttngtctattgctgcaacaagtcggggctggaccgttccaaagtaaatgtatatggatgcacgaatgcccttggacaccctttgggtgcaacacgtaatggaacatctacttacctg

SEQ ID NO: 57103 - DNA, 453 bp, Zea mays
  unsure (1)..(453): unsure at all n locations
ctgcagctgtataatggtaatgagaacgacctcacatttctctgcctgaaccagaagtgaggaaataaagatgtgacacatttccttttccgttacttaccctaggacttttaatctcgggacgagattcttttatggggggaaggatgtaacacccctggtgttactgtaactaaaacttgagcatggcatcataagcattggcattgcatatgtttgatacacctagagtgcattcactaggcaaaaatttcaaacaagttgtattgtataagtgttttgcanatagaacccttgataggaaacttaaccctaaatagggattaaaggggtcatacctaacccaagttgataaaacctatagactttanggaaatagttataaaatatcctcaaaataaaagtgaatcacatttgtacccctgggatactataaaccctaattgaaaccct

SEQ ID NO: 57104 - DNA, 434 bp, Zea mays
taacgacgatgagtgtgtctctcagctggaattgaaggagatgattctcgcgatgactaaagcttttaaaaaataccaggactctgcggcgacatcctatgagcagcttgatcgatgagttgataaacttgttacacgcatggatgtactggaggctcgtcccccaccaacaactccagccccatatcactctcatgtggacgacgacaacgatgacaacgatgtttatgcaccgctgccacaacgcttcgcatgtaatcgacaaggtatgggaggtaatggtagacgtcgtcatcataatcctgaaccagaccatgatccatttgctaagattaagttttctattccaccgttcatgggttcttatgatgccgaagcttacttagactgggagatgacagtagaacaaaaatttaattcccatcttgttcttg

SEQ ID NO: 57105 - DNA, 446 bp, Zea mays
  unsure (1)..(446): unsure at all n locations
gacctataaaactcagcttctnagggagaacacgtgatagggttgactaatgtacaattcatataagatagaccttgtgcagctggtcaggcaggtaaacaggtgggaggagcacatcacagcaagaatgtgatgaccacatcaagacccctcgagctgctacatatggacctcttcggactcgtcgcctatctaagcataggaggaagtaagtatggtttagttattggtgatgacttttcccgcttcacttgggtgttctttttgcaggataagtctgaaacccaagggaccctcaagcgcttcctcaggagagctcanaatgagtttgagctcaaggtgaagaagataatgagcgacaacgggtccgagttcaagaaccttcaagtggaggagttccttgaggaggaagggatcaagcacgagttctccgctccctacacacc

SEQ ID NO: 57106 - DNA, 385 bp, Zea mays
tctgcgatgcctctgggtgtgttgtgtctgcgagcgcacgagccggttctgttggtcgcttggccagcgaccttgcatgtggtgccaaagctgcttggggtcatccttgtcttctcctggtggaacaaccccttgggtaacagacttgcagaggtcggcaggtatggcgcaatacagatccacacacagcttgaagaagagcgacatctcggtgaggatgccacaggtgagctggtgggatggcgtgaggtacgagagctggtccggcaacgagaactggctgtggtccaaccctgccacctcgacaggctcgcccatggtcgtgcgcgtgcacgcgaaggagaagttgtcgacgaccatggtcatgggcgtgcgtgcgctagcg

SEQ ID NO: 57107 - DNA, 362 bp, Zea mays
  unsure (1)..(362): unsure at all n locations
tatgctctgcgccctacgtgtttagcccgtgctgcggtagatcacctggatggtcggcgggtttcgcgacgtccaaatgccgcccgcgggtgcggcatgtgctgaccgctgccgacaggaggttgaagataccggcgcgtcgtcgatctaaatttggacgacactgattaaggctatgtgatcgaagggcgctgcaccgttggatctgttgtagaaggataggattangtcttgggtacattaaaagcttgggcgttcatctgttatctagtggccacctgagtgtcccgtttgtgatctactttgtgtcgttggatctgcgatgggtggataagattagctccctggttcattaaatcatg

SEQ ID NO: 57108 - DNA, 240 bp, Zea mays
  unsure (1)..(240): unsure at all n locations
tgcttaatgcccataaaagattgtctaattttgttaatgtcatggcacccatggttcacgataatgaaggctacattntatatcctactaattatcatgagcacaaaattaggagaattcatgctaagaaacctcataacatctgtcaccatgcatttatgtataaaaatgaggcttctagctctaggcattctacacatgttaaaatgcctaaaaagaaaacgcatgctgcatcaaatg

SEQ ID NO: 57109 - DNA, 314 bp, Zea mays
ggatcttaatcaccgccgctgcagctgacattgctcctatggagccatgtcatctaaggcacgcatctccatataaacatgctccaacaaattaaaatttcattttctagttcatgctcggcaattttaacatttagtttagccatatgaacattttattggttaatcatatgcatgtgaacatggattgcctccacattaatatctctatattcctgcgcatagacacatgatcaatattggatgtagaaggttgcaagaattaattcatctatcttagatttagcactgcattttcatatctaagacacggg

SEQ ID NO: 57110 - DNA, 461 bp, Zea mays
cgtcacttgaaagacaattgccttaaaggaaagatattattttcagttcaccagtcttcactgtgtactggagaaatagtaagcactgctctctccatgagctcaaccgaaggtgcttttattgcttcaaaaaatacttcggagggaaggggaagcccctgagtcgctgatttggctagcaaatctgcatgctcattttcacctcttggaatattcttgatggaaaaaccttcgaaggaagctttcaaccttcggactgcatccagatatttttcaagcttcggatctcgtgccatgctgctattatccacatggccaacaataacttgagagtcagcctttaggatggcccttcttattcccatttgccttagtttccgaagccccaatagaagtgcttcgtactcagcaatattatttgtgcaactaacatccagttggactgcaaaacactgtttgac

SEQ ID NO: 57111 - DNA, 427 bp, Zea mays
gaactcaactgtgaaaaggccacggctgaattgtgtttcccaagcgttttaccatttgcgtaaagaagaaaagaaaaatgtacggcaagctaaggagctgtttcgtctgtgtaggaaatcggaattcacccagcaactttttttcattaatcaaatcttatataaaatatacaagaaattcggctagaaatcgtttcggatgtccttcgaatcgaaataattcttaattttttaatgctagaccctattgccataagtgattgatgagtatgtccaccctacgtgaaggttagccctcgatttagtttacataaaacaaaaaatatattattgtattcgctccaaattataagaatatttaaagatttgtacgcacataggcttttatatatatatggtatatatagttggtaaatcacttcatgct

SEQ ID NO: 57112 - DNA, 484 bp, Zea mays
  unsure (1)..(484): unsure at all n locations
tcgtgttcagttctggttattttgcttcagcttccgccaataaaccttcggttgcctggagctcaaagttctttttctcgaaagcatctgattgctcctttattttactttccaaattttcaattataacttcgtgcttcctatcttcaaaatcttgctgcatttgcaaggctttgctcaacagaatactctgcacgagaacaaccttcgttagacatgttttcattattagaaacaataaaagttaaggcaaaagtagttcaccttgaagttggaataaaataaactaccgacgatatgttgtcgtcggtagcggctgatgtctgtttctagcttcggaaagccgatactcttggacagagtanccgataacttggctccggttngatctcgaataccaatctaattttcatcatcaacgcctccaaagaggagtgctccangntcgtatccgcaggaatttgcatattctctaagctcttct

SEQ ID NO: 57113 - DNA, 366 bp, Zea mays
  unsure (1)..(366): unsure at all n locations
cagctttttgaggagaagaaagctgcgaatcctttcttatctgggnttatcgaatcaatggcgaaatctaatacagataagattactaaggagatactagagggcctatctgaagatactggtgacagtgacagttatgatgcagaaagtggaggcgaatattccgaggatcgaccctagagaccaagtcatgaaatttttggaaaatcaaccatcaagcaaagtcacctcgaaaacatgaggggaaggtactttcgggatatatctattgtgagggctggcggagacaacaacattcctgcgcctaaggagaacgaagttgtgattttccgaagcttcttcaaagctcggcttcggttcccactg

SEQ ID NO: 57114 - DNA, 433 bp, Zea mays
  unsure (1)..(433): unsure at all n locations
gctntaccctgcagtctggactataagntggttacattatgtgttctttatgcagtttgaccatttccagcatttgcatattaaggactctagggaaaagcctcgtagtgagaccctagccattcacctcgcaagtgaatacaggtctagctaacccgggctagaagggaatcgtgactcatgggtaaagatgtgccacctctgcgaagtgtaaaactgatatatcagccgtgctcacggntatgagcagcctggactcctcacatgataattgaacttgaagatggaaataaatcgagattcgatgatctgccaatggtttgcttaaagtggttcacttaagtggctttgatatactcgtatacctctgtttaatgggaatactcgggattcacacttattagtaagacaggtggtcgtaataaaatattga

SEQ ID NO: 57115 - DNA, 300 bp, Zea mays
  unsure (1)..(300): unsure at all n locations
gtactctatctaaaaagcaatgccatcttcatagctctatgccgaaagtatacgtacgttctagttggggaggcaaggatcacgagctaccctagcattatgggcatctctcgctcaatatactttacttaacagatttttttttctattttacactaccggaaacagttttttttgtcgagtgtctaaaacgttcagccaagccttagaactaacatgaatagttctatatggtagaactgaacctgtntcgtgaatccgtagccacgggtataacaaccaatttagtaattaattcta

SEQ ID NO: 57116 - DNA, 388 bp, Zea mays
agctcgcacacatagctcatttgaatacctttgatcatatctcctttatatgctatgactaatgagttttcaagtttatttcaaaccaagtcataagtatattgaaagggaattggagtcttcggcgaagacaaaggcttccactccgtaactcatacttcgccaccactccgagcaactctctcttcttcgggggagaaatgagcatcaaggaaaaggacttcatccttgggggagagagtaaaagctcaaacacaaaaggacttcgtcttttggtataatcttaactcacttatttatgaccaaaggggaagattgcacaccgagggctctaatgattccgtttttggcgattcatgccaaaaagggggagaaatgagcccaaagc

SEQ ID NO: 57117 - DNA, 408 bp, Zea mays
cctgcttgcatgctagcttctaagggagaacacgttatatgtcttgacttacagagccattcaagagaagatggactcttgcgcaggcctgtcacacatgttaacatacgggacgaacgcataacttcttgaaggtgatgaccacatcgagacccctgctgctgctacatatggacctttaagacctgtcagctatctcagcatatgaggaagtaagtatggactaattattattgatgactattcccgctctactagggtattctttttgcatgataattctgatacccctaggaccctcaagagctttcttatgagacatcaaaactagtttgatctcaccgcgataaatataatgagccactaagggtcctaagttaagaaccttcatgtgtgatagttcttgag

SEQ ID NO: 57118 - DNA, 283 bp, Zea mays
  unsure (1)..(283): unsure at all n locations
cggttcaccctanagcataccctacggtgcatgcgcgcgctactgttntctctcttcccccaaatgcccgaattttttgttcttagccccttttgtgacaaaaatttacgtttggacccccagaaattttatttgcaagtttggacccgatgctcgggcgcananntttggttgatataatactttgtaatataaccgacttatattgacattgtaccatggttcttaaagctgttagactacgcaaggcgtttgactcaccgccttgacagctaagctacac

SEQ ID NO: 57119 - DNA, 310 bp, Zea mays
  unsure (1)..(310): unsure at all n locations
cttcatccccacatgtgcttagcggcgatgccacaaccagcccatgctagtcttagctattaagcatgcatctagaccgggctcttcttttgcaaaatcaactaaataaagattgctgtctaatacacccttaanagctagtgaaccatcacttcttctaaagacagacacatctacatttgtaaatagacaggtatatcccatattgcataattgactcacagatagcagattatatccaagactctctactaaaaatacattagagatagaatgctcattagaaaatgcaattttacctaaccctttt

SEQ ID NO: 57120 - DNA, 328 bp, Zea mays
  unsure (1)..(328): unsure at all n locations
tatgactacatatagtcaaaaaaataatgggaccattaaatccacaggatgtcaacggttcttctattttattttcacttattgcgtgagttacacgtgaaatcactctaagtatccaaggttcaacataatcaatactttaccatttttatgtgagaacttgagattatcttctattaaatgtttattagtattgataatttacttgccatttcgtggtcgaacaagaatattntatgataactaattactgcattgtccgacaagtatccaatatccgatcacataatatccgtatccgacacttatccgctcggataaatatccg

SEQ ID NO: 57121 - DNA, 519 bp, Zea mays
  unsure (1)..(519): unsure at all n locations
tcgaccggatccttgagtcacctgcggcatgcaagctttgatcatgtatntacggtccanaaccaaatgatgcatttattactctggggcttctgagggggcttatgcgaaatcgtgaacagctcatgattctgcagtatcttgagaacttcttgaggctttagccagcgggtcttcactacctcttgtagcttgcctatgtctaagcctgtacagtgaaaccgtaggcagtcgtatttgttaacaagagatggcaagctacaacacgccgaacacatagcgactcanagttcacaattaaatagagtgtcacgtggatggttaaccaccattcaatttggtacatcaatcaatttccaaatatgaccaattggtatacaaccgtacccgtaaccactccgggtggcgggcgggtggtttcactcagatagaaataaagaagacagagacggaaaagaacttnttttntaatgttctcgcagcctagtaacttcgtttcttcgatcaagaagtactaac

SEQ ID NO: 57122 - DNA, 481 bp, Zea mays
  unsure (1)..(481): unsure at all n locations
ntngacatcgttgtgaattagactcaaagctaccacaagaaccttattaaatcactcgatctaagttctcttagatagtttttgaattttatacatgaggtacctcgggtgcggtagtaccacatcaatacccaaaactgtcgtggcacggtgatcctcacgcaagcacgagagtatcgcgtctgattctaactgttatattaagtttgttttatatgtctattgaaccatggttcttaaggcggtaagacgaggcaaggcgttggaccaccgcctggacgcctaggcaacacctagccgcttactaaggagagcaaggggacaccttaccaattagagaaatagaagaacaacatagatgaggaagagaaagcaccttaccaattagagaaatagaagaacaacatatatgaggaagaaaaaggaanaggaagggctatgagatgtataagagatggcctatcccatcagctagcccata

SEQ ID NO: 57123 - DNA, 472 bp, Zea mays
gcaagctgctaaaagtaaaacacatcttggcactatctaatttcattctgagaaagacagggtctgaagcgcatgtcaagcaaggaagcaagatggagatcatcatccacacaagaacatcatgttgactgacaggccacatgagctgctacacatggacctattctggcgtagctgaataaacatggcgggagtaatactgctattattgagatgaaattctcgctcacttgggtgttcatgtggcaagaataaacacacaccctagataccttatatggattcttgagacatgctaagaatgaattctgcttaaggatcaagaaaattataagcgacaacgggacggagttcaagaactcacaaatcgaatgctttcttgaggaggagggcatcaagcatgagttctcttctccctacacgccacaacaaaatggtgtagtggagaggaagaatagactctattggacat

SEQ ID NO: 57124 - DNA, 464 bp, Zea mays
  unsure (1)..(464): unsure at all n locations
tgtgaagattcttcatcccaacatgggctagtcgacgatgttatatttttcccatattagtcttagcaattaaacaagtatcgagttcagctctgttaatatcaactaagtatagctggccctctaatactcccttaaatgctactaaatcatcacttcttctaaagacagtaacacctatatctgtaaatagacagttgtagcccattttgcataattgagatacagaaagcaagttataatctatagaatctacaagaaaaacattggaaatggaatggtcaggtgatatagcaattctaccaagttctttgaccaaaccttgattcccatccccgaatgtaatagctcttttggggtcttcgttnttctcgtaggaggagaacattcttttctcccctgtcatgtggtttgtgcatccgctatcaattatccaacttgagccccccgatgcataaacctgc

SEQ ID NO: 57125 - DNA, 314 bp, Zea mays
aatatcccttgggcacaaatcgggctatgttccttggcaccacaccatgctcatctagttgggtgaggaagacccacttggttgctacaacatttcggctaggacctgagactagatgtcctacctcatgccccgtgaagatgcagagctcctcttgtatcgccagctcccattcagaaacctgataggcttactgttctctgtgaagctcaatataagacacacacgaatactgttcacaaaaatgatcaaccccacatctagtgggtacgcccttatgaatatcgccgaggatggcggtcacagggtgatcc

SEQ ID NO: 57126 - DNA, 452 bp, Zea mays
aaaactaagcttgcacatccagtttgtcatttacttgttaaccaaacgtttcttaatgctccaatgtcattggatctggactgcttcagatcagatccgagcagtgacaaacttctgtaatccagacaccgctggtcgttttttttcacctttcaccagtgccagctattcataattcacattttgttcaattgttacctccatcctgcaagacccacatcactacattcataattctgatgatggaactagcaacatcgtcgtcagtagtaacattggaagcagtatccagcagtccgatggatctctctgatttttttgtcacctgagctagcagcactgtatctgtcagaaacattagcattaatatcaagcaatgcaatcgaactatgatatttaccatctgagcgagcagaagctgtgatctgaaccaacaacatcattgcacgcat

SEQ ID NO: 57127 - DNA, 432 bp, Zea mays
  unsure (1)..(432): unsure at all n locations
actatgtggaaacgggattgagtcgctttggttntaatgactgtgatcctgctccaacaccttatgaccctagcatgctattgagaaagaatcggagaatagcaagggatcaattgacatactcccagatcatnggctcgctcatgtaccttgcaagtgcaacaaggccagacatctcttatgctgtgagtaagctgagtcggtttgtgtcgaaaccaggagatgatcactggcgtgctcttgagagagtgttgcgatatntgaaaggtactatgacatacgatattcattatactggaaacccaaaagtgttggaagactattgtgatgccaactggatttctgatcctgatgagctttatgccacaagcggatattgtgtttctgttggaggtggcgcctgttcctagaagtcttgcaagcagactatct

SEQ ID NO: 57128 - DNA, 490 bp, Zea mays
  unsure (1)..(490): unsure at all n locations
tcttcccttctctgacaganatcattatcagcccggatgtactcattcatcttctaaagaagcttctctagggtctgagagggtttcctggcaaagtattgagtcgtaagtcctggtcgaaaccctttgatcatggcctcaatgacaatttcattgggcactgtgggtgcttgtgctctcagacgcaagaaccttcggacatacgcctgaagatattcttcgtggtcctgcgtgcattggaacagagcctgagcagtgaccggcttcgtctgaaatccttggaaactggtgattagcatatccttcaacttctgccatgatgtgattgttcctggccgaagagaagagtaccacgtttgtgcgacattcttgactgccatgacgaaggattntgccatgactacagtgttgcccccatatgaagatatggntgcttcatagctcattagaaactgcttcgggttngaatgcccatcatacatanggagct

SEQ ID NO: 57129 - DNA, 290 bp, Zea mays
tggacgcgtcgagtggatgtctacttggagtagactcctccttcttttcttccgtcggcttgaatgcgacgggctgagcttcagatgtggtgggtacgtcaagctcgttgatctttcttgagccttcgatcatgcattcaacacttacgaaatgcccgataacttgctcggaggtcattatagtgtatctaggattaccacgaattaattgaacttgagtagggttaaggaaaataagcgatcttataataaccttaaccacctcgcggtcgtcccactttatgctcccg

SEQ ID NO: 57130 - DNA, 471 bp, Zea mays
agcttgagttattttgttacagaccatatgactttattgtgtgcacagtaataatattatacaaaccatgggaggcacatactccttccggatagctataagcaaaagaacctaagtggaggaccgagtcctcccgcacttcagacttgtttttcctcatttaggaccaccttgaaacaaaagcaacaaaaatttgtcgcttcctcacctaaaaacaacaaagggataaaccctgagtatgggatactcagcaagtcttacccgactaaagaaaagactctcaagggtatgctggaaaaatatgagtcaaggagagtgtttagcaaaaatcaacttatacttttgcagaagtagcttactaaagtgagtccttactttcaatcttctaacgccatattaagtattaatagactctatttgcatctagtctaatttcacatcacatcaagacaacatcatttttatccatcg

SEQ ID NO: 57131 - DNA, 453 bp, Zea mays
cttcatccccacatgtgctaagcggtgatgtcacatccagcccatgcaagtcttagccattaagcatgcatctagaccggcctcttcttttgcaaaatcaactaaataaagtttgccgtctaatacacccttaaaagctagtgaaccatcacttcttctaaagacagacacatctatatttgtaaacagacaattataccccatatgacataattgactcacagatagcagattatatccaagagactcaactaaaaacacattagatatggagtgctcattagaaattgcaattttacctaaaccttttaccttgccttgattcccatcaccgaatataattgaatcttgggaatctttattcttgacgtaggaagtgaacatcttcttcttccctgtcatatggattgtgcatacgctggcgatgatacaacttgaaccaccggatgcata

SEQ ID NO: 57132 - DNA, 407 bp, Zea mays
agcttctacgcggcctaaccactggtatgtatcttaccccatcttcggtgttcacttagcttcgcgtagccctagctaagattaaagaagatgcactggaatcctagatcactgctcgccggcgatggcgtcaccgtatggcgtatgcgccgccgcgtctggctttggggaaggaaacagtgtgtctgttggattcacgacgtacggatgaaattagatctgggccgttggtagtttgatgaggggctgagattagatcgcgctggtttaaaatctctatcgttgataggaaattcgatggccaggatcgcataccgcttcgattgggggggattgttaatatggtgcgttggatcaaaatccatgggtcggcatacaaccatacctcctcggctgcataatcttac

SEQ ID NO: 57133 - DNA, 439 bp, Zea mays
  unsure (1)..(439): unsure at all n locations
tccaatcctctccaagtcccacaattaagacaattgatcaatagtgattagtgacatgagagagtgagatttgtgtttcatttgtagctcttggtgcttggttgtgctttcttcatctccttataaactctctaagcgattgtaaagctagcaagagacacctaagtgtgtggtgatccttacggggtctttgtttcctatgagattaagaagaagcactcaaccggtctatgtgaccgattgagagagagaaagggttgaaaaagacctaacctttgtggcctcctcaatggggagtaggttcattggaacctaacctcgggaaacaaatcgtcgtgttcatttgtgttggtcatcaccattcgatttgtttcttccctctccnctctctctaanaggactcttgctcacaatccttctgagttagctcccaaattta

SEQ ID NO: 57134 - DNA, 436 bp, Zea mays
gcttgtagcggatgggtttagcgatgggccttttgacgccgactacactaggaaggaaggcctacgacgagctcttcgaaattgggcaggatgcgtccaaactccaactccaatgtgaagcactgcgagctcttctaagactaacacgggccgcgcacgcagcaatggagacgcaataccacttgttggtagggatgaaagtatgatgggaaatcctgaaccgaccgttatcatataaccgattttgttagttttgccccgatcgatttcgaacccgatgtaaaaaatgaaaacggaacgaaaacgggatatacaaaacggtaaacagaaacgatagagttgttttcccgaccgtttaaccgggatcccattttaatcgggatgatcccgtttgtaccgattttgtattcgggacacttcatatggctgctcaatc

SEQ ID NO: 57135 - DNA, 434 bp, Zea mays
gcttctaaaggatagcacatcttatgactaacaaactgttcttttttataaagacacgatttatagtgcatgtcaagcatggaagcaagttggagtgcatcatccacacaagaacatcatgacgactgataggccgctggagctactccacatggatctattcgggccgatcgcttacataagcatcgacgggagtaagtattgtcttgttattgtggatgattattctcgcttcacttgggtattctttttgtaggaaaatctcaaacccaagagaccttatagagatttttgagaagggatcacaatgagttcggattaagaatcaacaagattataagcgacaatggaacagaattctagaactctcaattgaacgatttcttgaggaggagggcatcaagcatgagttctcttctctctacacacctcaa

SEQ ID NO: 57136 - DNA, 261 bp, Zea mays
  unsure (1)..(261): unsure at all n locations
ttttgtcgaatgctttagagaacagcattatatcatcaacattatgccttagaggtcagcatacatttntgtcttcgagatcgagcacgcgaactgcctgtatcttgttaagccttggcatttaattgatctacgactgactggacgttcggtagatgacctttggctagtcttcatatcacttcatgcttcaatgcctctgttgattagacttgtacctcatcggctatatttggctatcatctgagctctggtgatatc

SEQ ID NO: 57137 - DNA, 465 bp, Zea mays
  unsure (1)..(465): unsure at all n locations
ctcagcttaccgtgaccatnaggctatcccgaggtcggactgtgtttgtatggctagggtggccggtctacggtggttgggtctctggcggccgctggcacgccgtgcgcagagcgatcgccggtgaacttgcgcttcagcggtgtggagagcgagcgggggtgtacggtcaatgcctgagtcggctttataggcgcgggcgccggcacagggtcttgcttggcgcggcacggcctgcgcggtgcctattgccggggcgtgctctggcgtcgccagggcgcggcgaacacttggccatttctttctacccgtgttctagcccttgttgtgcagccaaacgtgcgaatctcgccataagacttttgtgagatttcttccctgcacctatggctacctagttcatgtgagttccaacggaagatatgctctatctcgagagatatgctggcgccaagttgggtctgt

SEQ ID NO: 57138 - DNA, 274 bp, Zea mays
  unsure (1)..(274): unsure at all n locations
acagcatgttcgggacctttatcgcgagtcactgaaaacatatacgtacgttcacttgttatgggttgataccctaaattctaatgctactgtggtgatctgtatgcaaatgcatctttactttctattctcttaaaaatcagctaaatattctcttgtctagaaatttctctgacattaataaataattgtactcttgaaaccagtagcggacccagctgctacacttanggtgtgtcacgaaccactatgctaactaactttatatgatctt

SEQ ID NO: 57139 - DNA, 354 bp, Zea mays
tgggagccgaagcaactccagctctgaatgaagccattatctcttatagcggaagcgagttcaccgcaggtgggcgccaaagttggtgacttgttctcaaatgcttcgatataagaacaaggcaacacaaagatgtgtagtatataatgcccttcgcccgctgaagcattatttcccccacgaattaatgagcttctgaccaaggtcataagtaaaggatcacgaagttttcaccctccagatcatatttgtaagacaacaacgaggaatgaaatatatagcacaaaatatattcacatggtttattatatgaatatacacgcattaaaacataatatttatgcacacctatac

SEQ ID NO: 57140 - DNA, 454 bp, Zea mays
  unsure (1)..(454): unsure at all n locations
ntcctttaaccctgaaacgcgatacacccttcactgggtttcctttagataaacgtaatctcccactagaaagaatatgggcattcgtccgttgtctgcataactcttctgatgggtttgagctttcttcagattatggattattctctgaaccttttcttcggtttcttttaccacgtcacgcctgaagaagtacctttcacctggttctgtaacaccccaggttccacaaacaacccagaatgctactgaactacacttctgacgtccatatataaaatttcagcagcataccctttgcaagattgcatatataaggtggcaacaggttatatacatatatcatgatccaaaacatactatgtattattaattggctagcacagcaagataaacgtactgacctgaactgactaagcagtgtgcacgtctatataaagacgaacttctttga

SEQ ID NO: 57141 - DNA, 239 bp, Zea mays
atgaccagtgttgttaccagttgtttagaactatccttgaggtacaaacggtttttaaccttcctttcaaggcactaacgggacttttttatcaacgcatttaccctccaggcccccactgggttttgtttatataggttgaaaaaatggaaaaaacattaaacaactcaaaccacaacttttttcctattgtgaggattgactgaagcttattagatggccaatgtgcctcttgatga

SEQ ID NO: 57142 - DNA, 402 bp, Zea mays
  unsure (1)..(402): unsure at all n locations
tgactntagttgcacaaataatattgctgagtatgaagcacttctgttgnggcttcgaaaattaagggcaatgggaataagaagggccatcctgaaaactgattcccaagtcatttccggccatgtagacaaaagtagcaaggcaagagatccaaagcttgaaaaatatctggatacagttcgaaggttggaggcttctttcaaaggtttttctgtcaagaatattctaaggggtgaaaatgagcatgcagatctgctagccaaatcagcggctcaggggcttcctctaccttcggaagtattttttgaaacaataaaggcaccttctgttgaactcatggagagagcagtgcttgccatttctctagtacatagtgaagaatggaggaactgaaatatatc

SEQ ID NO: 57143 - DNA, 487 bp, Zea mays
  unsure (1)..(487): unsure at all n locations
agcttcttcaccatgtgatcacggttatcttgagaagggtgggcaatgcatttcccttttagttgtgtcaagctcttctttagcctctcattttcttctttgagcttttgatatgaatcctcatttgttcctgcaaattctagctcanaggaagatttgcttgtcgacaaacaacaagcattagcacatggtaatatagtatcaatttgaacccatgtgcacgagtgagggttgtgggattntaagttttctatcacaacctcatgagcaatgtttaatatgatatgatcatccataagattttcatgagaacatagaagcatatcatatttttcttgaaaagctagaatttcaacttttagctnttctacttggtccttaagcaaggtattcctatntactaattgagccgatacaatgtaaagcgtatcatgctcaattgaaacagtttcatacctttggaccagatcaacatgagggcacttta

SEQ ID NO: 57144 - DNA, 470 bp, Zea mays
  unsure (1)..(470): unsure at all n locations
tcggaattacaaaccgacttaaagatataatgaccttctagtccataagagtccgagtcattgttgtaaacttttacgaggggtacgattgtaattcctcacgggctgtgtcctgtgcctataaatagtgaacaatattcctttactgttcacgcatccctgtaattgcaactgcatcactcggaaattaccctttgtcaaggcaaatgtataaatgtgtctaaatattatgtttgaacatcttaaatttatagtatataaatgatgctatttatctccaatttacttgtctttaatgtcttatgtcttatgttattttatattatctttgtgagttgaattatgaaggtataaccttcgtaattctagcattataaccttcgttcgaaacacatcctcggaaaaataatgcttcagcggacgaaaggcattgaaatntaacattntatgttgccttggtcttaattcat

SEQ ID NO: 57145 - DNA, 409 bp, Zea mays
agcttgttcttcaccgcttcggcatgatgaatttttctcttctatgtacacattctgagtcaggtcatccacaacctctcgaggtgagcaacagactctgatcaccactaaagcatctaggtgatgtcgattaccaagagtaatattggtcacctattttcattcctaatgaggactcaagaatggcaacacaattagaaacaaattgctcctttccttccttcattctatctatgagagaagaataaaggaagaggattgttaataaaaacctttggataatgaaataattgtacattggagaaggggatcttaactataactggtttattatctttttcttggtcacaactaaatacgagtatgccttcgtgaatcgagacaacagtacaaatgtatgtgtccggga

SEQ ID NO: 57146 - DNA, 462 bp, Zea mays
  unsure (1)..(462): unsure at all n locations
tctaatgttctatatttttagatggggtcgatacaacaaatttatgtttaaccaacgttctacagcagcaggtaaatatttgcttctaatggaactagctattatttttgaacttttgaatcttacttcgtatatttttggtttgtctgtccatgattcaattgggcttctaatggaactagctattatttttgaactttgtcaatcttcaattctgatgatgcctagctgcctccttagctctgcaaaacggatccttcccagtggttttgttagtatatgccagctgttcttcagaactcacatgactgatttccagtctccctcgctaacacactccctgatgtagngatatcttgtatcaatctgcttactcctctcatgataaactggattttactcagctattgagcagatctgttgtcatttcggacgttgaatttcttcacttcagtgcccaac

SEQ ID NO: 57147 - DNA, 452 bp, Zea mays
  unsure (1)..(452): unsure at all n locations
atcattgatcttattgggatntcttttgcataccttcaagtgttttcctaatgcagatgtaccattgacttttgcctcacacttgataataatcttgcaatagttgcaccttgcttccttcacaacactagaatctttgtctatgatcttggtgaaactctgccatacctctgatctgggtgccatagcttttcttttcttcacctctttctctgcaggtgcctctgcaatacctttctcgggttcttgagttgagttgtctcgcatcggaacattctcaatcaattctagttgaggcattctttcttcaggttgtgccatctgcaaatgagatgtccttaagcaacattggaacaacattcatatttgaaacatcattcatctaagcaacatttgcgaagttgaacaacattcatatntgcatgcaaattgccaaattggaatagcgagct

SEQ ID NO: 57148 - DNA, 439 bp, Zea mays
  unsure (1)..(439): unsure at all n locations
acatgtgctaaacgacgatgttccagttatcccatgctaggcttagcaaatatgcatgcatctagaccggcctgctcttttgcaaaatcaactaaataaaagttgccggctagtacacccttaaaagctaatgaaccatcacttcttctaaagacagacacatctacatttgtaaataaacagatatatcccatattacacagttgactcacagacaacaagttatatccaagtgactcaactaagaacacattagaaatagagtgctcggatgaaatagcagattttcctaaccctttcaccttgccttggttcccatcaccgaatatgattgaatcttgtggatccttggtcttgacgtaggaagagaacatcctctntcccccgtcatgtgggttgtgcatacgctggcgataatccatcttgagccccggatgca

SEQ ID NO: 57149 - DNA, 452 bp, Zea mays
  unsure (1)..(452): unsure at all n locations
gcttatgacgaggccgcggggatggtgtatgttatctatctttaacgccgaagcatgcacagatgcaggagtggaagcagccgaactggaatgatgatgaagtgcaagggtagacattttanaaccgaaacctgaattcgaatagaccgaattatcgaactatattgtatttcgggtccgatttatatatatttgctatatctcacgatatggtgtcacgtcctatacttttatattccaacaaccctatatataacataacgctttaatatgcgatgcgattattatgtgacttatgaacttattaactaaaaatcatgatatcatatgtatatatgtatgttattntcttagtcacttgttgaataatagtactttcaattaattaattatggtatatattataataaaagataataggctctactatttcggtctatttaatgaaccga

SEQ ID NO: 57150 - DNA, 460 bp, Zea mays
  unsure (1)..(460): unsure at all n locations
ttaccaaatggacgtgaanagtgccttcctcaatggacctatctttgaagaagtacataagccaactccagactttgaagatagtgagtaccctaaccatgtttacaaactctctaaggcgctttatgggctcaagcaagctccaagagcatggtatgaatgcctaagagattatcttatcgctaatggcttcaaagtcggaaaagccgatcctactctctttactaaaactattgaaaatgaattgtttgtatgccaaatctatgttgatgatatcatatttgggtctactaacaagtctacttgtgaagagtttagtacgataatggttcacacattctagatgtcgatgatggaggagttgaagcatttcttacgatttcatgtcangcaactctaagagggcacctttcttagccanacgaagtacattcaagacatactcaccaagtttgggatg

SEQ ID NO: 57151 - DNA, 424 bp, Zea mays
  unsure (1)..(424): unsure at all n locations
ggaacttaagtcagctgagctgtcacttggtacacatgnatctcttttatctttcatccgcagatagatggtcagatagaaagaactaacctgatcctagaagatatgctgagagcctgtgtgttgcaagataagttaggatgggacaagagactaccttatgcagaattctcctacaacaacagttattaggccagtttgaagatgtcaccgtttcatgcactttatggaaggagttgcagaactccattgcactgggatcaagctagagaacatcaagtgtgtgggccctgacatttgctcgaagccaaagaacacatgaagatggttcgggagaatatgaagatagtgcagccaatgctgcaaagctatgcatacattagaagagagctgagctctcatgtgggagatattgtctacctga

SEQ ID NO: 57152 - DNA, 384 bp, Zea mays
  unsure (1)..(384): unsure at all n locations
tcggattgagcgttgaaattcgcatcatcctctcttattttttcgctaatgcgaatagaagtctgtctntctacatggcctcatttctcagcttaatgacctctgaccgaagggtgtcgacggccatagtgcagctttcgtcttcgacgatcttttgcgcccttaaggcgttgctaagaattacgtgctacaaaaaagaaggatcatcctgagaatataagacttcttctccaagttcataaactttgaagttcacaacttctgtaccttcaaactgctgcaagcgaggttgtccgcgaggtcagtcttcgtcatggcgcaaaggccagcttcgagcttcagaaaacccatactcttggccatctcccggcacatggataactc

SEQ ID NO: 57153 - DNA, 462 bp, Zea mays
  unsure (1)..(462): unsure at all n locations
agcttctataatcaaacagacccttaatcaacagttttagttccttaaacaccctcaacgtcaccatttatgggtcatttctgcactagtccagaccaatctccatcgatcatatcgtgcacatctcaaattctaaactctattattgcagttcaacaggcaacaagttactagtaatgccagcatcagtgcgaatattactactactgcaaaagggtaacaccgacggtgacattcacaaatggagcaggaatcttgcgagaatcgagcgtgatctgaggtcgggggcagactgtcggtggcgccggcatgcggcgggcatcccttcagatgacgcaacggccgccgctgaagatgtcgagcgcggcgagggcggccttctggactctctccccgtcgtcgtgcagcgctcgggcattctncgccacggcattcctcgcgcgctccagctccgcgtcgatc

SEQ ID NO: 57154 - DNA, 434 bp, Zea mays
  unsure (1)..(434): unsure at all n locations
gcttcagctgaaacctaatcggncgtttgcttctacacctactggagctggacagacacaggctcactcccttgatatgtntggtgatcatgcatgcatacatctagncgtcacacacggtacgtgtattggtgtactggtccaattatacggtctaaacaagtgcatagtctcgctgtaatccatggagctccacggataatggaggaatagatttataacaccaataataataataataacgaacggttggttcgatcgatgagtccccgcctaatagcatatatggtgaggcaacaatagtactgttcttgtgagtaaggtgggtccactagtcaagcaccctatcatccctgccactgcangtctgcggcgctgcttgatctgcatgccaatgactgcatanacaagtttctcgcttgttacatcatccc

SEQ ID NO: 57155 - DNA, 298 bp, Zea mays
  unsure (1)..(298): unsure at all n locations
gtcaactggtagttcggacggtactccaaagcggcaaacaatgttctgccagaagaatttttgggcagtctttgatgctattggagagacagcccgcgcctcgatccatttggtgaagtactcgacagcgacgaatgcgaacttaatgttcccctgagcggtgggcatgggcccgacgatgtccaggccccagcgctggagaggccatgtattggcgatcatctttgtatactgcgagggactgcctgaccgangagaaaacttctggcaggcttcacaggaccgtgtgacccgattt

SEQ ID NO: 57156 - DNA, 402 bp, Zea mays
tttgacttgactatgaaggggccctacctcttgggctccagcttgcccttggactccgtccgagctgttcggatgagtacgaggtcccccgcgctgaactccctcgggatgactgcgtggtcgcgccatgctttggtctgggcttggtatttgtttaaggcctgtagggcgaagacccggtctccgccaatgagatcttttgaggttggctcgtccacgtcagcgacggctgacggaactgtacgcggggacccatgctttatttcttgcggggtcattgccttcgatccgtatagaaggcggaaaggagtgaacccggtcgccctgcactcagttgtcgttagcgcccagactgcctccggtacaaatccgtccatctgtctttttttcatcgaggagcat

SEQ ID NO: 57157 - DNA, 482 bp, Zea mays
  unsure (1)..(482): unsure at all n locations
aactaagcttcgggccgaattggtaatgggcagcaaactcatgagtttattatcgattttgngcacgcgtcctccatacagtctcaaacattggcagattttattgctgattggaccccaggctcacaagacgaagcagtcgagtcaaacgaagttgcttggacaatttgctacgatggctcatggggatcgttcggagccagaactgcaactgttattgtgtaaccatctaaggtgatgacatcatatgctgtcagggtgcaatttcagagtacaaataatatagcagaatacgaaactttgntgttggaactaatgaagctgaaagcaccggtgtacgaagagtattattgaaatcagattatcaagttatcacaggctatgtagataaatcaagcaaggtgaataatcctaatctagagagatacctcgatatggntctaacgatggaatcttttctccaatgtacttgtatattttat

SEQ ID NO: 57158 - DNA, 332 bp, Zea mays
  unsure (1)..(332): unsure at all n locations
agcttcgcgcgttccgtagcgatcgtggcggtgtatttaattccatcgagntcaaagaagactgcgacgaacgcggcaaaatattttctgcgccttccgtaacctctgctcttgccaagtttttcgtcaggtgaaaacagaatagccactgatcgctgtcgaaccttccattccggtggccggcgccaacaactggtatcaaagccatcgcatgttctatagtggttccattagtccaccgcgtgagccccccaagaagaaattcgtcgttccgtaccggagacgtccggcgacagagatgagcgaaaaggatgtgggatccggcaatgggt

SEQ ID NO: 57159 - DNA, 481 bp, Zea mays
  unsure (1)..(481): unsure at all n locations
tgcatctaatacaccgcttaacgctaatgaaccatttctttctattacaatgacatcaatatttgtgaaaagacagttataatccaaatgacataattggcttacgaaaagcaaactattaccaagcgactcttccaaaaaagacattattgtaacactcccaaatcatattctggataaattacgaaactcatttcatgatttaaataaatgtgttttctaataatagattacctaaaagattcttatgtgaactatcctttgtgttaaagatctattctctaaaaaaacttaagttaaactatctcttaatatagattttacataagaagttatatccttttaaatgaatatgtcaagattaagatttattttattgtacttctaanatgtggctatgtgtttgaattatattctttaataattattattgtaaaacatcttacatgcattattcctactgagtttcaattgcttaaat

SEQ ID NO: 57160 - DNA, 288 bp, Zea mays
tatgttgagcaaccttccggctttgaagatagcgagtaccctaaccatagttattaactctctaaggcgctttatgggctcaatgaaagggaaatgtgcccttgggccatttctaatattttggtgatcgagtgccaacacaagtgcttaaatgtgaatctatgcccatggatgaacaaagtgcatatcaagagcaaaggcatgtttctaagtcttagtacattggttctgtgtactaatataccttgctaagtctgagaaacagaaagaagaatagaagaatagagt

SEQ ID NO: 57161 - DNA, 433 bp, Zea mays
tctaagggagaacacgtgataggtctaactaatgttcaattcgaaaaagatagaccttgtgcagcttgtcaagcacggaaacaggtgggaggctctcatcacaccaaaaatgtgatgacgacatcaagacccttggagatgctgcatatggacctcttcggacccgtcgcctatctgagcataggagggagtaagtatggtctagttattgtagatgacttttcccgcttcacttgggtgttctttttgcaggaaaagtccgaaacccaagggactctcaaacgcttcctcaggagagctcaaaatgagtttgagctcaaagtgaagaagataatgagcgacaacggatccgagttcaagaaccttcaagtggaggagttccttgaagaggaagggatcaagcacgagttctccgctctctacacaccacagc

SEQ ID NO: 57162 - DNA, 376 bp, Zea mays
  unsure (1)..(376): unsure at all n locations
ncaagcttgctcgcactggatgacctcatttggctttgatctggctcttgggtgtttgaatgagattctcttcttcttccttctttctgattatatatgttcatgtggctgtgttgacaatgcactcatcaagggggagattgcaaacataatgttgagttgtcccctgtggttcgagatgatgatgagtggttgtcaatgggtagcatttcatgttaagtcgtggactaatcgaagcatgagttatgtttgtgcaactatgtatgttggcttgcggtgcgtatgtgtggagcacatgaacagtggtcgacggcgaaggtgacagtcatgcgggtttgtgctaattgaccgagactggtgaatgatgggcgatggt

SEQ ID NO: 57163 - DNA, 383 bp, Zea mays
  unsure (1)..(383): unsure at all n locations
cgtgaagagtgttcattccaacatgggcaagtcggtgatgtctaatccaccccatattagtcttagcaattaagcaagtggttagttcagcaatgctatcattaaaatcaactaaatattgctgaccatctaacactcccttaaatgctattgaatcatcacttcttctaaagataggaacaccaacatcagttaaaagacaattgtagcccattttacataattgagaaaatgaaagcaagttgtaatctaaagaatctaccagaaaaacattggaaatggaatggtcaagaaatatagcaattatacccagacctttgaccaaaccttgatttccatccctgaatgtgagcgctctttagagatcttcatttntctcatat

SEQ ID NO: 57164 - DNA, 477 bp, Zea mays
  unsure (1)..(477): unsure at all n locations
agcttatcatgcatttcatatntgatgtgcacgatcgtgtttggtacttgatattatttcatagtgtgacaacgatgctgctgctcagtagcacaacggaacacttggcatgtatgagttctttccattacatgttttgtttcgtacttctaaaagtatatattgtagcatttttcttatgccaactatgcctcaagctgagaattagtagcatgctatgcaaattattgtacgatttatttttgtgttgcttgtattcatgtaatgcactaacattttatcaaataatttgtgtgcctttgcctctccctccctcctccgccacatcacggagctccgtctttgtcgatcgctgcgcaatcccttcgtcggcacccacgcataccttatcgactgcacgccgccgtcaccaaggtccttgtgaccagcgtcgccactccattgtcgtcctatggagaatattccctncttgaaact

SEQ ID NO: 57165 - DNA, 395 bp, Zea mays
tagaatgacatcagcctctcccttatctttcatctcgaaatagctcgatagaagactcttaactttctcaatcacattgagatttgatccaaagatcaagatgtcatcaacataaaggcatagcaaaacagactcacccccaccataccgagaatacacacacgcgtcagattcatttacaacaaaaccagctgcctgaagaagattatcaaacctttcatgccattgcttaggtgcttggtttacgccatacaacgattttatcaacctacacaccttgttctcttgaccatccgcaatgaacccttctggctgatccatatagatctcctcatccaactctccatttaggaaagctgtcttaacatccatctgatgaataataagaccataag

SEQ ID NO: 57166 - DNA, 467 bp, Zea mays
  unsure (1)..(467): unsure at all n locations
tcgcctttcacccggacagacttacctaacctacgagatgtatatttatataggctgaaaaaaaatccagacgaaaactctagctacaggcacgtacgagcgtacaatctggggacgcgagcaaacacggtagagtaagggcccacggttatgggctgcgtcctctccacctgcacgggctccagctccgggatctcgccgacagcgtcggttgccatgacgatgtcgttcagcagcagctgctggctctgcaagatcccgtccttatgagtcagatggtactcctgtctcgtgagcgcggctgctgctatcccgagccctacagggatgatgtggacatcngaagccccgctcncctatttccttatgctctgggcgtgcgcgcattggctcgtcacgtagatgcggttcgtgctgatgctcgtcaggttgatcatgagcagagcgatccctttctaataacatgt

SEQ ID NO: 57167 - DNA, 475 bp, Zea mays
  unsure (1)..(475): unsure at all n locations
ggtgaagattcttcatcccaacatgggctagtcggcgatgtcagagccaacccatattagtcttagcaattaagcaagtatcgagttcagctctattaaaatcaactaagtatagctgaccctctaacactcccttaaatgctactgaatcatcacttcttctaaagacagtaacacctacatccgtaaaaagacaattgtagcccattttgcataattgagaaattgaaagagaattgtaatctaaagaatctacaagaaaaacattggaaatagaatggtcaggagagtatagcaatttaccaagtcctttgaccaaaccttgatttccatccccgaatgtgatagctctgtggagatcatccattttctcgtaggaggagaacatccttttcttacctgtcatgtggtttgtgcatccgctatcaatgatccaacttgagcccncagatgcattaacctacaaaacaagttt

SEQ ID NO: 57168 - DNA, 368 bp, Zea mays
atgcacacaagatcacgaggagtatctctaggcatacatccgaaggttcttgcgtctgagagcacaagcacctacagtgcccaatgaaattgtcattgaggccatgatcaaggggcttcttccaggacctactgcccaatattttgctataaagccccacagactttggagaagctgcttcaaaagatggatgaatacatccgcgctgataatgactttcgtcaaagaagggaggaagcctacaggttctctaagatgaccaggggcttcggagggagaatccatccaaggcacgtcagatcaatccattccacctagaatgccgacagaggaagtcaacaacagaggccacaatattcctcgcaagc

SEQ ID NO: 57169 - DNA, 425 bp, Zea mays
atcactgggcgtcattattttgtttgtataccgagattctctggtaggcatcagccacataaacaaagaatgggattgttcaagtgattcaatgggaaaatactgcgctgccgtccgaaagctggaagataaattcgaaggtctggaatttcatcatatagaaagagatcggaacacggctgccgatgtactgtccaagctcagatccggtcgaactcacgtcccacccggggtcttcgtgcaagaaattcttcagccgagtatctcaatggatcaaacagaagagtgcaacatcatagatcaacccgagtcagactctgatgactggagacagtcgactattaagtatataaagaatgaagaagaaccacatgataagaactcagcagagtgcattgccagacagtcagctcactatacactca

SEQ ID NO: 57170 - DNA, 429 bp, Zea mays
gagaggaataataccgcgcgcgcgaccggatggaacggctaccctcttcttgctcataaaatgctgctggagaagggctactccttgaagactacggtgatgcaccccgaggacaatgagagcaactcccacctggaggacctgtagaaactgggcctgggccccttggaggctaccgcgccgacctcgccgaggaaggcagctacaacgaggcccgcgcccgatgcgaatacgccttcctgctcgccgcgccggtcaactacacgtccaagaaccctgatgtacgtactaatacacaagctacctatatatatacgtaccgtgcacgaacgaactattcgagttgtgacctcgtgagttgtgacgcgcggggtggaggcacccgcgcacatgcagaaagagctgatggagctcggcgtcaacgcactc

SEQ ID NO: 57171 - DNA, 428 bp, Zea mays
  unsure (1)..(428): unsure at all n locations
agcttctagttctggttcggtcgctctcttatttctctgttttcaaaattttgtctgctcaatatgtaagaggctaattccttccgtgataatacaggatgaagctgatgagatgttgagtagaggctttaaagatcagaattacgatgtctacagatatctccctccagaacttcaggttactattgaacttatagtctggacaagaatgatagtttttgatatctgcttatattcttgatatgtaaccacacatttgccacatttcataatgagcaaacaatggggaaaacgagttgcttttgtcgattcttgtttcgatgataagaaataccggcttttactcgaactggtgtgatcgtgtatttggttttntaaaggtggttttgatctctgcaactcttcctcatgagatcttggagatgact

SEQ ID NO: 57172 - DNA, 486 bp, Zea mays
  unsure (1)..(486): unsure at all n locations
tctacgatggctcctctcgcgcgtcaaggcacgctatttcttcgtctacatgcagtacgcctccgaaatcctcgcgatactcctgcagaacagccccgccaatcagaagcgcctcggccagatcaacggagtcgacgccctgcttcaagcggttgccatgtacaaatcaagggacccaaagacgtctgacgaggaggagatgctcgagaacctcttcgactgtctctgctgcgtgctcatgcccctggagaacaaggagaggtttgtcaaggctgaaggtgttgagctcatgatcatcattatgaaacagaagaagctggcatacagctctgcgacccgcaccctcgattttgccatgaccaagatcccgcctgcgtgcgaacgatttgttgatgtgcttggccttaagactgcttntgcggccttcatgggcaaggcaagtaaaccttcatcctttgctctatgatgctatgtgctatgcatatg

SEQ ID NO: 57173 - DNA, 360 bp, Zea mays
  unsure (1)..(360): unsure at all n locations
agcttggcataccatntcattagaattattgattggntaccccagacaatgcgctttaactgcattttagtggttgttgacaagttttcaaagtatggtcatttcttgcctctgtcacatccattcacagcagttaaagtagctaagctctttttggactcgttttacaagcttcatgggttacctgtcaatataatatctgacagagatagaattttcacaagttcgttctggcagcaactgtttcatctgaccgatactcagttgtctatgtctttagcatatcatccgcagtcagatggacagactgaaaggttaaaccaatgtttggagacatttctcctatgttttgtgcatact

SEQ ID NO: 57174 - DNA, 418 bp, Zea mays
  unsure (1)..(418): unsure at all n locations
ctcagcttggcacattagcctcccactactgaattaccttatgtcttaaacggngatnggttgcttggtattcagaatgatatccataaaggatatgatgaatctgtgatagattcaaagatttcagatcattaatgaacatcagtaatgaattgtcatttccaactggttatggttggagtcaagaagatctgcatgctcctgacttgtgattaactgcatgtactggatgtacaagttcccctatggtgttaatacgtgaaaatacgtgaaagatttcccatgcgtacattgtgtatgttcccaatctcaccaccgcagcgtacatatatgggcacacacgaaactggggatctatgtgagaatacattcttcgtcgatcattaagttttagaatctctttctagattctatttat

SEQ ID NO: 57175 - DNA, 377 bp, Zea mays
  unsure (1)..(377): unsure at all n locations
agctcgatgtttagaatgacatcagcctctcccaaatctttcatctcgaaattgctcgatagaagattttaacttcctcaatcacattgagatttgatccaaagatcaagatgtcatcaacataaagacacagcataacagactcacccccaccatatcgatagtatacacacgtgtcagattcatttacaacaaagccagctgttgtaagagtattatcaaacttttcatgccattgcttaggtgcttgttttaggccatacaatgatnttatcaacctgcacaccttgttctcttgaccatctgcaatgaacccttctggctgatccatatagatctcctcatccaactctccatttanggaaagtggcttaaca

SEQ ID NO: 57176 - DNA, 233 bp, Zea mays
gtcttcttcattttggaatcatccatgggtggcgcaacctgatctcaaatcttatatctaccttctgcactcacatgctccttaatggttccttgggcgaaatcattaaacatcgtaaggggctccgtcaaggggaccccctctcgtcaatgcctttcatcttggttattgacgttctaagcagtctctctgataaggctggaagaatgggtctcttacatgctttggataat

SEQ ID NO: 57177 - DNA, 352 bp, Zea mays
  unsure (1)..(352): unsure at all n locations
agaacacgtgatatgtgttgtctaacgtgcaattcgaaaaagatagaccttgngcagcttgtcaagcaagtaaacaagtgggaggaacacatcacagcaagaatgtgatgaccacatcaagacccctggagctgctacatatggacctcttcggacccgtcacctatctaagcatatgaggaagtaagtatggactagttattgttgatgactnttcccgcttcacttgggtattctttttgtaggataagtctgaaacccaagggaccctaaagcgcttcctaaggagagctcaaaatgagtttgagctcaaagtgaagaaaataagaagcgacaacgggtccgagttcaa

SEQ ID NO: 57178 - DNA, 397 bp, Zea mays
tctgtcgccgaggcgcacgcggaccgtcgccggagaccctgtctccgtggacctgcatcgtcgacacagctgcgatgagttcaagaagcgaagagtcgatctgccatgggcacgggtgaagctatatcgatctcaagctggcataccaggacacgactctcctctgcagcaataaggcggtgctcgggctggagtaggggctaaacacggccgcttcctcggccttggcgatcggcgacagctccacctccgtctccaaatccacccccgtcaccagcttcatcgcttcgagcaccggcagcagctcgggccccggcaggcaagctccaagcctcctgcggtccttcctgcggtttggagcagcaccgtaccgcagcagcggtggcagagtattata

SEQ ID NO: 57179 - DNA, 412 bp, Zea mays
  unsure (1)..(412): unsure at all n locations
ctgcagcatgcaagcttccaacttcaccctcgtgcgcgttgacaggacgaagttgatctctgtcgctacatataattctctctctctctgaacaaaagcgaaagaacacaacggattggaatgaatatatgccatcagagctataagcccaaatggtctcatctatatcattactgaaaatgatgctctgaactntgaggacaaggccctcccacgtattaaccaagactctgtgacacaacactactaattacaagtaaatatgagtcgctctgcatccgaacagtatgatataatactactctttcgatttacaaccacacatagcggacaaatctagatagctaacgtagactgcccaaacaagttatcttcccaggcacaccgtcctaccattaccagaaggctatct

SEQ ID NO: 57180 - DNA, 483 bp, Zea mays
  unsure (1)..(483): unsure at all n locations
tgaattgtctgtgaatgtatgtgaactactagaccggcgggtgccattgtgttattgacagtggatgcacacaacatatgacaggcaacccacggatgttcacctcattagatgagaatgttgatggtcaagataaaatcacatttggagacaactcaaaaggaaaagtacaaggacttggcaaggtggcaatctcaaatgacttatcaatatcaaatgttctcttagttgcacctttgagcttcaatttattatcagtgggacaactctgtgatcttggacttcaatgcttattcactccatcagaggttattgtaacaaaaatggatgatgaatcaatggtattcaagggatttagatacaacaacctctacttagtggatttcacttcagaagatgcagacttaagaacttgcctcttcaccaaagcttctcttggatggcttggcatangacgctcgacatgttgggatgccacactca

SEQ ID NO: 57181 - DNA, 391 bp, Zea mays
cagatcatgcgaggcctatgcttctatgtgaagactttgcagaatatagggttctgctgggatctgatctttcccatgagcatgaaaagactctgctattaatgttgttcaacaacgcagatgtctttgcttggaccaccaatgatctttgtggtgtcaacagagatgttatcgagccttcacttaatgtggatgcatctattacgccaaggagaccataatgtatgactaacgcttgatgataaagcagatggcgctcggaacgaaggcaagacacttatcactgctggttgttatcagagaagtcacagatccagaatggcttgcccacactattatggctgagaaggctcctgacaaatggacaatgtgtattgatgtcacatatctc

SEQ ID NO: 57182 - DNA, 380 bp, Zea mays
cgtgacctataaaaactcagcttaatgcttctaatagattgcctaattatgttaagggcaaggctctcatggtttacgataatgaacgctacattttatattctgcaaactatcatgaatataagattatgaagattcatgctacaaaacctcataatgtttctcaccatgcatttatgtataaaaatgaggcttctaactctatgcataccactcgtgttaaattgcctaaaaagaaaattcctactgcatcaaatgaacataatgttgcttttaagaccttcgatgcatcatatgttataactaacaaatcaggtaaagtagttgccaaatatgttgggggcaaacacaagagtccaaagacttgtgtttctgtaccc

SEQ ID NO: 57183 - DNA, 402 bp, Zea mays
  unsure (1)..(402): unsure at all n locations
gcttgcaagcttctactggagcttcggctcaacaagctgtatctgaatctgttgtcttagaagccctnaaagaacaaccttttgaagccgaaacaagaaaaattcccgaaccaatattaattgaagaaacggacaccgtcatccccgaagcacctgccggcatgcatgattacatcatacgacatgcttcggggaacaagctatctgaggaagaaactcatgaggcccaccattatgcaaaggagctgaaatatccgaagggggcagtaatattcaatggaacaaatgaagatgacttcttatactgcctgcctgataacaaagagctactcgtctaccgagagatggcgagaagcataggctttccgaagcttgaagctgggttaagcgccatgacgaaag

SEQ ID NO: 57184 - DNA, 417 bp, Zea mays
  unsure (1)..(417): unsure at all n locations
aattccacgaggagaaaatgagcatgctgatctgctggccaagtcaacggcacaggggcttcctctaccttcggaagtattctttgaaataataagagcaccttcggtggaacttctcgaaagagcagtgctcactatatctcctgtccatagtgaagattggaggactaagattatatctttcctccaaggtaactgtctctcggatgatgaggtttataacaaaagaatggaagcatgaacaagaccatatgtcataatagaaggggagttatataaacatggagtttgttcccacttctcaagtgcttgtccagaaccaaaggtatagaactgatgaacgagatacatgcaggactgtgtggatcccatattgtgtccagacctcttctgngaaagggtctcggcatgattcta

SEQ ID NO: 57185 - DNA, 356 bp, Zea mays
  unsure (1)..(356): unsure at all n locations
tcgcatggcccactctctcatagatagaaatactttgtaagctaaaaatacttgcactaagtccctagtgccgatatgctncgcgataactctaaattcatcccacgcaatttgggctggaccctctggtgtcatattgcacgggggtctggtctctccgaagatcaactctaatgaactctggaccaacttctccttatcatcgtcaatcttgacataaaaccattcagatttccaaccagctggccacttgcttcagtaactaatcactggaaattttgtagtcttgcggtaggcaaaattgtagcagccgaagtttcatgtaacccatcttctctagcctttgtctggtaatg

SEQ ID NO: 57186 - DNA, 427 bp, Zea mays
  unsure (1)..(427): unsure at all n locations
gctaatanaatgaaattctgtgtagatctaagctttcgagtggtgatgttcaccatatactacgtcatgacactccacagactctaagccctaatttgaattcagcaatcacgggatggaatattttgctatctgtgatctgaacatattttcgtgaaaaatcaacagacacactggtcactggttaattcatacaatatggataacacacaaagtcatgattctcggatactgagacgggtatcagagaaatcaccatctgcgctcccagtgatgaagaagtcagcaggagatacagcgacgtgcgtgacgacatcccgatgcatatagctcttctcgtacctgcgaaacaaaacgctntagttaaccagctctaagcgacgggcgacactatccacatggcgagggttgatagggcgcacatggc

SEQ ID NO: 57187 - DNA, 472 bp, Zea mays
  unsure (1)..(472): unsure at all n locations
gcttttgagactcacaagcgacgcctgccgtcttgttctggagcttcaaggaaatgaacccataaagatcttgttattgcacccaagcttaaatcaagaagtacaagatgggtttgtagatgaagcaccaagatccgcatctttcaatatcactcaaaagattctctcccaagatttgaaatgggagaggcaaaagatgtgtgagagagtggggagtggttttcacgttataaatggaattgaatgcatgcttgagagcacctagagggggggtgaataggtgatcctataanatcaaatactaaatagcacaaacttggtttatagaaagagttaagccaagttgttaagcgagaactcttcactcgatggtcctttagagtgagtattgaactatggggacatagcacaagtgattaagcgagaactcaagagatgaaaacaatctcacacatgagcgacgcaagagaca

SEQ ID NO: 57188 - DNA, 472 bp, Zea mays
  unsure (1)..(472): unsure at all n locations
ggacaatgaggaaatggcgctcgtcatcaagagcttccgctctattctctagcaaaggagagggaaagactacaagtcccgctccaagaaagtttgctacaagtgtggtaagcccggtcattttattgctaaatgtccattatcaagtgatagtgacaggggcgatgacaagaaggggagaagaaaggagaagaaaaggtactacaagaagaagggtggcgatgcccatgtttgtcgggagtgggattccgacgaaagctcaagcgactcctccgacaacaaggacgccgccaacatcgtcgtcaccaagggacttctcttccccaacgtctgccacaagtgcctcatggcaaaggacggcaaacggaagaaggttaaatccaactcctccactaaatatgagtcttctagtgatgataatgctagtgatgaggaggataattngcgtaccctcttttgcaacctcaacatg

SEQ ID NO: 57189 - DNA, 382 bp, Zea mays
acatgtgcttaacggcgatgccacagccagcctatgctagtcttatcaattaagcatgcatctagactggcctcctcttttgcaaaatcaactaaataaagtttgtcgtctagtacacccttaaaagctaatgaaccatcacttcttctaaagacagacacatctatatttgtaaataagcaattatatcccatattacaaagttgactaacagacaacaagttatatccaagcgactcaactaaaaacacattggaaatggagtgctcggatgaaatagcaatctttcctagccctttcaccttgccttgattcccgtcaccgaatatgattgagtcttgggaagtcttgttcttgacataggaagagaacatcttcttct

SEQ ID NO: 57190 - DNA, 430 bp, Zea mays
  unsure (1)..(430): unsure at all n locations
tgtaagttgtgtagagccatacctaattnttcttcgtcctccgccactgttcggntctaccccaatccatatggattaaaggggattgagggggtttcaatccctagtaagtcaaaattcctcccaatccgtatcaatctccttcaatccatatggattgaaaataaccgaacaagcccttaggaagatgtggttcccaaactagttgttagtagtttctatcaaacagttttagctactatcaaaccaaacatactctaaaatagagatactaaaagatagcctctagaaaccaaactcgtcctgaatctgtcaanaaaaaaaaggcccttatccacaaggtgcacgagaagtggcagcaactacgttcgaccgggtccggtcttgcgagcaatgataagagaaccaacacgaagtccacacatcactg

SEQ ID NO: 57191 - DNA, 383 bp, Zea mays
  unsure (1)..(383): unsure at all n locations
tatgtggatgacgtggtgattgtcggttgttagggttctatcgctcacccggngttgcccctcaaggtgtttctatgagtatgacggtgtctacgactgtagcaaaatggttcgtgccgatcgcacgagagacagtggacaagatttataggttcgggccgcttacagatgcgtaacaccctacgtcctggtgagaattcgaatgtggttacaagagggctctctgggttgaaggcacatagagtttacgtgggtggctaagtaagatagggtcgatcgatctgaaggggtgccccctaggccttatatactctaccgtgtggcagtacatgtggatatgattacaacaagtagctaacatgtagtgaaccttccgagtttat

SEQ ID NO: 57192 - DNA, 385 bp, Zea mays
  unsure (1)..(385): unsure at all n locations
acatttctctaggagaaaatgaacatgctgatttgctagccaagtcagcagcacaggggctgcctttaccttcggaagtattttttgaaacaataaaagcaccttcagacgaacttcttgaaatagcagtccttaatatatctcctgttcatagtgaagaatggagaactgagatcatttctttccttcatggtaatttcctttcagatgacgaagcttataacaagagaatagaggcgagagctcgaccatatgttataatagaaggggagttgtacaagcatggagtctgttctccactactcacatgtntatccagagccgaaggtatagaattgatgaaggaaatacatgcaggcctgtgtggatctcacattggatctaa

SEQ ID NO: 57193 - DNA, 454 bp, Zea mays
  unsure (1)..(454): unsure at all n locations
tataatgcttcgttgtgaacaaaaagtagggaatgtgtttttcgcctttcggctcacaagaatttcatggtttcgtccataacaaagcaaatagatgctacaaaaggtaatgatacaagctgttcttacatatttccaaaatattacatatcatctctcattgtctttcatcaagtctaatattttacaaaacgaagatccataagcatgtttcagggcttattcatagattgcagcttcttctttgtcactcctcaccatcatcagcttgaaagccacactatattagtacccaaagataaaaggggagggtgtcggtgttttgtgttcgaccacgcacccggngttaccctcgtggtgctttttggtaggatggtgtcgctgatcgtgactcgatggctcgtcgagcggatatcagcaggttcgagccgcttntatgagcgcaataccctac

SEQ ID NO: 57194 - DNA, 466 bp, Zea mays
  unsure (1)..(466): unsure at all n locations
agtcacctgcggcatgcaagctttaccgaccaaccntcctcaagctaaatttattcgtctagatgtcgcttagcaaagaactcgacttactcacaaccaggccaataaaatgatcctctgaagaaaagatatcgggaaccattgagtagattgttgctcaactcaactcaaagctcgggggctacacctattgggtgcaccgataacatgggaaaagaagttacacttaaagacaatcaaataacatagttcattcttggtgtctcgagcctattatcctcgaaaattcgcttgagccttgggggattttgggagatagatgtcccatgggccactaaggcatagatacattccatgggccaccaaagaggcccctgataagtcacccaatatagcgcatagtgggcctcgctccggtgggacaaataataaccgaagtgacgacgtggggacatagctgaaatat

SEQ ID NO: 57195 - DNA, 459 bp, Zea mays
  unsure (1)..(459): unsure at all n locations
agaacacgtgataaggttgactaacgtgcatttaaataatatataccttgngcagcttgtcaagcaggtaaacaagtgggaggagcacatcacagcaagaacgtgatgaccacttcaagacccctagagctgctgcatatggacctcttcggacccgtcgcctatctgagcataggagggagtaagtatggtttagttattgttgatgatntttcccgcttcacttgggtgttctttttgcaggataagtctaaaacccaagggaccctcaagcgcttcctcaggagagctctaaatgagtctgagctcacagtgaagaagataacgagcgacaacggatccgagttcaagaacccttcagtggaggaattccttgaagaggaatggatcaagcacgagttctctgctccctacacaccacagcaaaatggtgtggtagagaggaagacaagacgctca

SEQ ID NO: 57196 - DNA, 312 bp, Zea mays
  unsure (1)..(312): unsure at all n locations
agcttctatgtatatattntggattaattacatgatcctactctaacgatctatgggtctagagttatcttggtcttgcagtcgggattgccataagactgggatccacgccgaggtgagcggtacaagtgctgagtcccgacgggagcgggggaaccattctccaggtcacgacgttccgtgcgctcattcgcaatcgggcgatctcagcacgagccctactcggctcatctagtgcatggtccagctccgtgtttagtacggcggttaggttgactgtgctgctcaacctatgattgccctcaccgatag

SEQ ID NO: 57197 - DNA, 439 bp, Zea mays
  unsure (1)..(439): unsure at all n locations
tatatctacctactgacctgtttaaaaatggtgaacctctctgttcactctattaagntagntnttaccccttattccataatatgcttaaagataagaaaaatagaaaatattatttaaaccataaactagagagcacccctatttttgttagaatacttatttaatgtagttcactggaaaaatatattataccctggtttagtataaaatatgtaggataccttttaaattaataaaataaggataacttagaaaaaccctataaaaataaccccaaggtaaaaacacccccacccttgggataactaatgttgtattaatgagaacttangaaaaatataaaatctgctggttgacatttttcacatagtaatgtagtagaaagtgccttttngacactaaacttaagaaaatcataactaattaaccacccctt

SEQ ID NO: 57198 - DNA, 353 bp, Zea mays
cagcttctaaaaagagaacacatcttatgactaactaatgttcattttgagaaagcagggtgtgagcgcatgccaaacaagaaagcatgttggtgcccatcatccacacaagaacatcatgacgaccgacaggccacttgagctactccacatggatctatttgggccgattgcgtacataagcatcggtaggagtaagtattgtcttgtaataatggatgattattctcgcttcacttgggtattctttttgcaagagaaatctcaaacccaagagaccttataaggattcttgagacgggctcaaaatgaattccgcttaaggatcaataaaattagaagcgacaacggaa

SEQ ID NO: 57199 - DNA, 463 bp, Zea mays
cgtaacctctactgcaagcactccggtgcatgataatatatttctcatccctcctcttgagttccatcttgcatcaacccatctggacaggggcacgcggcataaaattcactattcggtccggttgagggcccccgggtccgaaacaccgacagatacactttagccagtcgtcgtttggctcatcaaatttctccctgaatctgaaggtatacttcagtcggactagaccacctttgctggaatcggtggtggtctccttcggcattttccagctgtctacaagcggccataccctgaaggctatatgttcctgaattaaatcccttgtaccaatgaatgagcaaatagtgctaaaagccctctgacacactttcgacagtgtatcaattttcaccttcgtgcttctgaggctgaagcgagaccagataaggtgcatgactacttctgtaatatcttcctt

SEQ ID NO: 57200 - DNA, 456 bp, Zea mays
  unsure (1)..(456): unsure at all n locations
ataacacagtgcgctgcttggcacgggcgcactggtcgccagcagacctagcaggcgcgccgcctgccggatgaccttgacgccgcctgccagcggatgggacaggacacattaaatgctgagagggcacgacgcatgtcaacgcagtggcaggtggcgcgtcctctcctcaataaatgcaggggctacacggctntacgtcaggctcggcccgatggcttatgtcatgggccacaagcagcgggccttcgcctgcgcggtgagcggagaacaaggcctgcacacgtgtcagcaccagacccctgcataccccaaggtccttctcggtccggaaccctgccggngttcggacctccccggngcttcggacctgtatgtatctaggggcccggtgaccttctgtggnggtccggtcttattgagacatggtgcctttcctcgccacgtggcgccctt

SEQ ID NO: 57201 - DNA, 414 bp, Zea mays
  unsure (1)..(414): unsure at all n locations
tgtgaagattcttcatccccacatgtgctaagcagcgatgccacagccaacccatgctagtcttagcaattaagcatgcatctagaccggcctcttcttttgcaaaatcaactaagtagagcttgccgtctaatacacccttaaaggctagtgaaccatcacttcttctaaagatagacacatctacatttgtaaaaagacaattataacccatattgcataattgactaacagatagcaaattatatccaagagactctactaaaaacacattagatatagagtgctcattngagattgcaattttacctaacccttntaccttgccttgattcccatcaccgaatattattgaatcttgggaatccttattcttgacgtaggaggtgaacatctttcttctccccgtcatat

SEQ ID NO: 57202 - DNA, 480 bp, Zea mays
  unsure (1)..(480): unsure at all n locations
gcttcgcacctctgaactaacctggctgcatcgttctttactgttggccaatagaatcctgacctgaagaccttcccgactagtgttctggaggttgcatgtattccacattgtccagcatggacctcatccagaagttgcttcccagtggacgggaggatgcacttcatgaggacgcctgatgcaccccttctatacaatgtctccccaatgagtgtgtagtgagccgactgtctggcaatgcgctcggccgagttcttgtcatctggttcttcttcattntttatatacttgatgattggccttctccagtcatcagagtctgactcgggttgatctataatgttgcactcttctacttgatccattgagatactcggctgtagtatttcttgcacaaagactccgggtgggaccttgcgtcgactggatcctatcttggacagtacatcggctgctgtgtccgatctctttctacat

SEQ ID NO: 57203 - DNA, 386 bp, Zea mays
tgacccggggacccgcgtcaccggaatagcccaatcgtgctcaccggagttcaaggacccgccggcgcacgtggaccatgtaagcccctgcaccgttttccaattccttgcgcgcatggcctctgtgttaccccgtgaagctcctcgtgcaccctaattgaactataccgccgtggtttggccggagcaggagccgccgacgacccccgccgcctgtgctcgtggccaaggtaactccgaccaccttcgacaccgacccgcccaccgacgtgaccgtcgcaacctcccggacgtcactgaccaccccaccggagctctactggcgccggtaagccccaccaccgtaatctatgccgcgggtactgtttaagtcggtcagggagcgc

SEQ ID NO: 57204 - DNA, 352 bp, Zea mays
  unsure (1)..(352): unsure at all n locations
gaagacctcgtgcagcttgtctagcatggaaacatgtgggaagctctcatcacgccaaaaatgtgacgacaacatcaagacccctggagttacttcatatgggcatatgaggaactaagtatggtctcgttatactcgatgattattcccgcttcacttgggtattctttttgcaggataaatctgaaacccaagggaccctcaagcgctttctaaggagagctcanaacgagtttgagctcacggtgaaaagataacgagcgacaatgggtccgaattcaagaatcttctagtggaggagtatctcgaggaggatagaatcaatcacgagttcttcgctcctacacaccac

SEQ ID NO: 57205 - DNA, 458 bp, Zea mays
  unsure (1)..(458): unsure at all n locations
aagtctttcgccgaagcgccaagggcanatgctcattggcttncagggaaggcttggagagcagtctagataaaactactgcctattctgcggtgaagacaaaggccataccaccaggatgtgccacattaccatccagaagcagaaggagatagcagaagcagcagcacaacatagtcagtcgaagcaggtcatgcatactgcttcgtatcattcgccttattttccagaatatgtaggcaaccaccctgcagcttctgttgcttcggcaagccaacctcaagcatcttgacagcagcctccaccgccaccacgaacacaaagaggtcagcagccagaatggattcagcgcgttaaccttcagcgggacttcagagaggagtccgaagctcgcacagtcaatagcactgtgccagagtcgaagcacatttactgataaatatcctacctcaacagca

SEQ ID NO: 57206 - DNA, 363 bp, Zea mays
  unsure (1)..(363): unsure at all n locations
agcttatcaagactcaaagactctttatgcagatatgctttctataagtggatccctaagaattcagtttacttattaagttaagtagttacctatatctagattcttttctattctagaacaagcacttgacctatactagccatcntttatcattccgtcagttcacttggtgctatgtggaggtcaatgaccaagtcctcatatccaagaattaacggggatgagaatcgaataatacctagctggagatctccaaccacacgacatatgtaacacttaacccttccatatgtcaactcgcaccccggtttcttaagaccagaatgggttcacgccaatcgatagcacaaatactccatt

SEQ ID NO: 57207 - DNA, 482 bp, Zea mays
  unsure (1)..(482): unsure at all n locations
tactcagcttcgcttgggctgacctccattgggcttcgcgtctctttttgaagtatcctcacttgagaatgcgccaatgctggcgaagctggttcttattttcttaacacattctatagatatttcataacgctttttcttggatgcacgaagctcttcaacggttttttctaaatgattggcccattgtcactaattctcgctttggttcttcaagtgagcactcttctntagctctgactagctgtttccgaagatcctcaatttcgcgcttctgagcctcagcttgagctttgaaagcagcttcgtcttcttttattttattcactaacgagtgtaatattttatctttttcgagaccttcgttccttagctcaattacttcggaacgaagggtgctcaaggctatggtacaccctttcgcttcngcatctttttgtgccctganggcattactaagtataaggccctgggaaaaatgt

SEQ ID NO: 57208 - DNA, 480 bp, Zea mays
  unsure (1)..(480): unsure at all n locations
ctttatatgcagctatacgtnggttagatgcattcacaaatgtaattgctttcctacaatcatctaaataattcctcagtcgtttcaaaccagacttgacaatcagattaacaatgtggcaattacagcgttgatgcaaaaaaaatagatgctaattcatcctcttctctaacttctacaggcaacagatgaccaatataagcagaaaaaacaggtgtaagaacagatactgcagttttatttgctgaagcattgtctaccacaatagagaaaatcttatcagaaatgccaaattcatcaacaaccatatgaactctatcagcaatgtttcttctagtatgagccacttcaattggtcttaaacctagcaatctcttttctaactcccaatctgaagttacctaatgagcaactacactcatgtaatcttctttagcctttcctgactagatatcagatgtaatagccatagatgacaca

SEQ ID NO: 57209 - DNA, 397 bp, Zea mays
  unsure (1)..(397): unsure at all n locations
tgaatgccatggagctcggtctgctggccgacacaacaaaccccgaatgtcatgggcttgtgctgtggtcgacgagttgggtctagcgccacaaagtcccatagtaggccgaccgtanggggcgacgcatgtcttggcactgcccttgaaaaccaaccgatgagtgtggtggccccccatagcgagtaagccatctctgacgtgatgaggttgacgaaggcgtancccttgttggcctcccttctgaaacccattgacggataaagggagtcatagtgcgacttcccctatctggccaaatcgttctaagaagaagggccaacgagggtcgtgtgacgggaagcacatgtttcaccccagacaattggtggagggagaacttcattgcatagatggg

SEQ ID NO: 57210 - DNA, 487 bp, Zea mays
  unsure (1)..(487): unsure at all n locations
tattgcgttggaattaaaaccaaatgaacaaagctctattatcccaataaccacaggatgcacatagcctcattaataagaacatgtatatcattatcacctcagaagaaagtcactactggttcttatctaccaatagaactgcatggtgcacaacttaagacaactagactatatatgcaagttatttacggtaaagagagcaaggaaagaaactggaaagtgatatttaaaaatgattataatcaacataaatggttactatttcagcgagaaaaatgtataaagaacatatcagacaaaaggatgtataccaaaagcagatggaagctggacgtcgagatcagacatganacttagttcttgagtttgattagtccccanagagatcactgagtttgactagtcaattcagatgtatgagctgcaaacatattaccatttcaatcagtcactagtatagtatgcggtcatatgaatgcattaa

SEQ ID NO: 57211 - DNA, 303 bp, Zea mays
  unsure (1)..(303): unsure at all n locations
ctactggcggagctagtctaatctcttgcttgcccanaagatggctggagtgggctggccacagtggccgaaactctggcggcaatggccggcggaattgagctcgcccgagctaatggaaagtggcttgcccgtgagggtgagtgccgggcgaattggggcccgcctgggaaggctttataggcacggcgcggtgcatgggtggtcgtggaccggcgggtgcgcacgggcatgcactgggaggcgcggtgcgcgaacgggcgtgaaccggaggtgtcagccacggtcgaacatgtgttctcg

SEQ ID NO: 57212 - DNA, 390 bp, Zea mays
tgactctcgcaatcagacgaagctccagtttaaagcctatttcgttagaagtaaaagcttcagaagaaaaagttttttagttcccaagaaattcaaaattaaatggccagagtgcgctctaccgctagagttgagcgtgagggaggcgaagccgaatgagcggagactgttcctatctccgaagcgatgcaacgatccggactggtgacctcggaaggaatccgtactgccgagacagagcagactgttgccgagacagaacaagttgctgccgaagcataagaaggaaatattgaggaagctgattccgatgatgattaccatattgccgtgccaagcaagcctagccacttggacttcggaaagtcgactgtctccaaggctgatttc

SEQ ID NO: 57213 - DNA, 405 bp, Zea mays
cttcatccccacatgtgcttatcggcgatgccaccaccagcccatgccagtcttggccattaagcatgcatctagaccggcctcttcttttgcaaaattaactacgtaaagtttgtcgtctagtacacccttaaaagctagtgaaccatcacatcttctaaagacagacacatctatatttgtaaataaacagttatatcccatattaccataattgactaaccgacagtaaattatatccaagactctccactaacaacacattaaagatagaatgctcatttgatattgcaattctgcctaaacctttcacctcgccttggttcccatcaccgaatatgattgaaacttgggaatccttattcttgacgtaagaggtgaacatcttcttcttccccgtcatat

SEQ ID NO: 57214 - DNA, 392 bp, Zea mays
ggacacatgtcgatcttcttatatgtcatcccacgaccagcccacatcttctttgtgaagtacatattctatggcgacttatgattctccgggagaacctcgcccatcagttggacgatgtcggtgtaagcattgtctgaaatgttgcgcttcgactctatccgcattagtcttgtgagagtcccaagaactgacatctgagtgtgctcgtgcagtctctcttcttccgtggcaagtagccggcagaatttctgagcatcgcgtggaagctcgtccggcttctcatcgtcatttcaaccttcctaccaagatcatgcaacatgtcgtccatcctatcatgatcgccatcgagctccacctccgcgttaacgtgtttaatatactctccatgc

SEQ ID NO: 57215 - DNA, 377 bp, Zea mays
  unsure (1)..(377): unsure at all n locations
agcttgtgaagaatctntattccaacatgtgctattctgtgatgccagagccagcccatgttagtcttagcaattaagcaagtgtcgagttcacctctatcaaaatctaccaagtatagctgaccctctaacactcccttaaatgctattgaatcatcacttcttctaaagacagtaacacctatatccgtaaaaagacagttgtaacccattntacataattgcgaaactgaaagcaagttataatctaaagaatctacaagaaaaacattggaaatggaatggtcaggagatatagcaattttatccaatcctttgaccaaaccttgatttccatccccgaatgtgatagctcgttggggatcttggtntttatc

SEQ ID NO: 57216 - DNA, 476 bp, Zea mays
  unsure (1)..(476): unsure at all n locations
tctaagggagatcatgtgttaagtctaaccgatgtctgntttgataaagacagaccttgtgcagcgtgccaagcaaggaaacaggtggcaagcactcatcatagcaaaaatgtgatgacaacgtcaagaccactggaacttcttcatatgaatctcttcggtctcgttgcctatctcagcatcgggggaagtaagtatggtcttgttatagttaatgatttttcctgcttcacttgggtgttctttttgcaggacaaatccgaaacccaagggaccctaaagcacttcttaaggagagctcaaaatgagtttgagcttaaggtgaagaatatatgaagcaacaatgggtccgaattcaagaatctacaagttgaagagtttcttgaggaggaaggcatcaagcatgagttctccgctccctacacaccacaacaaaatggtgtggtagagaggaagaacaggacactaatcgacat

SEQ ID NO: 57217 - DNA, 387 bp, Zea mays
  unsure (1)..(387): unsure at all n locations
aagctgaagcataagaaagagtatataattcttctccaacactgaacagaacaacatcttcactgatctccagcacaaaccaacacaacttctcagataaaaaggaatagtgaataaaaaggcttcccaactagataactaactccattaacatttaataggtaaaccaaggtgtaggggatgcccacactctggtgacagtcattaaaaagatccaaatccaacatagttcatcatggcaaacataaaagcacaggataagcaaactaccctgtctaactaagactaactaaaagtaagactaagatctaaacttctatattaagcattttttacaggacccaacgctgacgatctatggttctaaatntatcttggtcctacagt

SEQ ID NO: 57218 - DNA, 401 bp, Zea mays
  unsure (1)..(401): unsure at all n locations
tacgcgacctatgaaactcagcttgtgagggtcttcatccncacatgtgctaagcggcgatgtcacagccagcccatgctagtcttagctattaagcatgcatcaagaccggcttcttcttttgcaaaatcaaccaaataaagtttgccgtctaatacacccttaaaagctagtgaaccatcacttcttctaaagacagacacatctacatttgtaaatagacagttatatcccatattgcataattgactcacagatagcagattatatccaagagactcaactaaaaacacattggatatggagtgctcattagaaattgcaatnttacctaaaccttttaccttgccttgattcccatcaccgaatataattgaatcttgggaatccttattcttgac

SEQ ID NO: 57219 - DNA, 408 bp, Zea mays
agcttgcccttcttggcggcgagggctgctctagcgtcatacgtcgttagtggtgagctagaacggtctttttggaaggcatcgtgggaatagtcttcgtcgtacaaacgatgggcgtcaaatattgggcactgacatgcgctaacacgttgtcaggcggacccaaacactcagacggtgggggagagctcaactgcacgacaagacaaacgacagggaacagaagcttctcgttatatgtgtctcatcccgctacaggatgggggtatttatatgaccatctaggggtaggtggtccaaagttcggtcatatcctggtcaccaactatatccggagaatatacatgtaacggaataattgcagcatcgcacgcgcagcggacagtgcacactcgataacacacccgc

SEQ ID NO: 57220 - DNA, 418 bp, Zea mays
  unsure (1)..(418): unsure at all n locations
tcgtgttcagntctaatatttttgcttcagcttccgccagttaaccttcggctgcctggagttcaaagttctttttctcaaaagcatctgattgttcctttatttcgttttccaaattctcaatcataacttcatgctttttatcttcaagatcctgctgcatttgcaaggccttgctcaatagcatactctacacaaacacaaccttcatcagacatgtttttgttaggagcaataaaagttaggggacaagtcatttaccttgaagttggagtaaaacaaactaccaacgacatgctgtcgtcggtagcggctgatatctgcttctagcttcggaaatccaatactctnggacagagtactaataactctggcccctgtttggtcccgaatacactctaatttctcatcatcaaca

SEQ ID NO: 57221 - DNA, 326 bp, Zea mays
tgtgcctctctcccttgggaaggccctggacatcctcttttatagatacaaggagacggtccagctgtacatgggggtgtagctatgtgctaacgtggccggcggagaagtacttgagccttgtagaaccgcagctggcggtgcgaccctgggtcctactgacgcttctttgcctttgtagagagctgagaacaatcgacgtcatggacgcatgcagggaaccatcattacctgttgccggagtaatctagatgtgacaccgcgctctgtccttcgtagcctgagtcggctagctagaggtatggtaatgatgtatcccctgtagt

SEQ ID NO: 57222 - DNA, 472 bp, Zea mays
  unsure (1)..(472): unsure at all n locations
agcttgtggaggttcttcatccncacatgtgctaagcggcgatgccacagccagcccatgcaagtcttagccattaagcatgcatctagaccggcctcttcttttgcaaaatcaactaggtaaagcttgccgtctagtacacccttaaaagctagtgaaccatcacatcttctaaagacagacacatctatatttgtaaacaaacagttatatcccatattgcataattgactaacagatagcaaattatatccaagagactctactaaaaacacattagagatagagtgctcatttgagattgcaattttacctaacccttttaccttgccttgattcccatcaccgaatattattgaatcttgggaatctttgtttttgacgtaggaggtgaacatcttcttctcccccgtcatatggtttgtgcatccgctgtcaataatccagcttgaacccncggatgcataaacct

SEQ ID NO: 57223 - DNA, 310 bp, Zea mays
  unsure (1)..(310): unsure at all n locations
aatgtctactttgttagggcaaagcttccatgggtcatgatagagagggatacattttatatactgttaactatcccgaacataagattangagaattcatgcttgacaacctcacactatttttcatcatgcatntatgtataaaaatgaggcttctagctctaagcattctacacatgttaaaatgcctaaaaagaaaactcatgctgcatcaaatgagcataacatttcatttaagacttttgatgcatcatatgtgcttactaacaaatcangcaaagtagttgccaaatatgttgggggcaaaca

SEQ ID NO: 57224 - DNA, 464 bp, Zea mays
  unsure (1)..(464): unsure at all n locations
agcttaagtttgataaatagtagtttggaaataataattatatatatctaacattgcattgaataaaagatggaagagaatattcattacaaagaaatatatctatataattatgattattcatggtggtacattatatgtgcacttaatctgtgtgtgaaactcaccagctaatttgaattcaaaataccaaatttggaaatttagaatgaaagacaaagttgaaattattaaagaaaatataggataaaagagtacctcgctttgaaccgtgtcgctctcggccgacccattccgttcgttctctgtgcgacccacttcattaaactcgtgcgtaccgcgccatccgtctacactcaacgccatgtggggcaactcctataaggccttcttcccccacggacttgtcacgacgaaccgaccaccanattcgatgagacagctctaccgatctcgctacgatc

SEQ ID NO: 57225 - DNA, 492 bp, Zea mays
  unsure (1)..(492): unsure at all n locations
ataaatctaagcttagggagaagcacttctacacatgggttgtgattcatagtgctctctctgccctagaccttgtcattattgtagaagctagccctcttctgcactactttccaaacttttaggaaagcttaactaagtcagtatgaagccactgtaatttttgtagaatttttgggaacttctagagcagaggcatagttcaacctacccccataacaagccttttaaagtaaaggatgaaagaagcttttaattcctagtatgcacaaggggtatatatgttgcatacattctcatgcattngcattcattagattgcaatctcgcggacggagagtaagtgttgattcaagagcataaggctcagcatgaagctcgggaaccagcttccgatcccgtcgccgatgaacctttcgtcacacccacatatgaaagcaagcctggggtttatgcataatccgtatatatgctattttactacacttaatg

SEQ ID NO: 57226 - DNA, 388 bp, Zea mays
caagggcatggatgtaattttacacagactgcgtcctgtgcctataaatagatgaatagtaacactgtactgttcacgctgacttgtaaccgctcgcacgtcactctcagacttttgccttccgtcaagccaaaggtacaagtggaattcaatatcattaatgttcattcatggttattcaataaatatataaatgatctaatgatttgagatgcctattcatattctttatatgtaatttatacttctgctgtctattatatattgcgatgacgaacgtatacccttcaagactttcgtctgaagatcattatatcctacaggagataatgcttcgaacgacgaacgcctataaccattaacatttgtgttgccttttcttaactat

SEQ ID NO: 57227 - DNA, 471 bp, Zea mays
  unsure (1)..(471): unsure at all n locations
ctgtcccgataatgatagtgaccattattaacgaaacacgagggaaaagaagaagcattacaagaaggcaaagggcgaggcgcatctaagcaaggagtgggactcggattgctcctcgtacgactccgacaatgaaggactcgccgccaccgccttcaacaaatcaaccctcttccccaacgagcgtcacacatgccttatggcaagggagaagaaggtatgtactcggaactctacctatgcttcttcaagtgaggacgaatctagtgatgaggatgaagtagattattcatgtttgttcaagggcttagatagatctaagatagacaaaattaatgaattaattgatgccttgaatgaaaagaatatactcttagaatagcaagaggatntgttgtatgaagagcatgataaatntgttgaggcacacaaatcctatactttataagtaaaagaaataaatgctttctt

SEQ ID NO: 57228 - DNA, 339 bp, Zea mays
cttattataaaccgagatggactacctgctggttctaagaatgtagcagtgagtctggactggaaagcaccacaagatgtccgaggaatcaactgtttattgggatgactgcttattatcggcatatccttgaaggtgtttccaacattggcggaccaatgacagccctacttgtgaagaatgttgagttcaagtggaccccaacgtgccaagaatgctttgagatgttgaagcagaaatagacaacatcaccggtgttggctctgccagatgatcacacaccattcttggaggagtgtgaggcttgacacatctgactgggatgagtgttaatgcaag

SEQ ID NO: 57229 - DNA, 417 bp, Zea mays
  unsure (1)..(417): unsure at all n locations
ctgcgatgggtcctggggaaccttctgggcaagtgcagctgtctgtttaattgcaccttccaaagtcagaacatgctatgcagtgaaacttgatttcagttgcacaaataatattgctgaatacgaagctttgcttttggggcttcggaagttgaaggcaatgaggataagatgggcggttctcaaaactgattcccaagttatttctggtcatgttgacaagagttgcaaaacaagagatccgaagcttgagaaatatttggatacagttcgaaggcttgaagcttccttcgaagggttntctgtcaagaatattccacaaggagaaaatgagcacgctgatctgctagccaagtcagcggcacaggggcttgctttaccttcggaagtatttcttgaaacaataaaagcaccttc

SEQ ID NO: 57230 - DNA, 422 bp, Zea mays
tacggaccttaaaactcagctttggccggtcaggtcgccgacgcggagcatcacctgtctcaagggttccggagttccaggcctctcgatgatctcaaacttgtagccgtcggggtcctccacgaaggcgatgacggtctcgccgcccttgacaggaccggcttccctgatgacctttccagcctttgctcttatgagctctaccgtcttggccacctggttcacgaatcatccagatgatcccaagcatggtacgttctctattctaactcatcgatggagcagtcttaggttcgccatcttacgtcctcgactgcgatgccgaaatggccgaacccttcgcctatgtcatatttgtcaaccccgtaatctgtgaatggattcagcaagatcaggaacctggaaaccgcagactgcacagt

SEQ ID NO: 57231 - DNA, 328 bp, Zea mays
  unsure (1)..(328): unsure at all n locations
aattgactctagcctagctacaggtgcataagtttcaccgaaatccaaaccttcgacttgggagtattccttggccacaagtcgagccttggtccttgtcactacaccatgctcatcttgcttgttgcggaaaacccacttggttcctacaacattntgattaggacgtggaaccaaatgccctacctcggttctagtgaaggtgttgagctcctcttgcatcgccaccacccaatccgaatcttgtagtgcttcctctaccctgtgtggctcaatagaggagacaaaagtgtaatgccacaaaaatgtgcaacacgagatctagtag

SEQ ID NO: 57232 - DNA, 481 bp, Zea mays
  unsure (1)..(481): unsure at all n locations
tcatcggaagagtccctcaacaaagggaaggggaaggagaagaaatcctcttcccgcaagtcgcatctgagtggcgacaagaaaaagatgaggaaggtggtctactacgagaccgatacttcatcaccttccacctccggctccgacgcgctatccattacttctaagcgccatgagcgcaagaagtttagtaagattcccctacgctaccctcgcattcctaaacatacgcctttactttccgtcccattaggcaaaccaccaacgtttgatggtgaagattatgctaggtggagtgatttgatgcgatttcatctaacctcactccacaaaagtatatgtgatgttgttgagtttggtgtacagataccatctgtaggggatgaagattatgatgaggacgaagtggcccanatnccaacacttcaactccaagcctcaactatactcctcgcctctctaagtcgagaggagtataata

SEQ ID NO: 57233 - DNA, 415 bp, Zea mays
  unsure (1)..(415): unsure at all n locations
tcttcaccatgtaatcacgattatcttgagaagggtgagcatatgcatttcccttttagttgtgtcaagctcatttttagcctctcattttcttctttgagcttttgatatgtatcatcttttgttcctgcaaattctagctcaaaggaaggtttgcttgtcgacggacaacaagcattagcacatggtaatatagtctcaatttgaatacatgtgcatgtgtgaggttgttgagattttaagtttactatcacaacctcatgagtaatatctaatatgatatgatcatccataagattttcattagagcataagagcatatcatatttttcttgaaaagctagattttcaacttttagcttttctacttggtccttaagcaaggtattcctatttactaantgagcgatacaat

SEQ ID NO: 57234 - DNA, 315 bp, Zea mays
aatgctagggtgagctccgatgtgagggacatcagctcgtgatcttctcgaccttcgacatgcactcaaacttacaaattccgatacttcctcgggcatttagatatctggataccacaataattgacttgagtgggtaaggaaaatgaagacttaaataccttacctttcgggcgtctcacttttgtcccgagttgccactggtcaccagtctgaccggtgacatggtgggtctcctttggagccgaacgacgactcccctgacgttccgctgggacttggagccattcctgtcgcgtttgacactccacctct

SEQ ID NO: 57235 - DNA, 452 bp, Zea mays
  unsure (1)..(452): unsure at all n locations
cgagcagcgactggctacgacagaaacacgtggaatctatttataaccacatcctccaacttcagccaagaagtgattgtccctcgccgaaaagacgagtcccaagtctgagcaacactctcgacggccatgaccaatgatactgccatgactgcagtattgccaccatacgaagatatgggtgcctcgcaactcatcaacaatcgctctgggtctgtatgaccgacatacatgggcaactggggtggcttgaaagactgcggccacggtgtaccccgcaattctgtagaaaggggagaagcatcatctaaagcgaagcctccatgatggaaatcttataccagtcgtactcattggggaagccttcctgatggagctgactgcgcgaggccctctgctctaataatttgacaacaaggtgaactcntaggaagctcgtcatctgctctgaa

SEQ ID NO: 57236 - DNA, 306 bp, Zea mays
  unsure (1)..(306): unsure at all n locations
atcaatcttacattggctatcctttaagaatgacccaaagatgaatngagttgttatatcactaacttcatattcatctctagcaagaacctgtgttgtaaggaataaggattaacctttgtgggaatcaagcaaaaggcctacaaccaagtgatatccaaaggatggtaacaattaattcttaagtgcacattgcttttaattggtatattcctttgtgtcttttgtagccacataggaaaaatgaagcacttgagaatgaacttaaaagaatttaccttgctttggaaaggatctaattatatg

SEQ ID NO: 57237 - DNA, 462 bp, Zea mays
  unsure (1)..(462): unsure at all n locations
ntatcanatggacatganaagcgccttccttaatggaccaatcaaggaagaggtctatgttgagcaacctccctactttgaagatagtgagtaccctaatcatgtgtataaactctcaaaggcactttacgggctcaagcaagccccaagagcatggtatgaatgcctgcgagattttcttatcactaatggcttcaaagtcggaaaagccgatcctacactctttaccaaaaccattcctaatgatttgtttgtatgccaaatttatgttgatgatatcatatttgggtctactaacaaatctacttgtgaagagtttagtaggattatgattcaaaacattgagatgtctatgatgggggagttgaagtaattcttatgagtttaagtgaaacaactccaagagggcaccttcatcagccaaaccaagtacattcaagatatacttaccaagtttggaat

SEQ ID NO: 57238 - DNA, 426 bp, Zea mays
agctggtgaaggttcttcatccccacatgtgcttatcggcgatgccacagccatcccatgctagtcttagcaattaagcatgcatctagaccggccttctcttttgcaaaatcaactaaataaagtttgtcgtctagtacacccttaaaagctagtgaaccatcacatcttctaaagtgtaacacccggattttatgggtccaaaacccggggttaacataaacaccaggtatgctgggaccaagtctcacacatatgatgtatcgtggcacaggatcgaatgtcacatctttatatataacaggagttctatacaaaataaataattacattataaggagacaacggtccagcaacccaaaagtgactgggagacgacgacctagacctctcacgaactcatcacagcatccttcatgagcatca

SEQ ID NO: 57239 - DNA, 404 bp, Zea mays
taagaacatggtcaaagggcataaatacacatgtatgctatttatcaatccaagttccacgaatctaagacatcaagctcactacgtagctcacaaaaccttctttcttctaaagccttggtgaagatatcagctagctggtgatcagtgctaacatgggaaatatcgatatctcccctttattggtggtctctcaaaaagtgatgtcggatgtctatgtgcttagtgcagttgtgttcaactggattgtccgccaaacagattgcactctcattgtcacataagagtgggactttactcagattgtagccaaagttccaaagggtttgcctcatccaaaatagttgcgcgcaacactagcctgtagcaacatactcgatcttggtggtggatagggcaacata

SEQ ID NO: 57240 - DNA, 381 bp, Zea mays
  unsure (1)..(381): unsure at all n locations
agcttggaaaataatggtgcattcctcctagtggttacttgagcaacccaacaatccccattcatgattttgcgttaaagtagatgacaatattttggcaagaaaaaagtatccaaatgattcattntctaagtattatcatacaagccggagtcaactaaattctaagatacacgaacataaacataaacagtgcatctgcaacataaacacaattgttctatatgaaaccgcacacgagtgtgcttgactgaggtggatgactaatcacatcagaagtcgtgtgggtttggcaccgcaaatacccccaccattatctatgaagaatatgcaacatgtgttgcacaaatagaaatgagttatatcaagagtaatatgact

SEQ ID NO: 57241 - DNA, 418 bp, Zea mays
  unsure (1)..(418): unsure at all n locations
tctcgagagtctgaggggggttcctggcgaagtattgggccgtangtcctggtcgaagacccttgatcatggcctcaatggcaatttcattgggcactatgggcgcttgtgctctcagtcgcaagaaccttcagacatacgcctgaaggtattcttcatggtcttgtgtgcactggaacaaggcctgagctatgactggcttcgtctgaaagccttggaaactggtaaccaacatgtccttgagcttctgccatgacgtgattgtccctggccgaagagaagagtaccatgtttgggccatgttttggactgccatgacgaagaactttgccatgacagctgcattgcctccatatgaggatattggtgcttcatagctcatcaagaaatgctttgggtacgagtgcccatcgtacat

SEQ ID NO: 57242 - DNA, 356 bp, Zea mays
tttgagagtggctcataccatacaaaagagctatgctgacaatataatgagaccactggaatttgaagaacgagattatgtgtacctcaaggtgtcaccacttcgtggaatgaggagatttaaagtcaagggcaaattgtcccctcgctatattggaccattcctgatctttacgagagttggggagatggcataccaacttgagttacctgctagactatcggatgtgcataatgtgttccacgtgttccaactgaagaagtgtctccgtgtacctgaggaacagtttccaatggaagagcttggtgttctatgtgatacgacttacactgagtacccgatcaagattttgatac

SEQ ID NO: 57243 - DNA, 339 bp, Zea mays
agctacctttttttaaaggtggagggggcttaagtctctttgaaatcctctaaggtaattgcttaaaatgattcaaacatgctgtgataaatgcataagtctggcatgaacatcacactatctatgacacattggacttcacagtttctatgaaaaagatatgttctcattaacctaattatgtgcactgggcatttaaggccaaaatgtgtattcctctcaatgcacatatttacggggagcaatatatattatatataactggttaaacttaactgacatatccttttaaatcatgtctctttcctttggtacatatgcatattatccatctctatt

SEQ ID NO: 57244 - DNA, 350 bp, Zea mays
  unsure (1)..(350): unsure at all n locations
cactacacttcattctttcaggcgggacaagtanttcctcttatcggacctaaaacggagaattcgggaatatcctcctctcacgcgacgagacgattctctatgatagatgatttaccataaactgaatggcttggtcgccacggacgatctttggagaattcacacgccgctatccacatcatatcgtggcggtatcaccagtatactcaaacaaaccttgtaaaatatccttggtgattatttatgagatggtcttcgacattgctataagaaaccccagatttttctcttcggtgagactcaatttcatctcggtaacagccttcctatcttcatacatctttcga

SEQ ID NO: 57245 - DNA, 171 bp, Zea mays
ctctttttttttttgaaaattcagtctagttataataaggccagccctcccttgatgcggaggggacactaacttgaatggcctccaacatcacctcgatgtacgcgaaaagctgtgcacaccccacgcaagaaaggactgaaaccctcaaagatcgatgctgccagaacc

SEQ ID NO: 57246 - DNA, 381 bp, Zea mays
tatatgctacgccgcccctgcgtttgagagttccaagtttccaaaccacgtttttatactccaagaggctttgtatggtttgaaacaagcccctagagcctcgtatgagcatttgaaatcttttctgctttctaagggttttaaaatgggctctatggacaaaactcttttttctcctcaagcataataatgatacccttttagtccatatttacgtggatgatatcactctttggtggttcttctaatgctcttgtgtctagactttcagatcttatgagcaggaaattagagacgagcaagatgggcgagctgaatttcttcttgggatgcaattaagcagactcaggactgacctttgtcatctggcagtatccaaga

SEQ ID NO: 57247 - DNA, 474 bp, Zea mays
ggtggtggtccttgtgggaactttgtgttccaagtgattgatattagtaagctcactccatccgcggatcgtttgagagagggaacggtcgaaagagacccggcctttgtggcctcctcaacggggagtatgtttgcaagaaccgaacctcggtaaaacaaaggtccgtgtctcacttgcttaatcgcttaggatttgttttgcgccctctattgcggactcgtttcttattactaacgctaaccccggcttgtagttgtgtttatatttgtaaatttcagtttcgccctattcaccccccccctctatgcgactttcaactacattcagcgattcttgaagcagcgcaccgagctgcccaacatcaccgactcggatgtcatcggcgcgttcctcgccggcaccatctgccgcgacctggtgagcaagttgggttgcatgacctccaccagtgcgagcgagctgatggacatt

SEQ ID NO: 57248 - DNA, 347 bp, Zea mays
ctagttcaaattacaacatgttctacataacaattaaatacatgtgctacttttaatttaacatctaaatcattgctgacactctttagagtacaaatggttttatgacaagttgataattcaccagagagtatttcatttcttttacactctagagcaagagaattttgtgcactaacaaatttatcatgctcctcatataagagaacttcctgtttttctagaaatctattcttgtcattccaagcatcaatcaactcattaatcttatctattttacatctatctaagcgctcgaataagcatgaatagtctatgctatcatcatcactagactcattatcact

SEQ ID NO: 57249 - DNA, 296 bp, Zea mays
taaaagatagacctcgtgcaggtggtcaatcacgtaaacaggtggcacgaccgcatcacagcaagaatgtgatgaccacttcaagacccctggagctggtgtatatggacctcttatgacaccgcgcctatctgagcatagggggaagtatgtatggtctagttattgccgatgacttttaccgcttcacttgggtgtgctttttgtaggataagtcttgaacccaagggacccttaagcgcttccttaagagagcttacaatgagattgagctcaaagtgaagaagataaggagc

SEQ ID NO: 57250 - DNA, 398 bp, Zea mays
agcttgtctttggctcatcctctttcttcatccaaatttgaggagagcccgagtagcagtccaataggctcataagttctaaagaaggtgctgcatctacaagggagtctattcttggtaaaggaaactcgtccttcgaacatgccttgttaaggtctgtgaaatcaatgcacaatctccatttcccattagctttcttcaccataacggtgttagccagccactctggatatgttacttctctgataacaccgacactgagaagtctctttacttcatttcgtgcaccttcgactttatcattagatatttttcgaagcctctgctttcttggtctgaaggatggatccacattgagtgaatgctcaatgacgtctctattgacaccacagagatca

SEQ ID NO: 57251 - DNA, 390 bp, Zea mays
acataaaaactcaacttttatgcattctacttatatgaccccacgatttttccatgtagtaggacttaaatataggccgagccttttagcactaatattacagataggtgcatcatcaagattaaaatgaataacccattcataatggatgcaaagccacaaacatgccattttagagatcacacaccattgttttactccaaatgaataaccatccttcataaacatgaaggagacatatgttttgactcatactaggaactagatacaattattaactccaaaaaatcctgatggaggtggagttgcatcgtcccgatggcaacgcacaactcttgcttattgctacccggaataacttctctcttttacgctttattttatattcct

SEQ ID NO: 57252 - DNA, 416 bp, Zea mays
  unsure (1)..(416): unsure at all n locations
agcntacccatgaagaggcaggtgacctttttttggtcctcgancatcaagcctacatcgacgaggtccttaatcgactcacacggagacactacactgagactctcttctcgtgcaagtcacccacccgatcttagctttattatttcaaacccaaaggtggggacctgataaaagtacatcttttcctatgctgaacccatcatggccatgatggatccaccatcaagttttattttcgaaaacatcccacccacttgaagcatcatcttttgcaaaacaaaagattttgtttttctagagcacagctaagcatagaaaaacctttttgtaaatcaggggattaaggagaagtnatcaaatccaaggaaggaaatgcagcaactgggttagcacacaacttccatcacctaatg

SEQ ID NO: 57253 - DNA, 474 bp, Zea mays
cggaattaaaactctagcttatgacctttgctgtcacctgagatctatatttatgtggttgaagattgccttggagcactagatggtacacacattgatgattttgtacctttggctgatcaagggaggtataggaataggaagcaacaaataaccaccaatgttttgggtgtttgtgattgacacatgaagtttgtttatgttctagctggatgggaagggtcagcttcagattcacgtgtgctacgtgatgccatgtctcgggacgatgcatttgctattccaagtggaaaatattacctagtagatgctggatacaccaatggaccaggctttctttctccatatcgatccactcgctaccacttgaatgagtgggctgcccaagggaataacccatccaacgccaaggaattgttcaatatgcgccattcaatagctagaaatgtgatacagagaacatttacgctattg

SEQ ID NO: 57254 - DNA, 436 bp, Zea mays
agctgcagctaccaggaagttatagaatttttgtttaccaaacattcttcagccaaagggtgaactcacaatcaatcaagcactatcacaatctttggacagcaatacacgactcacttgtcttgatcataacttctcaaatattaatccaaaaatagccaactataactttctggaaagctcaaaaagtgttctacaactttggtattttcacctcaacaagattcaacacttagcaaggttaaaagtgctaacacaccagatctgtccagatttggacagattcagacttgcgactctataaattcacaactacagattcagacattccaaccaggtgatcctagactttctggaaaggtaatctaattgcctacatatcatttataaacatctcaaggcgattcaatatctaactcacgactaaagacactat

SEQ ID NO: 57255 - DNA, 399 bp, Zea mays
tataggtacatttgattattattcttgcgaaggatagctttgttataactaagatatttgacaaaatgatttcttgtacagcgggacttttgccactaccggaaccatattacacaaagaatgattcagaattaaaagatatccttatcgaattcaaggtggtgcataatgcaatcgatgaagctattaacacagtttcgaacgaagctgctgaaaaagttttgaacgaagaatgagagatatttgtaaaaaaactttttcaaattcgtgtttgagaatactgtgaaaaacctttttatgtgtttgctgtgtgtacagacaactatatggaatgtattatgtatataagtatgatttgcatgacatattttatgtagcgtgaaataagtatacctacca

SEQ ID NO: 57256 - DNA, 347 bp, Zea mays
gctttttcactcgctttggtggcggttattttaactatgttagacaagccctagatgcgatacaagaaatttaaacatgcaatgcaagcttgacaacaccatttgacatcttacataaaatttctgagatcaagaatatttagttcatttctcaacatgccaaagtgggtcttatcaagtggcttagtgaaaatatccgctaattgatcttccgacctcactccttctaaaatggtatctcctttagcaacatgatctctaaggaagtgatgacgaatatcaatgtgcttggtgcgagagtgttgtacaggattattagcaattttaacagcactcttattatcaca

SEQ ID NO: 57257 - DNA, 455 bp, Zea mays
  unsure (1)..(455): unsure at all n locations
aagagatggtatgaatctttgaggtgctttatagagtcaattcaaattttttgttgactcaagctatcaatcttcaaagatttatgtccaagattgacccaaagttgttttgaactgtcatatctaaaactcatatcatctcggggaagatattgatgttgtaggaattaaaagaattatcatgtgcggaaaaatcaaggcctacaacatggaggaaagtcaaaggatggtaacatttatgttcttaagtgcaattatcttaaaattatcatgtgtcttgagtagtcacatagaaataggaagcacttaagatgtttttatattacatcaccattccttgaagaattttctctcatatggtagattgtatattcatcattttcatattatggcaatctacatgctntaaattattngaaagtcccatggcatggtttacacaaaatattctatta

SEQ ID NO: 57258 - DNA, 447 bp, Zea mays
  unsure (1)..(447): unsure at all n locations
agcttctaagttctttgtaataactctgactatttcctctgcttcaagcaccaaatctggcccaaatatttccctctctcctgcttgagaccaattcagcggggttctacaccttctcccatacaaggcttcaaaaggtgccatcttcagactggactggtagctgttattataagaaaactcacccaaagaaagacacttgtcccaatcctttccgtagtgtagtacacatgcccgcaacatgtcttccaaaatctgatttaccctttccgtctggccatctgtttgaggatggtatgctgagcttcgtattacctaggtcccaagtgagtcttgcagctgctcccaaaagcgtgccacanacagtgctcctctgtcagatacacatggtcttggaataccatgccactgcattattngatcaacataaatntctgcatacttctc

SEQ ID NO: 57259 - DNA, 377 bp, Zea mays
atatcaaatggacgtgaagagagccttcctatttggtcctatcaaggaagaggtctatgttgagcaacctcgcggctttgaagatagtgagcaccctaatcatgtttacaaactctctaaggcgctctatgggctcaagcaagccccaagagcatggtatgaatgcctaagagattttcttatcactaatggcttcaaagacggcaaagccgatcctactctctttactagaactatagcggatgatttgtttgtatgtcacatatatgttgatgatatcatatttgggtctactaacaaatctacttgtgaagagtttactaggatcatgattcacaaatttgagatgtctatgatgggggagttgaagtacttct

SEQ ID NO: 57260 - DNA, 267 bp, Zea mays
tatatgcaagtacacctgatcgtacatgtcctggatgagcataaaatattatggccactatgtttacatcatatgtttcacttggagcgagacctgggagtattaatacgttatgtgcgaaatcgcgctcacccagagggctcattccttgcgggatgcactacataataagagattgagagctgtatgcattacatcattgacggaacaatgatctgtgtgcctgtacctaaacatgacggtaaactatgtcggagacggagaatg

SEQ ID NO: 57261 - DNA, 372 bp, Zea mays
tgctcccgcatacatgagcccatcgcgggtgctagtgcaatgatgtgtcccgctatggcggatgaagctcgtcttaagatcgtcctccgtgcttattcgagatcgatgataaccagagtagcagtgccttaagctcatgagctctacaatagtcgctgcatacgcagaacagtatatacatggcaacgggagctgacactttgggcaagccttggagacaactgtgaaggctacgcacattatagactctccattagctctttataccactacaccggtggtcagaacactagggtatgtgactaactctaaaactctcgcactcagaagcccattgacttcagcctgtgctccatcgacaatgcgtatgac

SEQ ID NO: 57262 - DNA, 354 bp, Zea mays
  unsure (1)..(354): unsure at all n locations
gcttacctttgttgacatagatcacttgtatgctcaacttgaacccagcaatgttttcaactgcaaggttattgaagaagccaacaagtccagtacacaggccaataagaagaactaatgaccatttcagaacaatatactggaatatctgctgcttctttcttgatcgccaatcctgcttgaaaaggtcattttccacaattctgaaacatgtaagtaaaatttgattgtaagtcgggaaataacacagcaagcttgctaaattgtgcatactgtctatntctaaggagtatacagtcagcaatttacatctgccagatattagcaccattgagtttacactaaataatttga

SEQ ID NO: 57263 - DNA, 396 bp, Zea mays
ccacatgtgctaagcggcgatgtcatattcagcccatgctagtcttagcgattaagcatgcatctagaccagcctcctcttttgcaaaatcaactaaataaagtttgtcgtctagtacacccttaaaagctagtgaaccatcacatcttctaaagacagacacatctacatttgtaaatagacaattatatcccatattacataattgactgacagatagtaaattatatccaagagactcaactaaaaacacattagagatagagtgctcattggatattgcaatcttgcctaaacctttcaccttgccttggttcccatcaccgaatatgattgaatcttgggaatccttattcttgacgtaggaggtaaacatctccttctcccccgtcatat

SEQ ID NO: 57264 - DNA, 306 bp, Zea mays
tccaaggaaacttccgacttgatgtacagtggttggggtctccactccaaaatatccttgactttgctgggatccaccgcaatccccttggcagataatacatgtcccaaaaattggatctcctccagccagaatgcgcacttactgaacttagcatataattggtgttcccttaagcgcgttaatatgatctgcaaatgtcgagcatgctcctcttcattcttggagtataacaagatatcgtcaatgaataccaccatgaacttatccaactcgggcataaatatcgaggtcatcaaatatgtg

SEQ ID NO: 57265 - DNA, 460 bp, Zea mays
tgacaatgacgagatggcgctcgtcatcaagagctttcgttcttttctcaaacaaaggagagggaaagactactagtcccgctccaagaaggtttgctacaagtgtggtaagcccggtcattttattgctaaatgtcctatatcaagtgacagtgaccgaggcgactactagaaggggagaagaaaggagaagaagaggtactacaagaagaagggcggcgatgcccatgtttgtcgggagtgggactccgacgaaagctctagcgactcctccgacgacgaggacgccgccaacatcgccgtcaccaagggacttctcttcccaacgtctgcacaagtgcctcatggaaaggacggaaacagaaggtaaatctaaatcctcactagatatgaatctctaggatgaaatgctagtatgaggaagaaatttgcgaccctttttgccaccttacatggacaa

SEQ ID NO: 57266 - DNA, 363 bp, Zea mays
  unsure (1)..(363): unsure at all n locations
gcattatcttttaacatagactctctatggataaacctaacacangagatgacattagtagctcacgcactagtttcttatttagcaaccctttatatgtggaaggcaagcgacttgcttaaatagagaaacctcctcatatggactaaagttcccttgagccctcatgcacaatatatctagaatgacatggatcatatgcatggatgttcaatgaaatctaaagggctgacttaatacatattatggtgagtgtctaatatagaagaatcaacatccaattaactacattgagaatacatcacataattttggattggtcaccatatgatgatactcattaatcttccaattagaccttta

SEQ ID NO: 57267 - DNA, 318 bp, Zea mays
cagcgcatatcggtccctccttgcagagttactgtttggtctctgcggtccaccgcgcagcgagtgcaagcggctgtccgtctggtgtaaaaatcctggcgcttcgccttcttacctgcagtactatataaacagatgagtatgtgtgaagttaccacaacattcattgctatttgcactggtttgctgccaaaatttttaaccatatccgaagcttgactctcggaatcgaacgaagctccagcttgaagcctgcttcgtcagaagaaaaaacttcggaagaaatagtatttaattcccaccaattcagaattaaat

SEQ ID NO: 57268 - DNA, 459 bp, Zea mays
gcatgcaagcttcacacctctgaactaactcggctgcattattttttgctatcggccagtagaaaccagacctaaagaccttcccaaccagagtcctggatgttgtgtgtatcctgcactgtccggcatggacctcatctaacagttgcttcccaatagctgaaaaaatgcacttcatgaggactcctgttgcgccccttctgtacagtgcctccccaatgagggtgtaatgagctgattgccttgcgatgcgttctgctgcagttttgtcatccgactcctcttcattctttatatatctgatgattggctccctccagtcattagagtctgactcttgcttgctcagaacattgcactcttctgctcgatctaaggaaatactcgggcgtggtacttcttggacaataactccaggtgggacctgggtccgactggatcctagttttgacaacgcgt

SEQ ID NO: 57269 - DNA, 409 bp, Zea mays
  unsure (1)..(409): unsure at all n locations
taatgctcctcttaaaagatnggtctaatttgttaagggcattgttctcatgcctcangataatgagggctatattttatatcctgctggttatcctgaggataaaattaggagaattcactctaggaagtctcactctggatctcatcatgcttttatgtataaaagtgaggcatctagttctaggcaatcaacccatgcaaaattgcctaggaagaaaactcctattgcatcaaacgatcataacatttcatttaaaacttttgatgcttcctatgtgctaactaacaaatcaggcaaagtagttgccaaatatgttgggggcaaacacaaggagtcaaagacttgtgtttgggtacccaaggtgcttgtttctaatgtgaaaggacccaagacctgttgggtacct

SEQ ID NO: 57270 - DNA, 241 bp, Zea mays
gggagatggctctagaaattataaggaaaagtgaagaacgtatttctgatgctatagaagtatcagaggccgctgtaaaaagtgcggatctcgagaggcgaatacgtatttgttaatagcttccgactctatgttctaactttatgactttgaacttatttacgctttgcatcacagccgcactatcttctcccccagagcccgccgagccattggcggaccccagagcaaaagaggatga

SEQ ID NO: 57271 - DNA, 451 bp, Zea mays
actaagctgctttgaaaacatgtagattatgtaattcgcttccttatttctttatctccgatgttctgtaatgtctgcaagacgggtgagacgttcccggtaaggtaaggaaagataccgaacttgtcaagtagtcaggggcacctacagggttgactaaagtccgttggacaaagacaactgtaagtgggcctaattacttgggaggttctgtcgcagctggtatcggagcgtagcccttctttgcagatattatgaggcatcttcaaaagaattttcaaaagtcttacccaaaaattcttttctcttcttacctaagtattctgaagagtctgttttaaagaccagataggaagagtgcaacgtatagaatgttgaatcgactaatgttgattctgtaattatacatgcatcatgctaagaatcttactaataacagtttcccccttag

SEQ ID NO: 57272 - DNA, 288 bp, Zea mays
ttgctgttatcctgtgataccccgctcgcccatgttgctcaaagatgggcatagattcctgttgccttgacttacttgtagaaatacatacaacacgcaatgtgaatccttactaacttacactaagcgtagaacaacccgtaaaatttctagcgtcgtacaaaccgacgttcagaacacaggatctgagtgaacattagtatgaatttatagattatcatcgctttggctaaactcatttcgttttaatactgctcttatatctatctgcgaactattcctaaacca

SEQ ID NO: 57273 - DNA, 388 bp, Zea mays
aaaactcagcttcgacctctgaactaactcggctgcatcacttatttctttttttcaatataatcccgacctgaagacctttcccactagtgtcttggatgctgcgtgtatcccacattgcccagcatggacctcatctagaagtctcttcccagtagatgagagaatgcatttcatgaggacgcccgatgcaccccttctgtatagtgtctcctcaatgagtgtgtagtgagctgactgtttagcgatgcgctcggctgcatttttgtcatctggttcctcttcattctttatatatctgatgagcggccttctccagacattagaatctgactctggttggatcacgaaattacattcttctgcctggtccgttgagatgcttgga

SEQ ID NO: 57274 - DNA, 446 bp, Zea mays
  unsure (1)..(446): unsure at all n locations
cttaagacacctgcagctgcaagctgccagctctctgctcaatttttattctgagaacgagctntggcgagtgagccttctgctgagcgcatcaggctatctttntctttcaaggaatcttcaagttttttattttatcttcaaagctttcaacaatgtttttgtttttctgtcctcgacatcctgctgcaacttcaaggccttgctcagtagcatactctgaaaaacaaatcaaagttagaatacccaaatcaccatgaatgtaccaatacggagctgtacagaagtcttactttgaagtttgagtagaccaagctgccaataatggtgtgccacctatagcaatgatgtccgtttccagctttggaaatccaacactcttggataaagtgcttatgaatttcgccccggcgcggtcgcgaatgcataccanaatctcttcgttg

SEQ ID NO: 57275 - DNA, 485 bp, Zea mays
  unsure (1)..(485): unsure at all n locations
gacctataaaactcaagcttcactgattccncanaagccagcatatccttgagagctcttttttttggtgggtaagacttgcgaaagtacactccgtactcaaggttttcaaacccatgttgttgtaggtgcggaaacaacagacttttgttgtttttgttctaaggtggtacccaaggacaagccccagcagtgaagttagtcgcgggaggatgttggccttccacgttaaaaacaataaacttttgtgcgggagggtgttttgcctccctggtctgtaataataatacttatgcactcataataccctggtattgtaataataatactctctatatattttttatgaatgtaaattaagttattgtaatctgcttccgcttattctatcctccgatgtgatgtaatatctgcatgacgggtgaagcgctcttgggtgaaatgatggagatagacttaccgaacttgtcgagtgattatgtgca

SEQ ID NO: 57276 - DNA, 430 bp, Zea mays
  unsure (1)..(430): unsure at all n locations
agcttcgcgagagagggaatgagtcccttgtctcttgagaagtctagtgttgcggagaggagttcgatgtttgagtgagttcgtctacatcgtccttgccgccttcgcctcctccgggaaggccctgtgcatccccttttatagatacaaggggatggtccagctgtacatatgggggtgtagctatgtgataacgtggccagcggagaagtgcttgagccctgtagaaacgtagctagcggtgcggccctgggtcctgatgacgtttctttgccttcgtagagagcttgagaacaatcgacgtcatggacgcatgcagggaaccatcattacctgttgccggagtaatctagatgtgacaccggtcttgttccttcgtagcctgacgcggctagctagaggtanggtaatgatgtatctcctgtagcgt

SEQ ID NO: 57277 - DNA, 377 bp, Zea mays
tatccttgcatttatgaccatatctggtcaggcgatgctctttgctgcctgcaacagatgggaaatccttatagttgtaattaggcagcgcagtggttctatcttgtaataaaggatatgagaaatcgtactgggtaccattaattcgccatccacaatctaggtagactgggaccttcacatctgtgattactccggcctatgtcaggcacatgccacatgataacaagaccaagaaaggatgaagacagttggcccaatgacaaataggatccacaaatagcatatacatacatgtaatactaccactcctttgaactataaagggagtggtagagcaacattcatgggacaaccaacacaccaagagaaattac

SEQ ID NO: 57278 - DNA, 402 bp, Zea mays
attccagtgtacccaggaccactattaataccttcaggcgtatgtccgaaggtttctgcgtctaagggcacaggcgccaacagtgcccaatgaaattgtcattgaggccatgattaagggacttcggccgggaccttcagcgcaatactttgccaggaagccaccacaaactttggagatgctgctccagaagatggacgagtatatccgagctgacaatgacttctgccaaagaagggaggaggcattcaggttctctgaaatgaccaggggcttcggaggaagatttcatccgaggcacgtcaggtcaattcataactccactcagaatgatgatagaggaagccaacagcaaaggccacaatactcctcgcaagcttcggggcagcagcaaagctcttt

SEQ ID NO: 57279 - DNA, 474 bp, Zea mays
tgatgtttagaatgacatcagcttctcccaaatcttttatttctaaattgctcgatagaagatttttaacttcctcaatcacattgagatttgatccaaagatcaagatgtcatcaacataaaggcacagcataacagactcacccccaccataccggtaatacacacatgtgtcagattcatttacaacaaagccagctgctgtaagagtattatcaaacttttcatgccattgcttaggtgcttgttttaggccatacaatgattttatcaacctgcacaccttgttctcttgaccatccgcgatgaacccttctggctgatccatatagatctcctcatccaactctccattaaggaaagctgtcttaacatccatctaatgaatgataagaccataagaggctgtcacggctattaatgtgcggattggagtcaatcgagccactggtgagtaggtatcaaagaaatctt

SEQ ID NO: 57280 - DNA, 441 bp, Zea mays
  unsure (1)..(441): unsure at all n locations
agcttgttgaatgtttggagaataattatcttgaccttgtgtgcagagctcatcacgtaaccaaaagtatttcaaccattagtccttattctcaatttttgttatagagtgatgtgcttaagtgtgtaactgttgttggggatttttctcctgcttttcagacctttcttttaaatgaaatgatacacaacttttttgcatgttcaagaaaatgatgttcttttttcgagattcatgtggcaatttttaacgtaattgtccctacctccatatgtggtagaagatggctacgagttctttgcagagagaagactattgaccatcttttcagctccaaactactgtggcgaatttgataatgcaggtgctctattgagcatatatgacagcttgatgtngtcttttcagatcttgaaaccaaatgaaacaggtgcaccacat

SEQ ID NO: 57281 - DNA, 368 bp, Zea mays
gggcgactgccagttcgacctctggaagcatactatgtggtcacatgcgtcactatgttcagcaagctccggcgcaatcgctgcttggacgtggtccaaagcggctgcaccgcgctgtccatcttcaaacaggggggacctcatggtcatcgtcaacgccggtgactctcgggttgttccgggcaccgcatccgacaacgacgccgtcacgacgtccagctcatcattcacctgaacctcaacctgccacataagtcactactgaccggccagcggccatgaattcttgtgcgctgggacgacgaccgttgctgacgttgtgtgagtgtcctcgaacaagatgtatgtagaggagtagcacatctggt

SEQ ID NO: 57282 - DNA, 273 bp, Zea mays
  unsure (1)..(273): unsure at all n locations
ggctctccaacatgtctgaaccctgcaacaacgctgctgctgcgatgaagctgactctttatgaagagaacaacttaggtgtttttatagcgatgtctaagaccaaccctaaaaaatcccaaggagattttggaaggtctgtctgaagatactggtgacagcgaaagttatgatgtggacagcggtggcgaagactccgaagatcgtccctggcgaccaagccattcagtttatggtnaatcaactctcacagagaatcatcttgttaatatg

SEQ ID NO: 57283 - DNA, 370 bp, Zea mays
tgagaaagacagaccttgtgcatcatgtcaagtagggaaagaagtgcgaacaagtcttccgagccagaacataatgacgacgtcaagatcactagagttgctacatatggatctcttcgggcccattgcttatcttagtagcgggggaagtaagtatggtctcgttattattgatgactattcccgcttcaactgggtattctttttacaggataaatctgaaacccaagaaaccctcaagtgcttcttaaggcatgctcaaaatgaatttgagctaaaggtgaagaagataaggagtgataacggattggaattcaagaaccttcaagtagaagagtaccttgaagagaaaggcatcaagcatgagttc

SEQ ID NO: 57284 - DNA, 469 bp, Zea mays
  unsure (1)..(469): unsure at all n locations
ttaccttgaatcccanaagccaacatatccttgagagtcttttcttttgatgggtaagacttgtgaaagtacacttcgtactcagagttttcaaacccatgttgttgtaggtgatgaaacgactgagttctgctgtttctgttccaaggtggttcccaagtaggaggatgaacgctaaaacttatttggggatggtgttttgcctcccggtaatgtaataataagttccgcactcaaacatccggtcatgtaataactactctttctatatttttgtatgaatgtaaattatattattttaatcctttccactcattatctactcctattatgtgtaatgtctacgtgatgggttaagcgcccttgggcgatatgatggagatacagataaccgaacttgccgagtcattatgcacacttgcatgactgtctgaggtcttangacangacatctgtangtgggctaata

SEQ ID NO: 57285 - DNA, 150 bp, Zea mays
  unsure (1)..(150): unsure at all n locations
aacaaagctcgggcccggcgcagctngcttgcccacggatccagcttttttatttgcagcatcaaacaacaaggcagcaaggggggggaggaatgatatcgcccntggctgcacacacacattatggatgattccattccatgccgcctg

SEQ ID NO: 57286 - DNA, 408 bp, Zea mays
aactcaagcttgacggtgactcgccgaagcaacagatactgcagggcggttgcttacttattctgggatgacaggcgaatgatacgaagcagcatgcgtgacctgcttccgctgagctcgataaactgccgcgatagctaattccttttgctgtctggaagggaacaaggcccatactggaggaatggactctgatctcaccacagaataaacaaaagatacttgtcggctgatcgccaaatattcccgcgaaggcgatagcgcctatgcctctcagagctcgcggtcggaaagagccatgctcgtgccccgaagcctgtgaggaacattgaggcctcagctgtaggctccctctatcatcactttcgtgtacagccatgacacgagctgacgtgcctcggatagaac

SEQ ID NO: 57287 - DNA, 406 bp, Zea mays
  unsure (1)..(406): unsure at all n locations
cttcgtaaagaatgtcttcttgtttttctagcaacctatcttttcattaagagcatcaattaattcattgaatctatcaactttagtcctgtctaaacctttaaatagatcactatagtcaacatcatcatcggattcctcatcactagaagaagtgtactctgaggtagcttgtgtacgtaacttcttctccttagccatgaggcacatatgatgttcgttggggaagagggaggacttgtcgaaggcggaggcaactagtccttcatcgtccgagtcggatgaagaatagtcggaagtccattccttgccaatatgcgcctctgcctttgccttcttgaagtnttcttcctctcattcttccctttcttttcttgtgccgtgtcattatcattatcgggacatt

SEQ ID NO: 57288 - DNA, 477 bp, Zea mays
  unsure (1)..(477): unsure at all n locations
tctacagggagagcacattntacgactaacaaatgttcattttgataatgacnaggattgtagcgcatgccaagcaggaaagcaaggtggtgcccatcatccacacaagaacatcatgacgaccgacaggccgcttgagttactccacatggatctattcggcccgattgcttacataagcatcggcgagagtaagtattgtcttgtaatagtggatgattattctcgcttcacttgggtgttgttgttgcaggaaaaatctcaaacccaagaaaccttaaaaggattcttaagacgagctcaaaacgagttcggattaaggatcaagaaaataagaagcgacaacggaacggagttcaagaactcacaaatgaaggcttccttgaggaggagggcatcaagcatgagttctcttctcctacacccctcaacaaaatggtgtggtggagaggaagaatcgaactctattggacatgg

SEQ ID NO: 57289 - DNA, 472 bp, Zea mays
  unsure (1)..(472): unsure at all n locations
aagctcaataaaccatctggacccactccatcgcgctacagacatgtttgtctgagctcccttcaggcaccctccgatgcaagcaaccaaccgccagcaaatgcctgttggcactgttgagaccccagtcacttcaagaataactgccctcagttgaaggcacccgggccgacctactccaacttggtgaatggccccaagattccctcagcacctacctgcaaggcacctccttccaacagccagcagagcaggactcagtaccagggcagacacgagtcaaccacagctcaagaagcccatcatgccccgagagtagtgctcagtgagttccttgttgaatctactcccgctactgtgctttgtgattcaggagcataccattcctttatagccactcagttcgtggaaagcatggatcccctctcccncttactatcctttggtacctgaccccggatagacctctatg

SEQ ID NO: 57290 - DNA, 312 bp, Zea mays
aaatacgtcggtgcggaaaaaaaacctctattaactgtctttgcttggcagtgtcatcaaatagagctctcccagatacctcaacagcataagctgtttttggtgtcttcatgcaagatcttgtactgaaacttctggcctaggcttgtggttagactctccaccttggtactgctgaatcaagtgttgtaacatgtgacacacagacacaacagttctttcagccaagtgagaaaatagacaaatctgtgccactgaattgcggtgatctcttacatggtaagcacacacatgaccctgatgcaaacttta

SEQ ID NO: 57291 - DNA, 408 bp, Zea mays
  unsure (1)..(408): unsure at all n locations
caccgctgggnttctacagctagaggccaaccagcccaaggtggggttcgaactgcccgtgatggaagaagggctacagattagtgaaactgtataatcagtagaacatcatgcttatatgtgtttaatattaaatataaattgtatatatatatatatataccgttttttaaaataataaaatataaccgtgtcggaccatactataccagcactactgaccaaggctacaacccaagcacggcacgacgttcttggctcttgcaaacattagggcgtntctaagaccacattatcgcaatggacttcatggtatttganggtgcctgaatggatggagcaataatgacttgtcacactaacacgacaatgacatgttatttgttggttctaaacgttagtaattgc

SEQ ID NO: 57292 - DNA, 432 bp, Zea mays
  unsure (1)..(432): unsure at all n locations
tgatctcttgcaacccttccaagttacttatttctccgcgttttcatagttggagctcgagaccctgagcctctccaagtgcgctgaccaagacacaagattcctagatgcccagggcaggaatcgcgacttacgtcttctcgacattcctgaccgcgtcctcgtggcattggctattgtgcagctgcatattggtagcgacctacatagtgccatcagccttctgaagggtttgtcggtgaaagaactaaatcgtttgacgagtgaattcgatgccgttgcgaatgttgtacttggggatgtgtttgtggaacagataatccacaaccttccatatcttcactcgatatccctttggcctagacattntgttatcacgaaccgtttggattattgatgtgtgtgggtttggggtccccagatcccggcttg

SEQ ID NO: 57293 - DNA, 436 bp, Zea mays
  unsure (1)..(436): unsure at all n locations
agcttcgtgaataataaattctccgaatctattcttctaagatgaagattgtgtctccttgggaccacaatattcactctttcaaatcatacttccgaagatcaatattgtgtccccttcttgtgaccacgattttcactctttcaaatcatactttcgaagatcaatattgtgtccccttcttgtgccatatgcaacatgatgtatgatgcttatgctatgcaaaatgatgtgatgatgttatgttacgtatatgacatttgttccgaaagatacacacatatccncacacaatatttttgtatcaacactgattcttcgctgtaagctctgcattcccttacgaacgtctttggagcttcttcgccttttacttaggcggtataagctctgcattcccttangaacgtctttggagcttcttcgccttttactt

SEQ ID NO: 57294 - DNA, 370 bp, Zea mays
taccggctctttatcttcatagcattcctataacatggccatttgcatgctaggggttggacatgatcggacccttcaagaaagctcagggaggctatactcatgtgctggttgccattgacaaaatcacaaagtggatagattataagcctattgcctctttaacctcagccaaggcagttggagtcatacaagacataatattcaggtttgggataccaaacagcatcataactgacctgggatccaacttcactagctctgaattcttcgaattctatgaacaacggaccatccagattaagtacgcgtcagtagcgcatccaatagccaatggccaagtggaaagggccaacagactgatactgga

SEQ ID NO: 57295 - DNA, 193 bp, Zea mays
tactattctatccttagtgggatgtaccatagtataggttaatttccttgcaatataaaatgttcaataatgcatataaacttgacatcaactatatgtgtgcactaatttaaaagaaattaatctatccttttgggtttcaagaatgatgatttattcttcatccacatataaggattatcatttgtgaaac

SEQ ID NO: 57296 - DNA, 479 bp, Zea mays
  unsure (1)..(479): unsure at all n locations
tataaaactcagcttcggctttaaaacagnttttagcgcttccgaagatttctttgctgctgagaaggctgctgctgagatgaagctgagtcttgatgaagagaagaacctatggtttcttatagcgatgtcgaagtccaacacagaaaagattaccaaggaaattctggaggggctgtctgaagacactggtgacagtgaaagttatgatatggacagtggtggcgaagactccgaagatcgcccctggcgaccaagccattcagtttatggtaaatcgactatcaaagagaatcatcttgttaatatgagaggaaggtatttccgggatctgtccattgtgagggcggacgaaggggaaaaaacttgtccacaccctgaagaanatgaagttgtggtgtacccgaagcttttgaaagctggattgcgattccccttgagcagcttcgtcgtggaggtgttaaaatcttcgaagctat

SEQ ID NO: 57297 - DNA, 146 bp, Zea mays
aacacaatgacacctgtatcagtgagaagagctttgaggcggccttcctatttgtgaagctcgcagcaacgtgtattctatggaatctacgggacatacactgctaatggaggggtccggagatataggaatgtttgcctgtcctt

SEQ ID NO: 57298 - DNA, 449 bp, Zea mays
  unsure (1)..(449): unsure at all n locations
agcttanagccatggtaagtagcatangcaatgttttatgcgaattgactcaagcctagctatgggtgcataggtttcaccgaaatccaaaccttcaacttgtgaatatcccttggctacaagtcgggctttgttccttgtcaccacaccatgctcatcttgcttgttgcggaaagcccacttggttcctacaacattttgattaggacgtggaacaagatgccatacctcattcctcatgaaattgttgagttcctcttgcatcgccaacacccaatccgaatcccttaatgcgtcttccaccctgtatggctcaatagaagacacaaaggagtaatgttcacaaaagtgagcgacacgagatcgagtggttacccccttatgaatatcgncgaggatggagttcatggcgtgatctctntgaatcgctcggtggactcttgggtgtg

SEQ ID NO: 57299 - DNA, 365 bp, Zea mays
tatgaagaatcttcattccaatgtgggctattctgtggtgtcttagccaacccacgttagtctcagcaattaagcaagtgtcgagatcagctctattaaaatcaaataagtatagctgaccctgtaacactcccttaaaagctactgaatcattacatctttctaaagacagtaacaactatatccgcgaaaagacaattgagcccatttacataattgagaaactgatagcaagtgtaatctaaagaatctacagaaaaacattggaaataaaatggtcatgagatatagcaattttaccaagttcttagaccacaccttgatttccatatccgaatgtgatagctcgttgggaacatggattt

SEQ ID NO: 57300 - DNA, 326 bp, Zea mays
ccactcacaagttgcagaatggctagcaccatgtgtcggatgggtcgatttacaaccgggctaaaagtcccgccatagtcgacctcagggctttcagtgaagccctagagaaacacccgggtcttgtaataattgaaggtctcattagagaggaacttatgtgtgaagatccatttgttagtgactatgttggagccatcagaccaaggatcgagttcccagatattgtttctcataagggttgtatattcttcctccatggttgtgcgccaatgtggaccagcaagcgcggaccagaccgaggatggaatcggagatggtgtcgt

SEQ ID NO: 57301 - DNA, 430 bp, Zea mays
  unsure (1)..(430): unsure at all n locations
gacctataaaactcagctattaatccctcgcagactgcatttatgcctgatcacaatatccttgaaggtgtaatcgtgcttcacgagactattcatgagctgcaaaggaaaaattgaatggcctgattctaaaacttggctttgaaaaatcctatgataaagtaaaatggtcattcctacaacaggctttgcgaatgaaaggtttctcactgaaatggtgtgcttggattcaatctattgtttctgggggacatgtcagaattaaaattaatgatgaaattgggcctttntttactacacatgagggccttcgacaaggtgatctcctttctcctattctctttaatatagttgtggatatgtcggtgatactctnttcaagagcgaaggaagataaccaattcgcgggagtgggtcctcacctaatgga

SEQ ID NO: 57302 - DNA, 373 bp, Zea mays
  unsure (1)..(373): unsure at all n locations
cagataagagtagcacgcctttatgttttgctatgtaaggaaaggcttcggcaaaaagaggaagcggccttttatgcttcgttgtgtacgaaaagaagggaaggtgttttttcgccttctgctcaaaaaactgatttcgtccacatcaaagcacctcaaccgaagggtaagaatatattacaaggtgtgtacaaagttccttgaagaacagtttaattctatttacaagagttgttacaaaattatcctgagtttttctaaagcacacttctgctagtcttcattaagcttcagcttcgacgacaacttcggcgacatatcctangcatcatcttcaccttcgtcatcctacatgagtcaaggaatcataaga

SEQ ID NO: 57303 - DNA, 462 bp, Zea mays
  unsure (1)..(462): unsure at all n locations
ttgactctgactatgcgaagataccttcttcaaaagagctcattacattataaaaacttatggcagaacgatttattctactttnttaaatacgagatgtgctntaataccctcacatgttattttactgcagtgcaattccagctaattaatctaaaccctacaaaatagtttcactgttttttatactttctgtgatttattatgtattttacaatacttagatgatttgatcaactttagaaggaaggaagagcctaacctaacaaccatgaaccatcttcgcattgggaaccctagcctatttttgtttttgtcgtgtactttgcattggaaatcctctcttttctcctcctgttcttgctagcagccgctcctcttgtttgcgtacaggcacacagcanggaaagcaggcccgtcctcgttgtgctgccgcactgacgagctccaaacaacgatgga

SEQ ID NO: 57304 - DNA, 448 bp, Zea mays
gcttctaagggagaacacggaagggtttctttctttcttattcaaaaagatagaccgcgtgcagcttgtcaagcaggtaaacaagtgggaggagcacatcacagcaagaatgtgatgaccacttcaagacccttggagctgctgcatatggacctcttcggacccgtcgcctatttgagtataggaggaagtaagtatggtctagttattgttgatgacttttcccgcttcacttgggtattctttttgcaggataagtctgaaacccaagggaccctcaagcgcttcctcaggagagctcaaaatgagtttgagctcaaggtgaagaagataagaagcgacaacgggtccgagttcaagaaccttcaagtggaggagtttcttgaggaggaagggatcaagcatgagttctccgctccctacacaccacaagcaaatggtgtggtag

SEQ ID NO: 57305 - DNA, 276 bp, Zea mays
  unsure (1)..(276): unsure at all n locations
actatanaaactcaagcctggtnaagatatcggctaactggttctcggtgctaacatataatacttctatatctcccttttgctggtggccactataaaagtgatgcccgatgtctatgtgctctgtgcggctgtgctcaacaagagtttcctccatgcccatagcactctcagtatcacatcagagtgggactatccacacattgtaacctaagaccctgacggtgtgccccatcctaagtaattgacgccaacactgtcctgctgtaacatact

SEQ ID NO: 57306 - DNA, 435 bp, Zea mays
  unsure (1)..(435): unsure at all n locations
ctgcagcttctgaactngaaacatggtttggaaactttggtctgtcaaaaccagggattaccgaacataaacctcatcttctatatacccattcaagaaagtacttttgacatccatttgaaaaaaagtttaaaacccatcaaaatagcaaaagctagaaggattctaatggcttctaaatgggcaacaggagcaaaggtttgctcatagtatataccctccttctggcaaaaccttgggcaaccaaccttgccttgtttcgaattaccaacccatcctcgctttgtttgtttttgaacacccattttgtaccaattgggtggcagtttggtggcgatgaaaccaaaatcaaaacctggtttctctcaaaattttaagctcatcatgcatagaattgacccagttaggattagacaaagcatgcccaacatcccg

SEQ ID NO: 57307 - DNA, 435 bp, Zea mays
  unsure (1)..(435): unsure at all n locations
nttacagaagcaagaggagcctgcggcaatcaagaagcctgcttaataaggcgaaggattattactgttattgatggtattgaagaaacgccaccatcggcttcggcgtcaaaaacaccggttgccgaagacactgcagctaccgaggctgcccccgccggagccgcaactgctaaagctgacaccgccgaagatataaatctagagggcactntttttgatattgataagatgcttttgaacatggctgcggaagaagctgctacagcttccgaagggactctggccccagcccgggaaagagagggggaaagagaaggtgattgccgaagatacttcggaggaaaatgattntaattntcaaaacatactanggcaaaagctgtctaaggctgagaaggaagagctgacggaatatgcaatatcatgcggcta

SEQ ID NO: 57308 - DNA, 207 bp, Zea mays
taatagagagtatggagggctattacacactttgttttttgctaagcaaacctccatataggcttcaaatcttaaacagctaaatagcaatggaacccctgtattttatggaattttggaaatagaacccactgcatagttaaacctacctagagcctaagagaaataagaaagaagtgatacagaataggcatctaaactttatat

SEQ ID NO: 57309 - DNA, 430 bp, Zea mays
cttcatccctacatgtgctaagcggcgatgtttagccagcccatgctagtcttagctattaagcatgcatctagaccggcctcttcttttgcgaaaacaactaaataaagtatgccgtctaatacacccttaagagctagtgaaccatcacttcttctaaagacagacacatctacatttgtaaatagacagtgataccccatgatgcatagttgactaacagatagccgattatatccaagagactctactaaaaacacattagagatagagtgctcattataaattgtaagtttacctaaccctattaccttgccttgtgcccatcaccgaatataattgaatcttgtgaatccttattcttgacggaggaggtgaacatcttcttctccccccgcatatgggttgtgcatacgctatcaataatcca

SEQ ID NO: 57310 - DNA, 436 bp, Zea mays
  unsure (1)..(436): unsure at all n locations
tatgagcgcacgttcttattgattcatagatctgagctcccttgacaaccatcagaagcatcctgacataatatctttctcctgcagatggannnacaagatgtatgccgactattttaccaaggggtgtgttgtgcnaacgggagagcgtcactgttcatcccatctccactccgaggggaagtcacgttaacgtacggatctagcgaacacgtcgcnnngannagcaacaaaccactcaggtagcatggttcgatgtaagaagtcctgtgatagaattagcgacatgttggcattagcatggaatgtaatggaagtctcattaggcaagtgaaccggaaatctctcaacgggaggaaaatgtcgatggatgtcaaaaccaaaaatgctccgacatgactcatatggacatataaatccaacatctaaatattcc

SEQ ID NO: 57311 - DNA, 458 bp, Zea mays
  unsure (1)..(458): unsure at all n locations
agcttggtatctttctctggggactccatttttctttcaatgagactactatacgaaataaacttgaaaacatgtattagtctcaaagtcttagattatagagtaacctccccctgaaggtgtgcatacaagttttgaatacttgtaggagacatgcactttgatttgatatcaagaggggcaaattttctataatccgaggtttggcacatataagttaaatgataccaattgaagtataattgaattgttatacctattgaagtatttcacaatatcaattgatatatcattttctttggaatgttaaataagctatgtgacgtgcttatcattntaaaccatgtaggtttgctcaagagtatgaattgaaagtgagcaatcctaccataagatttacctagtatgcatgccatttttaatcaaaagtaaaaatcaattgaaatactaggtatgac

SEQ ID NO: 57312 - DNA, 451 bp, Zea mays
tagcaaaagagatttctagaatcaagaatattgagctcatgctttagtctggtaaaagattgttcatcaagtggcttggtaaagatatcggctaattgatctttagtattaatgtaagaaatctcgatatcccccttttgttggtgatccctaagaaaatgataccgaatggctatgtgcttagtgcgactatgctcgacgggattgtcggccattttgattgcactctcattatcacatagcaaagggactttggttaatttgtaaccgtagtcccgcagggtttgcctcatccaaagcaattgcgcgcaacaatgtcctgcggcaatgtactcggcttcggcggtggaaagagctaccgaattttgcttctttgaagcccaagacaccaaggatctttccaagaactgtgcagtccccgatgtgctcttcctatttgatttgcaccccg

SEQ ID NO: 57313 - DNA, 441 bp, Zea mays
agcttgtgtgtgtgctcttggtatttatacttgttattaccaactaccgaaatagcatcacacagaaaagggatcacaatgtgtgataatttattaagtgctccaattcttaggttctctcttacacaccatttggcctcataaccaggcaagaaaaccaaccatgcatcaatctctgtgaagttatgatcaaaagcacccgaacttgccatagcagctttaactaaaatatatgcttgatcacggatgttcttaatctgtgaatgcaacatgatataaaccaagggttgcagatacttgtacattgattctggaactctttctgggtccaaacatcctctagaatggcctgaatattcaagtaaaaaagataacagggactgttgctcattcatggacagatccaatgggttaggtggtataatcttaaagaagtcatat

SEQ ID NO: 57314 - DNA, 407 bp, Zea mays
ggtggaggttcttcatccgcacatgtgctaagcggtgatgtctcaaccagcccatgcaggtcttaggcattaagcatgcatatagaccgggctcttcttttgcaaaatcaactaaataaagatggtcgtctagtacacccttaaaagctagtgaaccatcacatcttgtaaagacagacacatctacatttgtaaatagacacttatatcccattttgcataattgactaacagataacaaattatatccaagtgactcaactaagaacacattagagatagagtgctcatttgatattgcaatgtggcctaaacctttcaccttgccttggttcccatcaccaaatatgattgaatcttgggaatccttattcttgacgtaggaggtgaacatcttcttcttcccc

SEQ ID NO: 57315 - DNA, 422 bp, Zea mays
  unsure (1)..(422): unsure at all n locations
gcttatctcggcgtgctgccgcattttggtttatggaaatatctgnatcactgccgtcctgtgatggccggcgggcaacatcaattggtcggaggtgcaagtttagagatgcgccgtgggcggaagaccgagtatctcgagatacccctcaaagacagcattaaaggttggcgtctggaatggtttataatggataattatggaaattctctcccttcccgctcaggaagacagccagacgttcgtactccaagttggactgagtctcccacggaccaagaagtggccgaggcacgcgtgttgcttactgaagttggattactgaaagagagaggtctgactgccgaagctgtggtcacagattttgttntcaaaaacattcagccgctgaaagacagggcctatccggcatatctttaccg

SEQ ID NO: 57316 - DNA, 489 bp, Zea mays
  unsure (1)..(489): unsure at all n locations
gacctataaaactcagcttttcacaccatctttcggacaaacagaatgcccaacatgttggggcggagtacattagtaccaatcttcaagaacaaaggagatgttcaaagttgtactaattaccgtggaattaagctcatgagccatacaatgaagctatgggagagagtcattgaacaccgcctgcggaagatgacgagcgtgacccaaaataagtttggtttcatgcctgggagatcaactatggaggccattttcttactaagacaacttatggagagattcagagaacaaaagaaagacccgcatatggtcttcatagacttggagaaggcttgtgacaaagtacctacgagtgtaatgtggtgggccttggaaaacacaaagtatcaacaaagtacattaatcttactaaagatatgtacactaatgttgtgacaagtgtccgaacaatngatggagaacaccgatacttttcattaacatatg

SEQ ID NO: 57317 - DNA, 378 bp, Zea mays
cttgtgagcaatacaagtacacaatggtgtatgctgcttccgctgatcagctgaagcccatgctcttatgtgaagatatagcataccagagggtgatgctgggatctcaattgtctgaagagcacgagaaaaccctaataaggtgcctgttcaataacaaagatgttttcgcatggtcagctaatgatctctgtggtgtcaacagggatgttattgaacacttgctcaatgttgatccatccttcagacccacaaagcaaaggctttggaagatgtctgatgacaaagccgaaggtgctcgaaatgaagtgaaaagacttctcagcgttggagtcatcacggaagtaaaatacccagaatggctagctaacacttgta

SEQ ID NO: 57318 - DNA, 398 bp, Zea mays
  unsure (1)..(398): unsure at all n locations
ntatcaaatggacgtgaagagtgccttcctcaatggacctatctaggaagaggtctatgttgagcaacctcccggctttgaagatagtgagtattctaaccatgtttataaactctctaaggcgctttatgggcttaagcaagccccacgagcatggtatgaatgccttagggatttccttatcactaatggattcaaagtcggaaaggccgatcgtactttattcactaaaactcttgaaaatgacttgtttgtatgccaaatttatgttgacgatattatatttgggtctactaacgagtctacatgtgaagaatttagtaggatcatgacacanaagttcgagatgtctatgatgggggagttgaagtatttcttaagatttcaagtaaagcaac

SEQ ID NO: 57319 - DNA, 357 bp, Zea mays
  unsure (1)..(357): unsure at all n locations
agcttccaatctctccaacttccacaattgatacaagtgatcattagtgattagcgacttgagagagagagagagtgatccgtgtgatatttgtcgctcttgttgcttggcttttgcaatcgtgctttcttcttcctcattcttattcttcaagtgacttgtaatcaaagcaagagacaccaattgtgtggtggttgaaatggaaatgtgcccttgggccatttcaatattgttttggtgattaagtgccaaacacatttaaataagctctcatgtgctaaataaagagagaagtaataatcaaggcaaaggtatgggtctagacttagtacattggnttctgtgtgtactaatata

SEQ ID NO: 57320 - DNA, 420 bp, Zea mays
  unsure (1)..(420): unsure at all n locations
ggattcccaagtgatttgagaagagaagctcactcggtccaatggaccgtttgagagagggaagggttgaaagagacccggcctttgtggcctcctcaacggggagtaggtttgagagaaccgaacctcggtaaaacaaatccgcgtgtctcactttattattcgcttgcgatttgttttgcgccctctctcgcggactctattatatttctaacgctaacccgacttgtagttgtgattattttgagaatttcagtttcgccctattcacccccctctaggcgactttcaattggtatcggagcccggtgcttcattagagcctaaccgctcgaagtgatgtcgggagatcacgccaagaaggagatggagaccggcgaanagcccactacaagccacgggagcacttcatcgaaagag

SEQ ID NO: 57321 - DNA, 463 bp, Zea mays
  unsure (1)..(463): unsure at all n locations
gcttacagattctctgagatgaccagnggcttcatatgaataatccacccgaggcatgtcaggtcaattcataactccactcagagtgatgacaaaggaagtcagctgcagaggccacagtatacctcacaatcttcggggcagcaacaaagctctttccggccgccagctctaagaggtagaggcgccaggggcttcgaaggaagatatggggatcagcccaggaagatctactgcttattttgtggtgaagacaagggccatactacaagaatgtgccaaatcaccatccaaaagcagaaggagatcgcagaagccgaagctcggcagagtcaaccgaagcaggtcttgcacactgcttcgtgccactcaccatacataccagaatatgtgggtaatcatcctgcagcttctgttgcttcngctagccagccacaggcttcttggcacagcttccacctcg

SEQ ID NO: 57322 - DNA, 466 bp, Zea mays
  unsure (1)..(466): unsure at all n locations
tgctaaaagtcttttcattcangggctnggtaaagatatcagctaattggttgtgggtgctaacataagcaatttcgatatccccttttgttggtgatctctcaaaaagtgataccggatgtctatgtgcttagtgcggctgtgttcaatgggattacccgccatgcagatagcactctcattatcacatagaagagggacattgctcaacttgtagccatagtccctaagggtttgcctcatccatagtagttgtgcacaacaatgtcctgcggcaatgtactcggcttcggcggtggatagagctattgagttttgtttctttgaagcccaagacatcagagatcttcataaaaattgacaagtccctgatgtgctcttcctgtcaattttacacccggcataatcggcatcggaatacccaattaaatcaaaggtagatcccttgggataccatagcccaaac

SEQ ID NO: 57323 - DNA, 388 bp, Zea mays
gcaccctcctccctcaacgccgatgcccctgctgtctcctccaatggagcatggcgcacggagcagccatccctggctcggccgcagctcttgaagcattttccaccgcgcccccttcttcctccctggttctgcacagcggcaagtggggcgcccttcttccccaagagcagggagcagccgctcccatctccctgcagatcgcccctacgagctcccttcccttctccatggctcgagctcgagtttcctcatggcgctccctccttgtccatggccgacagaccttgctccccttcgcccactgcgcacagctttgactcaccttcatggaaatagccgactcatacacacgggcattcccacagcaccctactttccctcccat

SEQ ID NO: 57324 - DNA, 413 bp, Zea mays
  unsure (1)..(413): unsure at all n locations
gtctactgttagatcggacggtactccaaagcggctaacaatgttttgcccaaagaatttttgggcagtctttgatgttattgtggaaacagcccttgcctcgatccatttggtgaagtattcgacagtgacgaaggcgaacttaaggttcccctgagccgtgggcaggggcccgacgatgtctaggccccagcgctggagaggccatgtgtgggcgatcagctttgtaaatngcgaggggctgtctgatcgaggagcaaacttctggcaggcttctcaggcccttgtgacccgatttgcgacgcagatcattactggccagtaaaaaccttggcggatcaccttagcagctatggcccttggccctgcgtgagagccacaaggtccactgtggactttgcgtaagatctgga

SEQ ID NO: 57325 - DNA, 374 bp, Zea mays
  unsure (1)..(374): unsure at all n locations
aacaataaaaggcanaggaaacaagcctaaagaaggtacaacatgcgagcgcccaatgaccctacatcaaaacaaaatggtcgcacattaccattgcattctctcaagaggaccctcgcctcacagagtacacacgcaaagaagccatggcgacatcatgtgtcacaaagggcttcgcacttcacaatgtcttaggtgacatgggcagcgcagcaggtatcataatcgcaaaagccttcacgctgatgcaggaggcagaacataaaatctaagacccaacttagtctctctgaacctcagaaggctgcaggtggcggccctcaaaaaattggctatgcccatcaccctcagctatgttaacaatacaagaacac

SEQ ID NO: 57326 - DNA, 458 bp, Zea mays
  unsure (1)..(458): unsure at all n locations
agcttgcattcccatatctcaattcacttagtatttttaaagcagaacaaaanatcattccacagacactcacatcgatgcagcccttataaagatgctccctccagaaccacctccacccttctcattgctatccccaccgttggcgagaactgtgccattcatgaccaggtcctcagcaaacagccacacgatgccaccaccggcaccaccatagtccttctcaacgctggtcgagccccctttgctcccgtagctccaggggtgttcgaggtcagaccatgcataggcatcgccgccccatgaatcctcctgcgtctgcccttgcttgacgaagcagctggcgccacggccaccgtgcccgccaccgtcgccgtgcgtcctcgtgggaacgccactggtcccgtcaggcggatcaccaacgagcgttgtggtatcacaacgaccggtagcgaccg

SEQ ID NO: 57327 - DNA, 462 bp, Zea mays
  unsure (1)..(462): unsure at all n locations
tgtggaggttcttcatcctcacatgtgctaagcggcgatgtcatattcagcccatgcaagtcttagccattaagcatgcgtctagaccggcctcttcttttgcaaaatcaactaaataaagtttgccgtctaatacacccttaaaagctagtgaaccatcacttcttctaaagacagacacatctacatttgtaaacagacagttatatcccatattgcacaattgactaacagatagtaaattatatcatagtgactctactaaaaacacattagagatagagtgctcattagaaattgcaattntacctaacccttttaccttgccttgattcccatcaccgaatatgattgaatcttgggaatccttattcttgacgtatgaggtgaacattttcttctcccccgtcatatgggttgtgcatncgctatcaataatccagcttgaacccccggatgcat

SEQ ID NO: 57328 - DNA, 448 bp, Zea mays
cgacacaatacacacgcttgtctgcgccgagcatcaggaggatctaatccttgggcttttttgtttccgtcttactcaagctgcgtgctgaccatactcttgtatactcataaaccgactccaaagataccaagtcgcatatttcacttggaaaacatacgtcagatcatgtttttgaggaccttgggaagccggaggtccacaacattatctcgtgacgggactctgtgacatagatcatcatgacagggggacgtaccataccacaatgaacatgagtacaagtgatgtaaaattattactggcgtcgtttccatcaatgtgacggagtaactcttctgaagaaaatatgatattattctgatgcacgagcaattgtctacatcatgtggagagttgcccaagaactgtccatcgagtatttacacgcattgttggattgagacac

SEQ ID NO: 57329 - DNA, 387 bp, Zea mays
atccattgtctatggatgaactcaacacaagagatgacattagtagcacaagcactagtttcttatttagcaaccctttatatgtggaaggcaagcgagttgctaaaatagagaaacatcataatatggactaaatttcccttgagccctcatgcacaatatattgtgaatgacatggataatatgcatggttgttcaatgaagtctaaagggctgacttaatccatattatggtgagtgtctaataaagaagaatcaaatccaaattaactagatagagaatacgtcacataattctggattgttcaccatatgataatattcattcatcttccaattagacctttatttcataatcaacaactgatgtatatcctcaagtgcttc

SEQ ID NO: 57330 - DNA, 291 bp, Zea mays
ctgaccaataataacgacgtcttcgcctggtccgccctcgacctggtcggagacagacgcttcatcatctagcacggcttgggaatagacccttcagtaaggccgaagaaacagcggctgcgccagatgtctgatgagaagacacaggccgccaaggctgaggtacatcgcctgcttgaggccaaatttatcgagccaattgcctaccctacatggctcgccaacgtagagatggtgcagaataagaacggcaatggagaatgtgtattaattcaccatcttacaaagcct

SEQ ID NO: 57331 - DNA, 119 bp, Zea mays
cacagccgccgaggccaaacagaaaccgggcggggcaaacccgaggaaaacagccagcgacccaacaagacagcgcgaaagcacccagcccaagagaagaacccggcaggacccgaaaa

SEQ ID NO: 57332 - DNA, 440 bp, Zea mays
  unsure (1)..(440): unsure at all n locations
tctaaagggagaacacattctgggactaacaaatgttcatttttataaagacaggatttgtagcgcatgtcatgcagggaagcaagttggtgttcatcatccacacaagaacatcatgacaactgacaggccactagaactcctacacatggatctattcggcccgattgcttacataagcatcggcgggagtaagtactgtctagttattgtggatgattattctcgtttcacttgggtgttctttttgcaggaaaaatctcatacccaagaaaccttaaagggattcttgagacgggctcaaaacgagttcggcttaaggatcaagaagattagaagcgacaacgggacggagttcaagaactctcaaattgaaggcttcctcgaggagganggcattaagcatgagttctcttcttcctacacgccacaacanaatg

SEQ ID NO: 57333 - DNA, 453 bp, Zea mays
  unsure (1)..(453): unsure at all n locations
agctttcttttctttggaacagccatctttttttagggctgcattntttctttntcaaagctttctcatcttcttctatcattctagcagcttgcctcttcatgacactgacaactctttttcgctttggcccttcggcaccattgcttaaccgttcgtagtcaaggtattcaaatttcaaggcatccattactcggttcagtcttcatttcggtcgggtgccaaatgtggcggaaccgcccgaattattccagcttaagtgcccaagtcgcacccttaagggcagcaacacacttaaacaggaataacccgtcagtccctcagatctagtccgataaagccacttaccaggatcgaataccactagctcacacgaaggtgaggcacagagaaatacaantaaacataataccacaaatctaataagtatcattagtggatacattcatcgag

SEQ ID NO: 57334 - DNA, 427 bp, Zea mays
  unsure (1)..(427): unsure at all n locations
tctnagggagaacacgtgataggtntaactaatgtgcttttctaaaaagatagaccttgtgcagcttgtcaagcaggcaaacaggtgggaagctctcatcacaccaaaaatgtgatgacaacatcaagacctttggagatgcttcacatggatctcttcggacccgtcgcctatctaagtataggaggaagtaagtatggtcttgttatagttgatgacttttcccgcttcacttgggtattctttttgcaggataaatctgaaacccaagggaccctcaagcgcttcctaaggagagctcaaaacgagtttgagctcaaggtgaaaaagataaggagcgacaatgggtccgagttcaagaaccttcaagtggaggagtaccttgaggaggaagggatcaagcacgagttcttcgctccctacacac

SEQ ID NO: 57335 - DNA, 310 bp, Zea mays
  unsure (1)..(310): unsure at all n locations
aaactgcttgctgttgtcaactgttagttcggacggtactctcaagcgacaaacaatgttctgccaaaagaagttttgggcagtttttgatgttattgtggaaacagcccttgcctcgagccatttggtgaagtactcgacagagacgaatgcgaacttactgttcccctgagcggtgggcaagggcccgacaatgtccaggccccatcgctggagaggccatgtgtgggcgatcagctatgtttactgcgaggggctgcctgaccgacgagaatacttctggcangcttcgcaggaccttgtgatccga

SEQ ID NO: 57336 - DNA, 377 bp, Zea mays
  unsure (1)..(377): unsure at all n locations
aactcagcttgacgactgcttcgcacgagagctccgaacgtgatttatttttcgtccacggagtcactctatccgagcgcgagctaatcatcgcacaacgtgacgaaagaaggatccgcatcccggaggcgtaagagtccctcggctcggacagccatggctgcttacgtgtacaccgacagttccaggatccgctttccgaagtagtcaagaggcacgaaagaaatcctgctataaagagatcctattccgaggaaaaaatcaatcacagggggtctacccccttttaacccccgagggagggacgggctatgccgaggctangccgaccctctcttgacgactaaacattgcgcaagtgcgaggtatatggacaa

SEQ ID NO: 57337 - DNA, 392 bp, Zea mays
  unsure (1)..(392): unsure at all n locations
agctntaagcgctggcagattaagactctcatgttgctcactgacctaaaattattttgggtagtgacatcggctgttccccaggttgcataagatgatgcagcgaaggccgccgcactatcggagaaggccaagtgggacgaagccaatgaggcatgcttgtctcgtctactgaacgtcttgtcgaaccgcttatttgacgtgtactctggttttacctccgctaagggtctatggactgaacttgagaatgagttctctgaagttgacaatggcaatgagtcattcacaacgaaaaactacctcaactataaaatggctgagggaaggtctgttattgaacaactataggagattcaacttctttgtatggacttggtccaatatggatg

SEQ ID NO: 57338 - DNA, 408 bp, Zea mays
tgtgaagattcttcattccaacgtgggctagtcggcggtgccagagccaacccatgttagtcttagcaattaagcaagtatcgagttcagctctattaaaatcgactaagtatagctgaccctctaatactcccttaaatgctactgaatcatcacttcttctaaagacagtaacacatatatccataaaaagacaattgtagcccattttgcataattgagaaacagaaagcaagttatagtctaaagaatctacaagaaaaacattggaaatagaatggtcaggtgatatagcaattttaccaagtcctttgaccaaaccttgatttccatccccgaatgtgatagctcgttggagatcatgtttttttctcgtaggaggagaacattcttttctccccagtcatg

SEQ ID NO: 57339 - DNA, 354 bp, Zea mays
  unsure (1)..(354): unsure at all n locations
catcaattgagagcttatttgtttgtgtacgctcttcattcttttctttcgttgccttgaatgcaacaagttgcaccttgggtgtgaaggtggcaccttgctccaagttgacaatgtgtttggagtctttgaccataaattcaaaactcacaaactttccaatcaccttctcgggagatattntcttatacctaggattctcatgaattaattgcacttgagtggggttatgaaaaataaaagatcttataataaccttgaccatttcatggtcatcccacttggtgctcccgagggtgcggacttggttcaccattgtcttgagccgattgtacatggcttatggctcttctc

SEQ ID NO: 57340 - DNA, 430 bp, Zea mays
  unsure (1)..(430): unsure at all n locations
tactcctncctgggaagggctattcatcatcgtctttattttgaagcctggaacatacaagctggctaacgatcaaggcgaggtctacagcaacgcttggaacatccgacagctacgtcgcttttacccttaagatgttttcaagtcgttcataaaccccgttttctttacatacacaaatagagtctaaccgtcaaggaagggtcagccttgcctcggcaaagcccgaccctccctcgagggctagaaggggggaaccccctctgcgtcaaaattttcctcggtaaagttttctaccaaaacgactttcgtgctttccgactgtatcgataacagaatcctgcataatgagtaagagcgcacgtaagcggcaaggtcgaccgagccgagggactcctacgcctctgggatacggatacctcactcgtca

SEQ ID NO: 57341 - DNA, 320 bp, Zea mays
agctttgatgtcgcgtgcgggccttttctatgtctaccgcagagaacatcttctatctcggatctctcggtacgtaacgcccactaactcctcgctcgacatccatctgaacatggagtgatggagaagatgtaagataatcatgtgtgtgtcactgcaaaggagactcggtacgtcggtggggagatcatggttggccgcagccccagcaatgagcatcgacaagacctcgccgagactcctagctacctcggtatgttacgccaaccacctcctcgctcgacacctgaacaatgagatgattatgtgcgtcggtgctg

SEQ ID NO: 57342 - DNA, 435 bp, Zea mays
tcggcagttttatttgcctcttcttcctgagcccctggcgtctaatcaacgatgaagtctgctaacgtctgggactgaattaaagatctatgtacataatcaatggtgaattcattaagctctgcagcccattttcgaattcttccagtagcctctctattcctcatgatgtcctttagaggttgtgatgaaggaacaattatgtggtatgcttgaaaataatgccgaagctttctagaagccattaacacagcatataataccttctccaattctgtgtaatttttctttgatggacttagaacttcggagacgaagtatattggagcttgctttttagcctgaccatctagcttctcctgtaccagtgccgcactcactgtagaatgcgaagctgccacatataagagcaatggagcccctggcgcgggtggg

SEQ ID NO: 57343 - DNA, 321 bp, Zea mays
  unsure (1)..(321): unsure at all n locations
catactactacatgacaatgcgaatgcaatgcatgccatcatggacggactatcacgcattgcaacggcgacatcgaaccgcgtagacgctttcgcctacagactacagttacacagccaccccgtgcacaccggaaacggcagacggatagcattcagaaagcaggggtaccggcatgcaccccttacgcgcgcacgcgtgattcgagagagctgctactancctgtgacgtacgcgagctcctctctccttgcttgtgcggagacgcatggtgtgctataggcgagcaatcagctgcgtgcatagacgacgatcactac

SEQ ID NO: 57344 - DNA, 444 bp, Zea mays
  unsure (1)..(444): unsure at all n locations
tgagagtcagtctgtctttgattaacagaaataaggggttttcccttaatatatttttcagcaattattttctgccataaaccattagtattttccaaattccaaagccatttggatagcagcgcatcattcataaaacccaaattcaacacacctaaaccccctaagcttttggaggagcaaactgtctgccaattaaccaagtgcatcttttttgcctgtgaaccaccttgccaaagaagattttttctgaataaatccaattttctagtaaccgatttaggagccggataaatcgataacatgtacagaggtacattagaaagcgaactgttcaaaagggtcaatctgcctcccagactcaagaacctncctttccaaccagccagccttttgtccattntttccaacatagaacaccaaagagaattactaatcttctta

SEQ ID NO: 57345 - DNA, 426 bp, Zea mays
  unsure (1)..(426): unsure at all n locations
agcttccgcagcaatccaacacacagaggagttttgtttactctccagcggcccgaaccactctaaattctcgcgtgttcatgtgctcgatgctcagcangacagagcatacgcctaagccccttcatcatcttaggatttagggcgggtgcactccgccacccggccggagaattccctctccgacactactcaagttcaattaatacgtttggatcctagatataaactaatgtctcccgatgaggttattggcaagtttgtgagctttgaacttatgatcaaagacttcaaacatattgtcaacttggagcaaggcgccacctccacactcgaggtgcaacccgttgcattcaaagcgacagaagagaagaaagaggagtatacaccaagtaggcttccaatcgacgcctnccagctcgacaa

SEQ ID NO: 57346 - DNA, 468 bp, Zea mays
tcgttcctcagcttaataacctctgttcaaggttgatgtattctatttgtagctctcgtcttcggcgttcttttgcgctctcaaggcgttgctaagtattaaatcctatatgaaaagaattagtataagagctaaagaataattcaaaatttataaacttccaaatatacaatttccgtaccttcacactgttgtatgcgaggctatctgcaagatcgtccttcgttatagcgcagaggccagcttcaagcttcgggaaccccatacttctagcgatctcccggcagacagataattctttggtgtctgggaggcagtataagaagtcatcttcgtttgtgccattgaacactatggcccctttcggatactgtcagtctcgggcatagtgtttagcttcaaagatctcttctttcgataatattttcctcgagcgtgtggacaatataatcaagtacttcggaagat

SEQ ID NO: 57347 - DNA, 450 bp, Zea mays
agcttgtacaatgttgtggaacccacaacgtttcattttcatataaaaatacagttggtaaatgaatcatatgattggttcacattcaaataggatatgtcaatctctacttatctcgatgaagaaggcagtctaaaagatcacgagggaaaggtataaacaccaaacaaactttactcgcaaattctgttggaacatgtttatataactcttatttaaacaaggaaaatgtatgtccataacaacgtataggtacctaacttactactatgaagaaggtaaggggtaggctgaccctctctggttctgcctttcctatctccgacaaatgcactcaacacttttggcaaaaccatccacgcctggtctcctctagctcttccccgtctcttgctccaatcgcgcagcgcttcgcatgccacgacctctagccaccttcccgcccccgag

SEQ ID NO: 57348 - DNA, 360 bp, Zea mays
ttatcaaatggacgtgaaaagtgccttcctcaacggaccaatctttgaagaggtctatgttgaacaacctcccggctttgaagacagtgagtaccctaaccatgtctataggctctctaaggcgctctatgggctcaagcaagccccaagagcatggtatgaatgcctaagagattttcttattgctaatggcttcaaagtcggcaaggccgatcctactttgttcactaaaactcttgacaatgatttgttcgtatgccaaaattatgttgatgatattatatttgggtctactaacgaatctacatgtgaagaatttatatgacaaagaaattcgagatgtctatgatgggggagttg

SEQ ID NO: 57349 - DNA, 448 bp, Zea mays
ctgcagcttgatcccggacattgagccttttcctattctttaagatgaggactagtggcataccgactcctactacccgaaacattgtctgcagtgcacaatgtgttccatgtatcccaattgaagaaatgtcttccggttccagataaaaccgctgaagtgaccgatgttgccttataactagacttgatgtatttagaacatcatattcgagtcctggatctaaaggacaaggttacccgaagaaaaactctcaagttttataagatacaatggaactaacacacggaacaagaagctacatgggaaactcatgactttttagaaaagaatttccgaggctttttagcttcagctaaattgtgagatatgaacaattcttgtaatcaaggattatactccctaccacccctgcctttgacaagaaataaggaaataaaaatatgac

SEQ ID NO: 57350 - DNA, 455 bp, Zea mays
  unsure (1)..(455): unsure at all n locations
ggacgtgaagagtgcctttctcaacggacgttttttttgtagaggtctatgttgagcaaccttccggctttgaagatagtgagtaccctaaccatgtgtataaactctctaaggcgctttatgggctcaagcaagctccaagagcatggtatgaatgccttagagatttccttatcactaatggattcacagtcggaaaagccgatcctacactctntaccaaaacacttgaaaatgatttgtttgtatgccaaatttatgttgatgatattatatttgggtctactaacgaatctacatgtgaagagtttagtaggatcatgacatacaaattcgagatgtctatgatgggnggagtgaagtacttcttatgatttcaagtgaagtaactccaagagggcactcttctaagccaaacgaagtatactcaagatattctaagcaagtttgcgatg

SEQ ID NO: 57351 - DNA, 457 bp, Zea mays
  unsure (1)..(457): unsure at all n locations
agcttgtcctcactaaatctagagatctatgttgtataaagtagnaatctgaacaccgtcttggactgtcttataagtggcttctatatttcactgcacatttcagcaaatggaaccagcgaaacagataaaggtcatgaaaggattctagaaacgatcaacacagttggacatgacggtaataacattgacactgctgattattgtttatgttacttgaaagtttaaagatctcttgtgtcataatttatgctatagacatgaatcaactacacaatgtaaaacattaaaggcactataaaacataatgagcattatgtatcacgttttgatccagagtagaaattgatcactatgcaacttcataatataagcttaaatccgatgagatgcatgagttcacaggaattttcatgtacgttggcagagaatacggtctacaaatgcattatattta

SEQ ID NO: 57352 - DNA, 419 bp, Zea mays
agcttcgtcgtctgaaagagaattacccttattgttatagatgatctcagctctccaatcttcactataaacaggagatatgttaaggattgctctttcaagaagatcaaccgaaggtgcttttattgtttcgaaaaatacttccgaaggtataagcagcccctgggctgacttggccaatagatcagcatattcattttctccacgaggaatatttttgacagagaaaccttcgaaggaagcctcaatccttcggactgtatctagatatttttcaagcttcgggtctcttgctttatagcttttgtcaacatgaccagaaataacttgagaattcgttttaagaatggcccttctgattcccattgcctttaacttccgaagacccaagagcagagctttatactcagcgatattat

SEQ ID NO: 57353 - DNA, 472 bp, Zea mays
  unsure (1)..(472): unsure at all n locations
tgccaagccctcggacccgaccggacttcaccggaggccttatatcgacctcaccggacttcggtcttccgccgccgcgcgtggaccgagctatccagtgagtctccgcccaattcctttcgctcatgtcttctctggcatcccgtggacctccctgacctatttgattgaactatctcgccgtgaccaggccggtctcctcgccgccgacgagcatccccgcctgcgcgcgtggaccgaccgactccggccatctccgacggcgttccgcacaccgttgtgatccccgcgacctccccttcatcctcgaccacttcaccgaacagtctcgccgccggtaagcccctccgcccttttcttcgccgcggctactggttaaggtagaagaaggacctcgggttatgttctgtagaacccganggggtttctgtaatggtcagcgactcatgtgaatagtacctcaggaatgatt

SEQ ID NO: 57354 - DNA, 293 bp, Zea mays
ccttcttattcccatcgccttcagcttccgaagccccaacagaagggcttcgtattcaccaatgttatttgtacaactaaaatctagccttgatgcatatcatgttctgactttagatggtgctattaggacagcggctcgctcctgcgccgaaggctccccaagaaccatcacataaaattgtccacgcttacgcgtcttttgttacttctttctgagcccctagcgtccaatcatcgatgaagtccgctatgcctaagactgaattgaggacctgtgtacataatcaatag

SEQ ID NO: 57355 - DNA, 224 bp, Zea mays
actcgagcctattatccaccaaaattcgcctaagcctcgggggaatatgggagacatatgtcccacgggccaccaagggggacatacaatccaggggccaccaaagaggcccctgataagtcacccaagagagcgcatagcgggcctcgctcgggggggacaaacaatgcccgcgtctcaagacaggggggtcgctaaaccgacgagtgagtgtgctgcgcgcc

SEQ ID NO: 57356 - DNA, 417 bp, Zea mays
ctaaattagcagacaagatagactaaacttgggtgctcttatatcaatacactctcgtaactctagctatcatcattcaatgagctataatcatgattgacccgctggtatttaccatattactatgccttaaactcatatcaatctggagaaagattgattcagttgaaataaagaataatcctgcgtgaaaactacaaggcctacaacatggatgaatgccaaaagatggtaatatctatagttttaagtgctagaatatcaacatactatttatcatgtgtcctgtgtattcacataaacaatgaagcacatcaaacaacttaaattatgtcaccattctttaacaaacttctctcatatggtagaatgtatattcataattactgtaccatggcaatacacatgctataaatc

SEQ ID NO: 57357 - DNA, 131 bp, Zea mays
  unsure (1)..(131): unsure at all n locations
agctnttctttattagagaggagactcctatttatctcgtatatcgntattcacgacctgcggtggggacacaaccccccggtttgtatggccataaattcaacgcaacatacgcatttgctcacaacgat

SEQ ID NO: 57358 - DNA, 469 bp, Zea mays
  unsure (1)..(469): unsure at all n locations
tctaagggagagcacattntaggactaaccaatgttcactttgagaaagcagggtatgtagcgcatgccaggcaggaaagcaagttggagcccatcatccacacaagaacatcatgacgaccgacaggccgcttgagctactccacatggatctattcggcccgattgcttacataagcatcggcgggagtaagtattgtcttgtaatagtggatgattattctcgcttcacttgggtgttctttttgcaggaaaaatctcaaacccaagaaaccttaaagggattcttaagacgagctcaaaacgagtttggcttaaggatcaagaaaattagaagcgacaacgggacggagttcaagaactctcanatcgaaggcttccttgaggaggagggcatcaagcatgagttctcttctccctacacgccacaacaaaatggtgtagtggagagaaagaatagaactttatt

SEQ ID NO: 57359 - DNA, 410 bp, Zea mays
agcttgagtttatctgagagttattgctacttattagctatgaagcgagttcttgtgagcacaacaaccacagagaaagcgacacatgagacactatttttatcccgtagtttggccaagtaacacttgcctacttccacgttatggcttcccaatggacgagggttgcactcaacccctttcaagtgatccgatgatcaacttgaatatcatggtcttttccattagagtctttttcccgtgtgcaaggaatctccacagtttggagtctctcgtccttacaatagagatcacaatgaaagcacagagtaaggttggggagagcaacacactcgatactcaaatccgcagtacaaccacgcacacaagttacgacttgagctctaaacacaatacactgagttcgcaac

SEQ ID NO: 57360 - DNA, 365 bp, Zea mays
tctaagtggagaacacgcgatagggatgactatcgttcttttcgaacaagaaagaccttgtgcggcttgacaagctggtaaacaagtgcgaggagcgcatcacagcaagaatgtgatgaccacttcaagacccctgtagctgctgcatatggacctcttcggacctgtcgcctatctgagcatacgagggagtcagtatgggtaacctattgttgatgacttttaccgcttcacttgggtgatctttatgcaagatgagtctgaaacccaatggaccctcaagcgcttcctcacgagagctcacaatgagtttgagctcacggtgaagaagataacgagcgacaactggtccgaattcaataacc

SEQ ID NO: 57361 - DNA, 324 bp, Zea mays
agcttgcattgcatatttaaatttcttgtattgcatctaagacttgtctaacctagttgagataaccgccaacaaagcgagtgaaaaagcttaacttatgtcaaacctgacaagtcttagtttttaagcttttagcacttaaattcttactttttatgcaattattggttcttgaaatatgcatgaggtactgcacttagggggagtattcaaaactcaaatctctcatgaaaacccctagtacaaatcaaaatgcaaaattcaccatttgcctattttctctaaaaattatctagcctatggcgaaatattttgaaaagtata

SEQ ID NO: 57362 - DNA, 422 bp, Zea mays
atcgtgggagacttccaaggcacgtacgtgcgccctgtgaactcgtgggacctccgaagctgccgccagcagccaggggagtgcctccaagagtacatccagcggttttcatagcagcacaccgagctgcccaacgttaccgactcggatgtcatcggggctttccttgccggcaccacttgccgagacctagtgagcaaactggggcgcaagactcccacccgtgcgagcgaactgatggacgtcgccaccaagttcgcctcaggtcaagaggcggtcgaagccatcttccgaaatgacaagcagcctcagggagggccgaagacagacgcccctgaggcatccgcccagcagggcacgaagaagaaggataagaacaagtcgcaagcgaagcgcgacaccacagacatgaatctcgtcgc

SEQ ID NO: 57363 - DNA, 381 bp, Zea mays
  unsure (1)..(381): unsure at all n locations
tgctgattgggccaccctgctctaacgtatataaaagaaattgggtagctggaagggcaaacatttgtcttatggaggacggctggtccttattaattcggtccttacgagtcttccattgtatatgttgtccttctttgaaatacctagggaggttttaaaaaaattggattatctgaggtctagatttttttggcaatctgatcaacaaaagaaaaaatacagattggctaagtggaatattctatgccaacccaaggtttttggaggtttggggattaagaacatcgatattcagaataagtgtttactaagtaaatggttgtttaggttgttaaatgaggatgggatgtggcaacagatnttaagaaagaaatactt

SEQ ID NO: 57364 - DNA, 470 bp, Zea mays
  unsure (1)..(470): unsure at all n locations
tcggagtcgaactgtgttccattatctacagtgatggcctttggtactccgagacgacaaacaatattctgccagaaaaacttttgaatagtggccgaagttattgtggctaaaggctttgcctcaatccatttagaaaaatattccacagccactacaacatatcttaagtttccttgggccggtggtaacggacctaacaagtcaagaccccacctttgcaatggccagatgggttgtatcagctgagttagagacgaaggttgtttttgatctcttgcacatttctgacaaccttcgcacttttgaactaattccgctgcatccgaagctgccttcggccaataaaacccttgacgaanaacttttccaagtaacggcctagatccaatgtgagatccacacaagcctgcatgtatttctttcatcaactctatgccttcggctcttgataaacacttgagtaatgg

SEQ ID NO: 57365 - DNA, 351 bp, Zea mays
  unsure (1)..(351): unsure at all n locations
tatcttggttgcttcttttttcctgcgaatccgcgtccatcttttcttggatgaggtggacaacggagttctccgggtaaacgaattctctgctcctatcttgcaggaggtagccttcgcccggagcactggaggttgcactatttcctgcttcgtnttggctatttcggagattttcgaggagggcttcttctccgatggatccgctatacgatgaagaatcccttcttcgtctaccgcggacgagatggttccgaagcagaacacagatccagggcggagagcgatcttgtgctcaaaagtgatagccattgagctagcttggatcaacgacaccacccctacctggcg

SEQ ID NO: 57366 - DNA, 446 bp, Zea mays
  unsure (1)..(446): unsure at all n locations
actcagcttaagtgattgaagntcctgttgatcattcccagtttatttttccaatatcggataatgtaatgtcgaagtcttcattgaagacaatggcggaagccttgcgacttattgatctgccactacattagctttgcctgggtgatagtgaatctccaattcataatccttaatccgctcgagccatctcctctgcctcatattcaactcagactgggtaaagatgtatttaaagcttttatgatctgtataaatatgacagatattccccagcagataatgatgccatattttcagggcatgaaccacagcggctaattctagatcatgagttggataatgctcctcatgccagcgtaactgccttgaagcgatgctatcacttgtccctcttgcattagaacacagcctagaccactgcctgatgcgtcacaatacacatc

SEQ ID NO: 57367 - DNA, 382 bp, Zea mays
  unsure (1)..(382): unsure at all n locations
agcttacctgggccggactgcaccatttctgtttatctatcaaaacctcacctctctccgcgccgcccaaaccccaggagatcggcgccgacacccggggcccacgtgccatcccctgcgcttcgnctgttaagctgtcgcgcgggcccgcgttgtcatcacccgtcttcgcgctcacgaacacccgcgccctctgaccagtgggccccgaccctcacggctcggtcagtgctcgtcgtcaaccttcctcaacgggcgctcccgagctcggcgggagaccgcgccaaaatcggtgggccgttgaagactgaccccgattttcccctcgcatataaagcctccattgtggcacatccctaatcggtttgcgcactaccccgcg

SEQ ID NO: 57368 - DNA, 432 bp, Zea mays
tctaagaatcaaaagctatttcaaacataaaatcttgtggacactctatgagttcaactggagtgaggtttggtagacggagatccttcctgttgaaaagcagctgtgctttcctttagaaaagttgaacttgacttcagttgagttaaacttttcttcagctcagctgaacttgacttcagctgagttgagcctttcttcaactgagttgaacttgactttagctgagttgagctttcttcagatgagtcgaacttgacttcaactaagttgaccttaacttcaatcgaggtctcaggcaggttcaatcggggttttaccctcggacctctctagtcagaactgagttgaacttgacttcagctaagttgaacttaacttcaatcgaggtctcacgcaggttcaactggggttatacccccggacctctct

SEQ ID NO: 57369 - DNA, 449 bp, Zea mays
  unsure (1)..(449): unsure at all n locations
tgcagcttaactaactaactcgtgggaactttttttattgtgagtagcgacaccaaatacactggttaaactataaacaagtgtataataaaatgaacatactacataagacagtacaacaacccataatgccccttagcattcgatccatgaatttagattatctcttgggtgaaacttctggattcaggagacatggattgataataccagacataaaaaataaatagtgaatttatgttcttttttaacacaatagtgaatttattttatgcaaacacatagtcttatggcccanacatataagatagtaagatcaggcggtatcaaatagtgatattggctctgcatttctacattgggaaattcacattaccaaattagcagaaatcgacacataccacgacaacgaccaatattagaactgcacctccacttgttcacctaac

SEQ ID NO: 57370 - DNA, 464 bp, Zea mays
  unsure (1)..(464): unsure at all n locations
tctagctaggcgttgcgagctggtcgtcgtgaagagctgtctttgttgagatatttggaagccttggttttaaagaaattatccttgtgtacttaacacacgattagcaacttgtaaatgaatattaaaaaaaccgtgattgctaaaatattcgtacgtgtaccataatttataatatgtgtaatttgaccctgttaaaaaaaatggtgcaaccatttttgttaatatgattggtgaatatatggagaatgagatacaaaggatggaatttagagagtgttgccggagatgatgaagatagagaatagaaatttttagagtgtactgtaaaaaatataaaatattactttatagctagttngagaatttaatttttcagtgatttctattttctaaggaaaaataacttattcgattgaaaaatgaaattcttaaaaaatgaggtcatactagcattaaataat

SEQ ID NO: 57371 - DNA, 215 bp, Zea mays
tgatttacctggaaattcttgaatattttttgtcttgccgccataacgcacactacgcagagggagcccactaccacctgtgggaaaacacatgcgttaagaaatacgtagcctgcctcttacacgcttggcttttgtgcatcctaacaaagcccacctacaccctatgccctgatacaaacttgtcgtgcacaccaagctgctatattaaagtg

SEQ ID NO: 57372 - DNA, 413 bp, Zea mays
tgaattcggagtgcggaagaacttccttttgctatgagatgctcaatcgatgcggataacttatggagccaattaacacaatataagctacacaaagcttttagagaggagatggatgaaacacatctagtgatgaagatcaactcatatgaccacggtgattagattcccaaggttcggttccaaagaacctactccccgttgaggaggccacaaaggtcgagtctattccaacccttatcctctcaatcggtcacttagactagtcgagtgcttcttcttaatcacacgggtcactaaaactccgcaaggatcaccacacaattaggtgtctcttgctagctctacaaagcacttagaaagaattacagtgagacgacaaagctaccgagcgacaagagcaacataacaaa

SEQ ID NO: 57373 - DNA, 334 bp, Zea mays
cgtgtgttattgtgtaggcgacaatccggatcatatgcatcttggtgcagcaaatggtgatggtgcgaaactatcgcttttactgctatgaattaattggcatatatggtgctcattctataagacatattcatgtggataatggtgcatgtggccaataaattaatggagctttacgatggctttaaaatggcatctcagtgtaaatgggtatcttaaaggtgaatacaggtaggttgatattcctgtgatatatccactcaagtgaatggtgttaacactgatgctggcatttatgcgtatacacatcatggatcgattcttgacacaatgc

SEQ ID NO: 57374 - DNA, 425 bp, Zea mays
  unsure (1)..(425): unsure at all n locations
gctctaaacaactctagactatatactattatatagatctggattntagaaaaataatcaagttagtctcatgtttttctaagttaagatgaatctattatggttttacaaaaatgatttagatttaatattttttctgaaaaaaatattgaatctatcactgacggtgaaacaccgaataaatatggtaatttttacaacggctagaagaggtccaaattgtttttctgtttttttcctacttgatttcgtctccataatttttattaattgttttcatttagcccaaaaaatcggtaaaattttaaaaatatctttcgataaccgaaaattatcgttatgttttcatccctaagtaagactctggtattcgcatgaggagttatataaccacaactctaactcatttgcttgtttacagtcac

SEQ ID NO: 57375 - DNA, 428 bp, Zea mays
  unsure (1)..(428): unsure at all n locations
tacttcggacggctccctcgaccgctacaggcccgtttgtttcttctgggcttcacccaacgccccggagtggactacgacaagaccttcaaccccgtcgtcaagttcgccattgttcgcaccgtcctctcccttgccctctcccgggactgggcgatccatcagctcgacgtcaagaatgccttcctccaaggcactctgacggagactgtctactgcagccagcccaccggcttcgtcgacgaagcccgtccggatctggtctgccggctgaaccgctccctctatggcctcaagcaggtgtcgcggtcctggtacagtcgcttcgcttcctacttgacctccatcggctttgtcgaggccaagtcggacaccgtcctcttcatctaccgncgcggcgacgactncggctttcttctgctctacgt

SEQ ID NO: 57376 - DNA, 371 bp, Zea mays
agctctatcaaaatctaccaagtatagctgaccctctaacactcgctgtaatgcgatcgaatcatcacttcttctaaagacagcaacacctacatcagtaaatagacatgtgcagcccataccgcatagctgagatatggaaagcatattgtaatctaaagagaccaccagaaaaacattggaaatggaatgggcaggtgaaatagcaatgttacccaaacctttgaccagacgcttggtatccatctccgaatgtgatagctagatggggatctttcgttttcctatacgaggagagcatcttctttccacattgtcatatcgggttgcgcaccccgctatcgatgatccaacttgagcccctggatgca

SEQ ID NO: 57377 - DNA, 326 bp, Zea mays
cctctgcgatctgtgtttgtcggattctatgttgacattgaagtgtccacccgccaccacagtgggatgcaataatgggtccgtggatgtacgggaaagtatggtttttgggccgacgaatagaaaattacccccacgtgagatctccccttcttatcttttgtctcgatttatctagcttattttcattcaaatggcaaatttgtatctcatctacggttgcaaatatttgtgctccaaccataacccattctgacattcggttacactattattttattctacataacacaaatgttttagatatgtagcacacatataattat

SEQ ID NO: 57378 - DNA, 385 bp, Zea mays
  unsure (1)..(385): unsure at all n locations
agctntgcactttctattgatcattcctgtcttatcccagtgagaaacttattttcattaaacgagtcacttagctgtgtaaagcaaatgaagtttttcgttaggagtacagaattgctacatgattgacattttttcctattagtttctcaacttcttgataattgatcatgttatcactttgatcattgtgggttttttccaatgatacaatgaagaaccatacaaatatttaatttagccagcaaaaaagttattgccttcttagtgcatctctagccatgctattcttgcccacaccaaaccaggaatcttcacaagtctgcagcaatggcctaggttcatcangtagtcagttcattatataatatctctaagcctaata

SEQ ID NO: 57379 - DNA, 464 bp, Zea mays
  unsure (1)..(464): unsure at all n locations
tgtcctagatattctntttttctatagacttaaagggtgctttatcccacactttgttgcagtctgtagccttagttgttcgcattatccaaacattgtgagatgcccattacccaatataatctaataatgtgtagttcgtatgatcacatatattactttttatcctcttgtggagttttgatgtcttctaatcttggttctcttgtgagtaacagatatatatatatattaaaaatacaatccatgggtcagcaaccaagtaaagaaacaaggaacaagcgcaaggtggggcctatgttgccacctagcaaaagaccaacaacgtgtggccattgtcaatctgcaaaggttggtaaccattgcaacagtgtgtcggaagctcctccctccatagacatgttagtacttcgtttttactcaacacatggtaaataatatgcaagtgcattatagagatttac

SEQ ID NO: 57380 - DNA, 356 bp, Zea mays
  unsure (1)..(356): unsure at all n locations
agctngaaccgatggcccgcgtcttcggagtatccatatcgcgctcaccggagttcaagaactcgccggcgcacgtggaccgggtaaaccccttcaccatttcccgattcgttgcgcgcatggcctttgtgtcatcccgtgaagctcctcgtgcccattaattgaactctcccgccgtggtttggccggagcaggcgccgccgtcgatccccgccgcctgtgttcgtggccaggggagctccgaccacctctgacgccgacccgcacatcgacgtgaccgtcgtgacctcctgaacatagntgaccacctcgccggacctccctcgccgccggtaagccgcgccacccttttcttt

SEQ ID NO: 57381 - DNA, 459 bp, Zea mays
tgtggacccgctgcctatcaactgaagttgccaccttatatgtcagctgttcatgatgtgttccatgtatctcagctgcggaaatgtgttcgtctacccactgaagtgctaccggaaccggacattgagatagaaccagacttgtcctaccaagagtaccccgtcaaggtattggatcaaaaggagagatcaactcgggcaagatcagtcagaatgtataaggttcagtggagtcaccattcagcacaagaagctacatgggagaccgaggattgtctacgctctcgcttccccgactttctgcccaaaggagtcggtacgtaaccccaggaccccaccctcacctgccctttgaattcaattataagacaaacttatataacaaggatagtctaagttgtggattaacataagaagggcttcttctgagttgcaagagaatgacatcgagacagttat

SEQ ID NO: 57382 - DNA, 339 bp, Zea mays
  unsure (1)..(339): unsure at all n locations
agcttatagatgtgtttggctctttatgttctgctaaaaaaatgttctcagctatgcgccataaaaagctaaaagtcgtttggttctcaaactaccgagaacaccctatacttttgtatacatttttgtgtaactatatattttaatcgatgtatctaattaaaaaaccaatttcacatttgtgttcctaatatttttacaaataaaactagactccgctactagctgnatatcttggattattatttttatttcttttatgttaacacttaattatttcatttatgttaagacttaattatgtcaacacttaattgcacctagatttacacaacatca

SEQ ID NO: 57383 - DNA, 467 bp, Zea mays
  unsure (1)..(467): unsure at all n locations
tggcaccgcgttagatgatatgtattccaagtgtggtgctgtggtgacagcgatggaggtgtttgagagcatggctgaaaggaacgtttatatctggacaagcgcggttagtggccttgcgatgaatggcatggggaccgagtgccttcagctgttcaagcgcatggagggtgcaggaatacagcctaacggtgtcagctttgttgcagtgctgcgtggatgctctatggctgggttggtagatgagggacgagcatgttttgactcgatggacaagtatggagttgatccttggccagaacactatggctgcatggttgatctctatggtcgagcagggcgtctagacgacgccattagtttcatcaatgacatgccaatggagccacacgaaggtgtgtggngagctctactcaacgcttctaggattcataatagtgttgacttgngcaaatatgcattggaca

SEQ ID NO: 57384 - DNA, 300 bp, Zea mays
  unsure (1)..(300): unsure at all n locations
tctgatcgtgacgaatgcaggccggattcctggtgggccgtttaaccgctgtcgtcctgaattgcggctcggatttcaggcaataaagccgagacctgacctatatgctgcgccgccgcctgcactctgctgttgcgcactcgctgccgcgccatcccctttcagcataacgcctcggccatgaacttcattcgtctgcctccaacctctggntcttgcccaggtcgcgggtatcgacaggaagtatggatcgctcttgcacgggacctagcgctggaggtcagtcgtggtgggcgaatt

SEQ ID NO: 57385 - DNA, 473 bp, Zea mays
tatcagctgtgccaaacaggcctttacacaataactgggataaactattgaaaaccctggtggtaaatctgcccgactctttcgatacatgatgtagcctgatttgatgagcataaaacagtggtaatatgttgacacaaaaaggcggctatactcaacttgtgcttacattattaattacattgattatctaattcaccttagcagtgaatacattcgacaaataaaatatgtgatggtgaaaggttgttgaacattgatgcctaaatcagttgatcgttttttttcctgtttttcacagtttcccgattgatgaacaaatgaatatgaaatctgtcgtggaatactttaaggaaatgtatggtttcaccattcagcatccttatcttccctgccttcacgttggaaaccaaaagaaggcaaactatctacccatggagggcagatatatgctaatcacaacactatgttgc

SEQ ID NO: 57386 - DNA, 394 bp, Zea mays
  unsure (1)..(394): unsure at all n locations
gggagctatacaagcgtggggtctgttccccgttgctcaagtgtttatccagatccgaatgtatagaattgatgaaggaaatacacgcaggcctgtgtggatctcacattggatctaggcctttgctcgggaaagtttttcgtcaaggattttattggccaaaggcagcttccgatgcagcggatttagtccaaaagtgcgaacgttgtcagaaatgtgcacgagatcaaaaacaaccttcgtctttaactcaattaatacaacccacttggccgttgcacaagtgaagccttgatttactatgtccattaccacaagcacanggaaacttaagatatgttgtatgggcagggaatattttctaagtgattgaggcaagcctctaccacaatgt

SEQ ID NO: 57387 - DNA, 459 bp, Zea mays
  unsure (1)..(459): unsure at all n locations
tcggccccgcagaccaggaagagcgcggtctccctgccagcgcgattatctgtcgtcaccggtgtcggagtcttcggtgaaaacatccttcaggaccccctcaggcgactgatacccgaggtctgctcgtgccgttcactaacgcgcttcgcgagttcaatgatctcgcggcagtccgcgacgctatggcgactgttggggtgtatagggcatgagccgttgttacccctttgcggccgcgggcgcttgttgcgctcgctccggcccccagtcgcagctgcgacgatcggagcggcagactgtggcttctcgtggccgcggatctttatcttcttcttttgccgtcttgngggacggcactcgagccactggttattggccctagcgaggccgtggagctaggaacgtggcgcagcaactctctggatgcggacaacaccccatgcgcagccctagacg

SEQ ID NO: 57388 - DNA, 363 bp, Zea mays
gcttctaaaggagacacatttaggactttttttgtttcatttgagaaagacaggatgtgtagcgcatgccaagcaggaaagcaagttggctctcatcatccgcataagaacataatgacgaccgacaggccgctagagctcctgcacatggatctattcggcccgatcgcttacataagcatcggcaggagtaagtactgtcttgttattgtggatgattattctcgcttcacttgggtattctttttacaggaaaaatctcaaacccaagagaccttaaagggattcctgagacgggctcaaaatgagttcggcttaaggatcaagaaaataagaagcgacaacgggacggagttcaagaac

SEQ ID NO: 57389 - DNA, 464 bp, Zea mays
  unsure (1)..(464): unsure at all n locations
tcgtgaagatacccatgcttcataataacatccaagctttgtgttaattccatgcttcgnaagaacatccaagcttcgtaaacaagagatcccttcttttgcgacagagctgatgaagctgtatttctcagcttactttgtgccttagcagattttcatttttttaaagcattctccgaagatcaacttcgtatccaattcgtgtcattggtgcgatataatgtatgatgtgatgctatgcgagatgatgtgatgatatgatgcaaagaatgatgctgatgtcgaagatgcacacccacacgcccacactgaaacacacaatctctgcgtccccttaggaacgattggtatctctttgccgtttatttatcggtgtaagttctgcattcccttaggaacgtctattgaacttcttcgccttctatttcggcgggataagttctgcatcctcttaggaacgtctt

SEQ ID NO: 57390 - DNA, 446 bp, Zea mays
tgcattgcatatataaattccttgtattgcatctatggcttgtctaacctagatgagataaccgccaacaaagcgagtgaaaaagcttaactcgggtcaaacctgacaagtcttagttttaagcttttagcacttaaattcttactttctatgcaattattggttcttgaaatgtgcatgaggtactacacttagggggagtattcaaaactcaaatcactcatgaaaaccccgagtgcaaaccaaaatgcaaatttcaccatttgcctattttctctaaaaattatctagcctatggcgaaatattttgaaaaatatatgagggtgccaatacctgtcccaacaagtgttattttgtgtgattataagttgggatttgggttggttaggagttagatagaataattcataatttctcaactcccctctgtctgggctcaccggac

SEQ ID NO: 57391 - DNA, 446 bp, Zea mays
  unsure (1)..(446): unsure at all n locations
tgcaacttctaaaggagaacacattctatgattttttaatgttcattntgagaaagacaggatttgtagcgcatgccaggcagggaagcaagttggagtccatcatccacacaagaacatcatgacgaccgacaggccgcttgagctactccacatggatctattcggcccgattgcttacataagcatcggcgggagtaagtattgtcttgtaatagtggatgattattctcgcttcacttgggtattctttntacaggaaaaatctcaaacccaagagaccttaaagggattcttgagacgggctcaaaatgagttcgccttaaggatcaagaaaataagaagcgacaacgggacggagttcaagaactctcacattgaaagcttccttgaggagganggcatcaagcatgagttctcttcntcctacacgccacaacaaaatg

SEQ ID NO: 57392 - DNA, 353 bp, Zea mays
  unsure (1)..(353): unsure at all n locations
atatgctatttgactctagcctatctacgggtgcatatgttntaccgaaaatcaaaccttcgacttgtgaataccctttggccacgagtcgagctttgttccttgtcaccacaccatgctcatcttgcttgttgcggaagacccatttggttcctacaacatattggttaggacgtggaactaaatgccatacctcattcctcgtgaaattgttgagctcctcttgcatcgccaccacccaatccgaatcttgaagtgcttcctccaccctgtgtggctcaatagaggaaaccaaagagtaatgctcacagaaatgtgcaacccgagatcgagtagttacccccttatgaatg

SEQ ID NO: 57393 - DNA, 444 bp, Zea mays
  unsure (1)..(444): unsure at all n locations
agctttgttcacaacttgcgaccaaaatctctctgtcgtcttgaattctccaagcatcgntctcgccatgtcgataagtgtcatgttcttcctctctaccacaccgttttgttgtggtgtgtagggagcggaaaactcgtgcttgacaccttgttcctcaagatactcctccacttgcagattcttgaactcggacccgttatcactccttatctttttcacctttagctcaaatatgttttgagccctccttagaaagcgctttagggtcccttggatttctgatttatcctataaaaataacacccaagtgaagcaggagaaatcatcaacaattactagaccatacttacttcctccgatgttaagataggcaatgggtccgaagaggtccatgtgaagaagctccagtgatcttgatgttgtcatcacattcttgctatg

SEQ ID NO: 57394 - DNA, 454 bp, Zea mays
  unsure (1)..(454): unsure at all n locations
acctataaaactcagcttggaaggttcttcatccncacatgtgctaaacgactatgctacattcagcccatgcaagtcttagcaattaagcatgcatctagaccggcctcctcttttgcaaaatcaactaaataaagtttgtcgtctagtacacccttaaaagctagtgaaccatcacaccttctaaagacagacacatctatatttgtgaataaacaattatatcccatattgcataattgactaacagataacaaattatatccaagtgactcaactaaaaacacattagaaatagagtgctcatttgagattgcaatcttgcctaagcctttcaccttgccttggttcccatcaccgaatatgaatgaatcttggggatccttgntcttgacgtatgaggtgaacatcttcttctcccccgtcatgtggtttgtgcatacgctgtcgataa

SEQ ID NO: 57395 - DNA, 433 bp, Zea mays
  unsure (1)..(433): unsure at all n locations
gcaagcttnctncagcatttttgagcctgttatgtattctaagataacaataggtcccactaggagttataaagcttgtctttggctcatcgtcctttttcatctagatttgatgatagcctgagtagtaatccaataagctcataagttccaaagtagctgctgcatccacaagggaatctattcttggcagtgggaattcatcctttgggcatgccttattaagatctataaagtcagtacacattctccattttccgttagctttctttaccatgacggtattggccagtcactctaggtatgtcacttctctgataacgccgacacttagaagtcttttcactttcgttcgtgcaccttcggctttatcatcggacattttctgaagcttctgctttcttggtctgaaggacnggtctacaatgagtga

SEQ ID NO: 57396 - DNA, 453 bp, Zea mays
actctgcttaaccccccacgagaccttttccgttctttcttctatattaatgtgatatcgaatgtcatacttgatgcatattcactttatttgttcccttgtatgatgtactgtttgcttcccaatttgaatggatgaatgtatgtatgcttgcaatcgcatagagaacgatccggtcaaagagcccgaggaactcgcatgagaagcccctgagcagcagtcgtttggtggaggcaagtgtcccttgacctatctctgtcctattcattatttaattcacctcccgcttacacatttatgcctaaggactgactagcttttgttatccatatccttgtttacctatatgggttggattattattagttagctttatgctattgctcaactctaatcaatgaacatgatgagagtatctatgatacgctgcttcccttctctattatgaatgtg

SEQ ID NO: 57397 - DNA, 423 bp, Zea mays
agcttgtcccatcactcctcatgctcctcctctgtcgagtagggtcccactcgactatccaacccagtggcaagatggacgaccaagtcactctagcaaccatgtcctccagagaacctgtaaaattatgccacaagcaaggctgagtatactaatactcagctagacttatccggtgtgaggagtctactcctctacctctagacatgcagctgtttggttgaggggtttggtttgccaaaagcactagctgagtataaaatcaagttttagctttttcaagttttagtgtgactctcttaagacaaaatatgtacctatccaatcatacatggtatcaaacatttagcaatcaacatcttttgccaagtcatcacatttccacttgttactcaatgtagcagcatggatcaagcagtctca

SEQ ID NO: 57398 - DNA, 472 bp, Zea mays
  unsure (1)..(472): unsure at all n locations
tatatctatctactagaccaagtaaaaatgttaaacccctctgtccactccatttaagttaattntaccctttattctaaaatatgcttaaggataaggaaaatagaaaatgcaacttaattaatgaaccagagagtacttctatttttgttaagttacttattcaatatagttcactggaaaaatgtatcataccctggtttagtacaaattaaggaggatatcttttattttaataaaacaaggataacttataaaaaacctacaaaaatgaccccaaggtaaaaacacccccacccttgggataactattgttgtatcagagagaacttacgacaaataagaaatctgctgtttgacatttttcaaataataatgtagtagaaagtgcctttttgacattaaacttgagaaaatcataactaaataaccaccccttagttttctatgagttttagcacaaagacctatt

SEQ ID NO: 57399 - DNA, 424 bp, Zea mays
  unsure (1)..(424): unsure at all n locations
agcttctccaccatgtcgctgctagccaagttgttgcagctacctccatcaatgatcaaacgacatgaacgctccttaatgacacactntgtttgaaacaacgtatgtcgctgattctgctctgccttctccatttgtgcactaagcacacgctgtacaatgaggctctcataatgctctgcatcatctgcaccaatctgttcttcgggtggttccttagtgcctgcatcatcagccgcaagcaaagcaagtgtagcttcatccaaatcactagcagaggaatacccaccatcgtcttttaccaccaaaacacgctgattaggacaatcacgctgcacgtgtccatagcccttgcatcgataacacagaacatctcttgttctacctgtggaagctactgaagaggcactacctgcgggtttct

SEQ ID NO: 57400 - DNA, 471 bp, Zea mays
tgacaatgaggaaatggcgctcgtcatcaaaagctttcgtcaaatcctcaaacaaaggagagggaaagactacaagtcccgctccaagaaggtttgctacaaatgtggtaagcccggtcattttattgctaaatgtcctatatcaagtgacagtgaccgaggcgacgacaagaaggggagaagaaaagagaagaagaggtactacaagaagaagggcggcgatgcccatgtttgtcgggagtgggactccgacgaaagctcaagcgactcctccgacgacgaggacgccgccaacatcgccgtcaccaagggacttctcttccccaacgtcggccacaagtgcctcatggcaaaggacggcaaaaggaagaaggtaaaatcaagatcctccactaaatatgaaacctctagtgatgaaaatgctagtgatgaggaagataacttgcgtactctttttgccaatcttaacat

SEQ ID NO: 57401 - DNA, 318 bp, Zea mays
gcttgagttttcgccaccggaaccatttctttctttttcacaacgaacatgcccaatccactactttatgtccaaaactcatgtttggggtggttctccgcaatttcgttgccgcacgtcacccattcacaaaacgggtgttggggtgcatcaaccacgagtttttgccaccggaaccatttcttcttttttctcaacgaacatgcccaatccactactttatgtccaaaactcatgtttggggtgggtttcagcacattttttggcgcacgttacccatttcgaaaaccggtgtgcgtgcgcatacaaacacgagtt

SEQ ID NO: 57402 - DNA, 344 bp, Zea mays
cgagttttcgccaccggagcgagttcttcgattatctctattaacatgtccaatccactactttaggtccaaaactcatgtttgtggcggctcgcgcacatttcgttgtcgcacgtcacccattcataaaacgggtgtcggggtgcatacaaagcacaggtttttttccaccagaaccatttctttgtgtttctcaacgaacatgcccaatccactactctaggttcaaaactcatgtttggggtggttgtgcccaatttcgttgccgcacgtcacccattccgacaactggtgtcggggtgcttacaaagcatgagttttgccaccggaaccatttctttgtt

SEQ ID NO: 57403 - DNA, 321 bp, Zea mays
  unsure (1)..(321): unsure at all n locations
tgccagctttggctgtgttatgcgggtattttatattaatctaattnctaaatttaacttgggccaaaaatctaagtgccctgtgtgggttgaatcaaaacaaccccgcaagcctcacaagggtggtgaagcgaagagtttggcacctctaaaacttgttcattctgatctgtgccagatgaatggaattttgaccaaaggtggtaaaagatactttctcacttttatagatgactccactagattttgctatgtgtatctcttaaaaacaaaagatgaagcattccattattttaagggctattaagctgaaggtgagaa

SEQ ID NO: 57404 - DNA, 409 bp, Zea mays
tatacttaaaagtatcatgttcaaggcaaatgtgttttcataatggcaaaatgttgcaacccccaataaaaaccctaattgagccctataaacaaaattcaagagaaaggggaaaagagtatgaaaaatataaaatcatggcttgtgcccattataaacattatagtacactctataagcgacaactaagattatggaagcttggccaaaacaatttaaataaaaccctgaacaagcttctcaagtgggatttcattatggaattctgaaattcagaattctgaatttcagaccttgagccaaagatcaagcgtgttcaccttgatccctaactcaaagtctaatggccccgttaacaaaaacatgcataactaacctctctgtcttgtgccataagatggcattggga

SEQ ID NO: 57405 - DNA, 362 bp, Zea mays
  unsure (1)..(362): unsure at all n locations
acacgtcttatggccatgaaggcaaagtataacttctcgaataattgctataacgatataatcaatctgattattgatctcatcccatcgaaccataagatgccaaaagacttataccagtctaaaaagattgtgtccggtcttgggatgaagtataagaagatngatgtgtgcgaagataattgcatgttgttctggaaggaatatgaagcgaccacttattgtcagaaatgcggtaaatcaagatatgcggaggtactaaaagaggatggagctacttttgctacaaaagtggcagttaaacagcttctatatatgcacatcactccaaggcttatacgtttgttttaaccccagaaact

SEQ ID NO: 57406 - DNA, 68 bp, Zea mays
cactatacaaactcaagcttctacttgccatcatcaaccttgacgtataaccactccgactttcagcc

SEQ ID NO: 57407 - DNA, 470 bp, Zea mays
gtcacctgcggcatgcaagcttcttcttaagaccacccagaccactgttgtatatatgaggaatatccactggttaatagttgatggtgtcacaacacagagagagaaaatgtaagtttctgtcagggaccggactgtccacgccaggaggccgggctatctgcgccatcctggcagacggttcgcgaccgtctaggaacgatttctagaaccctagccaccccatctgtccaatcatcgattcaacagaaaataaccatccaaattcgttcaaatttttgcaccatattcacaatgagtaatactagcaattccaccaatcaaaattgtaattccactatccaattccagatcagagagaaacccctaagaattcccaaagttgaataaatcaaataaattccatgagaatttgaaataccgagatgaagacatggttgatgaacttccaacaatctcccggacagtcc

SEQ ID NO: 57408 - DNA, 67 bp, Zea mays
  unsure (1)..(67): unsure at all n locations
ttagcgacctatgaaactaagctgtcaagcatattntggacccatcgttgagggtccatcacagttt

SEQ ID NO: 57409 - DNA, 437 bp, Zea mays
  unsure (1)..(437): unsure at all n locations
agctntatggagacgaagttntttatcaatacatatagcgctatagctagggctggaaataaagctcaaggctcgcgagccagctcgagttgggaacagctcggctcgactcggagcggcgcgcgagcatcgagggagccgagcctgcttttcgagcttgttgatccattagaatgatgatggatattggttaattttttagatatccgactcgtgtcttagcatctgatgatggatacatgacaatttataatttagattacttataatattaaataataattatatttttcatatttatatactattaaaacactatataatgcaatattatatttatcaaggtgcagctcacgaaccgagccaagcctncactttaagctccttgattggatgagccaagcttagccgagctcatttctagccctagttgtaca

SEQ ID NO: 57410 - DNA, 51 bp, Zea mays
tgagcacattagcctccacactaccgaatttaccaaatgttcttacaatga

SEQ ID NO: 57411 - DNA, 439 bp, Zea mays
  unsure (1)..(439): unsure at all n locations
agcttgtcggtcgtttcaaatcaaagcgccctcgtgcagatgatgcagactataatccaactacagactcaaaggcccaatcttcagctgggggtagcgtttctatggacataaaagatgttccacatgctcatcctgactatccaattgacatcactggatggacttacccaaagaggagattctctatggcagaatattgctccaggaggacagtcaatcagtatgctctgccctcagacaccaatattcagttcttttacactcagcttcaatttgatgtcttttggggcacactgatggatacaaactttcacaagcatcaagttataaattagacttttatgctgggtcaatcagtcatgtaggacctgattcccaaattcgaggcatgtggtctntatcactttatgggccagaggaccgacttcagtgagat

SEQ ID NO: 57412 - DNA, 52 bp, Zea mays
tatccctccctacagagccttagaaaggaacaaaatcgagagaaactatttg

SEQ ID NO: 57413 - DNA, 407 bp, Zea mays
ctgagatgcaactaaaagttactttatatggatccggaattattttcatatatgctctgaggccgccgtaatcattgttttcttaccgagatattttctgccttttctgcccatggtgctgcgacaccctattttggcccaatgggtcgtgtatcaagttaggtccattaaggacgcattctagggttgcagcacgacctcaatacccttgtggtcgtcctcccatgtttatagaccccctagccgccaccaagaacagcgggttttgtttagatcaagtatagctctcgctacttgcttgcaagcgcgcgtgctagttcagccgcccatcttcttgtctttcgaaccccaccatattggagtctgacttgaaacctacattaaatctggtaattcagacttggtct

SEQ ID NO: 57414 - DNA, 331 bp, Zea mays
gatcgatagagccaccgcctgacaagtaacaatggcccacagtagagaatccatttgatatgggtgcaccaatttgcaaaagaactgttggcagacagaaaattgaggttcaaaagttcccttctaggcggctacagttcagagacaaaacatgatgaaggtggcatcagttcaaaggcaaaaccaactgaacaagataagcccacaacgatggtaagaggaaaacgtacgtgcaaaagatgctggacattgggtcacacaaaagttagttacagatgcccactcaatggtacaaagagaacgaagagaaagcctatgaatagcatatcaa

SEQ ID NO: 57415 - DNA, 451 bp, Zea mays
  unsure (1)..(451): unsure at all n locations
agcttatgaagattcttcatcccaacgtggtctattcagcgatgccagagccagcccatgttagtcttagcaattaagcaagtgtcgagttcagctctattgaaattaactaagtatagctaaccctctaacactcccttaaaggctattgaattatcacttcttctaaagacagtaacacctacatccgtaaaaagacaattgtaacccatcttacataattctgaaactgaaagcaagttataatctaaagaatctacaagaaaaatattggaaatagaattgtcaggtgatatagcaattttccccaatcctttgaccaaaccttgatttccatcctcgaaagtgatagctctttgnggatcttggtttttctcgtaggaggagaacatctttttctccccattcatgtggttggtgcacccgctgtcgatgatccaacttgagcccc

SEQ ID NO: 57416 - DNA, 480 bp, Zea mays
  unsure (1)..(480): unsure at all n locations
acccggattctctaagtcacctgcggcatcaagcttnatntacttactacatgcttttaatgtcttccttttcggaggttgatgccaaagggggagaagtttacggaccaaagcaatgaaaactatatcaaacaccaaacaccaccaatctaaaattttatatctacaaatggcttttcaagtggttttggttatttggtccaaaaataggaagtaagtgaattatggagttagggggaggcttaagtccataatatcacattgtggggacaatcatgcatcttagcaagtagattgcatattttaattcaaacacttgtattatttgcttgttttggttgtgttgtctgcaatcaccaaaaagggggagattgtaaggaaaatggaccccgggccatttggctaattgagtnttggtgtttgatgattaacacaacctgtgaactaatatgttcgctagtgtttataattatagatcat

SEQ ID NO: 57417 - DNA, 452 bp, Zea mays
  unsure (1)..(452): unsure at all n locations
agctntagtgattagtgagagtgatttgttgtgttcatttgagctcttgcgcttggattgcttctttctctcattctttcttgcgataatctcaattgtaatcaaggcaagagacaccaattgtgtggtggtccttgcggggaagtttggttcccgtttgattgagaagagaagctcactctgtccgacggaccgtttgagagagggaaagggttgaaagagacccggtctttgtgaccacctcaacggggagtaggtttgtgagaaccgaacctcggtaaaacaaatccttgtgtctcacttcttatttgcttgcgatttgtttttacgccctctctcggactcgcatttatttctaacgctaacccggcttgtagttgtgcttaagttgttaaatatcagattcgccctattcaccccnctctaggcgactttcagtatccctagcgata

SEQ ID NO: 57418 - DNA, 455 bp, Zea mays
  unsure (1)..(455): unsure at all n locations
agcttcagtctctctttatataggctgcgcacacactattgctaagtggaccaagtattggccagatagcacccattgggcctgcgccgacgacggcccagctcggcagttgtttgatcgatactattcccgtcatcttcctgcagcagaatactgacagcttggtggtatggcatcacgcattgatgagagggagatgatgctgtgtgggagtgatatgcaatggccagggagggaagatgctcaggttgttgctgtccacatggatgctcagcaagatgctggaacagatgactgagatggagagaaagttcagcaggcatcatgcatgatgacactgattattgcttagccagggtgctatggccatttgtgctctgctggaactttagtgctggataccctatccattgcttgggattaanaataaagaggcacccgtgtatgtgagctat

SEQ ID NO: 57419 - DNA, 415 bp, Zea mays
agctttagggtaaaagtcatattatgaccctctaaataaagctgaatcacatttatgcccctgggataccagaaaccctaattggaaccctggaaaaccctacagccaaatcctagggacttatgtgtaaaagtgatgaacctttggactaaagtgtaaaaactactatgtttaaacatataaagtcatttggttcacaaatatgtgaatttgcaagttaaaccctaagttttgggcttatttgcaaaaaaaacacctcttaagcactatagagcctaagtctgaaattcagtttagttggttcaactttggagccctgtatcttctgaaatatagggtttttgcccaaagtgaccacaacaagtttgtagcccaattataggagaacaactctgtttaagggttcaagccatga

SEQ ID NO: 57420 - DNA, 378 bp, Zea mays
  unsure (1)..(378): unsure at all n locations
ngcttgcattgcatatttaaattccttgtattgcatctaggacttgtctaacctagttgagataaccgccaacaaagcgagtgaaaaagcttaactcgggtcaaacctgacaagtcttagttttaagcttttagcacttaaattcttactttctatgcaattattgattcttgaaatgtgcatgaggtactgcacttagggggagtattcaaaactcatatcactcatgaaaaccccgagtgcaaaccaaaatgcaaatttcaccatttgcctattttctctaaaaattatctagcctatggcgaaaaannttgaaaaatatatgagggtgccaatacctgtcccaacaagtgttattatgtgtgattataaagttgg

SEQ ID NO: 57421 - DNA, 422 bp, Zea mays
agcttctgcttttgggtcgcaccgaaaggtcaatccccaagctgtgctcaattatggctcgactgactccgaccagatcgagggcagaccaagcgaagacatctttattcttggccaggcagcagagaagtttctcttcttcaagcgaggagaggtcttcgctgatagttactgtctgcttgggcgtggcctgatcgagggggacagtcttggtcccgtcttggcactgcaactgtgccttgtcgtgctgcttgtcagctgggctggccggcgcaaggacctctcgctgggtcgtgagacagtgtacgtttctctgaccgggcacgaagtcccgctcaatgttgcgcgccgtctgctggtgccgaaactgtgatggcgcctagcgggcctggtatcttcatacataggtacaacccgtggat

SEQ ID NO: 57422 - DNA, 52 bp, Zea mays
ttaataataagctcagaaaaattggtatgaatctgcgataatacccagctag

SEQ ID NO: 57423 - DNA, 405 bp, Zea mays
  unsure (1)..(405): unsure at all n locations
tcatcacatttcttctcaaatttagaaagccggcttccctttctcaaaatataacatttgcaaccgaataccctaaaatatgagatatttggctttctaccaatgagcaattcatatggagttttcttcaagagcttgtgacaatatagtctatttgatgaatgacaagcggtatttattgcctcggcccaataagaatctgatatactatattccgctaacatagacctagccatatcaatgagagttctattctttctttcaacaataccgttttgttccggggtatatttggaagagaattcatgtttaatacccttgtcatcacaatattcatcaattctcgcattnttgaattccgacccattatcacttctaacctttntgatgtcgaaatcaaattga

SEQ ID NO: 57424 - DNA, 448 bp, Zea mays
  unsure (1)..(448): unsure at all n locations
agcttggcctgctgtattgtgatgttttgatccactgcataggagataagctcaggacataagcaactatgatccttatgatcccatttatcaaaccaaagttgaacagaacgaccattaccaattactggccttgcaatatttttaaagagagataagtttttcataatatcgttccaccaaaaggagcattttcttttgttcgaggggatgtcatcccttgcataatggttattccagactatgtgcacctagggtatgtcctgcccattgtagaatttatgaagagccttcatgaggagtgcatctttgtgttnttcatgtccatgataccaagcccgccgttcattnttagtgcagaggcaatcttgcaagcagctttggggggttngttagcattcatatctgcacctacccaaagacaatgtcttctggatttgtctatctg

SEQ ID NO: 57425 - DNA, 365 bp, Zea mays
  unsure (1)..(365): unsure at all n locations
ccgcatcctctaagtcaccctgacgcatgcaagcttaccacattgaagcatgagcgcttcccctttgtcttggtcttgcttggctgccccttgcgaccctttagcgccgtcttgaatctcttgatgatgaaggccatctcttcatcattaagtctggcttgctcaatttgtgccaccttgctaagtagcgcctccttgcttcttgttgccttgagagcaagaggttgaggctcattgattggaccattcagagcgtcgtccacgtacctcgcctccttgatcatcattcgcccgcttacaaattttccaagaacctcttcgggcgacattntggtgtacctgggattctcacgaatattattcac

SEQ ID NO: 57426 - DNA, 393 bp, Zea mays
tattatacaaaccaagggaggcacaaactcctcccgataagttcttaagcaaaagatcctaggtggaggaccaagttctcccgcacttcagtcttgtttttcctcatttggtaccaccttggagcaaaagcaacaaaaattttgtcgctttctcacctaataacaacaaagggataaaccctgagtatggaattactcagcaagtcttacccgactaaggaaaagactttcaagggtatgctggatatataggagtcaaggagacgccttatcaaaaatcaacttatacttttgcagaaggagcttactaaagtgagtgcttactttcaatcttttaacgccatattaagtattaatagactctatttgcatctactctaaattcacatcaca

SEQ ID NO: 57427 - DNA, 438 bp, Zea mays
agcttctaaagggagaccacgtgatatgtctaaccaatgttcatttcgaaaaagatagaccttgtgcagcttgtcaagcacgtaaacaagtgggaggagcacatcacagcaagaatgtgatgaccacatcaagacccctgaagctgctacacatggacctcttcggacccgtcgcctatctgagcataggaggaagtaagtatggtctagttattgttgatgacttttcccgcttcacttgggtgttctttttgcaggataagtctgaaacccaagggaccctcaagcgcttcctcaggagagctcaaaatgagtttgagctcaaggtgaagaagataaggagcgacaacgggtcggagttcaagaacttgcaagtggaggagttccttgaggaggaagggatcaagcacgagttctctgctccctacacaccacagc

SEQ ID NO: 57428 - DNA, 416 bp, Zea mays
ccgcgatcctataagtcacctgcggcatgcaagcttcggatgtgcatcgactacactagtctgaataaggcatgccccaaggacctgtatccactaccgcgcatagattagattatggactctacttcggggtgcgacctcttatccttcttggacgcttactctggtttccaccaaatccggatggctaaggaggataggaggcataccgcttttgtgacagtagatggactatactgttatgttgtaatgccctacggtctgcggaatgccttgccaacttttgtccgggcgatgagcaagaccttcggggacctgatccgggataaggtggagatttacgtcgatgacatcgtggtcaagactagggaaggatcgggtatagtggaagacctgaccctggttttcggcaagct

SEQ ID NO: 57429 - DNA, 474 bp, Zea mays
  unsure (1)..(474): unsure at all n locations
acccggatccttgagtcacctgcggcatgccaagcttggaaaaatactgaagctaatattctttataaatacatatacgccttgcgtgctcggcagcctctttggttcgcttggcttcttctcgggcttcatgggattctttttcatttttctttatagcttcatcggctatctctcggccgcccttcatccaaatgttggaatagaatttcccgcccataatagtagctttagtcgaaggatcctttgtgttgtctacggagaagacggtttctgtctgggttgcagcttgaacatgttcacagccagttttctttaaaattggtgcaacccctctggcaccagcgaaggcgcaaaaatctccacgatcactaagaatttcttcaaaatcttcagtttcttcgccgatccattcaataattcctttggggtcgcctctaataaattnttgctccgatgagtagtgcacccacc

SEQ ID NO: 57430 - DNA, 449 bp, Zea mays
  unsure (1)..(449): unsure at all n locations
agcttgcaagagacacctaagtgtgtggtgtttcttgcggngtcttagtgatccaagtaatttaagagaagcactcgaccggtctgtgtgatcgattgagagagggaaagggttgaaatatacccggcctttgtggcctcctcaacggagactaggttctttggaaccgaacctcggtaaacaaatcgccttgttcatttgtgttgatctccactcaatttggttcctttctttcctctctctaaaagttcccttgctcatattgatttgagttttctcccaaggttatccacaccaattgagcaactcatagcaaggagaactatcttccgcactttgaattatttctaatgctaaccccgagcatagtgcgtgttcaaagtttataattttaaggtttcgcctattcacccnctctctaggtgactntcaagtacgcacgtacagtc

SEQ ID NO: 57431 - DNA, 462 bp, Zea mays
  unsure (1)..(462): unsure at all n locations
agcttgtcctaagggagcattntctcaagacagccagaacagcaaaagaagggcctaatgtaaacagtttattggatgcaaaagttcaaagtgctattaaagcggcaccggtttttttttggctgtggggatgacagtagactccatgttcagaattntatttcaccaatataatcctcagtcatgtcaatcatagtttcaaacacaggatcagaccaacagctgagcagcaaaactaaagtaggtatgatagaaaagctactacacaacaaccttggcgttagcatttcatggctgagataacaccattagctgcaagttttctagatcctttggtatcatagttaactaccagcctgttgttaagggaggctcacatccatgttagtggataactgacaactgaggacacttgattggagccaaaaaaacatganatgggtcagtttccaaataaactgg

SEQ ID NO: 57432 - DNA, 447 bp, Zea mays
agcttcggctatggttaaattttttggcatcttaacagtgcaatagcaatgaatgctgtggtaacttcacacctacccgtctgtttatatagtgctgcaggtaagaaggtgaatagtcaggatttttacaccaggcaaacagttgctcgcacccgctgcacggtgggccgcaaaaaccaaaatagtgaacctgcatggtgggaccgctacgcgctcgaaaactgtatcgtttctcgacaacgagctcagggaaggtgtttttcggaccttcggtttcctgaagcctaagagacttttttcacggatcaagctcgttacgaaaaacgatctatcaccacgaaggggctactgttgggaccatgcttcgtcgccgaaggtcctgcagaaaggaaacagcttcggctgaagctgcttgaacgtaatgccgaagatatcattcatgaagct

SEQ ID NO: 57433 - DNA, 436 bp, Zea mays
ctgcagcttcctcttaaggcgatgatcaactatgatccaccgcatcactacattcaaaacttgcaattgggtcttcatagtagatcaaacataattctcccattcctcctaacacctaattgggatgacacgtcttataacgtttggtggaggaactagtttaagtacaccctgaacgacaatgtcatcatttccatgacaacctagatctgccctagactttgcaaccaactcactaaaggagggtctatctgtaacaccccaggtgttacccaaagccctggctcaatacatgcacctatgacctattatcacatgtgtttaagtgggaagaaggggcaccaaaactttagaaaccatggcttaattaagtgatgatcatgacagaaggaataccctagctgttcatgtatcttcacctctggaaaagatgctc

SEQ ID NO: 57434 - DNA, 371 bp, Zea mays
agcttcgaccggctgcacccttatgcgactgtttctctgatagtcttcacggaagacttccagttttcgcacttggtgtgctagcccggctgcacccttaggcgacttctgcacggatagtcttcgcggaagactatgatttttctgcccttgctgtgctattccggctgcacccttaggcgacttttgcacggatgatcttctcggaagactacgatttttcgcacttgttgggctagtccggctgcacccttaggcgacttttgcccggatagccttcatggaaaacttcaatttttccacttgttggctagtccggctgccccttagcgacttttgacggattgtctcaccgaagagtgctattttcg

SEQ ID NO: 57435 - DNA, 452 bp, Zea mays
  unsure (1)..(452): unsure at all n locations
agcttggagtgagcatggtccctggagggcagttatatctaaaaccttatgatagccgatttgatcatcacccatacccacagggaaccaggatacccgaatttgcaaaattttcgagtgaccaaggaaaaagcacgcgtgaacacataggccagtttctagcataattaggagaattgggtgacacagaagcattccgcgtgcgtttattttcattgtctttaacaggaaccgcgttcgcatggtacgccactttactcctaattctattttatcatggggtgtgttagaacaaaaattccatgatcatttcttttctggtgattatgaattagatttggtacacctagtggccctgcggcaggggaaggacgaatcggttaatgaatacatctggaggttctgggatgcaagaaaccgatgcttccaaatacaattagtggaanaatagc

SEQ ID NO: 57436 - DNA, 430 bp, Zea mays
  unsure (1)..(430): unsure at all n locations
tcctttagtcacctgcggcatcaagcttggaaagatatcggctagctggttctcagtgctnacataaaacacttcgatatccccctcttgctggtggtctctaaaaaagtgatgtcggatgtctatgtgctntgtgcggctgtgttcaacaggattatccgccatgcggataacacactcattatcacataggagtgtgactttgctcagattgtagccaaagtccctgagggtttgcctcatccaaagtagttgcgcgcaacactgtcctgcggcaacatactcggcctcagcggtggatagggcaacgaaagtttgtttcttatagctccatgacaccagggaccgtcctaagaattggcatgtccccgatgtactcttcctatcgaccttacatccagcatagtcgaagtctgaatatccaatcaag

SEQ ID NO: 57437 - DNA, 367 bp, Zea mays
atgcaagcttcatctagaactcctctatcctcttgtttagtgtttatgcggatccttatacaagggagaataaatcacacgaagagtcttatcaagaaaaaattgatctctaatgtcctatgcgacctttgtcaccaggaagaagaagatggcgatcacattatcctccattgccaaatagcttctatattttggcaaaacatcgggatccaaatctccaacagtctctcaatgtctcgatcctaggagacccccctcatctatcatgagccaacaaaggagcatctttatccacctttattgttggatgcttcagaaaaactaacatgacatcgtcttctgggttgtgactctattcacccaaccc

SEQ ID NO: 57438 - DNA, 480 bp, Zea mays
gacccgggatcctctgagtcacctgaggctgcagctatgaaattttatcccacatggtctagtcggcggtgccagagccaacccatgttagtcttagcaattaaacatgtgtcgagctcagctctatcaaaatctactaagtatagctgaccctctaacacacccttaaatgctattgaatcatcacttcttctaaagacagtgacacctatatcagtaaaaagacagttgtagcccatttgacataattgggaaacagaaagcaagttgtaatctaatgaatcaacaagaaaaacattggaaatggaatggtcaggtgaaatagcaattttacccaaacctttgaccaacccttgatttccatccccgaatgtgatagctcgttggggatctttgtttttctcatatgaggagaacatccttttctccccggtcatgtggttggtgcacccgctgtcgagatccaacttgagcccccgg

SEQ ID NO: 57439 - DNA, 400 bp, Zea mays
agcttgaaggccaagataagaggcacgcctctttatattatgattccgaagttcttaggttgtcaaagaagaattatacagagttggagaaggtactgtatgctgtcttaatggcctccaagaagcttctgcactatttccaagcttacaacataattgttccttcttcacaacctctgaaggatattatgaggaaccgagaagctactggaaggattggaaaatgggctgcagagctcaatgaattatgcattgaatatgttcatagatcttcgattcagtcccaggcgttagcagacttcattgctgactggacgccaggggctcaagaggaagatacaaataaagacgccgaagcatgcgatagtgtttgcgatggatcttggcgaaccttcggagc

SEQ ID NO: 57440 - DNA, 401 bp, Zea mays
agcttgcacgagctagaaccgagcacccgctctatcggaatagcgaaatcatgctcgccggagttcagaaccccgccggcgcacgtggacagggtaagtcactgcgccatttttcgattcaatgcacagatagcctctacatcaccccgtgaagctcaccgtgccattggattgaactagatcgccgtggtttgaccggaacactcgtcgccgacgagagcccccgcctgcgcgcgtggaccggacgattccggccacccccgccgtcgagccgtacaccgttgtaaccgccagagcctccccgagccaaccccgcccctcgccggacctctctcgccgccggtaagccgcgccaccattttctttctctcgggtactgtttaaacctagggagggaccgc

SEQ ID NO: 57441 - DNA, 256 bp, Zea mays
acccgcgtcaccggaatatcgaaaccgtgctcgccggagttcatcaccccgccggcgcacgtggaccgggtaaatcactgcgccatttttcgattcaatgcacagatagcctctacatcaccccaggaagctcaccgtgccattggattggactacgtcgccgtgggttggccggcacacccgccgccgacgaagacacacgcctgcgcacgtggaccgagcgattccggccatcctcgtcgtcgagtcgtacgtc

SEQ ID NO: 57442 - DNA, 390 bp, Zea mays
tgcaagctttatatgctcaaaacatatgtccataaatgctttgtcgccttcaacggtattatcaaagcttttatgtgctccgggtatacgtgtgaatgtcaacggcaaaatgagaatgacttagaaatgcttgaatgcaatgccaatgacgaaattgcgccttcatatggtgttgactatgaaatggttgatagtgatgatgacacttatgatccggctaacccggacacatatgaagattatttttaatcgatgtaatgctatatttcatttattttgcatatgtttctaaatacatatttttatctgtgtttaattgcttactcttaattgcaagttggtggacaaagatggtgggcggtgggacgatgactatgagggggaggggga

SEQ ID NO: 57443 - DNA, 406 bp, Zea mays
agcttgctgttggctggaactgtcattatttatgagcgagcaattcatgagatatgacgaacagacgaatcttccgtttccaggatgggaacaagcgcccagcggaggaaagctgggagagaacgcaacgattcttttgctttgcttctgacagaacaactgaacaatagaggcgcagcgcagctagctaggaagaatatacacccggtgctggcagacgaaaagctcgggatgaacaaaaaaaagaagaggaggaaattaatggacgacagcgtccatagagttttcgcaacttctgaagctcaaccactactgccgatcgctatcgtgtcttctggtccatgtccgtggtgaacagaacacaacagagggtggtaggagatgatgatgagctcgctcgtaagta

SEQ ID NO: 57444 - DNA, 79 bp, Zea mays
  unsure (1)..(79): unsure at all n locations
ctatttacgccgcacactatatgannatactcaagcttgtaagaccatgnngtacagtagcatatggccacatatatat

SEQ ID NO: 57445 - DNA, 444 bp, Zea mays
  unsure (1)..(444): unsure at all n locations
agcttctaaagggagagcacattntaggacttattcatggtcattttgagaaagacaggatttgtagcgcatgccaagcagggaaacaagttggcactcatcatccacacaagaacataatgacgactgacagaccactggagctcctacacatggatctattcggcccgatcgcttacataagcatcggcgggagtaagtactggctagttattgtggatgattattctcgcttcacttgggtattctttttacaggaaaaatctcaaacccaagagaccttaaaaggattcttgagacgggctcaaaatgagttcggcttaaggatcaagaaaataagaagcgacaatgggacggagttcaagaactctcaaattgaaagcttccttgaggaggagggcatcaagcatgagttctcttcttcctacacgccacaacaaaatg

SEQ ID NO: 57446 - DNA, 442 bp, Zea mays
  unsure (1)..(442): unsure at all n locations
agcttaatcatcgtgctcagacgaaacttttcttttgattctgcttcgtcacaagaggaagagcttcgggaaaataaaaaagtcaacaacaaaaatttcaagaaagtcataatcaaatggccagagtttgctccactgctagggttgatcgtgagggagatgagaccgaagctactgagactgttccgatctccgaagcaatgaagcggtctgtgctggtaacatcggaggacgtccctgccgctaaagcagagcaagctgatgttgaggagaccgagtctgaagatgattatagcagcgcagtgccgagcaaacccagccatctggatttcggaaaatccaccatctccgaaggtgacctacctaagatgttgaaattgggctattttaatgaagaanagaaagagctgggtcgctctggtggcgaagaaactactccgaa

SEQ ID NO: 57447 - DNA, 318 bp, Zea mays
  unsure (1)..(318): unsure at all n locations
tctatgcacataatcaatgctgaactcgttgagttccacagcccactttccaatccttccagtagcttctctatttctcataatatccttcanaggctgtgatgaaggaacaattatatggtatgcttgaaaataatgtcgaagcttcctcgaggccattaagacggcatacaacactttctccaactctgtatagttnttctttgataaactgagaacttcggagacgaaagtatactggagcctgtntntcaattgtccttcaagcttctcctgaacaagaatccgacttactgcagagtgcanagctgcacatac

SEQ ID NO: 57448 - DNA, 185 bp, Zea mays
  unsure (1)..(185): unsure at all n locations
agctnttatacactacctctcttggtngactgtttgaccatttgngcagaggcaaccctttccagtagggtcgcgcccgtctggtaagagggtcgctggtaagctgcctgattaatcccttgtctttcactgtgtctgcatggtgcacgcgatgccagcagatcatgccgcgcccatatggtgct

SEQ ID NO: 57449 - DNA, 399 bp, Zea mays
  unsure (1)..(399): unsure at all n locations
ctgaggcatgcaagcttataggacatcctcttanacttattatacataaatcaggctactagggtgtgaggcaagagctcttagttattcggcgcttagcgacctcatgctccctctatccctgacgcgagtgcgcgaggagagcagtgcctcttaaacctcgctctggcgaagaacacagatgagttaggccaaatcaggcttttgtgcagctatgcgactgcttgcagagtttatttgcaacatcgggacaacattctacgctcttcagctacatgtactcttctaaagtaagctntagattgaccatacctgagagatctagagggggtgaataggtgatcctgatcaactccacattaataggcacacaacttagctattagagctatcacgact

SEQ ID NO: 57450 - DNA, 451 bp, Zea mays
  unsure (1)..(451): unsure at all n locations
agcttcagctccatctatgatatggattgtttttgagtcagnccagattccttcggcccttctggcagcttcctgacttccatgaatagcgatgggtccttgatccgaaggtatcttcatgcaaagataagcagggtgaagaattgcttcaaaagcattgagggtgccacgatcaataattgcattgtaagggtattccatgtcaacaatgtcaaacacgacttgctcagttctagtgttgttgatgaacccgaaggtcactgacatggtgatcttgcccagtgctacaatctgtcttcctccgaagccacagagaggatgtgtagcatcatgaatcttatcttctggctcttgcatttgtctgaaggccttagcaaatatgatatcagctgcactgcctgtgtcaaccaagacattgtggaccagaaatcctttgataacacaagagata

SEQ ID NO: 57451 - DNA, 438 bp, Zea mays
agcttctaaagggagaacacgtgatatgcttaactaatgtgcaattcgaaaaagtcagaccttgtgcagcttgtcaagcaggcaaacaggtgggaggatctcatcacaccaaaaatgtgatgaccatatcaagacccttggagatgcttcatatggacctctttggacccgtcgcctatctaagtataggaggaagtaagtatggtcttgttatagttgatgatttttcccgcttcacttgggtattctttttgcaggataaatctgaaacccaagggaccctcaagcgcttcctaaggagagctcaaaacgagtttgagctcaaggtgaaaaagataaggagcgacaatgggtccgagttcaagaaccttcaagtagaggaataccttgaggaggaagggatcaagcacgagttctccgctccctacacaccacagc

SEQ ID NO: 57452 - DNA, 318 bp, Zea mays
tcaagcttttgaggagttgggagaggatttgatctctttggtgtgtcttgtattgaatgctatagctcttgtaaggtgtagaagtgtataaacttggatgccattgaatgtggggtgggtggggtatttatagccccaaccaccaaaaatggccgttggaagactgctgtcgcatggcgcaccggacagttcggtgcgccaccggacactgtccggtgcgctagccacgtcagcgagccgttggggttcgaccgttggagctctgacttgtggggcctctgggctgtccggtggtgcaccggacatgtcctatagact

SEQ ID NO: 57453 - DNA, 399 bp, Zea mays
  unsure (1)..(399): unsure at all n locations
agcttgtgaaggttcttcatccccacatgtgctaagcgacgatgtcacaaccagcccatgctagtcttagcaattaagcatgcatctagaccagcctcctcttttgcaaaatcaactaaataaagtttgccgtctaatatacccttaaaagctaatgaaccatcacttcttctaaagacagacacatctacatttgtgaataaacagttatatctcatattacaaagttgactcacagacaacaagttatatccaagcgactcaactaagaacacactagaaatagagtgctcggatgaaacagcaatttatcctagccctttcaccttgacttggtnccctcacccgatatgatcgacacctgggatcactgtctctgccaccacgagacacactctt

SEQ ID NO: 57454 - DNA, 444 bp, Zea mays
  unsure (1)..(444): unsure at all n locations
gtcacctgcngcatgcaagcttgccaattattatcaaagcagcagcattttctatcacagcaactgcagaccatacccgtcacatggtcatttgcgtgctggggactggacatgattggccctttcaagaaagctcagggaggctacactcatgtgttggtcgccatacacaacattcccaaatggatagaatacacacccattgcttctctaactttagccaaggcagtggaattcatacaagatataatattcatgtttgggataccaaatagcatcataactgacctgngatccaatttcactagctcggtattctttgatttctatgaacaacagggcatttagatcaaatatgcgtcagtagcacacccaagagccaacggtcaagtggaaagggctaatggaatgatactggaagcactccggaagaaagtcttctac

SEQ ID NO: 57455 - DNA, 51 bp, Zea mays
ccttagaaactaagctgacagtagtaccgccaaattcgtggatggcgtctt

SEQ ID NO: 57456 - DNA, 428 bp, Zea mays
  unsure (1)..(428): unsure at all n locations
aacagtacaaattcataagggagaatgcagcttcnttttatcagccgaagcccatgctcttatgtgaagacatagcagagcacaccgcgctgctgggctcccaattatccgaagaacaagagaaaaccttgataaagtttttgttcaacaacaaagatgtttttgcatggtcagccaatgatctttgcggagttaacagggatgttattgaacactcgctcaatgttgacccatccttcagacctagaaagcagaggcttcggaaaatgtctgatgacaaggccgaaggagctcggaatgaagtcaaaagactcctcagtgcaggagttatcagagaagtaaagtacccagaatggctagctaacactgttatggtaaaaaaggccaatggcaaatggcgaatgtgtatcgactttacggatctcaac

SEQ ID NO: 57457 - DNA, 453 bp, Zea mays
  unsure (1)..(453): unsure at all n locations
agcttggcatggtacttgcaataatggaaggtctcacaatcttcttcccttatctgaaactcttccattgtctaagctctcagctgcataagaaggtttagttttggtctttctttatttccattgaaacatagtatatatatagcacttctctatatttcttgtggaaattatttcatcaatgggttcagttatgagtttgtttatgaaacagaaggaaatcccaaggggggtaagcaaagggataaatcagtttgtgcatgtgcgtgttatatatgctatttctattctatatattaaacgtcgtttacgatcgcatgcacaaagtgactaaggtagatcatatcaatatgcacatatttagttgtctgagtatagctagctattcgaagtgtatatagatgagtttatactntaccaaagttcgtagctatatatggcgactgaatgatg

SEQ ID NO: 57458 - DNA, 207 bp, Zea mays
gttcattttgagaaagacaggatgtgtagcgcatgccaagcagggaagctagtcggctctcatcatccgcataagaacataatgacgaccgacatgccactggagctcctacacatggacctattcggcccgatcgcttacataaccatcggcgggagtaagtactgtctacttattgaggatgattattctcgcttcacttgggta

SEQ ID NO: 57459 - DNA, 67 bp, Zea mays
atccaccccagcacaccaaaactaagctgcgccaaggagaaaaaaacccgaaaccggccgccaaatg

SEQ ID NO: 57460 - DNA, 386 bp, Zea mays
agcttgaagccatggatagtagcatatgtttatttattcgaattgactcaagcctatctacgggtgcatatgtttcaccgaaattcataccttctacttgggagtatcctttggccacaagtcgggctctgttccttgtcaccacaccatgctcgtcttgcttgttgcggaaaacccacttggttcctacaacattttggttaggacgtggaactaaatgccatacctcattcctagtgaagatgttgagctcctcttgcatcgccaccacccaatccgaatcttgtagtgctacctccaccctgtgtggctcaatagaggaaacaaaagagtagtgctcacaaaaatgtgcaacacgagatctagtggttacccccttatgaatg

SEQ ID NO: 57461 - DNA, 448 bp, Zea mays
  unsure (1)..(448): unsure at all n locations
agctntatcaaatggacgtgaaaagtgcctttctcaatggaccaatcaaggaggaggtctatgttgagcaacctcccggctttgaagatagtgagtaccctaaccatgtatataaactctctaaggcgctttatgggctcaagcaagccccaagagcatggtatgaatgcctaagagacttccttatcactaatggcttcaaagtcggaaaggccgatcctactttatttactaaaactcttgacaatgatttgtttgtatgccaaatttatgttgatgatattatatttgggtctactaacgaatctacatgtgaggaatttagtaggatcatgacacaaaaattcgagatgtcgatgatgggggagttgaagtacttcttgtgatttcaagtgaagcaactccaagagggcaccttcattagccaaacgaagtatattcaagacat

SEQ ID NO: 57462 - DNA, 463 bp, Zea mays
  unsure (1)..(463): unsure at all n locations
ttaagtcacctgccgcatgcaagctnttcaatcatctcacggcttatatgtttatgtttacttcctccatcaatgatcacctttactactttgtcttgcacttttgctctcatttgaaaaagattatgtcgttgtccaattttagcttctttcatttcaacacacaatatttgtgtaaccacaagagcggtaccatgctcaaattcacatctcgtatgttcttcaaatttatcagtgtcatctacatttcctgcttcagcttcctcttcactagctgatgtatattctccatcatcagtcacaaggatcacacgattatttggacactccttaatgacatgaccacgacctctcacattgaagctctgaatatcactactcttggctgttgagcccactgatgtagaagtggatgctgctgatttanaacccatgattggagcacagcgtcctttccactata

SEQ ID NO: 57463 - DNA, 454 bp, Zea mays
agcttataacaagaggatagaggcaagagctcgtccatatgtcatgatagaaggggagttgtacaaacatggagtttgtgctccgctgctcaaatgtttatccagaaccgaaggtatagagttaatgaaagaaatacatgcaggcctgtgtggatctcacatcggatctaggccgttacttggaaaagttttccgtcaagggttttactggccgaaggcagcttcggatgcagcagaattggttcaaaagtgcgaaggttgtcagaaatgtgcaagagatcaaaaacaaccttcgtccttaacacagctcatacaacccacttggccattgcaaaggtggggtcttgacttgttaggtccgttaccaccggcccaagggaacctgaggtatgttgtagtagctggtggaatattttctaaatggattgaggcgaagcctttagccacaataact

SEQ ID NO: 57464 - DNA, 432 bp, Zea mays
  unsure (1)..(432): unsure at all n locations
agcttgctatcttagcacaatcagtggcgtatataagggctggccggngcatggcccctaacagaaacaaaatattctttgtagttatatattcatagctaaaataaaaaaagttagtttagagtaagttaaaaatattaattgttatgactagtgactattatatatacatatattctatttattaacattatagctatagttatatatgtggtagccctcctaagactgtctgcaacggttgcggtttgcttctccctccctccatttagaggcgactgtagaccgctatccactgcatcggtaccctctattcgtccncctgtactagagggacgcttctctctcccctcaatacaggggcacgctacactcagacgcgaccgctctactcgcttcgtgccactccgctgctggctcgctgctgattgg

SEQ ID NO: 57465 - DNA, 340 bp, Zea mays
ccgagcccttctcctctcgcgggcccgggccttctccgcgtgcttctttttcttcttctcctccgcaggaacccgccgtgctgctcggtccaccgcattctgcgggacccgtggcatggaaggcttgtgccaccccaccttctgaagaagggggaaattccaatcgtaagaaccaggagcaacccgatgcaagagaagggaatgagcggacactcaccagagtcacgcacccttggtctgggcgcatcataagctgggagaaggcgccggggtccgcgttctccaacgcgacggacacccgcccgtggaggacgtcgaatggaagaggatcagaggacat

SEQ ID NO: 57466 - DNA, 400 bp, Zea mays
  unsure (1)..(400): unsure at all n locations
agcttaggatataagctttccaacccaacttatcccacattaaaanatgcttggagctgatggcaagcgtcataacaagatgacctccacaatctaccaagaatcagcgatgcctgctttgggtccaaaaggccttgtacatcttatggttgctcggccacctctaggccaccgtctaagtcaaggatgacttcaattcaaatgggggaggatgatgaggacatgactcccatacaaataatgcatgggtcgacaacacgagcatgtgcacgacagctaaatctccaggttcattcttacctagtcaattgtattntagagcttacactctatgccatggatgtgtttatgattataaatcttggagagaaccataaagaacttgtgaaatgtcaagaca

SEQ ID NO: 57467 - DNA, 165 bp, Zea mays
gcatactaggcggcaggactattttccgagcgggccagctaccctgggcggcaagggaattctccaggcgagcgagcgacctgggtgggaggggactcctgtgctcgagtgactcacgtgtcgttcccgtggtgcacaccgacaggagcgctgttctgaatcgca

SEQ ID NO: 57468 - DNA, 51 bp, Zea mays
tgtactaatcttcctgaagcaagtcaggagcttcaaaccataaaaacataa

SEQ ID NO: 57469 - DNA, 231 bp, Zea mays
tacacgagagcttcttgctaggtgctatagagaaacattaacttcgaggaaaccgtgataaagccctcacatggcccaagtgcacatcagatgtatggtgacttgtgacggagaggagacagtagccactgcgacatctcacattaaactagtcatgagacagataggtctaactgtgatagatacaactactgacgaaggcccactattgtcgaatctgaacagatcatt

SEQ ID NO: 57470 - DNA, 173 bp, Zea mays
  unsure (1)..(173): unsure at all n locations
cattacaccatataaagtgaaacactatgaaaacatgcaatataaaaatagagatcgcttctacggtcatgtgaggaaaagatacgcgatagtcggagctacggtcgagaagttatcacgtttacactaaacaagtattaattagaatattanatttgatataattatattaa

SEQ ID NO: 57471 - DNA, 490 bp, Zea mays
  unsure (1)..(490): unsure at all n locations
acccgcgatcctctgagtcacctgccgcatgcaagcttcanatgcattaaggatgcttggtgcactatccccagatttaatcttttcatttcttgacataaggtggtgttaggaaatcccaaagagagacaatgacaaaaggctttacgatttaaagcatccgccaccacattagcctttcctaggtgataatgaatttccaggtcataatcctagatcagctcgagccaccttctctgtctcatgtttagctccgactgagtgaaaatgtactttaaactcttgtgatctgtatatatatgacatatattccccagtagataatgacaccaaatcttaatggcatgaactactgcggccagttccaaattatgtgttgggtagtgttcctcatgccggcacagctaccttgaagcatacgctattacttgtccctcttgcatcagaacacacccaagcncaatgtcggatgcatcacaataaacatcaa

SEQ ID NO: 57472 - DNA, 454 bp, Zea mays
  unsure (1)..(454): unsure at all n locations
catccttaagcaccgcagctgcacttttaccacccccgggattcttgtttagttgagcaaagngtcttctcctcagttgtcgttgtttcttattcccacataatttcttttgtgaccctaaaacttgttgctcaatcaatgattggctttcttttgagcaacaggggctagcacatgatgatatacaattcaaatgcgcacacgtgcgagaatgaggttcacatgaatttaagtttgcaatgataacctcatgagcaacattaagcatgatatggtcatcaactaatttattatgagaatatgacaacatatcatactttntacctagagcaccgttttctaagtccattgtttctacttgactcttaangcatagaatttccgttttaagttgagcaatattagataatgcatcatgactatttctttgctcaattaaacatatcataccttt

SEQ ID NO: 57473 - DNA, 425 bp, Zea mays
  unsure (1)..(425): unsure at all n locations
agcttgtggatcaaatagatcttcctcgtggataacaacgacattattacatgaaaactatcaatgttntttttttgcttgacagaaaataaaactgaataagaaagactgctatcaaaggtaggatatgtgtcaataaatgtgtttcgactctggcacagtgctgttgactgtgcgagcttcggactgctctctgaagtccctctgctgtggagcgtattgactcccttctggctgttgaccttgctgtaatggaggtgggggcggaagctgttgccaggaagcttgaggttgacttgcggaagctacggaagctgcagggtggttgtctatgtattgtgggatataaggcggatgacacgaagcagtatgcatgacctgcttcggctgagcttgttgagatgcaacttcggcaatttcctttt

SEQ ID NO: 57474 - DNA, 286 bp, Zea mays
cgaagcagatctgtcacccgatgccgaacgactttgttcgtcctgcccactttgaagtcatccaggaacttctcctttgcttcttggaacagctgttcctggcgctccttcaacaagagctgtgtttcagccgtgaaggctctccatgacgcgcgcgatgatatatgatggaggaaacctcagagctatcttttgaaccggccattgatggcccgattgataggcctatatgtgtcgtacccaccggagtcgccaaaaagtatgtcgactccttttcggagcgcca

SEQ ID NO: 57475 - DNA, 470 bp, Zea mays
  unsure (1)..(470): unsure at all n locations
acccagagcacctgcagctgcagcttatgagataatgcagaagcttatgtttaagagcaataacacaagttctctcttgcaatgtgttgcttcactaagtgagagtttaacttaaagcaacaccaaatagaattagccaagagtagtgcaagagaaacttagaaagggaaaagacaaacaaatcacaagcaataagcacacgagacacgggtgatttgttttaccgaggttcggccctcgaaggcctagtccccgttgaggagtccacttaaggacgggtctttttcaaccctttccctctcttcaccgatcactcaaggatcggcgagctttttttcttctcaaggatcactctcgatcccgcaaggaccaccacactctttggtgtctcttgctagcttatacaggcctccaaaactttggaggaagtacgangggaggcacaactcaacgcgcaaatgaacacaaag

SEQ ID NO: 57476 - DNA, 460 bp, Zea mays
  unsure (1)..(460): unsure at all n locations
agcttatgaagattcttcataccaacttggtgctttcgacggtgccagagccaacccatgttagtcttatcaattaaacatgtgtcgagctcagctctatcaaaatctactaagtatagctgaccctctaacacacccttaaatgctattgaatcatcacttcttctaaagacagtgacacctatatcagtaaaaagacagttgtagcccatttgacataattgggaaacagaaagcaagttgtaatctaatgaatcaacaagaaaaacattggaaatggaatggtcaggtgaaatatcaattntacccaaacctttgaccaacccttgatttccatccccanatgtgatagctccgtggggatctttgctcttctcatatgaggagaacatacttttcttccccgtcatgtggttcgtgcacccgcttgcgagtattcaacttgagccgccggatgcat

SEQ ID NO: 57477 - DNA, 419 bp, Zea mays
  unsure (1)..(419): unsure at all n locations
agcttggctataaagatgttaatgctatataaccaagtgactatagagcgagctctcgtgaatcacaataatcatagaaaaagacaactcaagagacacagtggtttatcccgtggttcggccaagtataacactagcctacctccatgttgtggcgtcccaatggatgagggttgcactcaacccctttcaagtgatcctatgatcaacttgaataccacggnattcttccttatagttttcttcccgtttgcgaggaatctccacaagttggagcctctcgcccttacaaaattgatcacaaagaaagcaccgagtaaggttgggaagagcaacgcacactataattagatccacacttcatacacgcacacaagtgagaagatgagcacacaatacacgcgccgggagtttacaac

SEQ ID NO: 57478 - DNA, 356 bp, Zea mays
agctggcaccctgtgccagcctctgtgtgtttatcgggtactccccggaccacaaagggtaccgctgccttgacctctcctctcgccggatcctcatctctcactatgtggtgttggatgagaccgcattaccctactcctgcacaccgccctcctccgaccctgaccttgacctcttcactctctttccgcctgacgtggaggtcgagccacctattcttcctctctctgcaggtcctcgctcaccgcctgtcggatctactcccggcctggtgccttgctcgggtccggtggtgtctgctacagtggtgtcacctcttcgcggcgccccatccccgatcgcccccgggccgagc

SEQ ID NO: 57479 - DNA, 64 bp, Zea mays
aaagcgacactaaaaaactcaagctgcaaatttacttcacaacagcaaaaaggagtgagtggga

SEQ ID NO: 57480 - DNA, 442 bp, Zea mays
agcttgaaccgaggacccgcgtcaccagaatatttcaatcgtgctcgccggagttcaaaaacccgccggcgcacgtggaccgggtaagcctctgcaccatttcccaattcgttgcgcgcatggcctctacatcaccccgtggagctcctcgtgcaccttaattgaactataccgtcgtgatttggccggaacaggagccggcgacgacctccgccgcctgtgctcgtggccagggtagctccgaccaccttcgacgccgacccgcacaccgacgtgaccgtcgtgacctcccagacgtcaccgaccaccccgccggagctttactaccgccggtaagcctcgccgccgtaatctatgccgcgggtactatttaagtcagccagggagcgcgggttagatttcggttaggtccagggggttttgtcaatgtcagtgacccatg

SEQ ID NO: 57481 - DNA, 460 bp, Zea mays
atccttaagtcacctgcggcatgcaagcttctatagataactatatcgtccgctttggtcacatgggtattggtgtctcccccagcccccacgatagaaatatcatggaaatatctacctttcattgcatcaatctgactttgtttaatggttgatttctcgaagacagtgtggcttcgtcaccatggacagtcttcggcatctttgttctcactctctgcatcaaagctttcatcatcactagaactttcagatatcccagctaatgtttcatgtgcaatcttttctacgttggttctttccatagcttcgtaaaattcagacagggctgggtcaacaaccttcttctcaccagccatcagattttgttgaaatgacgaagcttaaaattcaatcaatattcgacagagcaggaaaacctaaatgacaaacacatagcaagcaactgagatggcacaag

SEQ ID NO: 57482 - DNA, 449 bp, Zea mays
  unsure (1)..(449): unsure at all n locations
agcttgtgattntaccaattgaaagagcactatctctatttatgaatttccatgaaatatcttaaaagagattgtattagtaacacaagcaatagtttcctatttagcaacctctagtatatgaatgacaagaaggttactaaaacaaggaaacctcatgatatgaactaaattacccttacaagcatcatgcataacatcaattggtaaaaaatgaaagtagcatgattatttaattaagtttacatggcaagtttaattcatagcatggtgagtgattaatgtagaagactcaaaaccaatttaaacaagaatgaatacatcacatagtattggttcgatcttctttgaatgttgaatggcacactccatttgggaaacacattctcatgttgtgagactacataaacacttagatagaaacattagtctcacaactctagtcatat

SEQ ID NO: 57483 - DNA, 51 bp, Zea mays
tgccaagccctcggacccggccagacttcaccggaggcccgagatctacct

SEQ ID NO: 57484 - DNA, 418 bp, Zea mays
  unsure (1)..(418): unsure at all n locations
agcttaatacttcggagacaaaatatattgggacttgctttntagtttgtccttcaagcttcttctgtacaagcgccgcacttactgcagactgcgaagctgccacatacaatagaagaggagcccctggcgtgggtggagttagcgttgttacatctatcaggtattgctttagctcttccaaggctttctgcttgactgaacctcattgaaagacttcgaccaacttcagcactttacaaaatggtaaattcatctctgctgatctaaatatgaatcgattcaaagatgacagtcttcctgtcatccgctgagcccccttccttatgctnggtggctccatccgaagaatagcttcgatcccttgttgttgaactacacaacccaggaatctttccttctttactccgaagacaca

SEQ ID NO: 57485 - DNA, 52 bp, Zea mays
tcgcatctctgaactaactcggctgcatcgtccttcgccggcggtcaatata

SEQ ID NO: 57486 - DNA, 447 bp, Zea mays
  unsure (1)..(447): unsure at all n locations
agcttggtgccgatggagaaacanatatctttgaaatcttggctgtcaaactgcttgccgttgtcaactgttaggtcggacggtacttcgaagcggcaaacaatgttttgccagaagaatttctgggcagtctttgatgttattgtagaaacagccctcgcttcggtccatttggtgaagtattcgacggctacgaaggcgaacttgaggttcccctgagcggtgggcaggggcccgacgatgtccaggccccagcgctggagaggccatgtatgggcaatcagctttgtatactgcgaggggctgcctgaccgaggagaaaacttctagcaggcttcgcaagaccttgtgacccgatttgcggcgcaaatcattgcgggccagtaaaacccttggcggatcaccttggcagctagggcccttggccctgcgtgcgaaccgcacatg

SEQ ID NO: 57487 - DNA, 451 bp, Zea mays
  unsure (1)..(451): unsure at all n locations
agcttaatgatgaactggctagtcttaatgctctacttaagactagcaagaatgatttcgataagctaaaatttgcaagggatgcctacacaattggtagacacccctcaattaaggatggacttggcttcaagagagaagccaagaacttaacaagccataaggctcccattcccgccaaggagaaagggaaggcccctatggctagtaatgtgcaaaagaaccatgcttttatgtattatgataggagacaaactagaaatgcttataggagttataatgcttttgatgattntgactctcatgccatgtttgcttctagttcttcctatatgcatggtagaaatatgtctaggagaaatgctattcatcatgtgtctaanaagaatgctattcatgctcctangaaagtagtgaatgaacacttcacaatttattatgctttaaatgc

SEQ ID NO: 57488 - DNA, 421 bp, Zea mays
  unsure (1)..(421): unsure at all n locations
gcttctcctggacaagcgctgcacttattgcttagtgcgaagctgccacatataataacaaaggagcccctggcattggtggagtcaatgttgttagatctatcaaatactgttttagctcttcgaaagccttctgctggattggtccccattgaaagacttctgctgacttcagaacttcgaagaatggtaagtttctctctgctgatctggatatgaatctattgagagatgccaatcttcctgtcaatctttgagcccccttctttgtagttggtggctccatccgaagtatagcttcaattatacttggattagcttcaattccctttgttgaaaccaggcatccaagaaatttccccttctttactccgaagacgcattnttctggatttaactttaagccagcctgtctgaaact

SEQ ID NO: 57489 - DNA, 382 bp, Zea mays
  unsure (1)..(382): unsure at all n locations
tggataagaaataaatctatacggacnaatgattgccttaaacagaaaaactggacaacatatattattaatgatatgcacagaatttataccatcatcttgaggatatatgacagatggcaccacatttaaatgaagaaaaatatttgctctcccttatgctgatgcctatactgtaatgcaattcatccagaagctaaagatacctaagattaccatgcaattaatactttcaagccatgggcttaaaaataatatgtcagctccaaatatgataatttctaaataaacactccctgataattagagtactcagcaacacaacttattcataactatcaaccaggagcccaggatacgcataanaacaatccttactgca

SEQ ID NO: 57490 - DNA, 447 bp, Zea mays
  unsure (1)..(447): unsure at all n locations
agctttaaatgtgttgtcatcaatcaccaataagggggagattgaaagtgcattcatcccttttgtgattntggtgatttggataacaacacatttaaaggtctaacgagtttgctaagtgttgaacaggaaattcagtatgatgaacatacttgaatagtgtataatgatcagtgaacaaggttcaacacaaggtcaaataaccagtgagacaatgcaaatggatataatatggtctctatattggtttgaatatatggacaagtcctaagaaatcactatgcataaatatgatcataatagaggttgaagtgattaagaggattggtcaagccaaagtgaataagatatgaggaatcatgaattggcttgaccatattactattagtccatatatgaatatatgagaatcaaactagagcttgattgatcttagcagntatatct

SEQ ID NO: 57491 - DNA, 449 bp, Zea mays
  unsure (1)..(449): unsure at all n locations
agcttcgccttgccgtcagctactcagaacacccttcggtgtgccctccccctctctggtctgtccggtccgcgctcaccggagtggttcttgtgcagccggagctccgccaccgtcgccccgncaagtccctgtgcctccgtcgttgccccgtgcctccagcgcttcccctcaaggtgagcaacctccccgcacccctatttccctgtgtactgcactggttaacgcgcaattgctcaccggagttgccccntgccgtcgttagcccgcctcgccgngtgcagcaccctctggtgctcccgcgccggcgtggtgccctcgactgagtccacaagatccccctgtgcgcgcctaggccaacccccaaacctctggtgccgctccntnnnnngtctgctcgtctccgacgagttaccgccgctagaccgagcggcgctaccttgcccatg

SEQ ID NO: 57492 - DNA, 372 bp, Zea mays
agcttgggcaaagtccacttgaattaatcttcttagaacccgacctcggttgcacattgacaccagaaggttcaacccaacaagcggtggatgaattcagaattattggagagcatatcaggacaagagacctgggtcaggaaattttggctttcaaggcttttcctagcttaaaagaatgggaaatgccgaagctaaagggggagaagaaaaaaggtgaacttggtgggttaccttactatttcaacgttaagaaatactttaaaacaccttgccaagagtggctggtacaattgaagtaatgtgcaatgaaatacttggcaattacctcaaacaagaagatcaagtgatgactacgaacttcggcacccg

SEQ ID NO: 57493 - DNA, 414 bp, Zea mays
  unsure (1)..(414): unsure at all n locations
agcnttttgtttctgctgctagananganaggtttattgcgctcctcgatctgacactatcttcttcggcacaccatgaaggcagactattcgagacatgtataactcagctaacactgctccggtgtacgttggcttcacagagataaaatgggctacctttgttaaccggtccacaaccacccagatggaatcatagtcgccccgcgtacgaggtaggccaactatgaaatccattccgatctcatcccacttccactgagggatctgcaatggctgcaacagtccggcgggcctttgatgctctgctttggttctttgacagctatcacagatggcgacatattctgcgatttctcttttcatgccataccaccaaaatcttctttttaaatcctgatacatnctttcact

SEQ ID NO: 57494 - DNA, 462 bp, Zea mays
  unsure (1)..(462): unsure at all n locations
agcttaaagtaaaatttaaattctaaaaggtttttaattatttagaaaagaagagaagaagaaaaatattatatgagtgaaaaagagtataaaatacatacatataataaaatataatatttctataattagacttgaatgtgtaaatttactcaagggtgaaactcacattaaaattcaaaataattacaaaaaaacagaaaataaaacttataataaaaagaaaaagagaggggaacttacctgggccgactgtacccattctggcccacctcctctatctccctcgcgcggcccaaattgctctaccgcgcgcgcctgctatgctttctgctgcgccgcgctcactagtgcgtgggacccaccggtcggngccgtctttctcgcgagattagcggacgaactccaacaaaccacgcttggatttcgccataggtgtcacggttgtgcttcactctatcg

SEQ ID NO: 57495 - DNA, 54 bp, Zea mays
aggaacgaaaaaccaacctagggcggagagagcaacaggaggcacagggaagag

SEQ ID NO: 57496 - DNA, 142 bp, Zea mays
tcttcttctattattctagcagcttgtcttttcattacactgacaactctttttctctttggcccttcggcacccttgtttaaccgctcataggcaggatattcaaatttcagggcattcattactcgggtcaaccttcgtt

SEQ ID NO: 57497 - DNA, 53 bp, Zea mays
tttgatgacaagcgccatttcctcattgtcgagcttggaggcgtcaattgttt

SEQ ID NO: 57498 - DNA, 382 bp, Zea mays
  unsure (1)..(382): unsure at all n locations
agctcgagccagntcttttgctaagaattattgacgctcaaagaacagataagggtatgaagtatattcgtgagaaaatagaggccgccaaggcaaattgtttcaggaaagataatcaaggaatagtatggtttaaagatcgcatagtagtgccacaagatgttgaagtccgccagcaaattttggacgaagctcatcttagtcgatattccattcatcctggaagcactaagatgtatcacgacttgaagcaacattattggtggactaaaatgaagattgaaattgcacgctatgtggcaaagtgtgacacttgcagacgggtcaaggccatacatttgaaggctgctgggccattgcaatctttgcccatcccaacttg

SEQ ID NO: 57499 - DNA, 410 bp, Zea mays
  unsure (1)..(410): unsure at all n locations
ttagagncgcctgatgcatgcagcttgtatctcggtttgaaatctttattaactcgcacatttgagagtggtgtggtactagcccccggactataattcgatacatttgagtcccacaggatcgggacgcttcaggtggtatcagagctgtaggactggccgtagaccacagccctgaccttaaaaagttgtcttatcaagaaaacacctcttacccccaagaaacactctccnctttccactgatattaacagaccctctttttcttctaccngatggaagacttctgggntattatgacatcctattgctcaggggaagaaggattacctcacctcttacggacgtgcgcgctacgcatgtggatccgtaagaagcccgattatggtctgaaggaatatcacgtatat

SEQ ID NO: 57500 - DNA, 440 bp, Zea mays
  unsure (1)..(440): unsure at all n locations
agcttatcaagtcagatctccaacgcatctatccccacgtcatttaaagattcctagaagaagttattgtcaaaatactgaaggctacgcagaagtcaaacagccacacggaaatcagctctgcagatctcccgaagaggctccttcacattagcacgtgaaaatacttttgtttcgtgtttatacctcgctaaggctgggtgttactagtataaatacccccctatgtctatgatgtaaggcagcttttgataatctaaaatagaacccttttgttcagctgtgtgctaacaaatattgagagtgatctctacccctttgctcttttgaattccttcgtgggattgcagaagcggcggcttcatccgttccgaagnggtgctcctacttcctttcgaggtctcctcgatgattgtaggctgcngtgggtggctctttga

SEQ ID NO: 57501 - DNA, 403 bp, Zea mays
agcttatggaggaagaaactgtgatttgtttgctatgccacatggaaggccacaagtctttccaatgcaaggcgatgaccgaggataagcaaaggcaaaggcaagagctcaagcaaaagccatcaagcaaaatctccaacacctacatcaaaaaggtggacaaaaaggctgctacaccatatttaatcaagaagaaaaagaatggaaaggtgatagcaatcaaggccaacaagcaagccaacaaaggaaaggtgccaaacgcatctgggtgccaaaggaaataattacgaccataaaaagcaccaagaaggtttggatcccaaaagggaagtgagtggaccgaaggtcatcgagaaatttggagacttggcaaagatgggatggatatcatgggatacatcat

SEQ ID NO: 57502 - DNA, 412 bp, Zea mays
agctttcttgatctcgtagggtccaatgtattgatgagctaacttgcccttaatcccgaatctctggacacccttggcggctgataccttaagataaacatgatctcccacttcaaactgtagaggcttccacctcttgacatgatagctcttttgcctgcgctgagcagcttctaagatcttcttgatgattctgacctttgcctctgcttcaagtaccaaatctggcccaaaaatctccctctctcctgcttgagaccaattcagcggtgctctgcatcttctcccatataaagcttcaaaaggtgccatctttagactggactgataactattagtataggaaaactcatccaaggaaagacacttgtacaagcttttctgtaccgcacacacatcgtcttcacatatc

SEQ ID NO: 57503 - DNA, 310 bp, Zea mays
  unsure (1)..(310): unsure at all n locations
agcttatgaagattctctatccccacatggttctagncggcggggccagagccaacccatgttagtcttagcaattaaacatgtgtcgagttcagctctatcaaaatctactaagtatagctgaccctctaacacacccttaaatgctattgaatcatcacttcttctaaagacagtgacacctaccatagtaaagagacaattgtagcccattttgcataattgagatacagaaagcaaattgtaatctaatgaatctacaagaaaaacattggaaataaaatgggcaggagatataacaattttaccc

SEQ ID NO: 57504 - DNA, 56 bp, Zea mays
tctctctacaagggagcagccacacttcttgggcactacaccacatgattctattt

SEQ ID NO: 57505 - DNA, 401 bp, Zea mays
agcatctgatgttctcgctatgcatatacttttagacaacgagccttgctcaaatttactaccagaaaacctactgattgaacatcactggtgtgatacccattacctggcgctcgctgtagtcgagagatattgttggcttggcctgagcaagcgacctttgtatcctcaccggcgaatgtgtggctccccctacaccaagccacaaaactctccgtctagcttttgaatgaagaatttaccccgggccattttttggtctttttagtaaacatgtggccaatagaccccatgatcaattcgaaacgggcatatgagctttaaatcctaccgaggagtgtcctactcatgttgtcatacacccattataaaacatgttattcctgtgagccaatttgtca

SEQ ID NO: 57506 - DNA, 416 bp, Zea mays
  unsure (1)..(416): unsure at all n locations
ataagctcatctcggctctaaattttaggacaccatacaacaaactgacttatgattatgtacttgtaaataacacttaaggaaataataatctacttccaaataaagtgaacccatgatatagatcgtgacctatcttgaattcattatcctttatgtagtatcgcgtctttttaagatgtgcttcaatgtttgtacatgtntggtgtgatgttcattaacactttccaaatgcattgaatgcatgctcgctttatttagataacgagcagtcctagggtactgagtgtgtttgtggagaccttcctgaacaacaacctggtgaagcaaggggcctctgcctattatggctacatactttatggtcattggcccccttcaatactcaaaccaaggatgactaccttccattactt

SEQ ID NO: 57507 - DNA, 424 bp, Zea mays
  unsure (1)..(424): unsure at all n locations
ctgacgacgagatcgtgtttgaagcgagctggtgagggggtttttattataanatgacngcgtcgacgactcgacgataaacgcgagcacgcacgaaacccgacgacgaggacctatgatgtgcgacacacgacacgcaatcagcctgtcgtgcgaacgagtgatgacgacgaaagtgagtcttcgagacagcacgacacagcatggaggaacagggagcagggacactggtgctggagacgcggcatcaagcggcggagtttgcgaacaatccaaggcggccgacatctacatccatggttgaagacaggaggcgagctgaacgagctcgaccaccagagagcaagacgcgacggtggattcgcgcgcgcagaaagctgaagaccaaatcgagctggagccgatcagaagaactcccgcgatg

SEQ ID NO: 57508 - DNA, 439 bp, Zea mays
agctggccctcgagggaagctacgtcgagcctggccctggcggcgacccgatccgtaacccgaaggtgctcccgacagggaagaacatccacgctctcgatccgcaggccatccctaccacggctgcgttgaagagcgccaagatcgtcgtggaccgtctcctggagaggcagaaggctgacaatggcggcaagtaccctgagacggtcgcacttgtcctgtggggcaccgacaacatcaagacctatggtgagtcactagcccaggtgctgtggatgattggagttcggccagttgccgacaccttcggccgtgtcaaccgtgtggagcctgtcagccttgatgagcttggacgcccgaggatcgatgtcgtcgtcaattgctcgggtggtttcagagatcttttcatcaaccaggtatgaattcaacaacacattac

SEQ ID NO: 57509 - DNA, 466 bp, Zea mays
  unsure (1)..(466): unsure at all n locations
agcttgtgaaggttcttcatccncacatgtgctaagcggcgatgcaacagccagcccatgctagtcttagctattaagcatgcatctagaccggcctcttcttttgcaaaatcaactaaataaagtttgccgtctaatacacccttaaaagctagtgaaccatcacttcttctaaagacagacacatctacatttgtaaatagacagttatatcccatattgcataattgactcacagatagcagattatatccaagagactcaactaaaaacacattagatatggagtgctcattagaaattgcaattttacctaaaccttttaccttgccttgattcccatcaccgaatataattgaatcttgggaatatttattcttgacgtatgaggtgaacatcttcttctcccccatcatatggntggtgcatacgctgtcgataatccaacttgaacccncggatgcat

SEQ ID NO: 57510 - DNA, 484 bp, Zea mays
  unsure (1)..(484): unsure at all n locations
tcttcccttctctggcagaaatcattatcggcccggatgttcttattcactttctagagcagcttctccagagtctgagggggtttcctggcgaagtattgagccataggttctggtcgaagccctttgatcatggcctcaatgacgatttcattgggcacttggggcacttgtgctcttagacgcaagaaccttcggacatatgcctggaggtattcttcgtggtcttgcgtgcactggaacaaagcttgagcaataaccggcttcatttgaaacccttggaaactggtgatcaatatgtccttcagcttctgccatgatgtgattgttcctggccgaagagaggagtaccaggtttgtgcaacattnttgactgccatgacgaaggacttcgtcatgactgcagtattgccccccatatgaagatatggttgctntgtagctcatcagcaactgcttcggatctaagtgcccatcatacatg

SEQ ID NO: 57511 - DNA, 468 bp, Zea mays
  unsure (1)..(468): unsure at all n locations
agcttctatagggagaacacattntacgaataacaaatgtgcattntgagaaagacaggagttgtagcgcatgtcaagccgggaagcaagttggaacccaacatccacactagaacatcatgacgacagataggccgcttgagctactccacatggatctattcggcccgatagcttacataagcatcggcgggagtaagtattgtctgtaatagtggatgattattctcgcttcacttgggtattctttttacacgaaaaatctcaaacccaagagaccttaaagggattcttgagacgggctcaaaatgagttcggcttaaggatcaagaaaataagaagcgacaacgggacggagttcaagaactctcanattgaaggctctcttgaggaggagggcatcaagcatgagttctcttcttcctacacccctcaacanaatggtgtagtggagaggaagaatctaac

SEQ ID NO: 57512 - DNA, 429 bp, Zea mays
tcttctcctcgctcagcttcgtttcagcaacagctttcttatcttgagacatctcttcggaaattgggaaaatgtgctcttagagccgaagcttataaaatctaaaaaaccaagcaaacattggtaggcaagagctaaaaattgagcaagcagagcagatggcaaaaggcgtaccaaatgagctcgtggtgtgctcttatttatacgcctagtgcgttgcatggtagagggccccgattgtcattgactgttgctattctagcaaagggaaagtgttttttcggaccttctgcttatggccttcgtccatatcgcaatctgaatttattattctaacaaattaatattgcgaggtgctactgttgggggccttcggtttccgaagttcctcacaaacatgatttaacaatggttctggagtataataca

SEQ ID NO: 57513 - DNA, 434 bp, Zea mays
ttccatgttgtgcttgaacattccaatccgagcccttatctgatcgtggtgaccgtcacaagttggtgttcttctgcagtccgaatccagcatgttcaaatccttttccctttcggtcttctccctgattcctaagcaaaacaagagtgcacgggtctccatggtctaaatatgatggacatgaactcaagagtgtaatcacctgatggttgagttgacgagcacgagcgcgagtaatgggaccagaaattggtacttgtattggtatagatgcatcagtagtgtggatgtcttcatcagtggaataactcgattgggggaggagacgacgttcacggcccgactacagccttccaaagacgctgcgccttagcaaccgatacaccacctcctatggctgtcacgatcttgtggagcgtgacaccctggccact

SEQ ID NO: 57514 - DNA, 414 bp, Zea mays
ttcatctctggcctgttgtgaacattcgtccaatccctggaccagtagtacttactcctggcagctctctacgatcatatattgtcctcacaaaccaacacgagtcttttgtgcgcactttgtccttatgcacacccgagaaaacttcccagtcagtcacccatcccaaatagctccaagccaagcacgcttaacctggagattctttcgagatagacttccgaaaaagaagatgcaccaccccgtccaatccctagaccgacagtacttactcctggcagctctctaggatcatatattgtcttcacagaccaacacgagtcttttgtgcgcacattgttcttatgcacacccgagaaaacttctcagtcaggcactcattccaaattgctccaagccaagcatgcttaacct

SEQ ID NO: 57515 - DNA, 475 bp, Zea mays
  unsure (1)..(475): unsure at all n locations
tctaaagggagagcacattttatgactaaccaatgtttatttttataaagacagggnttgtagcgcatgccaagcaggaaagcaagttggtgcccatcatccacacaaaaacatcatgacgaccgacaggccgcttgagctactccacatggatctattcggcccgattgcttacataagcatcggcgggagtaagtattgtcttgtaatagtggatgattattctcgcttcacttgggtattctttttgcaggaaaaatctcaaacccaagagaccttaaagggattcttgagacgggctcaaaatgagttcggcttaaggatcaagaaaattagaagcgacaacgggacggagttcaagaactcacaaattgaaggcttccttgaggaggagggcatcaagcatgagttctcttctccctacaccccgcaacaaaatggtgtagtggagaagaatagaactctatnggacatg

SEQ ID NO: 57516 - DNA, 200 bp, Zea mays
aaaaaaataaaaaaaaaaaagaaagagaaataaaaaggaaaaaaaaaaaaagaaaaaaaaaaaaaaaaaaagaaagaaaaaaaaaaaaagaaacaaaaggaaaaagaaaaaaaaaaaaaagaaaagagggaaaaaacaaaaaaagaaaaaaagaaaaaagaaaaaaaaagaaaaaaaaaaaaaaaacaagaaaagaaaaa

SEQ ID NO: 57517 - DNA, 379 bp, Zea mays
  unsure (1)..(379): unsure at all n locations
agcttcgcacgacctcgngactcgattcgcttctcttattattgcgggccaataaaatccttgacggatcaccatggcagcgagggccctatgtcctgagtgggagccgcaggtttcgctgtggacttcgcgaaggatttgaatgccttcagtttcggtgacgcattttagcatgggttgactgatccccttcttgtatagctggcccccgactagtgcgaagtcccggcttcggtgcttgaggcgcttggcttcgttgatgtcacttgggtggtaatatccttgcangaacagggttattggggcccgccaatcttcagtcataatgagggtgacgatgcgatggccttcggcatcgntggttacttgtaagccctct

SEQ ID NO: 57518 - DNA, 427 bp, Zea mays
  unsure (1)..(427): unsure at all n locations
agactgcctttcgatactttgggccgtatgtgtaacatctcgccaatccctggaccagtagtacttactcctggcagctctctacgatcatatattgtcctcacagaccaacacgagtcttttgtgcgcactttgtccttatgcacacccgagaaaacttcccagtcagtcacccatcccaaatagctccaagccaagcacgcttaacctggagattctttcgagatagacttccgaaaaagaagatgcaccaccccgtccaatccctagaccgacagtacttactcctggcagctctctaggatcatatattgtcttcacagaccaacacgagtcttttgtgcgcacattgttcttatgcacacccgagaaaacttctcagtcangcactcattccaaattgctccaagccaagcatgcttaacct

SEQ ID NO: 57519 - DNA, 347 bp, Zea mays
aaaactcacttactttacaatatagaagcctcgctatttcttcttttgtgcattattaatccccattttgtgtgaaaatgctataactaagaacagaggcggaggacacgtcaaattaacgagttgctctaacagcatgaatagaaaccaattgttttatgtttgaaatgcaaattaataagacacagccaaatttaggtccattacaagtttaacaatgattacccactaagctttacatgtctcaaaataatctaattcaaaatttggaaatttcaataaaattatacctaatctggggacaagaaactccaccccgatgaacaccacataaggcaaggcgtggg

SEQ ID NO: 57520 - DNA, 332 bp, Zea mays
aatcaccaggagggggatgactgtacagcgtggatatatgactacggtgcatgctgttggagaccgaggcggtggcataccgcagcattggcactgtgggccgaggttgaggagcccctcaatgtccaacgctgccacgatgccattatggcctgcctgcagcacaagatggctaatgtcaaaatgaagctctgccaaatccttcgctttgtctactacaagatggtgcttgactgtgcttggcaccaccgagatctagtagttccctcttctttgcacagcgtgcacatctggtggtgtgacttcacgcaatggcccccttgagtatcggt

SEQ ID NO: 57521 - DNA, 387 bp, Zea mays
  unsure (1)..(387): unsure at all n locations
atctctaagggtctccttttatttattttattaaataaataaaactacatctatattaattcatactaaatcctaaaaattagagtgtgcaaacagtaagtgaaaccattttatttaaacagagaataattctatgaaccatttgcaatttcaatcactaaatttggagttcatatgcaaaagttatgaaataaacaagtttgggaattcaaaatatgaaattagggctaattctgtgaatatctcanagtccagggttagatatgcaagattacaggggcctccgcacgaaaaccagggatggcgggttgttttccaataaaccgagggtctctttaagaaaactaccgcgcgaaggggtatcgggtgaatctaaccgttagatca

SEQ ID NO: 57522 - DNA, 456 bp, Zea mays
  unsure (1)..(456): unsure at all n locations
tgtagtcacgggaaattgcttgttgtgttccaaatgtgtatatttgtgttctccggtaaaaatctgaagggctcatgtggtggctaaactaaaatgcggactagtgggtgaaaagcgcttagatataagtatatgccggatttgatgattgtggtgaatgcgtttgttaactgaatgtggtaattntagtgcactaaatgatttggataaaatctgtaagtctacttgctagtcctcatttaattaatntaactctaagaaatggtaaagtgctagaatgattcaagtctctagaacatggcgattcttgaattgtataggagctgagatatattaatttctgttttgggctgcacgcactcgtttagttgtgctgtatgtttgatgaacttaattgtgtttatgacatatgtgctataaaaagtggtgataacttattatttactgtgtaaaatt

SEQ ID NO: 57523 - DNA, 453 bp, Zea mays
  unsure (1)..(453): unsure at all n locations
ttatgtagatgacgtggtgatcaatatttattgttcanaaaagttcattgaagatttatagctggtcttcaacagtctacgacgattcagatgggagcttaatccagaaaagtgcgttttcagagtgccagcaggaaagttgctcgggtttattgtcatccaccgaggaattgaagtcaatccagaaaagatagaggatatcatgaggatggaagcaccacgatcacagaagaaagttcaaagactcaccgggtgtatggcaaccctaagcaggttcatatctaggctgggagaaaaaggcttaccaatctataagttactcaagaaggtggataaattccagtggactctataagcacaggaagctttataggcgttgaaaagttcttgatacaccaccggtgttaaaccaccgactcagccacccgactcaccggctgaagattgctttat

SEQ ID NO: 57524 - DNA, 380 bp, Zea mays
tctgaaattcagatttctgaattttagcccttgagccaaagaccgagcatgttcaccttgatccctagcttaaatcctaatgaccccattgacaaaaatgtgcctaactaacccctctacctcataccagaagatggcatctggacacgtgctctggacaacgtaaacccgggatcttctctctgtgcgcggcagtgagacaaacctgatttctcccctctctatgtcttgatccagtcagcagaacctgcaagcctcgacacacaaacaacaaaggaatgcaagggaagagatctctcaacgggatcatggccataatctcaaagatttggaagccatccgcgcttgaactcaccttcttctgtgctgcctcgtgctcg

SEQ ID NO: 57525 - DNA, 406 bp, Zea mays
agcttcgggaatcctatgctcttacctatctcctgtttaacgagatattctttgttatccgggagacaatacataaaatcttcttcgttattaccattgaacactaaggcccccttcagatatttcaatctttgggcgtagtgtcttgcttctagtatttcttgggatagtttctttcccgaagcatgacgaatgatgtagtcagcgcttttgttcgaagcttcgggagcaggagctttgattttttcaggtgcaatctgctctgtcaatatttcctcaggcacggcaggctccgtctcggagggcactgaaggcccagcttcggcttcagcctgagcttgcgtagcttcggtttctgcttgccaagtttttgcttcggctttgcgtatggcagcctcaacatttt

SEQ ID NO: 57526 - DNA, 443 bp, Zea mays
  unsure (1)..(443): unsure at all n locations
ttgaagctgcaacaggaaaacaaagatagaaagaacgagcttgtttcttttacttggaagaaaaagtgaaagaaattgaatatcttctggaagaaaaggattctaagattaaaactgtcgaagcggacctggccgaagctccccttcgaattgaaaatcaagctactcaaatttttgatcaagacaaacagctgaaaaggctgaacatagagcttgaaaaagtgaattcaaatttaaaagaagttgttcgctatgagcacgaaattaaagaactaaaagatgaagtcaaagccgaagcggagaanagttctaagctatatgaagccctaagaatgcttcgggacacctactccggcttcgcaactcggtgcttccttcgtctgcgaaattttcaattcggtccgggcaatgtgatgagaagtcgaatattctgttgacgatat

SEQ ID NO: 57527 - DNA, 351 bp, Zea mays
  unsure (1)..(351): unsure at all n locations
agcttctgctccatctatattatgaattgcttttgattctgtccagtttccttcaacctttctagcagcttcctgacttccatgaatagcaatatgcccttgatccgaatgtatcttcatgcatagatatgctggatgaagaattgcttcaaaagcattgagtgtcccacgaccaatgattgcattgtangggtactccatgtcgaaaatatcatacacaacttgctcagtccttgtattgttgacaaatccgaaggtcactatcatcgtgatcttgccgagcgctacaatatgccttcctccgaagccacagagagggtgtgtagcatcatgaatcttattctctggctc

SEQ ID NO: 57528 - DNA, 397 bp, Zea mays
taatgtaagggcattaatgtaattctacacgggctgcgtcccttgcctataaatagatgaacagtacttccgtactattcacgctgacttggcattcgctttatgcatcacgcctgtacctttactatccgtcaaaccgaaggtacatttataatttgttattctggatatgataatgcaaataaaaataagttgatgataatatctatattaatattcgtattttgcataggaattcttgcttatcatctatagtgcttacgaagggtttttactttataaccttcgtgcggattcattaattccatagggactaatgtcttgaagacaacgacttaatatttacacttttatgtgcctgtcctacctctacattgaaacatgctcacatggcccc

SEQ ID NO: 57529 - DNA, 371 bp, Zea mays
agctttaacatgttggcatatgtgctacacgctttcatcggatggtcttctttatcataagaaatagtaggaggtggaatatggtcctcgctgacgaaccaattttcttactaatcctcataagaatctgaatttgactcattcagattcggtgcttctgaaactccagatttggtacactggttaagtacaagccctcctcatccacactcatcaagatcgctagatgctaggattgttgaccaacatcatcagcgagcttctgtgatataatcatataactttctattaccatgcttggcgaacattgacattgcgagcaaatcttgatcatacttgacttctaagtgcgctttgctagcatcgtcata

SEQ ID NO: 57530 - DNA, 488 bp, Zea mays
  unsure (1)..(488): unsure at all n locations
gtcacctgcngcatgcaagcttgttgcaaaaaatgggagccagtcttatattatcacacggcaaaggaatcctggagacacaccattcaagctacgcctatcatgatatataaaaccgtaaacccacaggccgtgctagattaaacattatcttattccttggtgcacagatcaaaattaaggtggtggaagatcaccgtgggcattcgggttaacccgaaaattcggatcaggcttttcgggcttttataattttggatatccaaaaccattatccgaatatatggttcatagactatatacccgatatttcgggtatccgaaattttcgggtttggatttgggtagcccgttctatccaatttatcagacttcctcagacgttcaagctgcaacccacttacccacacgaccacaggggatgttggcgtcttggcgaatggaggatgcagtgatgcaccatagtgagtggtggcggtgtggatgat

SEQ ID NO: 57531 - DNA, 402 bp, Zea mays
  unsure (1)..(402): unsure at all n locations
taagcttctaagggagaacatgtgataggtctaacaaatgtacttttctattaagatagaccntgcgcagcttgtcaggcacgtaaacaggtgggaggagcgcattacagcaagaatgtgatgaccacgtcaagacccctggagctactgcatatggacctcttcggacccgtcgcctatctaaacatagggggaagtaagtatggcttagttattgctgatgatttttcccgcttcacttgggtgttctttttgcaggataagtctgaaacccaagggaccctcaaacgcttcctcaggagagctcacaatgagtttgagctcacagtgaaaaagataagaagcgacaacgggtccgaagtcaagaacctcaagtggaggagtccttgaagaggagggatc

SEQ ID NO: 57532 - DNA, 454 bp, Zea mays
  unsure (1)..(454): unsure at all n locations
aacttcccaggggagcatcgtatagctctgcgtcttatttttacccttattctcatcgccaccaacaataccaacattgtcgtcgccagaaccatcgccggcaggagcaaactctaggtcttgttcatcatcactttcttcatcttgaataggagacaaggggactttcaaccttaacctcttcctcctttccttaaatncatttttatctaattgctttctcttgttctgtacacgaggagagcgacggacagtatcagcgccttgctggcctttgacattctgctcttgatccattataaaaaccactcaaaaatgggaatgaaaaaaacatgagggcacaaacacatggtatagatctcataaccaaaaattgctaatcaacagactaatacacacagtacagataggaacagaaaataggtgcaatacacactagtggtgcaacacacat

SEQ ID NO: 57533 - DNA, 295 bp, Zea mays
  unsure (1)..(295): unsure at all n locations
agaacacancttaagacaaacaaatgttcattttttataacgccagggattgaagcgcatggcaagcatgaaagcangttggcacccaccatccacacaagaacagaatgacaacggacaggccactggagttactccataaggatctattcggcccaatagcgtatataagcatcgaccggagaaagactgcctaagaaatgtggaagataatctcgcttcacagcggattcttgcataacaaaaatcatagaccccagagacacttaaaggattcttgagacgggcacaaaac

SEQ ID NO: 57534 - DNA, 462 bp, Zea mays
  unsure (1)..(462): unsure at all n locations
agcttcgggaatcctatgctcttacctatctcctgtcttacgaatattnctttgttatccgggagacaatacataaaatcttcttcgttattaccattgaacactaaggcccccttcagatatttcaatctttgggcgtagtgtcttgcttctagtatttcttgggatagtttctttcccgaagcatgacgaatgatgtattcagcgtttttgttcgaagcttcgggagcaggagctttgattntttcaggtgcaatctgctctgtcaattattcctcaggcacggcaggctccgtctcggagggcactgaaggcccagcttctgcttcagcctgagcttgcgtagcttctgtttctgcttgccaaagtttggcttcggctcgcgttatggcagcctcaacatttttctttgtaagagcanggctcaaggcctttgttgtctccagcacagcatacaacacg

SEQ ID NO: 57535 - DNA, 475 bp, Zea mays
  unsure (1)..(475): unsure at all n locations
gcttgccttgcagatgtctaacgtacgctcttaactcatttattctctgaccgtcttctacccacaccctggttctgtgacgtagctctgtccgaagctgctccacttgggcttctaagtctccgatggggtcgatactgccgctgctgctctcttcattccttggagccagctgatgccgaggtacgccaatatgtccggtggacttacgtgcggttttcctcgtgcacggcggcatatctccataagggggaaaactttattagtatagtttttacacatgatgcatgcataattacggaatcaaccttcgttgataccccacctcctatacattgcactctgatatctggtcttatacaagaagtactcataaagtagccaggtgagaatgaaagaaattctcttggataacgaatagaaaattcttttgacatgcctcatatatctgagagatggcttnctctgaaccact

SEQ ID NO: 57536 - DNA, 462 bp, Zea mays
  unsure (1)..(462): unsure at all n locations
agcttatctatgtggcgtctcccagtctgcttgttggcgccaaggaataatatttagttcgcttattggataatttatttttgcaagacttccgctatgtaataatgatacctgtgacatttagctatatacactttgtcattatatgttatgttcttctttggcgcacatatgagatgcacccggctttatcccttacattctgttgtgacagaagtggtatcacaggaaatgttgactgtaggacaaaacctagatagaactggacaaaaccctttcctacttaccttactctgattctttcaatacttatcttgatcctgtctcacctttngatgttctactctgactattcttatattctctactctagaaagacaagaaggatttcacaccttggaatcctacatttataaccctcttaagagatatgagacctaacacaataaatatatttctcta

SEQ ID NO: 57537 - DNA, 398 bp, Zea mays
gaccttaaaactcagcttatcatccttatcgcagctcacatatatttattattctcgacaagttctatgattctatgacttcatttaatttctatataattttaaaacatgtggtgcatagcttcgtggtcatttttcgtgaacgtaatgtttaaaatttctagtatgttactgtatacgatctcaacttatactgagtaacatgactatcgtgttttcattcattttttccattatgtgaatgacttggagatcaaatttgaattatccaaagaaatccaattaaatgaaataaatttagtaaatatagcatatattctgagaaatgtgccaaaattgaacaagtagttctacgtgctatataaacacaacatataaagtttgggagcacaaagaaa

SEQ ID NO: 57538 - DNA, 422 bp, Zea mays
  unsure (1)..(422): unsure at all n locations
ttaactctcgcgagacctttccccatatctttcttttcttttttaattcactatcgcatgtgatattctatgcatatttactttatatggtcccttgtatggtgtactatttgtttcctaatttgaatggatggatgtatgtatgcttgcaatcgcatagagaacgattcggtcgaggagcccgaggaaccctcaggagaagcccctgagcagcagtcggttggtggaggcaagtgtcccttgacctatctctgtcctatacattctttaattcacctcccgcattatacatgtatacttaaggattgactagcttttgttatccatatacttgtttacctatttgggttggagtatcatcgcttagttgtatgctattgctcanactctaatcaatgaacatgatgagattatctatgata

SEQ ID NO: 57539 - DNA, 434 bp, Zea mays
  unsure (1)..(434): unsure at all n locations
agctcgccaatacttgtctaaactacaacatctgccagcacagcaactacagaccataccagtaactnggcctttcgcatgctggtgactggatatgatcggacctttcaagaaagctcaggggggatacactcatgtattggtagtgatcgacaaattcactaaatggatagagttcaagcccactgcttctttaacctctgctaaggccgtggaattcatacaggacataatattcagattcgggataccaaacagcatcataactgacttaggatccaacttcacatgttcataattcttcgacttctgcgagcaaaagagcattcagatcaagtatgcatctgtagcacatccaagagccaacgggcatgttgagcgagccaaccggatgatattggcgcactcatgaaaaatgtcttcgataagaatga

SEQ ID NO: 57540 - DNA, 464 bp, Zea mays
  unsure (1)..(464): unsure at all n locations
taagtgcttcagccaatgttgagacaattaaatatcattatgggccagcggtgactccgacaagaaagagaatggtcaatgtgttaaatgttctggaaacaattaagtcctcaagcacaactccgaagaagactgttgcaacttccgaagcaaaaactgaaatttctgatactaaggctccagagcaagaaactgaagctgaagctgggccctcagagcctacaaaggtaaaatccttggaaaccgaggaagaaaaaataacggagccaattcttgttgaagaaatcagtgctgttgcccccgaagcatcccccacagtccttgattatattgttcgtcatgcttcggggaaaaaattatcagaaaaagagaagcaagaggcccagctntacacccaaaaactgaagtatcaaagggggcgtaatattaacggaatggagagaagacttttgtattgctcctga

SEQ ID NO: 57541 - DNA, 449 bp, Zea mays
aagattctttatccttacatgtgctagtccgcgatgccagagccagcccatgttagtctatagcaattaagtgagcgacgagttcagctctatcaacatctaccaagtatagctgaccctctaacattcccttaaatgctattgaatcatcacttcttctaaagacagtgacacctacatcagtgataagataattgtagcccatttcgcataaatgagatacagaaagcagattgtaatctaatgaatctacaagaaaaacattgagaattgaatggtcacgagatatagctattataccaagacctttgaccaaaccttgatatccatccccgaatgtgatagctcgttgcggatctaagattttctcgcaagaagacaacatctccttctcactcgtatatggtctgtgcacccgtgtcgatatccacatgacccccgatgcataa

SEQ ID NO: 57542 - DNA, 336 bp, Zea mays
  unsure (1)..(336): unsure at all n locations
tcttcttcttcacgtncacattggttcttatatctgatgcataaccatcatgaaattttactccttttagtagttcacaaaataatgtcttctcagacgcactcatagtatatgatgctggtggtaaataaaacttgtcacccactggaacaagatgaagctcagttcggatgcctatggactgaagatccaaacgatatttcaagttatccttggactttcggtgaatgcctangatggtgttgacaatgttgtcacacacattcttctcgatatgcatgacatctaaattatgtcgtaacattaaatccttccaatatggaagcctaaaaaaat

SEQ ID NO: 57543 - DNA, 252 bp, Zea mays
gcaactaagataaacagggatttcctttaacagacacacaactgggaaaaaacgagcctatgcaaggcgcagcacagggaaaagcaaactacaacaactcacaaccaagcaagagaacagcggacccaaaacccaaaaaaccggggattccccggagatagaagacccacaagaaagacatgtgtacctagcaccagcaacgcactatggggcaatgaacatgctttccatgccacctgccacaacaatatc

SEQ ID NO: 57544 - DNA, 347 bp, Zea mays
  unsure (1)..(347): unsure at all n locations
tcgcacttggaaaatttttcccacgctcttcacgagtatttatattctcttggttgactctgctgcagactttagttctgtgaatctgtttgttgtgacatctatagattatgtgatgttcagatgattcgagtcatgaaaggcattctaattgggatgaacgctcaaggtaatttggatatcagcttggctgcatagtaaatcaattgttctatttttttcttataacgatatgaatcttgggggtctggcactatgctnttaggacatccattttattttaacctttttttatgacttggtgtggtctgtgcaggcaagaggagggctctaatccctctcctgat

SEQ ID NO: 57545 - DNA, 398 bp, Zea mays
agcacagcaactacagaccataccagttactcggtctttcgcatgctggtgactggatatgatcggacctctcaagaaagctcaggggggatacactcatgtattggtagtgatcgacaaattcactaaatggatagaggtcaagcccattgcttctttaacctctgctaaggccgcggaattcatacaggacataatattcagattcgggataccaaacagcatcataactgacttaggatccaacttcacaagttcagaattcttcgacttctgcgagcaaaagagcattcagatcaagtatgcatctgtagcacatccaagagccaacgggcatgttgagcgagccaaccggatgatattggcgcactcatgaaaaatgtcttcgataagaatga

SEQ ID NO: 57546 - DNA, 399 bp, Zea mays
  unsure (1)..(399): unsure at all n locations
gaatgtttatgaatgcacatgtcatgatgtaatgtatcgtgcaaatgaatgtccaaatacatattcgaagccaaatcaaaaccttcattcccttgggaatgactcaaatcttctttgccgcttatttttcggcttcatcgtttatttttcggtgtatcagcgctgacttttcgctgtaagcctcccttgggagcttcttcgccttctatttcggcggaatcagcgtttattnttcgctgtaagctctgcattctcttaggaacgacttttgagcttctccctggtttctatctttttttggttgccctcgatggtgtgtctcagctttacattacatctttggggatatggctttatcgactaaataagaaaagaaaattcatgcatggcccataaaac

SEQ ID NO: 57547 - DNA, 447 bp, Zea mays
  unsure (1)..(447): unsure at all n locations
agctttagcctctgacgactagatgtggtgtcctgcttttggtaacaacattaagatacacatgactatctatcaaatataattaaattaaatacaaacaacattaagatatagtaccgtaaacaaggaagaggagtgtgtcaaacaaaaggatcggcctccctactcgacctggattgtgtggacctggaggagccttcaccctttttcttccctttccccttaccaacaccctcaacatctacacaatttacacacaatagttagtataaatgattcaattataaaataaatttaaaacaggtgtatggcataaattacagtaataaacatacataaatggtagtaataaaaaatcgtcagcatcagaatcctcttccctcacacatgcattaatgagtccttcaagaaatcttgttgactttngaacgtgcattaagttaagta

SEQ ID NO: 57548 - DNA, 427 bp, Zea mays
  unsure (1)..(427): unsure at all n locations
tcagatctcttgctctgctgcttttatcaacatgtcctgttattttctgtgagtcagaattgaggactgcccttcttattcccatcgccttaagcttttgaagccccaagagaagagcttcatactctgcaatgttatttgtgcagntgaactccaatatggttgcatagcaagttttgatcttggatggtgaaattaggatagcagctgcacctgcgccaaaggtcccccatgacccatcacagaacactgtccaagcttcgttttttgttgtgcttcctttgtcctaagccatcggcgtccaatcaacaatgaagtatgctcacttgcgattggattgaagatctatggacaaaatcaatagcgaattcatttagttctgcgacccactttccaactcttnccgtggcttctctgttcttatagt

SEQ ID NO: 57549 - DNA, 426 bp, Zea mays
aactttatcacacccttctgcacgtacctgctttgtttgtatgctcttacgactcacaaacggcgggtcaaccttttctcgccataccaagagggttctcaaaagtcaagtaggccgcaacattttcacctacgtagatgacattgtcgttgcaagcaaaaacaaagaggatcacctggccgaccttgcagaaacattccgccatatgcgcgatgcatgacttcggctcaaccctgagaagtgtgtcttcagagttcgccaagggaagatacttggttacctggggtcacatcgagggatcgaggccaacccaactaagatccaagtgatcatcaacatcgcacccccgcagtccaccagggatgtccaacgactgacaagcaaattggccgccctgaacagatacatcttcaaatccgtagagcg

SEQ ID NO: 57550 - DNA, 425 bp, Zea mays
  unsure (1)..(425): unsure at all n locations
ccttacaaactcaagctaatgccactgctgccaaaaatgagaggtgaactgcgtttttttgtttgacactatcagccncggcacaccatgaagacaaacgattcgagacatatacaattctgccaatacagcgctgctatanttgggcttgacaggtatgaagtgggctgacttggtcaaacggaccactacctacccaaatggaatcgatcccgcttgagtgcgatgcaatccgactataaatccataccaatttcatcccattttcactgagggatctgcaacggttgcaacaaatcagctggtctttggtgctctgccttaattctttggcaactatcgcacatagtcacatgctctgcgatttcacttctcattccgtaccaccagaaattcctctttagatcctgatacatcttctcact

SEQ ID NO: 57551 - DNA, 453 bp, Zea mays
  unsure (1)..(453): unsure at all n locations
agctntagttgacttaaggctccttggtggatcattcccaggtttaacttctccatctcctggcatagtgtattgtcagaggtcttcactgtaagatagtgacaggaaaccttacggttaagtgcatctgccactacattggccttgcctcggtgataatgaatttccaattcatagtccttaataagctcaagccatcgcctttgtctcatgttcaactctgactgggtgaagatatacttcaagcttttatgatctgtatagatgtgacagatattacccagtagataatgacgccagatcttcagggcatgaaccactgcagctagctctagatcatgagtgggataatgctcctcatgctagcgcaactgccttgaagcatacgctattacttggccttcctgcattaatacgcagccaagaccactgcctgatgcgtcataatacaca

SEQ ID NO: 57552 - DNA, 426 bp, Zea mays
agctttggcttctagttggtgatttcaattttatcctgttgtcggagaacagaaatagaattggggggatattaaccttatgctcaagttcaatgaagcgattagcaacttagatttgattgaaatccctcttcacggtctcacgtacacctggtcgaacagacagcaggaacctctgcttcagaagcttgattggtttttcatctcgcaagaatggtcgactgtcttttcagactcctttgccaagacattgccgcgggacatctccgaccatgttccttgcttgatttcatttaagtccaaaattcctaaacctacgatttttcgtgttgagaatttctggcttgaattggatggtttcatgaacctctttaagctacttggaatgggatccctagcattcccgacaaggccaagaatctgact

SEQ ID NO: 57553 - DNA, 375 bp, Zea mays
  unsure (1)..(375): unsure at all n locations
actaagcttctatacagctggcataaaaactgcagctgcgatctgtttatccatcgtctgatcaaccacaccgncaaacttgccatcctcagatatgatgaatattctctcctcattggtactagctatggtgggagacaaccatggaagtgaacgtaaagcctcactgccacatcccaacccaacttgtatatgtggtggtggccaaggaattttccagcacagagaggctaagagcttcccaatattgacccaagtagcaggggagctaagagacaattcctcgaacaccttctgtgcagcaaacacctcgtatgtgaattccaactgtgagcagtctggtagctgatgacgtatgtgacagagaagtccgac

SEQ ID NO: 57554 - DNA, 470 bp, Zea mays
  unsure (1)..(470): unsure at all n locations
agctggacattgtctccctgtaggaagccattgccttttttattgctaaggcgtctcccattataaagcatactacgagcaaatttaaattttccattttctagntcatgctcagcaattntagcatctaggttagctatatgatcattttggtggttaattatagctatgtgatcatggatagcatcaacattaatatctctacatctcatgcaaatagaaacatgatcaacaatggatgtagagggtttgcaagattntagttcatctatcttagattntagcatgctattttcatctctaagacaggaaatagaagcattgcaaacatttaaatctttagccttagaaattagtttatcattttcaatcttaaggctagagagagaatcattcaacttatcaatcttagcaattaaactagcattatcatttttaatattaacaagagaatcatcaccaccatgtaa

SEQ ID NO: 57555 - DNA, 382 bp, Zea mays
  unsure (1)..(382): unsure at all n locations
tgccatgcttaatgccagggcgtctcccattataattgttgcttcgagcnacatcaaaattcccattttctagatcatgctccggaatcttagcctctagtctaactatatgatcattttgttggttaatcatagcgaggtgatcatgaatagcatcaacattaatgtctctacatctagtgcaaatagaaacatgctcaacggtagatgtagagggtttgcaagtatttaattcaacaatcttagcatgtaaaatagcattntcatctctaatattggaaatagaagtattgcaaacatttaactctttagccttagcaattagttcttcattctcagttntaaggctagagagagatgcattcaattgtcaatcttagca

SEQ ID NO: 57556 - DNA, 70 bp, Zea mays
accaacacaagccaccagcaaaggggttctaatgaaccgccccgccccagagtccaacccacaccacaag

SEQ ID NO: 57557 - DNA, 365 bp, Zea mays
tgagaaagacatcaggtgatatacacgcgcgcacattatatgcatcttgttctactcgaacttcagagtaagatccgctctttccaagctggcgtcggtatccttcgtgtagacttaagtatttgtcgggggccttcgacatctgaaggccctcaaaaacgtaattagaccatgctttccaagagaaatatgtgaacaggtacctccgaagtcagactgcgagtataccagagcacggataaaacgaagcttgactgggacggcgatcacgacaaaggataagacgatcacgaagctatgtgcagaagagcttccgcataacggcgggaaaaggataccgactctaagatgaaaagccacattag

SEQ ID NO: 57558 - DNA, 369 bp, Zea mays
agcttgaaagataaacggcgaacagtatctcttatattcgtcggcacacacgtgcatatgcgatgcatgttgctgtcaggcgggcggaacaacgggcaaagcggcctcggctgcaattcgttgagccactgccatctccacgcaaatcgggcctacgtgtctcatgtctcatgggacgaagtacttattggctggcgccgcgctgacctctggacagggattgtgtaatgtattttttagaatttacgctatgaaatttaaaaaccgaattaggatcagaacttattctgatttatttttaaactaaatttagttaagagctttaacctaatgttaataaacatttgatatcgaaggtattaccacccc

SEQ ID NO: 57559 - DNA, 376 bp, Zea mays
  unsure (1)..(376): unsure at all n locations
acggaccttanatactcagcttagccccgtgaccgggagtacggggccctctgttatgacatccttcaggtccccctcaggtgactgatacccgaggtcccgttcagtcgcggccacctcgccatcgtcgaccctttccttgccaggtcggcgacgaggtggggagccgtccttggaagactgctcgcgccgctcgctgatgtgtttcgcgaggtcaatgatctctcgacactccgccgcgctgtggcgaccgttggggagcacagggcatgagccgctgttacccctctgcggccatgggcgtttgttgcgggcgccccggcccctagtcatggctgcgacgattagagccgtgcaccgcggcttctggtgggca

SEQ ID NO: 57560 - DNA, 394 bp, Zea mays
agcttggtgctgtccctcatggcctgttcacctactctgaggatgcccagaggtgcgcacggccttctcatcactgctttgtgatgctatcgacacttttgtgaacagtatgattttgctgcgtgcacggaagctgagtctatctctaggaagactcttatgagctccgccgagaagtttgagttccaggctgatgtgtccagactcatggacatcatcatcaactcactctacaacaacaaagatatcttcctgagggagctcatatccaatgcctctgatgtatgtattgcttctgacccctgtgtttattctgcatggtggatggtcgaaattaactgtggtgttctgcatgtctgtaggcattggataaaatcacggtcctttccttact

SEQ ID NO: 57561 - DNA, 445 bp, Zea mays
ctacaaccacaccattattgtttgaggatctcattatccaatttggtgttgttgctcttgatgtcttcctctttcatttgagggtcttcccttcgtagatggctcttttttcttccaaacttattgaaaatactcaagagagatgttaatagcataagggtgtatatgatgaagaatgatttcttttagataaggaatataaacaattcatcattcacaagttacacagacatgaagtaaaatccttaacattagtgcacattattaaaaaagaggaatatgcaccttttgaacattctgatcaatcataggaatgttacttcttcatattgagtttattattgcaacttaacagcctatcaatatgagaatagatatacgaaggcatgaatatattctaatggacagtgcattatgagaatatatggatgtcatctcctgacta

SEQ ID NO: 57562 - DNA, 349 bp, Zea mays
  unsure (1)..(349): unsure at all n locations
ctgagcagngactggcttcgtctgaaaaccttgtaatcttgttattaacatatcctccagacttttccatgaggtgattgtgcctggcccaagagaggagtaccaagattgtgccacactcctgacagccatgacgaaagactttgccatgaccgctgtgttgccaccatacgaagatatggttgcctcataactcatcaggaattgtttccgatctgaatgcccgtcgtacatgggaagctggggggcttgtaaaaatgggccaagaagagcctgcagttctgttgcaggggagaagatcatcaaaaccaaatttccgtgatgggaatcttcatacccgtcaccctcg

SEQ ID NO: 57563 - DNA, 394 bp, Zea mays
  unsure (1)..(394): unsure at all n locations
agcttctcctgtacaatttctcttcttactgtatagtgcgaagctggcacatactatagcagaggagccccatgcgtggcgggagttagctttgttagatctatcaggtattgcttcagctcttctaaagctttctgctgagctgatccccattgaaagacttctgtcgacttcagcactttaaagaatggtgaatttctctctgctgatctagatatgaatcgattcaaagatgccagtcttcctgtcagccgttgagcccccttctttgtgcttggcggctccatacgaagaatagctctgattttgttcagattagcttcgatccctttcgtngaaactagacaaccaaagaatttttccttctttactccgaagacacatttctctggat

SEQ ID NO: 57564 - DNA, 453 bp, Zea mays
tattatcatcatgggcctgataagttgcattggtagccatcacctgctcagttctatggaaactcaagccactccactcttctttgggactgttttcactggttgtagactggagagcttcctgcataagggcactccaactaccactctgtagagatgagtagccaccaccataattatcattgtccaaagaattgccattatcattgtcgcccctcaacaaagctccccagttgccatcctcatcgcccccaaataaaattttctcctcggtggggtcaaggctagccccacgacttgcttgccctacctgcattgcttgattatcttgcatgcccacttgaaggtcaacttggtttgacctaccatgaaaatcttgggtttgaaataccatcgtgtagtgatttcactgtacccgactgcctgccctgatactatcaccttgactttgca

SEQ ID NO: 57565 - DNA, 390 bp, Zea mays
  unsure (1)..(390): unsure at all n locations
agcttcgtcatctgataagaatgttctctgtatgtaananaanatnncagctctccaatcttcactgtacacaggagaaatagtaagaactgctctttcaagtaactccactgaaggtgcctttattgtttcgaaaaatacatccgaaggtagcggcagcccctgtgctgcagacctggctaacaaatcagcatgttcattttgccctcgagggatgttcttaacagaaaatccttcgaaagaagcttcgattcttcggactgtgtctaggtatttttccagcttcgggtctttagcctttgcaactttgtcaatatgacccgaaacaatctgagaatcagttttaaggatcgcccttctgatccccatctgctttagtttccgaagacc

SEQ ID NO: 57566 - DNA, 401 bp, Zea mays
  unsure (1)..(401): unsure at all n locations
tgatggttagaatgacatcagcttctctcacatctttcatttcgttattgctcgatagaagaattttaacttcctcaatcacattgagattcgatccanagatcaagatgtcatcaacataaaggcacaacataacagactcaccccaccataccgatagtatacacacgtgtcagattcatttacaacaaatccagttgttgtaagagtattatcaaacttttcatgccattgcttaggtgcttgttttatgccatacaatgattntatcaacctgcacaccttgttctcttgaccatccgcaatgaacccttctggatgatccatatagatctcctcatacaactctccatttaagagagctgtcttaacatccatctgatgaatgataaaacccatag

SEQ ID NO: 57567 - DNA, 464 bp, Zea mays
  unsure (1)..(464): unsure at all n locations
agcttgtgaagccaatcacaagtctattaaagaatgatacgaaatttaactggtcctcaagatgcaacgaagccttcgagcagctgaaggtattattgaccactgctccggtgttggctcaaccggatattgaaaaaccttttgatgtgtattgtgacgcatcangcagtggtctcggatgtgtcttaatgcaagggggatgagttataacgtatgcctcaagacagttgcgccggcatgaggaacattatctaactcatgacttagaattagctgctgtgattcatgccctgaaaatatggcgtcattatctgctgggaaatatttgtcacatatatacagaatcataaaagttgaagtacattnttacccagtcagaactaaatatgaggcagaggagatggcttgagctgattaatgattatgaattgaaaattcactatcacctaagcaaggctaacgtg

SEQ ID NO: 57568 - DNA, 281 bp, Zea mays
cactggcttgttctgtatatggctggggtgggctggccacggtggccgaagctcttgcggcaatggcgggccgaattaagctcgccggagcttatgggaagtggctaacccgtgaaggtgaatgcggggccaaatggggcgcgcctgggaaggctttatatgcgtggcgcggtgcattggcggtcgtggaccggcgagtgcgctcgggcgtgcactgggaatgcgcggtgcgcgaacgggcgtgaaccgggggtgtcagccgcggtcgaacacgtgttccc

SEQ ID NO: 57569 - DNA, 457 bp, Zea mays
agcttcatatattagtttgataattgagacttcttagtgaacataccctactcgagtgttggatatgacatagattaagttcacatccaagattgagaaagattgaacaccatgaaagagatgaccataaaggatgatcaaatgctcaacatggaaaagagagaaaaaagtaaaatgcatgaactcaagccaaaggtataaactaagggcattttgttttgacgtttaagacacaatagagtgtgtcattgaattatgatagatatccgtactattaagggatgagagtctaatgagacaactcggtcatatagtatcactaggtgttgaagtcatatgcttcgtatatgcctaagtgaggcacataacatcaagcaaaaatgttttttaaaaatgctctaaaatgctaaatgtgctctgatacgttgataaaacatttgagagctagcatgtttga

SEQ ID NO: 57570 - DNA, 372 bp, Zea mays
  unsure (1)..(372): unsure at all n locations
gcagcttgacaagcatggaaacaagtgggaggctctcatcacacaaaatatgtgatgacaacatctagacccttggagatgctgcatatggacctcttcggacccgtcgcatatctgagcataggaaggaagtaacgtatggtctaattattgttgatgactnttcccgcttcacttgggtgatctttttgcaggataggtctaaaacccaagggaccctcaagcgcttcctcatgagagctcataatgagtttgagctcaaggtgaagaagataatgagcgacaacgggtccgaattcaataacctttaagtggaggagtttcttgaggatgaagggatcaagcacgagttcttcgctccctacacaccac

SEQ ID NO: 57571 - DNA, 327 bp, Zea mays
  unsure (1)..(327): unsure at all n locations
agcttgtgaaggttcttcatccncacatgtttaatctgcgatgccacagccagcccatgctagtcttagctattaagcatgcatctagaccggcctcttcttttgcanaatcaactaaataaagtttgccgtctaatacacccttaaaagctagtgaaccatcacttcttctaaagacagacacatctacatttgtaaaaaagacaattataatccatattgcataattgacttacagataataaatatatcccaagactcactaaaacacattaaaatgagtgctatagaaatgcaatttactaaccttttactgcttgatccata

SEQ ID NO: 57572 - DNA, 289 bp, Zea mays
cttggaagactcggggccgaacccttctggcatggtagcgtctcacagactgatgataccgtgccgagtgtagtaaggccacgtcccgagcctcttctagctggaccaacgaatcttctcagctggtctggttgctttggacatcgtaagcctttgtgctcggggaaccgtattccaagtccgtgggtaagatggcctcggccccatggactaggaaaaacggcgagaaacccatggcccggctcggcgtcgtcctcacactccagaccaccgagagtagttcttttat

SEQ ID NO: 57573 - DNA, 366 bp, Zea mays
  unsure (1)..(366): unsure at all n locations
ttaagtcacctgcggctgcaacttactttgggtttcgaagtgaatttatgttatcanaaggcgcgtcttaaaactgagtccaattatgctggcatattgataaaagctataaagcaagagatccaagcttgaaaatattatacacggtccaacgattgggcttctttgaggctttctgtaaaaatatctctctggagaaaatattatgctgatcattagctaatcatcacacagggctgccctaccttcggagcaatttttgaacaaaaaacaccttcgatagctttttaaagagcgcctcaacaaccccctgttatttaacactgaaatgaactcccttctttaggacttttttaatacaactta

SEQ ID NO: 57574 - DNA, 395 bp, Zea mays
  unsure (1)..(395): unsure at all n locations
ttgaatactcagcttcgggagccgaggtccaaaaacaccttccctgatctcgttgtctagaaacgattcagtttcctagcgcgtagcggtcccaccttgcagagttactgtttggtctctgcggtccaccacgcagcgagtgcgagcgggtgtccgcctggtgtaaaaatcctggcgcttcgccttcttacctgcagtactatataaacagacgagtaggtgtgaagttaccacagcattcattgctatttgcactgttttgctgccaaaatttttaaccatcgccgaagcttgactctcggaatcgaacgaagctccagcttgaattctgcttcgtcagaagaaanaactttggaagaaaaaagtatttaattntcacaaactcagaattaaat

SEQ ID NO: 57575 - DNA, 380 bp, Zea mays
  unsure (1)..(380): unsure at all n locations
agctntatcaaatggacgtgaaaagtgtctttctctatggaccaatcaaggaggaggtctatgttgagcaaccttccggctttgaagatagtgagtatcctaaccatgtctataaactctctaaggcgctttatgggctcaagcaagccccaagagcatggtatgaatgcctaagagattctcttatttctaatgacttcaaagtcggcaaagccgatcctactctctttactaaaacaattgcaaatgaattgtttgtatgccaaatttatgttgaagatatcatatttgggtctaataacaaatctacttgtgaagaaattagtaggattatgattcacaaattcgagatgtctatgatgggggagttgaagtatttt

SEQ ID NO: 57576 - DNA, 391 bp, Zea mays
tcagcgaccatgggatcaagctctttgaggtctcttatttgtataccgcgagcatttgtttggtgaaggccaatgttctctaacccattatgtcctacttactttataattcactgtcccgcattacttaattaaaacctaagaattgactagtctgtatttatcttgcccttgattaccttttgagttattatagttagcttcatgctattgctccactttaatcaatgaatatgatgcgaatatttatgacatgatgatgtcattatgattatgatgacattcttgtggcactttaggggactcaggctgtttcctgagtacatctccataaggacctcatcgttgtgtgaccaaccgggataacagtacaactatgatggtggaatga

SEQ ID NO: 57577 - DNA, 432 bp, Zea mays
  unsure (1)..(432): unsure at all n locations
gcctacactgctgattggcattccaatattatttgcggtcggataccagtctaccagatagcctgccattcttgcactttcaaagatcaccgggcaaagaaacctgagataagaatcgcacctgaccagcgccttgatgtaaattgtaaactagatctagtttttttatacgaaaaatatctctgcatgatcatctagatcaggcacacatccatttcactaactgtttgcgcgcgagcacaacaaaagaaccctcagtttgcaacaatgcggtgtntatttcccacccaaatgcaaggattcagggattcagacagtccattccgtacctcgacgaagcagtcatggaagaccagcctaagaagctcgccggggatggaggggtccagggtggaggccgaactaacgacgtccctcactgtcagctcaacg

SEQ ID NO: 57578 - DNA, 428 bp, Zea mays
tcatcatcgccaatattttgaatcccgggacatacaagctggccaacgatcgaagcgaggtctacagcaacgcttggaacatccaatagctacgtcgcttctacccttaaaatgtttcaagtcgttcatgtatctcgctttctttacatgcataaataaagtctaaccatcaaggaaggatcagccttgcctcagcaaagcccgaccctccctcgggggctagaaggggggaaccccctctgcgtcaaaattttcctcggaaaagttttctaccaaaacaactttcgtgcttttcgactgtgtcgataacggaatccttaagacgaacaagagagccttgagcacaatgccgaccgaaccgagggactcctacgctttccggataccgatacctcactcatcaccttccgcgaaaagtaactcacgct

SEQ ID NO: 57579 - DNA, 466 bp, Zea mays
agcttagaaaaatctggtataaatctgcgattatacccaactagtccaagaaaactccggacttggtgaacagttgttgggggtttccattccagaatatctttgaccttgctaggatctaccgcaattcctttagccgataacacgtgccccaaaaattgaatttcttccagccagaacgcgcacttgctgaacttggcatatagctgatgttccctgaggcgcgtcaatacaatccgtagatgctgagcatggtcctcttcattcttagaatatatcaagatatcgtcgatgaagactaccacgaacttgtccaactcgggcatgaacaccgagttcatcaaataggtgaagtgggcaagagcatttgtgagcccgaaagacattaccaagtattcaaacaatccatatcgcgtagtaaacgcggtcttcggtatatccttgggccgaatacgggattgatgat

SEQ ID NO: 57580 - DNA, 472 bp, Zea mays
cttgggtgcttgagagagtcaattcaatcttcatttactcttgctatcaatctacaatgatctacatatccaagattgactcaagggtatttcaaattattatgtctaaaactcgtatcatctcgggaagatattgatgttgtaggaaataaagaactaatcccatgtcgaaaagccaagacctacaacatggaggaaagccaaaggatggtaacaattatgttttcaagtgcaagtatctcaatttatcatttcttatgtgtatcgtgtagtcacatagaaaaaggaagcactcaaaatgttcttaaaattatgttaccattctttgaagatgttcctcccatatggtagattgtatattcatcattcttatactatggcaatctacatgttttaaattattaagcaactcatggcatggtttactcttattatcttattattggcataattctagatatagagagatatt

SEQ ID NO: 57581 - DNA, 458 bp, Zea mays
gtcacctgcggcatgcagcttaccctgcagactggactatttgttttgttcgtcagatgtgctctatgcagtttgaccatttccgacatctgcatagtgaggactctatggaaaagcctcgtagtgagaccctagccagtcacctcggaagtgaatatgagacttgcaaaaccaggctagaagggaatcacgactcatgggtaaagatgtgtcgcctctacagagtgtaaaactgatatatcagccatgctcacggttacgagtggcatggaccctcacatgataattgaacttgaagatggaaataaatcatgatcggttttgtttaagcagtatgcttaagtggttcgctcaagaggttgagcttcatgttgatggtatttgctcaagtatgtgagtttatgttgactatgaattattgataattggagttggtatatacttataccttagtaatc

SEQ ID NO: 57582 - DNA, 156 bp, Zea mays
tctttcgacccgtcgtctaatttagcatatggggaagtaagtatggtctaattaatgttgatgacttatcccgcttcacttgggtggtctttttgccggattagtctgaaacccaagggacccttaagcgcttcctaagagagctcaaatgagttg

SEQ ID NO: 57583 - DNA, 433 bp, Zea mays
  unsure (1)..(433): unsure at all n locations
gggttgagcacatgttctttgncactttcataccacattcagaggatcaatgatgtaggcaagggtaaagtaacacacatggcacatgtgcatttctccattggtatgtattctgattatgcggattgcgatgtagtacctatggaagcttgttctcttttgtcgggtagaccttgggaatatgatactgatgcatgtcaccatggtaggagtaatacatacacttttatgcataaagataaaaacattactttgctacctttgactcttactgaaattgtacaagctgataaagatatagctgcaagtacccataaggaaccaactaatgagacagaaatttaacaacacactaaattgatagctcctgtcatgcttgctactaaatctgatcttcttgagactcatgctactgatgcttgtgctatgcctt

SEQ ID NO: 57584 - DNA, 381 bp, Zea mays
  unsure (1)..(381): unsure at all n locations
tcgcatctctgaactaactcggctgcgtcacttttcgctgttggccaatagaatcctgacctgaagaccttcccgactagcgtcttggatgctgcgtgtattccacattgcccagcatggacctcatctagaagtcgcttcctagtagatgagagaatgcacttcatgaggacgcctgatgcaccccttctgtataatgtctccccaatgagtgtgtagtgagctgactgtctagcgatgcgctcggctgcatttntgtcatctggttcctcttcattctttatatatctgatgatcggccttctctagtcatcagagtctgactctggttgatccacgatattacactcttctgcttgatccattgagatgctcggctat

SEQ ID NO: 57585 - DNA, 459 bp, Zea mays
  unsure (1)..(459): unsure at all n locations
agcttctcctcaatgggttctcctcctactctctctcgnacatcatcatttcggactcggtctcttcttgtgtggccacatatccagcgcaacatacacatctctgccacacttagttgttggacatgtcgtatattagtgggccaacattttgctccatacaacatagccggtcggactgctgtactgtagaatttgccttttagtttgtgtggcacccacgggtcgtataagacacccgcagcttgccgccacttcaaccatccagctttaattctatgactgacatcctcatcgatgtctccctccttctgaagcattgatcctaagtaacgaataatgtctctcttgggtaccacttgcccatcaagactaacatcgccatcctcataccgcatggtactgaaatcacacttcatatactctggtttagaccactaagcgtanagcctttgtttc

SEQ ID NO: 57586 - DNA, 335 bp, Zea mays
ctacttggtgtagactccttcttcttttcttccgtcgccttgaatgcgacgggttgagcttctgatgtagatggaacatcaagcgtcgtgatctttctcgagccttagatcatgcactcaaaacttacaaaatgcctgattactttctcgggggtcattttagtatatctaggattaccacgaattaattgaacttgagtggggttaaggaaaatgagagatcttagaataaccttaaccatttcgtggtcgagccacttgacgctcccgacggtgcgcacttggttcaccagagtcttgagccggttgtacatgtgttgtggctcctccccttt

SEQ ID NO: 57587 - DNA, 483 bp, Zea mays
  unsure (1)..(483): unsure at all n locations
aatacacaaattctncccctttgacatcaaacaccattttttatttctagcaagaacataggatgatgtcaaggaacagcatggtgttaaggaggaaaaacgactatcaaaactcccccttacttattgaacatatgcactatcaacatttaagtaagatacatatttgcaaagagattaatacttccttttgtacctttaccatgttgtagtgtacttcccatcttgaaagtgtttaatctctcgagagcttctccacacttgtgcctgattctttatcctaactnttccttggtgctaagacaccaaacttagaacaagttatagtatttggcacaagaagaaacttctattctaatgattatcacaagatgtcaatngaagcacactatcatggctaccaatcgaaagatacaatcgcanagtcatttattatatagcttcatgatattaagaataagcatctttatcaccagatgtata

SEQ ID NO: 57588 - DNA, 458 bp, Zea mays
ttcttcatcccaacatgggttattcggcgatgccagagccaacccatattagtcttagcaattaagcaagtatcgagttcagctctattaaaatcaactaagtatagctgaccctctaatactcccttaaatgctactgaatcatcacttattctaaagacagtaacacctatatccgtagaaagacaattgtagcccattttacataattgagaaactgaaagcaagttgtaatctaacgagtctacaagaaagacattggaaataaaatggtcaggtgatatagcaattttaccaagtcttttgaccaaaccttgatttccatccccgaatgtgatagctctttggggatcttcgcttttctcataggaggagaatcatccttttctccccagtcatgtggtgtgtgaacccgctatcaatgatccaacttgagccctctgatgcataaacctaca

SEQ ID NO: 57589 - DNA, 436 bp, Zea mays
  unsure (1)..(436): unsure at all n locations
attttgtaatgtttgattntgagcgcatgccacgcatgaaagcaagttggcactcatcatccgcataagaacataatgacgatcgacaggccactagagctcctacacatggatctattcggcccgatcgcttacataagcatcggcgggagtaagtactgtctagttattgtggatgattattctcgcttcacttgggtgttctttctacaggaaaaatctcaaacccaagagaccttaaagggattcttgagacgggctcaaaatgagttcggcttaaggatcaagacaataaaaagcgacaacgggactgagttcacgaactctaaaattgaaggcttccttgangagganggcatcaagcatgagttctcttctcctacacaccacnacataatggtgtagtggagaggatgaaatcgactctattggacat

SEQ ID NO: 57590 - DNA, 460 bp, Zea mays
  unsure (1)..(460): unsure at all n locations
agcttatgaagattcttcatcccaacatgggttagtttgtgatgccagagccaacccatgttagtcttagcaattaagcaagtgtcgagttcagctctattaaaatcaactaagtatagctgaccctctaagactcccttaaatgctactgaatcatcacttcttctaaagacagtaacacctatatccgtaaaaagacaattgtagcccattttacataattgagaaactgaacgcaagttatagtctaaagaatctacaagaaaaacattggaaatagaatggtcaggtgaatatagcaatttaccaagtcctttgaccaaaccttgatttccatccccgaatgtaaatagctcttggggatcatgatttttctcgtagcaggagaacatccttntctncccaatcatgtgggttgtgcacccgctatcaattattcaacttgagcccccggatgcat

SEQ ID NO: 57591 - DNA, 387 bp, Zea mays
atctggaccctcttcatcgcgctacagtcttttttatttttatactcccatcaggcaccctccgctgcaagcaaccacccgccagcaaacgcctgttggcactgcggggaccccagtcacttcaagaacaactgcccccagttgaaggcaccaggaccaacctactccaactcggtgaatggccccaagatttcatcagcacctacctccaaggcgctttcttccaacagccagcagagcaggactcagtaccagggcagggcccgggtcaaccacgtcgacgctcaagaagcccagcaagccctcggggtagtgctcggtgagttcctcggtgaattactcccgcttctgtgctttttgattcaggagcatcccattcatttatag

SEQ ID NO: 57592 - DNA, 461 bp, Zea mays
  unsure (1)..(461): unsure at all n locations
agcttgtggtttatccaatgtaaaacaagcatcatctcttaacatagatnntcacccttgctactatctccaaatatgattatacattcattgtcgagcacccaacttgatccattgaaggtgtgatcctgcaaaacaagtttaagctgcatatcttggtacccaatttgaattgagtcctttgagattagtaggaagagccttgagtacccacacaatccttattgtaacctttctctttgtgtaggcacccacatatacttgacaaccatcttacatggtttcaagtcaatatttaatcacatagataaaagctagagttaagaataggagccttttctccttttcttgatacatcattgtgttgccttcttgatgatgaacctagcttgatcttgggtgcaccgattgaagtagatttctaagatatcaaaatatgggtttcaaaatgtaatagtatg

SEQ ID NO: 57593 - DNA, 427 bp, Zea mays
  unsure (1)..(427): unsure at all n locations
gcttgaatatcatgtaaccaaacttaccaattctatttatagaactattggaaaaaacattcttggtcagttcttatatttaagatctacgaagttgtttatagaactattgaaagtcgcctagaggggggtggataggcgaaatctgaaatttgcaaacttaagcacacactacaagccagggttagcgttagaattaaatctgagtccgaaagagagggaaaacaaatcaaccaagaaataaagcggatgaacacgatgaattgttttaccgaggttcggttccaaagaacctagtccccgttgaggtggtcacaaagatcgggtctctttcaaccctttccctctctcanacggtcacttagactgagtgagctttctccttaatcanacgggtcacttagaccctcgcaggaccaccacacac

SEQ ID NO: 57594 - DNA, 428 bp, Zea mays
  unsure (1)..(428): unsure at all n locations
ttgatagattagccctaagtcaatagcatatgtcaagggcatgaatgtaatttcacacaggctgcgtcctgtgcctataaatagatgaacaatgacaccgtattgttcacgctaacttgtatccattcgtgcgtcacgcttggactnttaccttcttccaagccgaaggtacaaatataattcaatattggtcatgttcattcataatgataaaataaaagatatattaatgatttcatatgattattcatgttatctttcatgtctcatatgcttctcctttcattaatacaaactgcgatgatgaacgtacgtccttcatgaccttcgtctgaagatccttatatcctaaaggagataatgcttcgaaggacgaatgactttaacctctgacattttgtgatgccttgtctttaactcatagcatt

SEQ ID NO: 57595 - DNA, 369 bp, Zea mays
gaactctgctgggagacttggaagaacgactactgcttgcaacacattgagacaagtcagtatgcaattaggatgaacaaataatctaagctagaattatgatatgattcatggaaagaaaacataccctaaaattcctaattccacggttgctttatactgttgtggtatctccatcaatgctgagagagcaaatgcagcctctttccttgattgtgccatgttcttggacattatctccgaaaaatttacaaactagacaagcaataaattctcaatattatggaaaaataattcattatacaaaatacgtgaacaagtctagtgacatcaatcatcacatgcctgagctgttaagttccatgtgac

SEQ ID NO: 57596 - DNA, 452 bp, Zea mays
  unsure (1)..(452): unsure at all n locations
agcttggatgaagngccatcatcatttttatcttttatcatccaaancccattcaactaaatacgctttgccatctttcttcttgtaaagaatttctttttctctcttggcactctcatctttgcccttcttcttcttgctcgggcaattcatggcaatgtgaccgggttccccacactcaaaacacattctatcattgaaaacacttcttctagaagtttgacctcttctaagttgacctctcttcatcttcatgaatatattgaattctcttacgaatagagccatgtcaccatcactctcactttcattctcttcatcattactctcttccctgtcaattgcctttgaggctttagcttttacaccaattgaatcattattcaccttcttcgcaaacttaaagcatcggctgcgactatttaatatatcttgagtgagaatttctccca

SEQ ID NO: 57597 - DNA, 368 bp, Zea mays
acgggtggcacctctggtgttgaggaggcgccttgctccaagatgacaatgtgtttggagtctttgatcattagctcaaagctcacaaacttgctaatcacttcctcgggagacattagtttatatctatgatccccacgaattaattgcacttgaatatgattgcaaaaaacaagggatcttataataaccttgaccatttcatggtcatcccacatggtgctcccgaggttgcgcacttggttgaccatcgtcttgagccacctgtacatggcttgtggctcttctccttttgtgaagacgaatcgaccgagttcttcctcgatcgtttcacgcttggtgatcttggcacctcatccccttctgtg

SEQ ID NO: 57598 - DNA, 272 bp, Zea mays
agatagaccttgtgcagcttgtctagcaagtaaacaagtgggaggagcgcatcacagcaaagaacgtgatgaccacttcaagacccctggagctgctgcatatggacctcttcagacctggcgcctatgtgagcatatgaaggagatagtatggtctaaatattggtgaagattattcccgcttcacttgagtgttctttctgcatgataagtctgaaacccaagggaccctcaagcgctttctcaggagagctcaaaatgagtttgagctc

SEQ ID NO: 57599 - DNA, 404 bp, Zea mays
agctttcaatgacctgtgtcagttctcatgttattatgccgacacggacgagaagaagagagacagattcaagcgaggccttattactaaactccgtgagcgtctcaacacaatcagggccaacagctataatgagctagtcaacatggccatctctcaggaggattaattgcattacagcccgtcacacaaaaaagaagagaaagactcctgtggcaggaccttcagctcagcctcagtgcttcatgattgtgtccgacactcaaagtatgggacctcatcattagcaaggacgatgggtaatccgaccacagcagcagcagcaggcacccaaccgctctcaacccccagttcagaggaacatcagccataccggcagggcaatgataacaggtgtttcactt

SEQ ID NO: 57600 - DNA, 204 bp, Zea mays
accttatcactgcgctcaactgcacccgtttttttgtatttttgagaaatagcctgctgtaaccactggactattcctgtccgctgacatatctcgcacactcaggacattatccttgatatacaagccttgggcataggctcactaagtcctgagggttacacagccttatccctcggaggaccgctcatcggacatcttcta

SEQ ID NO: 57601 - DNA, 284 bp, Zea mays
  unsure (1)..(284): unsure at all n locations
gacctcgcatacagtcttgcctacaataatctgaaggtacaaaagttatggacttataagcagattattttttgggtctcttattcttgggatgatcctttgtctccccctttnttgtanggcttgattctaagcaacgctttgagagcaaagaanaatgctgaggatgaaaagtgccagatagcccttggtaaccttcggtcagaggttatcaaactaaggaatgaagctgcagagaaggataaaattctactttccttagtggacagagtcaaggctagtga

SEQ ID NO: 57602 - DNA, 378 bp, Zea mays
  unsure (1)..(378): unsure at all n locations
tttgtttatatggcgagaaaagaccngagaagcagatttcaggatggcccttcttatccccattgcccttaactatcgaagccccaacaaatatggcgcatattcaacaatattgtttgtgcaactgaagtcaagctctgctgcataacaagttttgacttttgaaagcacaactaggacagcagccgctcctacactgaatgttccccaagagccatcgcagaacacccgccaagcttccgcgactttgtttatatcttcttactgagcccctgggcgccaatcaacgatgaagactgctaacgcctgggactgaattgaagagctatgcatataggcaatggggaattcgataaattctgcagcccattttccaaa

SEQ ID NO: 57603 - DNA, 434 bp, Zea mays
  unsure (1)..(434): unsure at all n locations
cctttaatagtgatctaacctcacaaatgacaccctcgattagacaattgtagcacatacctgcttgagataagaatcccatcatggagatacaaaatgttgcatgaaaggtcagcttgcttctccaaagcgattgcttgcttgctcttccagtcatttcttttgtatcaaggtccgaaaggtaacttaaaattagtcaaagcatcaaacaaagtgggtgaagctctatagtacctactaaattactggtaactaacatacctgcttttagctcccatgacgagtgtggtaatctttcgcttttttacaatctccacgagtgcangagcaacatgatgtttgtcaattatcagtatctttgcttcgacctanatgacatacctgactatgagttttttttgcacatatagaanacaaagagtatcaacgtaatc

SEQ ID NO: 57604 - DNA, 396 bp, Zea mays
  unsure (1)..(396): unsure at all n locations
tagctttatttacataacaaaacataaaagactgcttctcttatacacaacgattcataanaaaccacttcttcgaaacctttcttttacataacgaatcataacaaaccatttatccgaaacttttctctgtgccgaagcaaccatttaggaacacaaatgctatgaatgaatgcttatgcatgcaaatgccatgatgtaatgtgcaaatgaatgtccgaagcgtatgtccgaagccacactcatccatcattatcttaagagcaaacacacgtcagctctgcattccctttaggaacgaccttggagcatctttgccttttacttaggcagtatcagcgttgactnttcgctgaagctctgcatcccataaggacgtcttggagctcttcgtct

SEQ ID NO: 57605 - DNA, 376 bp, Zea mays
  unsure (1)..(376): unsure at all n locations
ctcttcgatagagtactgaccaccttttcttctatccggtcccggaggcattctaagctcttctcgtcaacgccactgaagagcaatgctcctggttgatagccacatgatattgcataatccttcaactcttccttctcagccttagacaacttttgaccaagtatgttttgaaaattaaaatcctcttcctctgaagtatcttcggcaatctccttctctttccccttctcttttcctggcgctggggccagagactcttcggcagctatagcagtttcttccgtagccatatccgaaatcatcttatcaatatcagaanatacgccctcaagaattgtagcttccgccgccgcagcttcatcagttgtagctt

SEQ ID NO: 57606 - DNA, 453 bp, Zea mays
  unsure (1)..(453): unsure at all n locations
aactntccatgttgagcttgaacataccaatttaagttctcatctgaccgtggtgaccgtcacaaggtggtgttcttatgcagtccgaatccaccatgttcaaatacttttcccttgcgggcttctccctgattcctaaacaaaacaagagtgcacgggtctccatggtctaaatatgatggacatgaactccagagtgtaatcacctgatggatgagatgacaacaccaacgcgagcgatgggaccagaaatcgggacttgtattggtatagatgcatcagaagggaggatgtcttcatcatactgcccttctctgcatttgagtcgtcctcgactcaagctcaactgtctctcccaaggaaggctgtaaaactgcaatggaaatgttgcgctaaccccacaactgaggcagaatagcctatatgcatgtcgtaaattgtctacactttaac

SEQ ID NO: 57607 - DNA, 418 bp, Zea mays
tatcttatcttctttccacggatctgaccttatctcatatatttttctgagcgctccgcaatcatcgtagagatttctggacttcctatattaacaagatttgttaaatctgatttaaaggggttgttagcaatatctttattgtttgggttgtcatagtgaaaaaaaagggtttatgcccctgccaaaaaaaactcaataagaagaaaaaaaaagaatataaatagaaaaaaataggaaaagaagaagaagggggctgaatctctaaatctgttggttctctatgtgctgcgctagttgttctttctcagtgactacctatgtgcctaggctcacgtctctagcctggtttagcctaagaccagcacagtaccaccgttgaacgaatattcagcttgcttttgtactaacgtggact

SEQ ID NO: 57608 - DNA, 421 bp, Zea mays
  unsure (1)..(421): unsure at all n locations
agcttanagccatggtaagtagcataagctaataatatgcgaattgactcaagcctagctacgggtgcataggtttcaccgaaatccaaaccttcgacttgggagtatcccttggccacaagtcgagctttgttccttgtcaccacaccatgctcatcttgcttgttgcggaagacccaattggttcctacaacatnttggttaggacgtggaactaaatgccatacctcatttctagtgaagttgttgagctcctcttgcatcgccaccacccaatccgaatcttggagtgcttcctctaccttgtgtggctcanaagaggaaacaaaagagtaatgttcacaaaaatgtgcaacacgagatctagtagttacccccttatgaatgtcgccgaggatggtgtcgacggggtgatctcgtt

SEQ ID NO: 57609 - DNA, 474 bp, Zea mays
  unsure (1)..(474): unsure at all n locations
tatcaaatggatgtcaaaagtgtcttcctcaatgtanctatcatagaagacgnctatgttgagcaacctcccggcttcgaagatagtgagaaccctaactatgattacaaactctctaaggagctttatgggctcaagcaagccccaagagcatggtatgaatgcctaagagattttcttatcactaacggctctcaagtcggaaaggccgatcctactctattcactaaaacccttgacaatgcttagattgtatgccaaatctatgatgatgatattatatttgggtctactaacgaatctacctgtgaggaatatagtaggatcatgacacaaaaattcgagatgtcgatgatgggggagttgaagtacttcttgcgatttcatgtgaagcaactccaagagggcaccttcatcagccaaacaaatacatcaagacatactcaccaagtttgggataatgatgccaaccca

SEQ ID NO: 57610 - DNA, 407 bp, Zea mays
  unsure (1)..(407): unsure at all n locations
gcttcttgaacgaaaactttcccttatcttctcatattgtagtagcgcctaaaaccgcaaccagtatgttccccctgtacacagcctgccaaaatgaattatattttgcattgttaagacaaatattcgttcgacatcgccaaatagactaacacaatgccgcttgcctaactagaatcagttttctctcctttgtggagacatctattagtcacccttgaagcatatgtgagacagatctgggtggattaacaccgtaggtacatgtactaccctctanatgaatttctggcatgatgactgtcggtacccttaatcaagggtaccccttactacaggatgaagacacngggcatgtgcagctatctctgcgcgcgtggagaacaacacccgactcataacatgag

SEQ ID NO: 57611 - DNA, 428 bp, Zea mays
  unsure (1)..(428): unsure at all n locations
tctggtcaatgatcaatggccacacaaccnccatttttgtctttaagagccatgaatgaccattntcaataatacctgaaggtaacacctacggatttttgaccaagaaatggtctccaccagaaatccaaaaatgtgatccatggtaagaagacatttgtggggtgaggagaacgagcctctggtcaatgatcaatggccacaaaatggccatgtttgtcgacaataaccatgaatgaccatttacaataataccgaaggctaacacctacggatattttacgaagaaatggtctccgctagaaattcaagaatgtgatctatggtaaggaaacattgtanggtgaggtgtatgagcttctagtcaatgatcaatggccacacacaccccatatttgtcagaaatagcatgaacgaccattntcaat

SEQ ID NO: 57612 - DNA, 469 bp, Zea mays
  unsure (1)..(469): unsure at all n locations
tcacctgcngcatgcaagcttctccaaaacatatgctaaactctttctcttagagctgnnnggataaagagctcaactttatcattgcggtccatggggagcacacggccaatggaggggagagagaaagagttgttcaatgcaaaatggggttggggaccacttttggcacagtttaacacctttggttgagctaagttctaatgggtgctaaactttatcacaacacttttagtcaccttgtttgttatcttagtagctaaactttagaaaaaagtgcagtggtttagtttagcaagaggaaacatatgaatccttatctactaaagttagttggagacatccaaacaactcaactaatagtttagctattagctatttttagtgggagacattctaacacctctaactaatagttcaactaactattagctacaccctaaactacccattatttattagttggttc

SEQ ID NO: 57613 - DNA, 362 bp, Zea mays
taatcctgagaagtgtgtcttctgggtcccccgatgtattctcttatggttcatcgtctccgagcgaggcatcgaagcccacccggagaagatcacggccatcaccagcatgggacccatcaaggacttaaaaggggtacagagggtcatgggatgcctcgcggccttgagccgcttcatctcacgcctcggcgaaagaggtctgcctctgtaccgcctcttaaggaaggccgagtgtttcgcttggacccctgaggccgacgaagacctcggcaacctaaaggcgctccttacaaaggcgcctgtcttggtgccctcggcggacggagaagccctcttggtctacgtcgccgcgaccactc

SEQ ID NO: 57614 - DNA, 434 bp, Zea mays
agcttggtccccaaagatatgacatctactcatcacatcctagcaaaagaggctagcccttaagaaaagcagaaatgggctcaacatcactagccgaagatcaaaaccaaattaaaactaatttaaatatattaggaatatggtgtattgtgtatagggcatggatttagatataaccgttatggggctgtgatttcgggtgaattcttaaaggatggtgaaaaagtaagatatagagggatgatatacagagaatcgttgtggatagtcttagggtctgtttggttgggttgtggctgtgaaaaaagttgttgtgggctgtaagctgtggaaaaagctgttgtggctgtgagctgttaatagaataaaatctattggtggaaaccactataagccgtaaaattttttcgatatatgttttcatagttctatct

SEQ ID NO: 57615 - DNA, 392 bp, Zea mays
ggtctcaacaacgcttggaacactcaacaggtatgtcgcttctatccttaaaatgtttcaagccgttcatgttcttcgattttacatgcttaaatcgagtctaaccttcaaggaagggtcagccttgcctctgccaagcccgaccctccctcgggggctataatggggcaaccccctctgcgtcaaaattttcttcaaaaaatttttctactcgagaacacgtttctacagaaataaaaactttcgtgctttcgactatatccatagtagggtcctgcgaacgggtgagagagcacgtaagtggctaggccgaccgagcccatggactcctatcgcctgcggatatggatacctcactcatcaccttccgcggaaagtactcacgctccgat

SEQ ID NO: 57616 - DNA, 375 bp, Zea mays
tagcttctggacatactagatacaggccggatgtctcatcgcctcaattgctttgatcatctctgggtttgcttcaatgccccagtgcgaaaccaggaaccccagcaactttcctgcggagacaccaaagacacactcgtgcgggttcaacttcgtgggtgttgctcatagcttgtcgaagaccacggttaagtcttccactatggtcgaccctctcttattcttgaccacgatgtcatcgatgtatacctctactctgtccctaatcagatccccgaaagtcttactcatcgcccgcacaaatgtcggcaaagcgtttttcaaaccgtaaggcattacgacatatcaagtaagcccatccactgttacaaaagc

SEQ ID NO: 57617 - DNA, 467 bp, Zea mays
  unsure (1)..(467): unsure at all n locations
tcactacacaatttcaggacatctacttaattcattattatatcttcacacatatcgactcgatttgaattaaccacacatgtctatcacatgaatggagcatttcaacaaatatcctataacaaactaacttcatcacacatcttgcattacaaacctacttcacttatttgaagtgtctactcgaaaccgtgagtgcaatcatacactatatgcgaagcataatttaaggaactcctaacgcgtatagactcgacttataattatagaggaagtgatgactacttacggcatgtcatcacctctctacataagccanaacaatttctactatcgactaagagttctaagtattaaacacacggttacttttcatgcgcacataaatctcaacttaacactagtgacaccgatggaattttactaagatcatcatgtgcataaccttgtctcgcatacaactatat

SEQ ID NO: 57618 - DNA, 431 bp, Zea mays
agcttcgggtcaggaagtcgccttattggccggtgcttctgatgacagagttttgatttctgctattgacactgacttggtcgccactgatgcattgcgggttgctccgggtgttgatccttcatcgagccatcaactaatttcccacgacttgggagttctttcgttcttctccaacctccaggtaatttggtttttcctgatctggttgtaccccgggtgtgatattgttcttacactcatttgtttttaatgtcaagcattggtcgatgaaatggttggtcagctgaggtcgcagggtgcttctgttccggaaagagctctatctttgacgcattggaattcagtgctgcttcagcggcgtgtatctgatttggagatggcaaatgctggatagtgctctttgtttcttatatggctacttgattaat

SEQ ID NO: 57619 - DNA, 391 bp, Zea mays
ctcgggtttattgtcagccaccgcggaattgaggctaatccggataagattgaagctatcatgaagatggaagcacctcgatcacaaaagaagggtcagcgacttactggatgtatggcagctctaagcagatttatatccaagctgggggaaaaaggtttaccattttacaagctactcaagaaggtggataagtttcagtggacttcagaggcacaggaagctctagatgcactgaagaaattcttgacaacaccaccagtactgaagccgtcacgacgagctacgtcaactcaaccagccgaagatctgctactgcatatctcttgcacgactcacgtggtaagcaccgcgttggtagtcgagcgagcataagaatgacatgcctacc

SEQ ID NO: 57620 - DNA, 461 bp, Zea mays
  unsure (1)..(461): unsure at all n locations
agctnttacagaagaaagacgatccttcagctacaaaaaggtggatgggcagaaaaagagaaggattggtactgtaatggaagccattgaacggacgccaccatcggcctcggcatctaaaataacacctattgcaagtgtcgaggccactgccgaagcaaacatctttgccgaagctaccaatttggagagcacactatcgggaattgataaattactattgggtatggctatggaagaaacagctgtggctacagaggaggttatggccccagagcctgacaaaggaaagaagattgccgacgttgctttggaggaaaaatacttcgacctttggaacctggtcgggcaagaattatcctaaaggaaactatctgtaggaatgcacgatttatataaatggcttntgtaataaaaccgctactggaatgttctttcaactaacggttattgagtcatga

SEQ ID NO: 57621 - DNA, 458 bp, Zea mays
  unsure (1)..(458): unsure at all n locations
tgacatgcactgcatggcttgtctttntcaaacaccacattctctaatcctctaaccatatctttctttaataccttcttgagtgtgctcatcccaacatgtgcaagccttctatgccagagccatccaagtgaagctttagtgaagaggcaagttcttaagtctgcatcttctgaagtgaaatccactaagtagaggttgttgtacctaaatcctttgaacaccattgattcatcatccatctttgttacaataacctctgttggagtgaataagcattgaagtccaagatcacagagttgacccactgataataaattgaagctcaaaggtgcaactaagagaacatttgatattgataaatcatttgagattgcaccttgccaagtccttgcacttttccttttgaattgtctccaaatgtgaatntatcttgcccatcaacattctcatcaagt

SEQ ID NO: 57622 - DNA, 463 bp, Zea mays
  unsure (1)..(463): unsure at all n locations
catgaagcttgaaatgaaaaggatgcacttgaattaagcatgttaagcttgagtgtccaaaatcaagaacttcaagtgcaacttgaaaattgcaagaacatcaatgcctcatctttagtgattgaaactaagtctagctcctcaaataataccttttgcaaacattgtgccaaatatcatgcttcttgttgtctaactaaccatgcaaggaagaaaagcccacaggtgaaggtcaaagaaatattgaaaagatgctctagcaatgatgggttaaagaaagttgaacccaagtacaagtccctaaagcccaacaatggaagaaaagggcttgggttcaactcatccaaggaaaaccctatcatagtgcataaggggtggagatcccccaagttcatagagggaaccaccctatatgatgcctttgggaggattcactcctcanatgacaagtcaactcaagtaa

SEQ ID NO: 57623 - DNA, 445 bp, Zea mays
  unsure (1)..(445): unsure at all n locations
cttcatcccaatatgaactaatcggcgatgccagagccaacccatattagtcttagcaattaagcaagtatcgagttcagcttaattaaaatcaactaagtatagctgaccctctaatactctcttaaatgctattgaatcatcacttcttttaaagacagtaacacctacatccgtaaaaagacagttgtagcctattttacataattgagatacagaaagcaaattgtaatctaaaaatctacaagaaaaacattggaaatagaatggtcaggtgatatagcaattttaccaagtcctttgaccaaatcttgatttccatccncgaatgtgatagctctttgnggatcttcgtttttctcgtaggaggataacattcttttctcccttgtcatngtggttgtgcatccgctatcaattattcaacttgagcctccggatgcat

SEQ ID NO: 57624 - DNA, 75 bp, Zea mays
acaagaaaaaaagggagcgcaaccaatatatcaaaataagcacgcaaaggcacacaaagaacaaggggaaccaaa

SEQ ID NO: 57625 - DNA, 443 bp, Zea mays
  unsure (1)..(443): unsure at all n locations
gtatcacaataattttggctgctactttttttttctcggtctgggtcaagctgtcctgtgccaacctttcggaagagatggcccggcgactggatgacagaatggttttatgtgaagaatgacctgaatacacgggaatatattaaaggtataattatgcgccctatttggcaaagcttcngtctgcggaggccgaaggttgaaatgaatgaagctgccgaagagtgccagagagccttcggagttatttgttcttttattggaacgagagatttggtccaagagcatattgccttcagagtatggccgctcgcggaaaaatgggaaatgccgcaagagaccataaaggaggctgacgaaggtggacttatcangctgaagtatactttcaagttcggagataaattccgtgagccagatgatgactggctaacaagcattga

SEQ ID NO: 57626 - DNA, 383 bp, Zea mays
  unsure (1)..(383): unsure at all n locations
agcttctaaagggagagcacatcttaagacttancttttgtcattcttganaaagacagagaggcgatgcgcatgccaagcatgaaagcacgttggctctcatcatccacataagaacactatgacgactgacaggccactagagcttctgcacctggatctattccgcccgatcgcctacataaacgtcggcgggagtaaatactgcctcgttattgtggatgattattctcgcttcactgggggattctttttaccggagaaatctcaaacccaatagaccttaaaaggattccttgagacgggctcataatgagctctgcctaaagatcacaataattaaaagcgacaaccggactgagttcaagaactcacaaatcgaa

SEQ ID NO: 57627 - DNA, 424 bp, Zea mays
atctctaacatctgcatgcttgagccctgactctatcatcattacccccaatgagtagcctaaaggggcttgagccttcaagaatatccatgtcttagtagacttaacaaaaatgggatatatacgttgtctgactccatttttttcttaaccgcaactcttggacatatcacatagtgttgaattaatactatggaaacaacaaccacgatatacggccctaagattaatatccaaaagtctcctttatactctatgatttttttcattccatatagtatctgttagcatatcctcggcctctcatattatctattataatcccaagcttctttagctcattctacacaacatcatacaatcctgaccctgctgtatcatctataccaagaaaacctaataatgcttcctcaatgccatacga

SEQ ID NO: 57628 - DNA, 349 bp, Zea mays
agcttgaagccatggtaagtagcataggctattaatatgcgaattgactcaagcctagctacgggtgcataagtttcaccaaaatccaaaccttcaacttgtgaataccccttggccacgaatcgagctttgttccttgtcaccacaccatgctcgtctttgttgttgcggaagacccacttggttcctacaacactttgattaggacgcggaactaaatgccatacctcattcctaaagaagttgttgagctcctcttgcatcgccatcacccaatccgaatcttgaagtgcttcctctaccctgtgtggctcaatataggaaacaacagagttatgctcacaaaaat

SEQ ID NO: 57629 - DNA, 347 bp, Zea mays
  unsure (1)..(347): unsure at all n locations
tcttcgattccccttgagcagatnnttgtttttattttgaagacatttgaaatcttccttcattaaatcacccccgaagctataatcagaatgggtatttttgtttgggtcgtaaggagccaagggctggagccgagcgcgaagcatttgtattaaaatgttgcttaaacgtcgtttaagcgtcatttaagcgttacaacgtgattagcagttggaacgtccgaccgttntaggtaagccgcgtagaacgtctgtttcgagcgtttaagcgtcgcttaagcgtcctaatcgtgtnttaggacgttntatgcgtgttggggacgttctacccattatgggcctttcct

SEQ ID NO: 57630 - DNA, 455 bp, Zea mays
  unsure (1)..(455): unsure at all n locations
tcaactgangcatgcagcttaagctcttgacaatgaaatactttttcttcttaaacagagagnaagaatgaatgtttgagaagttaaactaggtatgaagcagggtttaatgcatgaacatgctttctcttccttttatacaagatatgcaaggaatgtaagaagatttacgtacatgtataaataagattgaatagttttacccttttgtacctttacatagtgatgctcttcttcattgtgctttgtccttagtcttattgaattcgcctaagacttatagtcaaaacaatgtatgaaaatattttgcacaagagagagttctacaactaatgatcctcttctaagtcatgttattatatatcaagttgatcacacattgcataaatatatcatgaattcttcttttaacttagtgcctatcaagatagatgaaatcaaattgataatacatg

SEQ ID NO: 57631 - DNA, 332 bp, Zea mays
  unsure (1)..(332): unsure at all n locations
ttgtgcgcanattggcacgaagatccattttgtatctgttatacatccagagtcaaatggacttgtcgaaagagctaatggcattaaaatgacaggaataatgaagctaattttcaatcagcccaggggaaagtggccagatgaattgatcaaagtggtgtggagccgcaacacaactatgtcaagggcaacaagctttacaccattcaaattgatgtttggtgatgaagcataaaccccagaagaagctaaagcttggtcaataagaacagtggcttcngcgacagacgaagctgattattctgtcgaaaaaagatgctatataatggatc

SEQ ID NO: 57632 - DNA, 458 bp, Zea mays
agcttgtaaatgaaaaggatgcacttgaattaagcatgttaagcttgagtgtccaaaatcaagaacttcaagtgcaacttgaaaattgcaagaacatcaatgcctcatctttagtgattgaaactaagtctagctcctcaaataataccttttgcaaacattgtgccaaatatcatgcttcttgttgtctaactaaccatgcaaggaagaaaagcccacaggtgaaggtcaaagaaatattgaaaagatgctctagcaatgatgggttaaagaaagttgaacccaagtacaagtccctaaagcccaacaatggaagaaaagggctcgggttcaactcatccaacgagaaccctatcatagtgcataaggggtggagatccccccagtgtatagagggaaccaccctatatgatgccttggggaggattcactcctcaaatgacaagtcaactcaagta

SEQ ID NO: 57633 - DNA, 390 bp, Zea mays
actcagctttactcttcgctataagcttagcggcattcttatatttttgggcatatcctcatcttgacacagttggcatgggagaaaacttccatcctgaagctgaagctccctgtagtaattcatgttatgctagaagcagatggttaatcatgtttttgaggaccttaggaagaggaatgccctcaacaacccccttcttgtttaagctggtaacgaagatcaagaacgcagtgagatgccaatgctcgatagaaaagagtaataatatctattactgacacttagaactagattgtcagcccagctccccgcaaggaacctggttttatcctgtaccgattgcccacgcaggaatctctcatggggcaccgctatgacctatttgga

SEQ ID NO: 57634 - DNA, 439 bp, Zea mays
  unsure (1)..(439): unsure at all n locations
gcttgtgaagagtatagcggccttttctgttgtctctctcgatcatcagntggaggagagttatgaattgacctaacgtgccttgggtgaaatcttcctccgaagcccctggtcattttagagaacctgaatgcttcctcccttctttggcggaagtcactgtcagctcgaatgtattcgtccatcttctggagcagcttctccaacgtttgtggtggcttcctggcaaagtactgcgctgaaggtcccggccgaagccccttaatcatggcctcaatgacaatatcattaggcactgttggcgtctgtgccctcagacgcataaaccttcggacatacgcctgaagatattcttcgtgatcctgagtacactggaatagagcctgggcggcgactggcgttggctgaattcttggaagctgttataacatattcttag

SEQ ID NO: 57635 - DNA, 339 bp, Zea mays
  unsure (1)..(339): unsure at all n locations
tcaacctcttcgggagagggtcgcactctaaggcccaaactactgtcaccagcaggagggattgacacacaactgatgaaagtcttggaaggaggcagattccaggttgaatacacaacaggagcaccgacattcgacaccttgcctctaagaatcatctcaagacggcttaccagatccacaacaggaatccttctgttggtaacccgggtcaagtcagtgatgccacgatacagataagctaggtacgctctgtccttcagtggctaaatgttcttaanaacaaaatcggcgaccacagcttcatcagtcagacctttctccttcaacaagccaacc

SEQ ID NO: 57636 - DNA, 456 bp, Zea mays
  unsure (1)..(456): unsure at all n locations
agctnttgtagctggctcctaaactttctctatgtctgctccttgctcggggatgagcacgtactctccatcagcgaggttgcaatctatttaatatgatgcataagatgcatgtacatttataatatgcagatgataaatatgatgcatggttgagtaacacgaggtcatttagtaatgttaggtttctcccttctaacccaacttcttagtagtgttcttgtcgatttttaagttaaactgatatctagtggaaataagggatgtagtttttctttcaagaagttagtgaaagatcagctaagtctttgaaattttaattgaacatgggtaagacttacctctttattctattttcccttacgccttaaatggtggtttgaactatgaatgctatttagaatcttcaaaaattctgaaaaatttacagtaacttaatacagggtaaactagtct

SEQ ID NO: 57637 - DNA, 457 bp, Zea mays
  unsure (1)..(457): unsure at all n locations
actcagcttcacatncagccgatgggaagcagtggcaagatttcaatgacttccaccgagactttgccgatgaaccgagaaatgttatgttcgcactgagtactgatggaatgaacccatttgctgagaggagcagcaagcatagcacatggccggtgatcctcaccatatacaaccttcctccatggttgatgcagaaacggaagtacattttgctaaccatccttatttctggacctacacaancctggagttgacatggatgtatttttggagcccttaatggaggatatgaaaatattgtgggaaacaggtgttcaaatgttggatgagtatcgtaaaggttcattcacgctgagagcaattctttntgttacgatcaacgattaccctgctctcttcacattatcaagccagtntaagggaaatgttggttgcacagtatgcattgatggaa

SEQ ID NO: 57638 - DNA, 372 bp, Zea mays
cgctacacctaggtgtgaaagatctccacgttttggatctcctgatccaagacatcctccagaggtgttggactaacacccttcctcttctggctgtcggcctctctaagagatacgacatcctaactgggatccagcggctgtaatagaccaatccctgtccctgaagctttctttcgggggatgacgaacgcgatgctcgccgaaaacgttaaagactcataaagtggaagtgagttcaccggacgtgggcgccaatgttagcgacttgttctcgagtgctatgaatccagaacaaggcatcgtggatttgccaaatatcaaacgcccttcttccttcaaatcattaatttccattctgatataaccgaa

SEQ ID NO: 57639 - DNA, 434 bp, Zea mays
  unsure (1)..(434): unsure at all n locations
ctcagcttcataacttattgacatagtagagatttttattttataattggcctcagtcatgatttcaagctttccatggcttatcatcccttttcttcatttctacttaaatagcttaattagggttggtctagggtttcaacattttctccctattcgaaaaccttatttgttataaacatgactctttagatataaacttagtggatcttttatntatacattgattcggtgcttcatgctcaatctggcttacatgagatgaagactcttgagataccactgacaaaagccctaagagacactggtgtacagacacatattaaaacagagtgctagagataatgtccaatacatcgagtactattactagcggagtctacgaaaaaatagataatattacacaactagggatcatcttagtgcaagctact

SEQ ID NO: 57640 - DNA, 417 bp, Zea mays
agcttggcgggcggacatgctttctgaacatgtaataataagctcgtgtggtcctgccggccagttcagcgtgtgcccatgcacatgcatgatcgatgttcaggtgcattgcatttgtcctagctagctctgattcactattcctgcacatctattgttgctgcgacattttctgtacacatatgcagtacatgcatggctctttgtgtgatccttggaatgaatgaatgaatgaatgattcatagtgtattcatgccagaacgaaaggaacaagacggaactcttatcacacatgtatgtcagtcattgcttggatgccagtagactatcgtctcttctgcatatatatctactattttcgctggcggcctacgttaggacctcttttctggtaacataatcgcccttcaactaat

SEQ ID NO: 57641 - DNA, 480 bp, Zea mays
taaggatactattcaactaaagtaagatgaagttgtttatatgccaaggtatgaaaacttcctctccttcagatgttttagtattctatccttagtgggatgtaccatagtataagttaaattctcttgcgatataaaatgttgaatagtgcatataactttgacatcaactatatgtgtgcactaatttaaaggaatttagtctatccttttgggtttcaataatgatgattcatttgccatccacatataaggatcatcatttgtgaaaccctctcttgtgtggttaatgctctcttttctaagggttacaacgaggtccttccaagagctttcaagatggattcaaaatctacgaaaaatgaatgaagttcaagatcacttgggtggatgaaactacacagagaacagagatcatagtgaatcaagaacggagtatattcttttgtcaccaaataatgagatgtaggacatattata

SEQ ID NO: 57642 - DNA, 406 bp, Zea mays
  unsure (1)..(406): unsure at all n locations
tctctcgatcatcaantagaggagagatatgaattgacctaacgtgcctcgggtgaaatcttcctccgaagcccctggtcattttagagaacctgaatgcttcctcccttctttggcggaagtcactgtcagctcgaatgtattcgtccatcttctggagcagcttctccaacgtttgtggtggcttcctggcaaagtactgcgctgaaggtcccggccgaagccccttaatcatggcctcaatgacaatatcattaggcactgttggcgtctgtgccctcagacgcagaaaccttcggacatacgcctgaagatattcttcgtgatcctgagtacactggaatagagcctgggcggcgactggcgttggctgaaattctggaagtggttataacatattcttagc

SEQ ID NO: 57643 - DNA, 384 bp, Zea mays
  unsure (1)..(384): unsure at all n locations
ctccatgttgtgcgtgaacattccaatacgagctctcatctgaccgcggngaccgtcacaagttggtgttcttctgcagtccgaatacagcatgttcaaatcctttatcctttcgggcttcatcctgattcctaagccaaacaagagtgcacgggtctccatggtctaaatatgatggacatgaactcaagagatgaatcacctgatggttgagttgacgagcacgaacgcgagtaatgggaccagaaattggtacttgtattggcatagatgcatcactagtgtggatgtcttcatcattctccccttcttgcatttgagacgacctcgactcaagcctaacttactctcacaagtatggctttaaatctgcaatgttaaatg

SEQ ID NO: 57644 - DNA, 384 bp, Zea mays
agcttatcagacaaaagcttctagtcttgaatccgtggtggaagcagcaagcgagaaagaaaaggaatttatggagtcattgagccaaataactgaagaatagaagaaaagtgaagagctagctgcaaaatatgactgaggtgcacagtagaggtatagaactccaatccgcagctgaatcaaggaatgcggaaattgaagctcaattgcaggaagctcttgaggcagtaggacagaaagaggctgagtcgagaaacttgaatgaaaagctggttgcacttgagtccgaaattgaaagttcgatgcatgtaaatgaagcgttgaaacaggaaatcaatgctaagctggtaatggtggatgagctgcacgagaagtgtagtttta

SEQ ID NO: 57645 - DNA, 439 bp, Zea mays
  unsure (1)..(439): unsure at all n locations
tctaaagggagaacacgtgataggtttgactaacgtgctattctaaaaagatagaccttgtgcagcttgtcaagcagggtaacaagtgggaggagcacatcacagcaagaatgtgatgaccacttcaagacctctggagctgctgcatatggacctattcggacccgtcgcctatctgagcataggagggagtaagtatggtctagttattgttgatgacttttcccgcttcacttgggtgttctttttgcaggataagtctgaaacccaagggaccctcaagcgcttcctcaggagagctcaaaatgagtttgagctcaaggcgaagaagataaggagcgacaacgggtccgaagtcaagaaccttcaagtggaggagttccttgaggangaanggatcaagcacaagttcttcgctccctacacaccacaacaaaat

SEQ ID NO: 57646 - DNA, 423 bp, Zea mays
ttgcacttacgaccaaaccttacccgtatccatatcacattcaatggctcaacaatagtggtaaggtcaaggtaaccaagctggtacgaattaattttgctattggttcatatcgtgatgttgttgactgtgatgttgtgcctatggatgcttgtaatattctgctaggtaaaccatggcaatttgattcaaattgtatgcatcatggtagatcaaatcaatattctctcatacaccatgataagaaaattattttgcttcccatgtcccctgaggctattgtgcgtgatgatgttgctaaagctaccaaagctaaaactgagaacaacaagaatattatagcttgtggtaataacaaagatgggatataaatgaaaggacatttgcttgttgcaacaaaaactgatgttaatgaaatatttg

SEQ ID NO: 57647 - DNA, 378 bp, Zea mays
  unsure (1)..(378): unsure at all n locations
tctccttgtcgtcatcaactttgacgtagaaccattctgatttccagcctaccggccacttgcttcggtagctgatcacagaaaatattgtagtttttcgataggcaaaattgtaacaaccaaaattttcatgtagcccatcctttctggccttcgtttggtagtgtagctcgtgtactcggcagaaaccttcggaaaatggctccaccccctggcttcggagagcccaaatataaacactaagcctaacaatagcgttaggagttagttgatgaaaatagatcccanactgttttagcacatcagcaatcatcctattcaaaggaaatctcacactagctttgaggaaactcttgaaaatcactatttcatctttct

SEQ ID NO: 57648 - DNA, 366 bp, Zea mays
gctctgtgcagaagagcttcggcataacggcacgaagaggaaaccgactaaagatgaaaggcgtatagacctcgaagacatactatagagttattgataaacgtaaagggcattaatgtaattttgcatgggctgccacccgtgcctataaatatgtgaacagtattcccagactgttcacgcggactgcgcattcacttttgcgtcacgcctagattttcattccttcaagccggaagtacacttataattaactattgtcgataccaggaatataaatggaaatagatcaataataatgtttataaaaattatggtactttcagcattttgtatgaatgctttccatcttttatcatgatcatg

SEQ ID NO: 57649 - DNA, 183 bp, Zea mays
tagatatgtcgtccccagcggagtcgccaaaaagtatgttgactctcttttggaggcgccaattactcaagagaaccagcggcggtgctttctgcacaggggcggaccgtccgcgcgcgggggccggacggtccgcaacctgatgcgaggcggcggtgctttctggtcaggcgcggactgtcc

SEQ ID NO: 57650 - DNA, 433 bp, Zea mays
  unsure (1)..(433): unsure at all n locations
agcttgtaacccctactgcaagcacccnctgttcaagataatataagccacatccctcctcttgtgttccatcttgcatcaacccatctggacaggggcacacggcacaaaattcactagtcggtccggttgagggtctcccgggtctgaaacaccgacagttggtgcgccaggtagggacagctgcgtgttgacaatactttcccgttgagttccagatggacaatcttcagcagcctcttcagcccgggacggtgctccgcttaagaagtctcgagttcatgtcccccgacggcggctacaacatggtactcctcccctcgcagcacgacaacaactacngtcgtcggctcgcccggcggaggcgaacacgacgacgacatcctcccgtggcggaagaggaacacccgagtcaaccccaccaccctcctct

SEQ ID NO: 57651 - DNA, 480 bp, Zea mays
  unsure (1)..(480): unsure at all n locations
tgtccaagcaatgacgtagaagatagtggaagacagtttttctaatgatgtattttgtaaatccgatgattaatgaaatatatggttcatgattgcaacacttgtcctcattagcctgattctttgtatttcttttgttctcgcgaacaaaatggcacgcccggtgggacctgattctcctcccatctttgttgcgctatagtggtcgtcatacaatttctcttctaggcctagctattcaatagcaatggctggtgcttgtcacaagaactctaagagttcagcgaaaacaaatatttatgttgcatgcacatggtaacatgtactagcagcttgcatgatagactctgcgtttgagtcacataanataaatgatttaatagacacggcgaaatgagcttgtctaatggtcattatagatctacatgtgttatattgctgaagcatggttgaatacacatatagctgattgaatggcgt

SEQ ID NO: 57652 - DNA, 474 bp, Zea mays
  unsure (1)..(474): unsure at all n locations
agcttctanagggagaacacattntgggacttaccaatgttcattgtgagaaagacagaatgtgtagcgcatgtcaagcaggagaagcaagtggtgttcatcatctacacaagaatagcatgacgaccgacacgccgcttgagctactccacatggatctattcggcctgattgcttacataagcatcggcgggagtaagtactgtctagttattgtggatgattattctcgcttcacttgggtgttctttntgtaggataaatctcaaacccaagagaccttaaagggattcttgagacgggctcaaaatgagttcggcttaaggatcaaaaaagattagaagcgacaatgggacggagttcaagaactctcanatagaaggctttcttgaagacgagggcatcaagcatgaagtctcnttctcctacacagcacaacaaaatggtgtagtggagaggaagaatagaactcta

SEQ ID NO: 57653 - DNA, 431 bp, Zea mays
gacgtctagtacatttaccattcttttcctttttggggtcactgatggccccttttggttttttgctgcttcaatatttactgcaagactcaaaacttctaatgttttttccttagtcggctttttcgcttcttccattttttctgtggatggtgcttcggccatctctgcagtttctggcagcaaggatggctgttcagcttcggtggccgaagaagcttctccggtgaactcaggcaccgaaactggttcaatataacgcggccgatgcgtaagaacctttatctttttccttttcggttctggctcactatgagcagctgcagcttcttcttttgcagagattgtgttttttctcttctgcctttcaatgggatagcagctatcatggtagacaaaccctatggcatcaaatacccgattcagtctct

SEQ ID NO: 57654 - DNA, 434 bp, Zea mays
  unsure (1)..(434): unsure at all n locations
tagcttctaaagggagaacatcatttgcgactatcaaatgttcatnttgagaaagacaggatntgtatcgcatgtcacgcagggaagcaagttggtgttcatcatccacacaagaacatcatgactactgacaggccactcgagctcctacacatggatctattcggcccgattgcttacataagcatcggcgggagtaagtattgtctagttattgtggatgattattctcgcttcacttgggtgttctttttgcaggagaaatctcatacccaagaaaccttatagggattcttgagacgggctcaaaacgagttcggcttaaggatcaagaaaataagaagcgacaacgggacggagttcaagaactctcacattgaatgcttccttgaggaagagggcatcaagcatgagttctcttctcctacactcac

SEQ ID NO: 57655 - DNA, 398 bp, Zea mays
tgtccgagtccttattagctagtctgttgttctctatctgtgcacgagcgcgtttctaggagttagtggtagagcggacagacagggatggctgggcttcgacactgggatgtcacggtcgcgagaagagtttagtcagttgttcaagcgtctcagtctgtaagccacttttgttcttccagtagaaatatacagagtcaagaaaactcagttcagaactacaccaccaaaaaaaaaacacccagcgttcctatgttgtgtttgtgtcatcgttctcaactccggcgcccaattcgtagccgcctagcggaacagtgtgtacagccacgaggtgcggtctttgatctcgcataagcggcaccttggtgcatggggtgatcgagctgcgcgaggagaac

SEQ ID NO: 57656 - DNA, 428 bp, Zea mays
tcaatcgcctgcagcatgcaactttttaatgctcttctatatgaaactttcacctatactgaacaggactaccgaccttagcctcatatggaagatgtgtaatgagatgctgcttacgatcgaatatacccggtggaaatatttttccaatttgcacaaaatgcaccggtgcctccttctccagctgtaccatcacatctgttctgatttctttagcacacaactgtctgtagaaatagctaacttcagctaacgttttccacacagcttctgaaatgtacccacgaaacattacaggcatgagcctctccataatcatgtggaagtgatggctcttcagtccattcatcttcattgacttcaagttcacagatcttctaaaaccagcggaataaccatcggggaatttaatatcctgcattcactac

SEQ ID NO: 57657 - DNA, 427 bp, Zea mays
gaagcatgagcgcttcccctcggctttggtctttcttggctgtcccttgcgacactttagcaccgtcttgaatcttttgatgatgagagccatctcttcatcattaagtccggccggctcaatctgtgccaccttgctaggtagcgcctccttgcttcgtgttgccttgagagcaaggggttgcggctcgttgatcggaccattcaaggcgtcgtccacgtatcttgcctccttgatcatcattcgcccgctaacgaattttccaagaacttcttcgggcgacatcttggtgtacctgggattttcacgaatattgttcaccaaatgaggatcaagaacggtaaatgaccttagcattatgcggacgacgtcgtggtccgtccatcgcgtgcttccgtagctccttaatttgttgataagggtcttg

SEQ ID NO: 57658 - DNA, 437 bp, Zea mays
agcttatgaagattcttcattccaacatgggttagtctgcggtgccagagccaacccaagttagtcttagcaactaagcaagtcttggaacccttgtgtttgcccccaacaaacttggcaactaccttgccggatttgctagtaagcacataagaagcatcaaaagttttaaatgaaatagcatgatcatttgatgcattaggagttttctttctaggcaacttggcacgggtaggttgcctagaactagatgtctcacccttatacataaaagcatggttagggccagagtgagacttcctagaatgagttctcctaattttgctctcaggatagccggcagggtacaaaatgtaaccctcgttatcctgaggcatgggagccttgctcttaacaaagttagacaagtttttaggaggggcattaagcttgacatt

SEQ ID NO: 57659 - DNA, 481 bp, Zea mays
  unsure (1)..(481): unsure at all n locations
tcttctggacaagtgctgcacttaccgctgagtgcgaagctgtcacatataataacaaaggagcccctggtgttggtggagttaatgttgctaaatccatcaaatattgcttcagttcctcgaaggctttttgttgtcttggtctccattgaaagacttcggctgatttcagcacttcgaagaatggtaaatttctctctgctgatctggatatgaatctattgagagatgccagcctccccgtcaatctttgggcccccttttttgcatttggtggctccattcgaagtatagcttcaattgtacttggattagcttcaattccctttggtgaaaccaagcatccaagaaaattccccttctttactccgaagacacanttttctggattcagctttagaccagcttgtctaanactggcgaagggtctctgcanatcagcaatgtgattntcttggttcgtgctttttacaatgatatc

SEQ ID NO: 57660 - DNA, 468 bp, Zea mays
  unsure (1)..(468): unsure at all n locations
agcttgtgaagattcttcattccaacatgtgctagtcggtgatgccagagccagcccatgttagtcttatcaattaagcaagtgtcaagttcagctctatcaaaatctactaagtatagctgaccctctaacactcccttaaatgctattgaatcatcacttcttctaaagacagtgacacctgtatccgtaaaaagacagttgtagcccattttacataattgtgaaatagaaagcaagttgtaatctaaagaatcaacaagaaaaacatttgaaatggaatggtcaggtgatatagcaattttacccaatcctttgaccaaaccttgatttccatccccgaatgtgatcgctctttgggatcttggtttttctcataggaggagaacatcttcttctcccctgtcatgtggtttgtgcacccgctatcgatgatccaacttgagcccncggatgcataaacctaca

SEQ ID NO: 57661 - DNA, 356 bp, Zea mays
aaatgtgctaacttatgttgatgatatcattgtaaaaagcaccaagcacgataatcacattgctgatctgcaggagaccttcgctaattttagacaggctggtttaaagttgaacccagaaaaatgtgtcttctgagtgaagaaagggaaatttcttggctgtctagtctcaacaaaagggattgaagctaatccaaataaaatcgaagctatccttcgaatggagccaccaagtacaaaaaaggggctcaaagattgacaggaagactggcatctctcaacagatttatatctagatcagccgatagaaatttacccattttcgaagtgctgaagtcagctgaagtttttcaatg

SEQ ID NO: 57662 - DNA, 396 bp, Zea mays
  unsure (1)..(396): unsure at all n locations
tagctttggactcctcccaaanatcgttatgttttggagcgtgttggggcccttctggctgctggcttcggaccagagtaagtgctatcggtggtggtggtgggagctgggcccatgaagcttgagaatggcttgccgaagcgacagaggccataggctggtgattacctacgtattctgggacggagggagaatagcatgaagcagtatgtagtacttgcttcggctgattctgccatgcttcagcttcggtaatctctttctgcttctgaatcgtgacttggcacgttcttgtggtatggcctttgtcttcgccacagaacaaacaaaacagtctcctaggctgatcttcgtatcttcctccgaagcttctgccccctctgtctcttggagctg

SEQ ID NO: 57663 - DNA, 392 bp, Zea mays
  unsure (1)..(392): unsure at all n locations
gaattgcattgaaaccatgatcttggntcgcgtgagtcatgggttcaaaggccaaaatagaagtgaaaatggtcattctaaaggcaagcaaacttcaatatttatatatgatggattgtacgaagtgttggaatgttggcaagaaagcccaaaaggcgagagggtcttcaagtacaagttacagatgatcgcacggcaacctgaattagccctacatgcagttaatgcaacgaggaagttcaaagttcgtgaaggtctttgtttgcctgatatatctcaaggaagggagcggatacccatatgtgtcatcaacacaattgatgacatgaagccagcaccatataaatacattaccgaagtcatatatccagattggtatgaaaaagaaccac

SEQ ID NO: 57664 - DNA, 399 bp, Zea mays
  unsure (1)..(399): unsure at all n locations
agcttgccaatacctgtcataacaacaacatctgccagcacagcaactgcagaccataccagtaacttggcctttcgcatgctggggactggatatgattggacctttcaagaaagctcaaggaggatacactcatgtattggtagcaattgacaaattcactaaatggatagagttcaagcccattgcttctttaacctctactaagggccgggaattcatacaagacataatattcagattcgggataccaaacagcatcataactgacctaggatccaacttcacaagttcacagttcttcgacttctgcgagcaaaanagcattcagatcaagtatgcatctgtagcacatccaagagccaacgggcaggttgagcgagccaacggaatgatact

SEQ ID NO: 57665 - DNA, 444 bp, Zea mays
  unsure (1)..(444): unsure at all n locations
tacctataattggtccctcgtcacaacctctgaatgatattatgaggaacagagaagctactggaagggttggaaagtgggacgcacagctcaatgaattcaccattgactacgtgcacagatcttcaattcaatctcaggtgctagcagacttcagtgctgactggacgccaggggctcacgaagaaggcacaagcaaagataccgaagcttgtatggtgttctgcgatggttcttggggaaccttcggtgcaggagcagctgcggtcctagtggcaccttcaaaagtcaaaacatgttttgcagtcaaactggatttcagttgcacaaataatattgctgaatacgaagcactctctttgggactntggaaactaagggcaatgggaataagaagggccatcctaaagactaattctcaagtcattgctggccatgtggata

SEQ ID NO: 57666 - DNA, 457 bp, Zea mays
atggcaccctcgggcgtcttgtcgcattcgaagtaccaagtctcccacctggaagcctcggggccgaacccttctggcgtggtagcgtcgcaaagactgctgataccgtgccgagtgtagtaaggccacgtcccgagcctcttccagctggtctaatgaatcttctcggctggtctagttgcttcggccgtcatacacctttgtccttgggaaaccgtattctaagtctgtgggtaggacggcctcggccccatagattagaaagaacggcgagaaacccgtggctcggcttggcgtcgtgctcaggctccagaccaccgagggtagctctttcatccaccgcttgccaaacttgttgagggtcgtgtaaatcctcggtttaagtcctgcaaaatcataccgttggcacgctccacctgcccatcgtcatgggtgagctacagcggccagtccacac

SEQ ID NO: 57667 - DNA, 226 bp, Zea mays
ctgttaactcggaccgtactccgaagcggcaaacgatgttctgccaaaaaaatttttgggcagtctttgatgtgattgtggaaacagccctcgcttcaatccatttggtgaagtattcgacggctaccaaggcgaacttaaggttcccctgagcggtgggcaggggcccgacgatgtccaggccccagcgctggaggggccatgtatgggcaatcagctttgtata

SEQ ID NO: 57668 - DNA, 451 bp, Zea mays
  unsure (1)..(451): unsure at all n locations
agcttcgcacctctgaactaactctgctgcatcgttcttcgctgttggccaatagaatcctgacctgaagaccttcccgactagtgttctggaggctgcatgtattccacattgcccagcatggacctcctccagaagttgtttcccagtggacgggagaatgcacttcatgaggacgcctgatgcaccccttctgtataatgtctccccaatgagtgtatagtgagccgactgtctggcaatgcgctttgccgagttcttgtcgtctggctcttcttcattctttatatacttaatgatcggccttctccagtcatcagagtctgactcgggttgatctatgatgttgcactcttctgtttgatccattgaaatactcggctgtagaatntcttacacaaagaccccgggtgggacctgagttcgactggatcctagcttggacagtaca

SEQ ID NO: 57669 - DNA, 474 bp, Zea mays
  unsure (1)..(474): unsure at all n locations
agctaagatcctctctcattttatctatattgtctacgccacacaatttcccctaattacttggtctagacaagcgccataatagtccttgagtttgtactggtgtcctgagtggtcgctcggtgaaacagtccttatggtgaggcactttagcaatcatatcctcatgcatgcgagtctccatggtttgctaaaaagcatcttttataaacaaaatttgtaaaatatttataaacatttctcttttgaacaatgtagagcactatcatttgtccactataaatgttcccaaaattcccagtttatcaagcacatggtgatcgagactaggtaagtcctactacaagcaataaattgaccaaaatggtgattaatatttaatgtaatgggaaatcggatcatcgaatatacttgctctctttaagggacttgacgtcctcataagtggngccctcatgatagttgtaacagtct

SEQ ID NO: 57670 - DNA, 418 bp, Zea mays
tccctcacgtttttatcctctcattgactcaaggcaaatggagatgcttttataaaaatcatcaccgatctaaatgatataaatgatgacgatgatgttgatgatgatggctattcatatgatgatcctgttaaaatgttaagtgatgccgatgactacatgcactaaataaatgaaaaaatttacaccttgaatgaattgtataaaaacctccaaatgtattttgaagagctcaagacctctcataacgatctaaaagagaattgtgagaaacttgcgaaagctcaaaactcatctattgtgcatgaagatgtggtggtcacctacgatgttggaatcacttgtgatttacttgtatattctacaagtgtaccactacctaactactctatgagagataaatgcataatttctctat

SEQ ID NO: 57671 - DNA, 348 bp, Zea mays
caacatgcgcaagcgtgttccgtctccttcatcggaggagtatggtgactcggaatactcggatgaagagttctccttcgagcccgaggggtctccggctcccgcctctcccccagcgtcgttcgatgattctgacgactcccatgggatagccgcggatgtctggacatacatccgggccgtctatcgcgccgggctcgatggctcggatgagtcggagtactcctcggatgatgaggactcggacggcggcgacgatggtgaagacgacgacgacgacgacgactactgcgacggcatcggcatgggcggcggcgacggcagcatggacagcatctatggcgacag

SEQ ID NO: 57672 - DNA, 314 bp, Zea mays
ctcatgaatgatgccttctgcgtcacgttctaacaccttcattctatactgtgtctttctgcatgaacctcggcgacaaaacatgatcccaacaagcactatatttggctacatttttgggcgattgtgaaacaaggccattttgtgaacattcataggggttgtttaagccatggagattattgacacttgtatttgtccgttcacaaaccacttatatatctacagtccgagcagtttcccttctcccacaagcattttcagcctgagtcagcttggtgtttaataagttaatattatcccgggatgtggag

SEQ ID NO: 57673 - DNA, 472 bp, Zea mays
caatgtagccgtgtcctgtcctacttcttatcctgctaaagcgtcttcgggccctcatccgaatggagacgacgaaatcaaaacgatggctgaagatattttggacgaagtcgtctatcggctcctaaacgaggctgcagaagtcgttttgagagaagattgagtattttgtgtataaacttctggaatgtaatatactgtaatatcttgtaaccccatatgtaatatacctatgtttgttagtcaattctttacgatgcatgaaactttatacgtaccgctttcgagtctttgacgaataaaacaccttcccttcttttcatgcttcgtgaagaagaagttgtctttgccacaacaatatccagtgttctgatgaataatatccaagctttgtaaagatattctccgaagctacacttccgaagctcacttcgtaaagatatgttcaagacatcttctgtacatgatatgc

SEQ ID NO: 57674 - DNA, 400 bp, Zea mays
cctggcaacagaccttcgtctacaccttcgctgcaacaaggtcagcatccatataggagccagtttgctccacaccaatgggacttcatagagcagtccgaagctcgtacagtcaacagcactgtgccagagtcaaagcacatctattgacaaatatcctaccttaatagcagactttcttattcagtcttattgtctgtgtaataaaagacattatttagatttcatgtaaacagtttcgttgtttccacaaagaaaatatattttcttcacaggcctaagttggtgaagtttaaagaattgtgataacaaagaggaccttcaaattatcgaaaattcttcgaagcaacaaaaagccgttctaatgaacgcagagtaagtttgctgaagtcacaaaaag

SEQ ID NO: 57675 - DNA, 260 bp, Zea mays
caccatgctcatcttgcttgttgcggaagacccatatggttcctacaacattttgggtatgacggggaactatatgccatacctcattcctagtgaagttgatgagcttatcttgaatcgacacccattcaatctgaatacttggatgtgctgctttctaccctatagtggctcgagtagacggatacaacacgagtaattggtcacaaataatgtgcaacacgagaactatcattacacccttatgaatgtcaccgaga

SEQ ID NO: 57676 - DNA, 388 bp, Zea mays
ctaccttcatttccaaaagccagcatatacttgttatgttttgataaggaaaagggcttaaaacatttcctataatcggttttggtggttgacgtccatcacaaaccacgtggactaactagtttgcctagttgtcatttatactacgtgcataatgttcaacataaaccaagtaagaaatttaattggggacttaactaaggttggagcaaaagacaagtagatgtgctgccagtggcgcaccggacactgtttggtgcccatgccgagcaccttccatactggccactcccatgtgtctctatgagacaccccactattattcacctgacggtccggagagccaacggagcaacggtcacctgctctcaacggtcgactgcgtgaa

SEQ ID NO: 57677 - DNA, 385 bp, Zea mays
  unsure (1)..(385): unsure at all n locations
aggttgtatcgcatagtcatgctaggaatcaagatggtgttcatcatccacacaagaacatcatgacgactgataggccactcgagctcctacacatggatcttttatgtccaattgcttacataaacatcggcgggagtaagtactcgctagttatcgtggatgactattctcgcttcacttgggtggtgcttttgcaggaaaaatctcatacccaagagaccttatagggattcttgagacgagctcaaaacgagtttggcttaatgatcaagaaaatatgaagcgacaacgggatggagttcaagaactctcatattgaaagcgttcttgatgaaganggcatcaagcatgagttctcttctcccacacaccacataaaatg

SEQ ID NO: 57678 - DNA, 289 bp, Zea mays
cgaccgagccgagggattcccacgcctctgggataccgatacctcactcgtcccttccgcgaaaagcaactctcgctcactcaaacataccatttaccgacgaaatccatatgctcgaaacaggatgaaaaaagacgcagcttcgcaagcggggcgagggtgtgttcttctggcctcggtgggcgcggaaagcacacgctacataatgatctgatcctgcacgctctggtcttcacgctgaatggagcacgatcaccccttgcatcgacgacgtcttcagcaaagcccg

SEQ ID NO: 57679 - DNA, 218 bp, Zea mays
atgcgcactctagatataacaacacatgaggctaatcccaaaatttgatctacgatcatgtgctagtctgaaaatagtgcatatcaactttaattctaagataacgatccaattctaatattgtttattcttaacctaacgagagtctataccttaagatggagcgtactcttagggtgagtcacttatacaggaatagttaatacttgtgaaataga

SEQ ID NO: 57680 - DNA, 258 bp, Zea mays
tcatcaatatatgtggtatgcatgatcatgtgcttcttatggcgatatagataacaacatcaggaatagtactaacattttgttaaatgtgttaaactaaatggccttccacgtaatttgcagtttgctactaatgggctgttgtggtggctaacgctatgtatgggttcccatggtgtgcctattattttgggagtatcttatatttattgaagctagtgcaaaccactcttaattcctcccatctctcaaatgcat

SEQ ID NO: 57681 - DNA, 367 bp, Zea mays
  unsure (1)..(367): unsure at all n locations
agctcaaggaacaggaagttacacggccttttaataaagccctggcagctgctagcagtatacagtgggaggagcacatcacaccaagaatgtgatgaccacctcgagacccctggaactgctgcatatggacctcttcggacctgtcgcctattctgaacatatgagggagtaagatggtctatttattgtgatgacattctccgcncacatgggtggtccttgtgcagataagtctgaaacccaagggacgcctcagcgcctcctcaggagagctcaaaatgagcttgagctcaacgtgaataagataacgagcgacaacgggtccgaattcaagaatcttcatgtggaggaagtccttgaggag

SEQ ID NO: 57682 - DNA, 283 bp, Zea mays
gagagcctccgaacgtgaagacttgttctgtccacagagtcactttatccgaacgcgagttacttatctcagtaagtgatgagtgaggtatccgcatccccgaggagtatgagtccctcggctcggtcagccttggctgcttacgtgtactccgtcgtttccaggatccgctttccgaagtagtctagaagcacgaatgaaatcctgcttaaaagagatcctttttcgaggaaaaattcgacgcaaaaggggtctcccccctcttaacccccgatggagggtc

SEQ ID NO: 57683 - DNA, 293 bp, Zea mays
cggactgttcgatcaccatactaagacagtctccaccaacggtcatgtttggggttgaggctatatataccccaaccacccccacattcatagcatccaagtttctcatctttctaccactatacaaaagctagcattcattgcatagcacaccaaaagatatcaaatcctctcccaacttcacacaaagccttagtgactagaaaaagtgacttgtaatgttcatatgaactcttgcgcttggaacgcttcttatatttgcattctatttgtgacaaacactacttgtattg

SEQ ID NO: 57684 - DNA, 318 bp, Zea mays
  unsure (1)..(318): unsure at all n locations
atgctatagtctatgaccacatattactgctaacttaatcgactggtcactangtaagctcttgcgcccatcttggaagatattttctcaccatggcagtccatcaccatcacttgatcgtataactgcacccaatatatcatagaggcactgtgttaatttgaagatgaataacatctctatgaataaactatgtacacccaaatgaatacaaggaagtatacctgctttccatcatgaaagcatctccagaattatggccctggtctccctactgcagtctttattatatcagctgtggatagtaaaactgaatct

SEQ ID NO: 57685 - DNA, 330 bp, Zea mays
cgaatgattcgtaacagtgtgcatgacctgcttcgactgaccctgttgtgttgagcctctgctatctccctttgcttctggatggtaacattgacacaatactattttgtataggccctctggtttctccacaaaacatacaaatattctcccggattgatccccaaatctttcgccgaatccactggcgcctctgcctcttgtagctggtggtcagaaagagccttgttgtttccccaaatcctgtgaggagtactgtggaccttgctgctgaactcaccttatcatcatttgagtataattgtgaatttgcctaacatgccttggata

SEQ ID NO: 57686 - DNA, 423 bp, Zea mays
gaactataaaactaagctttccgaggcaggacgggtctgagatggctctgctagctcttctactgtggcaaaagggttgagcggccgtggactcgctgggcacgggcaatctgtgactagctaactcctgcgatgtgtggaaggtgtgcgtgaaggtgtacccgaagcctgcgacggatttattagctcgggcgccggccactgcgccggtttggctctggcgctgtgcggtgcgtgctaaggcgcgccctatcgttctctggcgcgggcagaaggcgtcgaacaacgtgcagtggagttcttccaatgttcaaacgctttcagagatcgcaaacgcgcgaatctcgccatgaatacggcgcagacctactcctgtccactaggctatctcacatgtgtgagttccaatggatgatacgccct

SEQ ID NO: 57687 - DNA, 412 bp, Zea mays
ccatttcttccaaaagttggcactgggaggcttgttgtgttgctagcgataaaatcataacaaccatagttgatgtggtactgatctttacccataggcttcatctcatatagtactttcgtgcatatagcagaaacacttcgtgcttggctctagcccttggctccttactgcccagacaaaaatgcaaatccttattatggctctaggaatgatctgatgaaagaatattctggtcgacttcagcacttcacaacatacttacttatagggaaccgaatcacacccttgtagaagcttctgaaaatcacaacttcattctcctcatgggcagggaacgtgttgtattcgctatccctctcaatacacatatgccaaatagaccttcccctcatgttcttgaagaatctgt

SEQ ID NO: 57688 - DNA, 123 bp, Zea mays
tatcataaaaatattattgactaaggaaccgtatttcacatacataatgacatatagcctcatgtcctattgctaactcattcccatattattctcatggacaaatagacgtgatatctaaat

SEQ ID NO: 57689 - DNA, 303 bp, Zea mays
  unsure (1)..(303): unsure at all n locations
ccatcaccaagtactcggtggaaacaatgccggaattgtggctcgcggactaacggctggcctaccagctgggtggaacaaacgatgacaacctcatcatccgcaatcctccnccgttcctctccgacgtcgcccgggcctggctggatcatcttgcttctgcgcagatctccaactgggacgacctaatcaaagccttcgctggaaacttccagggcacatacgtgtgccctgggaactcctgtgatctaccaagctgccgacacagccagaaaatcgctgcgggataatccggtgatttcg

SEQ ID NO: 57690 - DNA, 390 bp, Zea mays
ctatcatatggacatgaagagtgcctttctcaatggaccaatcaatgaagaagtctatgttgagcaacctcccggctttgaagatagtgagtatcctaaccatgtttataaactctcaaaggcgcttaatgggctcaagcaagccccataatcatggtatgaatgcctacgagattttcttatcactaacggcttcaaagtcagtaaagccgattctactctctctactgaaactatcgcaaaagaattgtttgtatgccaaatttatgttgatgatatcatatttgggtctactaacaaatctacttatgaagaatttagttgatcatgactcagaaattcgagatgtctatgatgggggagttgaagtatttcctatgattccaagtc

SEQ ID NO: 57691 - DNA, 409 bp, Zea mays
tcatttctacttgacttctaatcatattattctcaggtttaagttgagcaacatcagataatacatcatgattatttctttgctcaaataatacagatccataccattggaccaaattatcatgagagcactttagctcctcatgttctttggtcatcttctccaagctttcgttggttttgatgatagtctcctctagcctgaaaagcgtctcgccttgttccttgttcctcctcaatagcttaaccaagagcactctgtcttctgtgatgagatgggtgtagaactggcgtatctcctcttcttccacatcgtcagtctcattttgcctgtcattattatcagtggaagcaatacatgaaaagtaccttgtggtgatgaagactcatactcgctatcatactcatat

SEQ ID NO: 57692 - DNA, 380 bp, Zea mays
cacataacaatctattttgttaccttagctggatgactggattcattgcagagttgtttggtgatgggctattctcctctaaccttgttcttgcagatctacataagggtaatgaatgtcttgcaaggtccaacgttgtgggaatctacctgaggtaagaatcatgaaatagccattatatttgggtggttcttgggctgattttgataatttttgattcggcacctggtaatattaaattcacttggcaaaaaaatataacttgtgataagcccctccatctatttctactaatttctagagtatgtgagtgcgacgggatttcttttcttcttataactaaatttgtctgtttgtttggaaacatgatctatatactg

SEQ ID NO: 57693 - DNA, 423 bp, Zea mays
  unsure (1)..(423): unsure at all n locations
ctgccaaataaggcgcataattatacctgtgatatcttctcgttgtttcaaatcatttntcacataaaaccattctgtcatccaatcgccgggccatctctttcgaaaggttggcacggggcatcttgacccggaccgagaaacgaaactatagcagccaaaattattgtgatattgttccttaccccaaggttttgtttcgtatgataattcgtgtatattgcagaatacttttgcatcaagcttcataccttggcttctcacggaccacacgaagatattcagccttataattgcctcgggggtaaagtggtggagatagacttcgaatattttcaacacctctacaacgaagttgctcaagggaaaccttattccagctttcaaaaagcttcggaacactacgacttcattctcttcaag

SEQ ID NO: 57694 - DNA, 403 bp, Zea mays
  unsure (1)..(403): unsure at all n locations
cttatgtatttccttgtaaaatcataaaagagagtgatttaataacacaagccatacttccctatttagcaacctctattatatgtattgacagaatgttactaaaacaacgaaaccttatgatatgaacttaattaccctcacaagcatcatgcatatcatcaattgtaaaaagatgtgagtagcatgattatttaattacagttacatggcaagtttaattcataacatggtgagtgatttatggagaagactcacaaccaatttatacaaggatgaatacatcacatagtattggtccgaactctttgaatgttgaatggcacactccatttgggaaacacattctcatggtgngtagactcataaacacctagatagaaacattactctcacaactcta

SEQ ID NO: 57695 - DNA, 177 bp, Zea mays
gcaactaacaacctcgtgcggtggccatcattcctcggctttcaaggttgttcctcaacaaagatataactctgcctatgacgtggcccaaaaatggtgtacgtctctgcaatgatacagacataatgggtcatccctcggaccgtgatgcgcgtgaagcattttaccaatttgatc

SEQ ID NO: 57696 - DNA, 419 bp, Zea mays
  unsure (1)..(419): unsure at all n locations
tacatgaacagaagacactattgttacatattanaacatatatttcagaaatttaaaataacatatacaatttcgtatttcctaccctatcatgaatggtaaggccactttggattctattctcaataatgttgacacacccacaaaatttgcttacggcgccttgtatagcactccaacgatgtatcaaggaactctcagttcgttctgcacaatttgctctatttgtctcatagaacatatggattcttttctagaatgtacctctagtctgatttgtcccttgtgtacggtccgtactgacattctaccatgctgcaacaagaactctgtcttcttactcactataagttttgcctttgtgcttctggtttgaattatagaaaggattgctatcatttgtagggactatgtgctgc

SEQ ID NO: 57697 - DNA, 438 bp, Zea mays
  unsure (1)..(438): unsure at all n locations
tctcttttttgccgaacaaccaagagatcaaaataatgctttattgaacaaaatggtgtataatgtgaggagaaatgtttgccctgctggcagcatcataaattattatctattgttataaggtctctctcaaaattataatgcctaaaaatgttgcataaatcgatacccaatttcagaacgggatgagtaattgggtaaaccatgggcaataataaaatgagctggactatacatctctacatataaaaaatctctacttggcagcattggcctgatgccgtgcactttacaaccattatctatgcacatattcttctatgtgcttgaaagcataatgcaacaagtgaatgtccttgtaagcgctataccttgatggtcattntacttgttgatctgaagtcaacttatggcttcaaacgacgaatgatatgcatg

SEQ ID NO: 57698 - DNA, 198 bp, Zea mays
tatagaaatcaactaagtatatctgacgcctcttacactccgatataagctgttgaatcatcacattgtactgaagacagtaacacctatgtctgtgaaaagacatatttgttaccatttttcataattgtgatactggatgaatctaccataaaaacagtggatatgatagggtcaagtgatatagtaattttacca

SEQ ID NO: 57699 - DNA, 161 bp, Zea mays
tttgatttttaacgacaaaatatctgacgaaaactttgaagggggcgaattttgtgctaaggattgcctaataatttgaaaaatttccacagcactataaattcttatttccttgtccacgggtatggaccaacagtcatgcccaccttgtatggccaacg

SEQ ID NO: 57700 - DNA, 194 bp, Zea mays
cgatgtgctctcctaacacatgagtcatgcacctttggtatgtcgcaccatcatttctcataccaaatggcatagtattataacaatacatgccataaggtgtgatgaaagaagtcgcgagctgtgcggactctttcatctgattttgtgataccctgactaggcatcgatgaatgacaggggtttgccccaac

SEQ ID NO: 57701 - DNA, 214 bp, Zea mays
ccaaaatttctgctagtccgcttctgttgttaagtcacccttctcgcctaaaatggttggttagctcttcaataatgcatacttaccatggttaggctagaaaagacatgtgagtctcgttatatatgtacctttctctactgattgcgaaataagagttccatagatattgacgcttattgcctctattaaatttgcggtatcagagatgctt

SEQ ID NO: 57702 - DNA, 261 bp, Zea mays
aaacactagcccaaagcactggtggctgttcggtagaacaggcctttttcgtggttccacataatgaaatctgctgaacatagttaatagctttgataagagcctactagtctacagtaaagccaaaaattcatgctaaacaaagttataaacttgagctctagtactcaatagcaaatgcaaatggggaaacagctcaactggttggactcagacgtctagaagacaacttgacaaacagcaactgttagtatcacagca

SEQ ID NO: 57703 - DNA, 320 bp, Zea mays
  unsure (1)..(320): unsure at all n locations
cgtaaaagaattgaataatgaaaagagacttgtatattacattcaaatgtacaaaatattacataaatcacacttcaaatgtttttcctaataacacctagtcttctcttaatactacttcggcagcctcatttagaagctgttctacaactgtatccacgatagtttcggccatttgtttaatttcgtcatccccttttgtgtgagggtcagcagacgatccaacacgttctgagggaagaggatatttttgcattactattacaaaccgcgagcatagtttgaatataattacacacgatcanactataattatacct

SEQ ID NO: 57704 - DNA, 392 bp, Zea mays
actctattcttgtcaaaaaggtagaactctatatttctctcttaacattacaacgacttttacttggttatggctcaaacacaacggcatattcagtcattaacaaatccactaactcaattgaagtttcttgtgaccttgtgtttgatagcgaccaatggctctcaagtagagtaatgttgattttaatgaactagatgatgatatggttccatgcaccactcgaacgaacatgtccattatggatgcatgcccgtaataaccacatgtgccaactcaagcaaaagatcaaccattttcctacacacaatcatgttctctaactcaagatgaagacaagctcaagaagatgaacaaatctatatattgatcaagctcaagatgggagcata

SEQ ID NO: 57705 - DNA, 369 bp, Zea mays
  unsure (1)..(369): unsure at all n locations
gcacatcgctcatctgaatacctttgatcatatctctttgtatgctatgacaaatgagcgttcaagtctatttcaaaccacgtcataggtctattgtaagggaactggagtcttccgcgaagacaaaggcttccactccatatctcatacttcgccaccactccgagcaactctctcttctttgggggagaaatgatcatcgcggaaaaggacttcatccttgggggagagagttaaagctcaaacgcaaaaggacttcgtctttggtataatcttaactcacttatttatgaccacaggngaagaacttacttctatggctctaatgattcccgtgttggcgattcatgccaaaaagggggagaaatg

SEQ ID NO: 57706 - DNA, 452 bp, Zea mays
gaaactcaagcttcatgagtggtagcttcagcatcacgtgtgaacagcttcatccgatactgtatcttcttgcaagaccttctgcgacaaaacatgtgtccaacagtatccccttcacggtgctatatcgcttgttgtaccagcctgatacgtgaaaatagtctcttacgcttcgagaaaccgaaagtgcgaaaaacacctttcccgagctcgttgccgggaaactatacacattccgagcgtggagcggtcccaccatgcaagttcaccttctcgattttgtggtccaccgtcatagggtgcaaacgactgattgccggtgaaaaaactcgagattcacctcttcctgcagactatataaacaacgggtggtggaagtatacagcatcattgtttgactgtttgtgcaaaatttactagcgaactgactttcttcaaacaactccttggat

SEQ ID NO: 57707 - DNA, 271 bp, Zea mays
ctattcctgagaactgtgtcttctgtgtgcccctatgcatgtctcctttggttcatcgtctccaaacgagggatcgaatccaacccggagaagatcgcggccatcaccagcatgggacccatcaaggacttataaggggtacagatggtcatgggatgcctcgcggtcctgatccgtttatttcacgcctcggcgaaagatgtctgcctctgtaccgcctcttaaagaaagccgaatgttacacttggacccctgaagccgaagaagccct

SEQ ID NO: 57708 - DNA, 441 bp, Zea mays
tctaaagggagaacacattttatgactataccaatgttcattttgagaaagacaagatttgtagcgcatgtcatgccgggaagcaagttggcatccatcatccacacaaaaatattatgactaccgacaggccactggagctcctacacatggacttattctgcccgatcgcttacataagcatcggcgggagcaagtattgtcttgtaattgtggatgactattctcgcttcacttgggtgttctttttacaggataaatcctatacccaagataccttaaaaggattcttgagacgggctcaaaacgagttcggcttgaggatcaagaagattagaagcgacaacgggacggagttcaagaactctcatattgaatgcttgtctgatgaggagggcatcaagcatgatgttctcttctcctacactccacaacaaaatg

SEQ ID NO: 57709 - DNA, 281 bp, Zea mays
tcctttcgtgcatagttcacgaatcaaactgatggaaatacgtggccaacggcttgtctgtacccatgccgtttgttgtcggaaaccctgttctacactgggtagaatgaatatgccatctatcctgaattgttacttctgcttcctaccatccatctgatgctcttacttgggtcaatagaacaaatatgtccaaatgtgacacaacatggtcccctggtgcccagagggtccgggaccatgatgtgggcactgatggaactgaattgtatcctctgatg

SEQ ID NO: 57710 - DNA, 160 bp, Zea mays
ggtggcaaaacgctcccacatttatctccgagcggacctctactcaaggcggttcatgagactcaaatctctgagatgcgtgtcgaggtcgaacttgctcacaagaaggaccctcaacatttcctgattccgatctgcgaagctcgtcaaccgcgcaccc

SEQ ID NO: 57711 - DNA, 346 bp, Zea mays
taaatatagttcctaaccatgttataactctctattgcgcttattggctcaagcactcccttagatcaaggtatgaatgccttagagattcccttatcactaatggattcaaagattgaaagtgcgatcctacactttttaaccatacacttgaaaatgaatcgtctgtatgccaaatttatgctgatgatatcacatttgggtctactaacgaatatacatgtgaagagtctactttgatcatgactcatactatactacatgtcaatgatgtgggacgtgaagcacttcttgcgatacaagtatatcatccatatatggcacctttctaatcatacgaattttc

SEQ ID NO: 57712 - DNA, 316 bp, Zea mays
tccatgcaatgcatgttaagctggatagcaagttgctaatacacattccactaatagctttcatgtcaacatctaagacactggaactacctcctatggatttacttggacctacaaattatgtcagtgccgcgtggaacctctactgcctattgatcgctgatgacctctcaacataccgtcggtgtcctttctccatgacaaatctgaagtgcatctatattcagaacattgccacaaagctcaaaagatattcttgcgagattaagaaatcagatgtgacttcgcaaagattttacaacaccacatcttgatt

SEQ ID NO: 57713 - DNA, 328 bp, Zea mays
tagcatatgccaatatatgcgaattgtctcatacctatctacggtggcatatgttctacgaaatacataccctctactttggagtattcccttgggcacaaagtagagctttgttacttggcaacacaccatgctcgtttgcttgtgtggaaacacattggttgctacacatttgatatgacgtgaactaatgccatccccattcctaggaagttgtgagctcctttgcatcccaccacccaatccgaatttgaacgcttctctgcctggtggctcataaagaacaaaaaatatgtccaaaatgagcatcagatcagtattcccctat

SEQ ID NO: 57714 - DNA, 351 bp, Zea mays
atataaccattccgattttcaccctgctgcccattggcttcagatgctgatactaggatacttcgtactctctccaccaacaaaaatgtatctaccaaaattgtcatgtatatccatcctttccaacctttgtcagatatggcagatcgtgaactccgcagaagctgttcgcaaacggttccaccgcctgggttcggagtgcccaatataaacactaaacctaacgatagcgttaggggtcaactggtgaaaaatgattccgaacttcttcaatacctctggcattatcccatgataggggaatcttaaccaacctttaggaagctcttaatataacaatttatccttttc

SEQ ID NO: 57715 - DNA, 411 bp, Zea mays
tgccttcgcttcaatctatcatccgcagtccaacggggtctttgatcgcgccaatgggaaaatatcacagctgtcatatagatgctcctcgatgaaagaaaaagcagatggaccgatttattaccagatgcagtctgggcgctatacacaaccgagtgcatagcgaccgggttcactcctttccgccttctatacggatcggaggcaatgaccccgcatgaaataaagcatgggtccccgcgtacagttccatcatccgtccccgacgtggatgagccaacttcaaaagatctcattgacggagaccgggtgttcgacctacatgccctatacaatattaagcccataccaatacatggcgcgaccgcgcagtcatcccgagggaattcagcgagggggacctcgtactca

SEQ ID NO: 57716 - DNA, 214 bp, Zea mays
atcatactctccggatgggaatgcaaatgccttagccagatatctccataacaacaattaccattgcaatttgtagaagccgccccttatcgccctctattacaaagagctgtctaacatcgatctatgggatcatctcggaaatagcatgtgtttggccatacactttgctgtagtcgaaacaacaacagatggcgcaaagaatctgaaatag

SEQ ID NO: 57717 - DNA, 313 bp, Zea mays
cgcatgacacgcatggaatcaagcttggtggtcatcatctcacacacagaacatcagtgacgatctgacacgccaacttgtgctcctacacatggatatattcggcccgataacttacataagcatcgactggagttagaactgcccagttattgtggatgactattctcgcttcacttgggtggtcttttgcacgataaatctcatacccaagagaccttatagggattcttgagacgggctcacaatgaaatcgggtgtaagagcaaaagattataagcgacacgcgacggaggtaagaactctaaattga

SEQ ID NO: 57718 - DNA, 269 bp, Zea mays
tttcctgttttagcacattttatgcttttctggcatggaaatactctcatgcttacttcctgtgtaactcttctaaccctgtaagaacatatagtactcactccattttaaatatatgatgccgctgactttaaaataaaactttaaccactcatcttatttgaaatatttattgtgatattctaatatttctagactacactcaaactaccttaagtgatataaccaattttaacaaaattatactatttcacaatcgttgttgaaca

SEQ ID NO: 57719 - DNA, 373 bp, Zea mays
actcaacttgctcagtataccacataatccttaatccttttctcctctcatggcaaagcattctccctggatccaagtccatataccaacatatatcccgttatcaagatgaatacaatcaattcctgacctcgcgtgagtgctataataatcactcgacttctaccgatatcctgattagcaaacagctactcgtcctagcatactagtattcatcttataatggaatactaagttcatgcaactaaaggtttcaagcaactcctacacttatgtgcacattacaatcctacaagcattaagtgtagtaaagtagcatataataatacggttatgcataaaaaccggagcttgccttcaattgctggggcta

SEQ ID NO: 57720 - DNA, 123 bp, Zea mays
tctcactctattgtcactgactacagacaggccgctagagcttctacacatggacatattcagcccgatcgcgtacataaacatcgagtggatgattagtattgccgatgtaatggtggatga

SEQ ID NO: 57721 - DNA, 384 bp, Zea mays
agagaaactatcaagcgctggcgatcaagagctataatatttttaatacatagcaaatggcgcaagcagcgtaccacatgatgttggtgcacgatcttatttatacgctctgcacgccccgaattggacggtcctgtctgtcattgactgttgctattctagcaaagggaatgtgtttttcggaccttcgtcttaatgccgtcgaacatgtcgcaaactgaattcgttatcttaaacaaattaatactgcgaggggctactgttggggccttcatactccgaaagtcctcaaaaacgtaatttaacaatgtcttccaagtatggcttatggtcaagtaccttcggattcatgataaaagcgtacacgatgagaagatcatgatc

SEQ ID NO: 57722 - DNA, 445 bp, Zea mays
  unsure (1)..(445): unsure at all n locations
gacacttataaactcagcttccaacgaggaaatggcgctcatcatcaagagctctcgtcttatcttcaaccacaggaagggaaggactacatgtaccgctccacanatgtgtgctaccagtgtggtaagtccggtcatttcatatcaaaatgtccaatttctattggaagtgacagggacgatgaccacacatggaagaatgagaagaagagattcctcaagaagaatggcggtgatgcccacatatgtcgggaatgggactccgacaagaactccaccgactcctccttcgacgaggacgcacgcaacatatccgtgaacaatggcctcctctttcccaacgtctgccacaagtgtctcatggcttatgacggcaagaataatattgtcactctatagccaccccaaatatacaacatctactgatgaaggtagctctattgat

SEQ ID NO: 57723 - DNA, 335 bp, Zea mays
  unsure (1)..(335): unsure at all n locations
gatgtccgacggcctgtctgccagccgttggacatatacttatgtccgacggnctggctgaacaccctcggatgttccgcgttatgtccgacagccgccattatccgtcggacatacgcttatgtccgacggtggttgtcggcgtttctagaccagggggtccctgtgccgacgagtgaaatgtcttcgcgtgccctaacccatatgggtcggcgcgaagccgatcgcgaatgggggaaaaggcggacggagaccggcgtgagagatgtgaaaataccgcggtgatgcgtcacgatgcccgatcttcacgacgtatgatcaatcttcagataact

SEQ ID NO: 57724 - DNA, 387 bp, Zea mays
taatgatatgcttatcaccagcttccattgatttcagacgtttccagtcactgctcaagctttgtttcagtgcgcacatagaccatgatgagtaccttcatgcgtatgtccgaatgttcccgcgtctgatatcacaatcgcctactgtgcccaatgaaattgtcattgaggccatgatcaaagggcttcatccatgacctacgactcagtatgttgccaggaaacccccacaaaccctggagaagcttcttcagaagatggatgaatacatccgagctgattatgatttccaccaaagaatggaagaagcatacatgttgtgtgagatgaccaaagacttaattttgttctcatgtaataactgtgcccatatcattaagtataatg

SEQ ID NO: 57725 - DNA, 414 bp, Zea mays
catttgcatatgatggtcggctattcgagacttccaatgacttctccagtaccatattccagtatgagtgtgattctgcattgccaccacatcaaatcgtttggtgtggactatccaatgcaaccatctactggcatgaggtgttgttgatgattggcccaaatgtgagattctgttcgaatacacatttatatatgatacaccctaataaactgtattccctatagtgcgaatggtgttaagaatcctctccaacttaagtatggaacatctacaccatgtctcaaattttactacatcatttgttggcattggaagcatcttaccagcaacattattatacgatgttcgtgatcactatgacattcatagcacacgtagtgttcgatatgggatgactgaactgacacaatg

SEQ ID NO: 57726 - DNA, 348 bp, Zea mays
atgggctgcagagctcaatgaattttgtattgaatatgttcatagatcttcgattcaatcccaagcgctggcatacttcattgctgactggacgccatgggctcacgaggaggaaacgaataaagacaacgaatcctggacagtggtttgtgatggatcttgtggaaccttcggagcatgagcggctgctgtgttggtttcacctttcaaaatcaaaacttgttatgcggcaaagcttgatttatttgcacaaataacattgctgaatacatacattgatctatgctcggaagtaaagcatgggaatcaaaggcctcttaaactgatccacgttgttcggtatatgac

SEQ ID NO: 57727 - DNA, 425 bp, Zea mays
  unsure (1)..(425): unsure at all n locations
agaacacgtgataagttttactaatgtgcaattcgaaattgatagaccttgtgcagcttatcaagcagggtaacaagtgggatgagcgcatcacaccataaatgtgatgaccacatcaagacctttggagatgcttcacatggacctcttcggacccgtcgcctatctaagtataggaggaagtaagtatggtcttgttatagttgatgacttttaccgctttacttgtgtattctttttgcaggataaatctgaaacccaagggaccctcaagcgcttcctaaagagagctcataacgagtttgagctcaaagtgaagaagataatgagcgacaatgggtccgaattcaagaaccttcaagtggaggagttccttgatgatgangggatgaagcacgagttcttacgtccctacacaccacaac

SEQ ID NO: 57728 - DNA, 253 bp, Zea mays
aaaacacagctcatcactttatctaagcctatactagccatgtgatatgcctaattatagcgattatcctcactcatttaaaccagatatacgaacatcacaatataacgaagtttatgagaaggatacttcatctctttaaccaattgagtgtacattgagcatcaaataaaaaaaaatataattgtaattaacagacctaaaagaagtactctatgtatcccttgaattgtaaacattacacgttaatatc

SEQ ID NO: 57729 - DNA, 394 bp, Zea mays
  unsure (1)..(394): unsure at all n locations
tgtccgctggccttcaacatagtttgcagctacattgacaccatagattnggtccagtatcacatcgctgtaaatgtatggccccttgttaatgattgggagatgccgaaagaaacctctgctggttccagtgtatgtggcctattgtatctgaagtacacctataactatagaagtcagttgggcgatccaaatgatgaatggcttgaagaccttgacgcgaccagtgatgaatcgctggggcttattcaatagcagatgacgaaaccatggatattgcattccgcgctcgcgggaagataagattgaacataattcttgatgttattggattagactatactgactactgtattctcgctcgaaaacaagaaacgaagaggataatcacatc

SEQ ID NO: 57730 - DNA, 354 bp, Zea mays
  unsure (1)..(354): unsure at all n locations
actcaagctctaaacggagaacacgcgatatgtgtgactaacgttcaattctgaaaagatagaccttgngcaacttgtcaagcaggtaaacatgtgggaggagcgcatcacaccaagaatgtgacgaccacatcaagacccctggagctgctacatatggacctcttcggacccgtcgcctatctaatcataagatgaagtaagtatgggtttagtattgttgatgactttttccgcttcacttgggtgttctttttgcatgataagtctgatacccaagggaccctcaagcgcttcctcacgagagctcataatgaattcgagctcaaaatgaaaaagataatgagcgacaac

SEQ ID NO: 57731 - DNA, 470 bp, Zea mays
  unsure (1)..(470): unsure at all n locations
acactttaaactcagcttctaagggagagcacatcttatgattaacaaatgttcattttgagaaagacaagatttgtagcgcatgccatgcatggaatcaagttggtgcccatcatccacacaagaacatcatgatgaccgatatgccacttgagctactccacatggatctattcggcccgattgcttacataagcatcggcgggagtaagtattgtcttgtaatagtggatgattattctcgcttcacttgggtgttctttctgcaggaaaaatctcaaacccaagagaccttaaagggattcttgagacgggctcaaaatgagttcagcttaaggatcaagaaatatagaagcgacaacgggacggagttcaagaactctcaaatngaatgcttccttgaggaggagggcatcaagcatgagttctcttcttcctacacgccacaacaaaatggtgtagtggagagg

SEQ ID NO: 57732 - DNA, 422 bp, Zea mays
  unsure (1)..(422): unsure at all n locations
nttgtcattaacctctcttagctaacccatgcttccaatgttttatgtgcttcttctcccccacttaacgacatgtgatcacaagtcatcagtgcataaatgaagccattgccttggtaacacctgatgtgttacagattgtccttaatacaatagtaaacatacatggcatgaatgtaattntacacaggctgcgccatgtgcctattaatagatgaacaatacccccgtactgttcacgctgacttgtattcgctcgtgcgtcacgcttgtgtttttgccttctgtcaagacgaaggtacaaatgttactcaaccttgtttttattcatccatgattatataataaggatatataaaggatgttatatggctatttatggtacttctcaatgttcatatgcttctccttcatcaatataa

SEQ ID NO: 57733 - DNA, 295 bp, Zea mays
gacgatcaatgtgtgatatggttaaaaaccgcatagtagtgccaaagaatgaagagctccgccagctaattcttgatgaagcacatcttattcgttattctattcatcccggaagcactaaaatgtatcaagacttatagcaacactactggtggacaaagatgaatattgaaattgcacgctatgtggctaagtgtgacacttgcagacgtgtcaggccatacacatgaaaactgctggtccattacaatccttgccaatcccaacatggaaatgggaagacatcactatggac

SEQ ID NO: 57734 - DNA, 434 bp, Zea mays
  unsure (1)..(434): unsure at all n locations
agctttataaaattgtttaaaatggtagaataattctataaatatgagaccaattttcttagaaccctaatttcctatactatttaataaaaataagtttgtgatttttagtggaagtaagaaattttagagtaattaaagtagttaaaagtcttggttatagatttttagaaaataattggtaagtcctaaaatgcccaaaatatttatgagtgttatacaatatttagaagccttgggtaggatttgaattgatttggaccttgtttgatcaccaaaccccaaaacaccccccctgccctatgaactcctttaccgactccggaaaccctaagttcccggaactccgtgaaggaaagttgtattcaagacataaataataagtntatactatctttgcatcctcatgagcattccatggcatccattcttat

SEQ ID NO: 57735 - DNA, 110 bp, Zea mays
taccctattagtcagacatatggacaacaacctcaattgtgacaaaagcctcgacttcctgcgtcatgactatattctgagaaatacactatatgatgctgctttttttc

SEQ ID NO: 57736 - DNA, 242 bp, Zea mays
gagaacacgtgataggtgttactaatgtttctttcgaaaaagaaaaccttatgcagcttgtccagcatgtaaacatgggggaagctctcatcatgccaaaaatgggatgacaacctcaaaacccctggaggtacttcataaggaccttttccgacccgtcggctatttaaaccttagaggaagtaagggtgggcttgttataggtgaagagttttcccgcatcacttgggtattctttttgc

SEQ ID NO: 57737 - DNA, 462 bp, Zea mays
  unsure (1)..(462): unsure at all n locations
acgcgatacaaccttcattggggaaactttcaagtagatatatatctcccacgagaaagtataaggggtgtcgtcgtcggtctgcataactcttctgtcgagcttgagctntcttcaagttacgaattattctttgaactctttcttcggtctctttcaccatattatgcctaaagaagtacctttcaccaggttcagacccaattagcggagtacgacatcgtcgtccatataaagcttcaaagggtgccatctcaatgctttcttgatagctattattatatgaaaattccgctaacgacaaacattcatcccatttttgtggaagatctagaacacacgcccgtagcatatcttcaagtatttggttcactctctcagtctgtccactggtttgaggatgatangccgaactatggagcaacttaatacctacggatttgtgaagtgctttccaaaact

SEQ ID NO: 57738 - DNA, 415 bp, Zea mays
agcttctaaagggagagtacattgtgggactattatatgttcattttgagaaagacagagtttgttgcgcatgtcaagcaggaaagcaagttgtgcccaccatccacacaagaacatcatgacaacggataggccactggagttactccacatggatctattcggcccgatagcttatataagcattggcaggagtaagtattgtcttgttattgtggatgattattctcgcttcacttgggtattctttttgcaggaaaaatcatagacccaagagactttaaagggattcttgagacgggctcaaaatgagttcggattgagaatcataaagaatagaagcgacaatgggacatagttcaagaactctcaaattgaaggctttcttgaggaagaggggatcaaacatgagttc

SEQ ID NO: 57739 - DNA, 463 bp, Zea mays
gctttagctcttgacaataaaatacttcacccagtttaaacatatatgctagaatgaatggttgagaagttaaactatgtatgaagcaaggttaatacatggacatgtttgctcttccttttatacaagatatgcacagaaaggaagatttatgtacaagttaaaatgtgaggaagttgttttacccttttgtaccttcgcatacagatgctctcttcattgtgcttgcttaagacctatacttaagacaatatatggaaatatttcgcacaagagagagttctacaactagtgatccttttctaagtcaatggttttagatatcaagtagatcacaaattgcataaatatatcatgaattcttctttttaacttagtgcatatcaagatagatgtcgattggatttaaattaaaatacatgacgcactaagaagcataagtgataattgaagtattcaatga

SEQ ID NO: 57740 - DNA, 440 bp, Zea mays
  unsure (1)..(440): unsure at all n locations
ggacctctaagncacctgagcatgaagcttctaagggagaacacattttaggacttacatatgttcttttngagaaaaacaggagttgtagcgcatgccaagcaaggaagcaagttggtgcccatcatccacacaagaacatcatgacgaccgacaggccgcttgagctacttcacatggatctatatcgcccgattgcttacataagcatcggcgggagtaagtattgtctcgtaatagtggatgattattctcgcttcacttgggtattctttttacaggaaaaatctcaaacctaaaagaccttaaagggattcctgaaacgagctcaaaatgagttcggcttaaggatcaagaagatcaaaagcgacaacgggacggagtcaaaaactctcaattgaaggtttcttgagaggagggcataagcatgagtctcttct

SEQ ID NO: 57741 - DNA, 418 bp, Zea mays
actctttggccaaaatagtgctgccatgttttaagcgtacggaccaaagcatacaattatttgtcatacacagaataatttaattgagcacctcccaatttttcacttaaatatgctatagggtttccttgttgcattaaaactcctcctattccaatcccactagcatcacattctacttataaagttttagtgagatcaggaagaataagtacacgtgcttcagtcaaatgtttcttcaattcttgaaaagcatcttcttgtgagttttctcatttaaattcaacacctttctttgtcaattcatttaaaggggaagtgatggtactgagatcttgcacaaatcttctataaaaactagctagaccatgaagaattcttacttgacttacattcgttagagcttgccaatccttga

SEQ ID NO: 57742 - DNA, 426 bp, Zea mays
taacttgcttttgaataaaaagattgttattttattctcttccgcacttcttcatcttcgatggtctgtaatgtctacaagatgggtaagacgttctctggtaggtaaggaaagataccgcacttgtctagtagtcaggggcacctacagggttgtctaaagtccgtcggacaacgacaactgtaagtgggcctcaatacttgggaggctctgtcacatttaggattaccttgcaaggataaaaactctattcgaatcgtctgcttctcgcagctaatgagacttcttgatccatgctgctacattgagtaataagtggaaatgagttgattggcacaagatgttgattgataaatgtttgataccatgtatgaatagctaggtacacatcctagtaaaaagatcatactcaaacttgaaaagcta

SEQ ID NO: 57743 - DNA, 304 bp, Zea mays
atggctcacgataacgagggttacattttataccctgccggctatcccgagcacaaaattaggagaattcactctaggaagtctcactctggctctcatcatgcttttatgtataagagtgaggcatcttgttttaggcaatccactcatgctaaattgcctaagaagaaaactcctattgcatcaaatgaacctaatatttcatttaagacttttgatgcatcttatgttttagctaacaaatcaggcaaattagttgtcaaatatgttgggggcaaacacaacgggtcaaagacttgtgttt

SEQ ID NO: 57744 - DNA, 415 bp, Zea mays
agctctggggcagcaacaaagatcttttctttctccatcgccaaggggcagaggcgcctccggcttctgtggaaggtttggagatcacccaacaaaaatttactgcctattctcgtggttgaagacaagaggcgcatactcaccatggatgttgacatcgttaccactccagcaagcagaaagagatagcactaagcagcagcgcaacaaatgcagccgaagcaggacatgcatactgcttcgtatcattcgccttacattctataatatgtatgcaaccaccctgcagcttctgtcgctttggcaagccaaccccaaacatcttggctagagtcttcaccgccaccaccaacacaaagaggtcatcagccagaacggagtcagcgctataaccttcagcgggacttcatagagg

SEQ ID NO: 57745 - DNA, 383 bp, Zea mays
  unsure (1)..(383): unsure at all n locations
accgaggactcccccaccggataagcgctttcttgctcgcccgagttcaaaaccccaccggcgcatgtggaccaggtaagtctctgcgccattttccgattcaatgcacagatagcctctacataaccccgtgaagctcatcgtgccatttgattgaactagatcgccgtggtttagcatgaacacccgnccgctgacgagatcacccgcctgcgcacgtggaccggacgatttcggccacctctgccgttgagccatacaccgttgtgaccgtcaggacctcccggagccgaccccgcccctcgtcggacctctctcgccgacggtaagccgcgcccgccttttctttttcgccgatactggataaacctanggagggaccg

SEQ ID NO: 57746 - DNA, 370 bp, Zea mays
  unsure (1)..(370): unsure at all n locations
ttatcatccgaagcctatgctcttatgtgaggacataacagagcagaaggtgctgttaagctctcaattatccgaagagcatgagaaaaccttgataaggtttttgttcaacaacaaagatgttattgcatggtcagctaatgatctctgcggagtaaatagggatgttattgaacattcgcttaatgttgatccatcctttatagccagaaaacagaggcttctgaaaatgtcatatgataaggccgaatgtgctcgtaaccaagtcaaaagactcctcagtgcatgagtcatcatagaagtaaagtacccacaatggctagctaataccgctatggtaaaaaacgctaatggcangtggtgaatgtgt

SEQ ID NO: 57747 - DNA, 393 bp, Zea mays
cagcttataacaggaggatagaagcttgatctctaccatatgtcataatacaaggggaagtatacaagcggggggtaagttccccgttactcaagcgctcatccagagccgaaggcatagaaatgatgaaggaaatacacgcaggcctgtgtggatctcacattggatctaagcctttgctcggaaaagattatcgacaaggattttattggccaaaggcatcttctgatgcagcggaattagttcacaagtgcgaaggctgtcagaaatgtgcaagagatcaaaaacaaccttcgtctttaactcaattaatacaacccacttggacgatgcaaaggtggggccctgatttgctaaggtcattaccaccaccacaggggaacttaagatatg

SEQ ID NO: 57748 - DNA, 275 bp, Zea mays
agttagatgccaatatcatatgcctgaagaggattggcgaaaattatcttattgacgcaagcaatgtaaacacgttcgtgaatcatatgaaaaggcgagtcatgttctttgatgcgacgaatgggaatagaaacttcacttatgccaacgtgcgatatattggtggacctatgagtgtctaatcacctgtgactcatggtccgttagataggtgcacagtcacacataaaaataaccgcgtttggtcgtcactagtattcaatacttgcgatcaa

SEQ ID NO: 57749 - DNA, 418 bp, Zea mays
agcttgtgaaggttcttcatccccacatgtgctaagcggcgatgccacagccaacccatgctagtcttagcaattaagcatgcatctagaccggcctcttcttttgcaaaatcaactaagtagagcttgccgtctaatacacccttaaaagctagtgaaccatcacttcttctaaagacagacacatctacatttgtaaatagacagttatatcccatatgacataattgactaacagatagcaaattatatccaagactctccactaaaaacacattagagatagaatgcttattggagattgcaattttacctagcccttttaccttgccttgattcccatcaccgaatataattgaatcttgggaacccttattcttgacgtaggaggtgaacatcttcttctcccccgtcatat

SEQ ID NO: 57750 - DNA, 426 bp, Zea mays
  unsure (1)..(426): unsure at all n locations
tctaagggagaacacgtgataggtctaaccaatgttcatttctaaaaagatagaccttgtgcagcttgtcaagcacgtaaacaagtgggaggagcacatcacagcaagaatgtgatgaccacgtcaagacctctggagctgctgcatatggacctcttctgacccgtcgcctatctgagcataagaggaagtaagtatggtctagttatagntgatgacttttcccgcttcacttgggtgttctttttgcacgataagtctgagacccaagggaccctcaagcgctttctaaggagagctcacaatgagattgagctcaaggtaaagaagataagaagcgacaacgggtccgaattcaagaatcttcaagtggaggagatccttgaggaggaggggatcaagcacgagatcttcgctccctacaca

SEQ ID NO: 57751 - DNA, 424 bp, Zea mays
tagcttataatatacaacattctatttatttctattatttgcggcgggcaatttaaccaccaaaatcatttatgaaaaggtggtggcctatttcccttttaatctccccctttttggtgattgatgcccacaccaaccaaagaaaatattaaagtgccgaattgagctactttgcataaagtaagtgcaaaagttgcttggagtgaaaccaataattatttctactagatatgcatggatggctttcttcttattaaacattttggaccacgcttgcaccacatgttttggttttgcaaactcttttggaaattctttttcaaagacttttgcaaatagtcaaaggtatatgaaaaagattttgagaagcattttcaagatttgaatttttctacccctgtttcaaatgcttttcctttgacta

SEQ ID NO: 57752 - DNA, 393 bp, Zea mays
tgtgcttatgccgccggtatcatatttgcgaacacatatatataaacagcatggaaaccgacgctggaaagagagcatgaagtccaactgtcaaggctttggagtttgggcacaaagaattccacgccatgcaagcctaagactgactccaatgcatgcccctttccctcccctacgctgatcctgttcatcgtattggggctacagtctcccccttcctcgcgtagcggcgagcgctaccatcttccctttctcgcgacactcttctctctcacgccagatgcaggggttcactgtagccgccccctcgcctgctttgcgcggaaggagccgcccgcgccagacaccgtaaacttctcgctccacctcgctccgtctcgacccgtacgcgga

SEQ ID NO: 57753 - DNA, 403 bp, Zea mays
cagcttatgctgcggaggcttgtcatttgtgtctacattgagcgaacgcccgaagacacctctgttgacaccgcaaaggtcataggctgacccgtgaaaaacatccttggtattaaatacgaacttcaacaaaggcttctcctgtcatcagataattgggatcccaacaacactttctgactggctatatctctccacaaaaacatgggctttggttgaactgatgaaacagcccttgcctctttaatgcttatattgatgaagagctctggcttcatctatgttaaggatggcattcgaatctgctcagctaccttcggatctccggcaagctcttggcttccatgcataaagataggcacctggtcataaagtatcttcatgcaaagatatcgcggaagga

SEQ ID NO: 57754 - DNA, 278 bp, Zea mays
catgcacgctggcttacttggtaagatgaccaaggcttctcttttttggtttaccggagaggacgccattttcaccgccactcatatatgcggatgtgtgcggacctttgccttttacaactacgggattattccaatacttcctcacctcctctgctgaatttagtagagctcggtagtgctactttaagaaacacaaatctcaatccttattgagtgtaaacagtttcatatttacttagaaaatccgtgtggcgttattttattaactttttcag

SEQ ID NO: 57755 - DNA, 452 bp, Zea mays
  unsure (1)..(452): unsure at all n locations
cgcacacatagctcntttaaatacctctgagcctaactgttttatatgctatgactaatgcgannccaagactatttcaaaccacgtcatggtatattgtaagggaagtggagtcttcggcgaaacaaaggctatcactccgtaactcatgcttcgccatcactacgagcaactctctattccttgggagaaatgagcatcaacgaagaggactctattcctgcgggagagagtaaaagcttaaaagcaaaaggaccggacctcgtctctggataatcttaactcatttacttatgaccaaaggggaggaacatacttcaagggctctaatgataccgtttatggcgactcatgccaataagggcgagaaatgagcccaaagcaaaacgaccgcaccaccaccaaatgagcctcaagcaaaaggaccgctccaccaccacccatctcaaaac

SEQ ID NO: 57756 - DNA, 294 bp, Zea mays
atggctcaccaagctcgctgattttcctcgagccttctatcatgcactcaaaacttacaaaatgcccgataacttcctcgggggtcattttagtatatctaggaataccaccaaacaattgaaccttagtgggatttaaaaaaatgagaaaacctaaaataacatttaccactttctgggcctcccacttcttgctcccgagggtgcgcacctagtttaccaaagtcttgagcccgctagacatgtgttgtggcaccctccctatgttgagccggaacccacccagctccccct

SEQ ID NO: 57757 - DNA, 394 bp, Zea mays
aactcaagcttgaagccatggtaagtagcataggccaataatatacgaattgtctcttgtctatctacgggtgcataggtttcaccgagaaccaaacattcgacttgggaatatcccttggccacaagacgagctttgttccttgtcaccacaccatgttcgtcttgcttgttgcggaacacccatttggctcctacaatattttgattatgacgtggaactaaatgccatacctcattcctattgaagttgttgagctcctcttgcatcgccaccacccaatccgaatcttgaagtgcttcctctatcctgtgtggctcaatagaggaaacaaaagagtaatgctcacaaaaatgtgcaacccgagatctagtggttacccccttatgaatgt

SEQ ID NO: 57758 - DNA, 390 bp, Zea mays
agcttgagcttggcctatctgcaatgacgattgttctttctttcttacagccttgcttataacagtttgaagggttgtatatttctatttctgcatttactgatttttgttaagcgaattttcggcaagcgatttgggggaatacttattaatatttggatatttctttgttgtcagggtcttatcctcatcaaagctttgaaagtccagaaggaagaagaaaatgaaaagccctcagatagcctttgggaacttgcgtcggaagttataacgcttaagaatgaaactcttgagaaggataaaatcctgctctccttggttgagaagttaaaatctaacgaagctagactatctaaccttttcgaagcagatcagaaaattaaagagttt

SEQ ID NO: 57759 - DNA, 331 bp, Zea mays
aacattggggcttggtgccgcgcgcaaagaaaatattgtgtgaaccactaaaaaatgactatggagtggtgacaacgaacaatgctcgactatgttgcaaatgctatgtccatgttgcacatttgaactttttggagacatttgctcctgcagctaggttagagtcaattcccatgttattggcctatgttgtttcaccattattttaagctttatcaaatggatgtaaagagtgccttcctcaatggaccaaccaacgaggaagtgtatgtggagcagctacatggctttgatgatgacatgtatctcaaccatgtgtataaactctcta

SEQ ID NO: 57760 - DNA, 440 bp, Zea mays
  unsure (1)..(440): unsure at all n locations
ggaccttaagtcacctgcngcatgcaagctttggaagattacgacttcattttcttctggagtatgcgtanncctttccccgccatctgccctcacaataaacatgtctcgaaaataccttcccctcatggtatcaagatgactctggttgaagctcgattttcccaaaactgtgtgacttggtcgccacggtcggtcttcggagtcctcaccaccactatctgcatcataattgtcactgtcaccagcatcttcagataaaccctccaaaatctccctagtaatcctctctgtattggtctttgacattgattgaagaaagccagacgcatctcctcagaaaggctcagcttcgaatcagcaacagctttcttatcctcagacatcttcccaaacgctgagaaagtgctctacaaaccgaagctttaaaattaaagaag

SEQ ID NO: 57761 - DNA, 362 bp, Zea mays
  unsure (1)..(362): unsure at all n locations
taagattttttatatgcgtttgaagtgtgaagtctgaatctgttcaaatctgaacagcaaagcctttctagtgtcttttaaccatgatacactttaaatcgacctgagttgtttataattgatttgtagacaatttaattatctttccagaaagtttaagatcaaatgatttggatgtctgagtctctagttatgaatatttgaaggcataagtctgaatctgcccaaatctgaataaagatgtcgtttatcactatntaaccttattaagtgtctaatcaccttgagatgataataccaaagttgtagagaacttcttagacttttcagaagtatttgatcattatttctatatgaatatc

SEQ ID NO: 57762 - DNA, 345 bp, Zea mays
tatcttgggttttaggcgtgaatgccattatactggtgtacacgctgaggtgagcggtaccggtgctgagtccccacaggagcgggggaaccaccatcccagtgacgacgtttcgcacgctcagcccccagcagggcgatcttagcacgagccctactcagcttgtctagtgcatggtccaactccgtgtttagcacggcggctaaggatgactgtgctgctcaacctaagattgccctcaccgacaggtgagacaatcactcctcctgtgctgtcagatggactgtgggggtaatactttatgtcaagaccaataactgccccaaccaaaaccgaacagtaatg

SEQ ID NO: 57763 - DNA, 428 bp, Zea mays
aactcacaaaggcaaagcattatataatttattggtacagtgcgaggctggagaacaatgcggaggagcttcatgagtccaaggagagatgctatgagaaatccttggattgcgccaagaaactgaaagacaactctgccaaggtgggtgcatactcattggagcaaaagtttattctaggtgatcccgaatgagtcattgaatggatcggcgaagagagtgaagcttttgaagaaattcttatcgaccgcggggatatttgtgccttcgctagtgttcgaggggttgcagtgattctggagaaaactggttgtgaacatgttaaagctgcaacccatgcagaagccgtcttctccatatacaacgccaatgagccatctgcagaagctactttgataggtgtgaaaatttattctaatgtttggatg

SEQ ID NO: 57764 - DNA, 354 bp, Zea mays
aactcagcttgtcgctatacaccctctaaagctagtgaactattatatcttctaatgacagacacatctacatttgttaacaaacagttatatcccatattgcataattgactaacagatagcaaattatatccaagagactctactaaaaacacattagagatagagtgctcctttgagaatgcaattttacctaaccctcttaccttgccttgattcccatcaccgaatattaatgaatcttgggaatcattgtttatgacgtacgaagtgaacatattcttctcccccgtcatatggattgtgcaaccgctggaaataatccagcatgaaccccccgatgcataaacctgc

SEQ ID NO: 57765 - DNA, 333 bp, Zea mays
aggctcgtctaacctagttgagataaccgccaacaaagcgagtgaaaaagcttaactccgggcaaacttgacaagtattagttttaagctattagcacttaaaaaatcttacttgctatgcaaatggtgggtcttgaaatatgcatgaggtactgcactaagggggagtattcaacactcagatcactcatgaaaacccctagcgaagccaaaatgcaaatttcatcatttgcctattttctctaaaaattatctagcctatggcaaaataattttgaatagtatatgagggtgcccattcctgtcccaacaagtggtattttggtgtgatat

SEQ ID NO: 57766 - DNA, 402 bp, Zea mays
  unsure (1)..(402): unsure at all n locations
ctcagcttacctttgcccacaacctcagacaacgggtgttcctactcttcantgtgtactatgagccaccaagtcgtggtagcatcatctggaggatacgacaccaccatggccaaatctttcaccatatctctcgaaggcccaacccttatatggtacacgaggctggcgccattgtcaatcgactcatgtgaagaacttcgcgaaagtttttattaaaattttaagggtacataccaaacacaaacgctctggcagaaatatcactctgtatggagcatgagaaagaaacccttcgagagtactacatgagatttctcttgttgaatcatagctgccttctgttgattaccatatagctattcactatgcaatcagcgaccttcgtgccgagtgtttata

SEQ ID NO: 57767 - DNA, 391 bp, Zea mays
tagcgcatgctacgcacgaaagcaagttggtacccaccattcacacaagaacatcatgacgacttacaggccgctcgagccactccacatggatttattcgtcccgatcgcttacataagcatcggcaggagtaagtactctctaattattgtggatggctattctcgcctcacttgggtattctttttgcaggaaaaatcacaaacccaagagactttaaaaggattcttgagacgggcacaaaatgagttctgatttagaatcaagaagataacaagcgataatgggacggagctcacgaactctcaaattgtaggctttctttaggaggagggcattaagcatgagttctcttctcctacacacctaacaaatggtgtagtgggagga

SEQ ID NO: 57768 - DNA, 158 bp, Zea mays
caccaagccacaaaaaaaccaagaaagcgcgtaaactaagagaacacaagacactacaaaaggcaccccggtataacgcaccggacagtcctgcccaccaacgaactccaaaaaaaacgttgccccctccagaaaaagggaggcccttcaatataaaa

SEQ ID NO: 57769 - DNA, 416 bp, Zea mays
gcagctgtcgcccctagctatcctttattgtggacttttattctttacccagctctaaagccaaggcaacccactgttttgacgaattctggaaattttaaaacactgtcataggtcatacctacactaaaaaccataaagagaaattaaaatgaggaataaaaatgaataacggtaattagtgccatcctaaaacccttgtaatttgtccactgaaatgtataaaggccatacaagtccactatgttatcttcaatggaaaccctaaaactaacaagtaataagtataaaccacttgtagtctctcatgactaagaaaccctaagtcacttcttgacgtagttctttctagcataatggtattaaatcttgcataatcatgacatacatgttcattgctatttgatagactgtaa

SEQ ID NO: 57770 - DNA, 338 bp, Zea mays
tcaatatatcttcagttgcttgaagctcaaagatctatttctcaatagcagccgacagctcctttattctgctttctaaaatttcaattataactccctgtgtcttgactcccaaatcttgctgcattattaaagctttgctccacagcatactctgcacgaacacaaccttcgctagacatgtcttccttattgaaaacacataaaagttatcggaaaagtagttcaccctgaaattggaataaaataaactaccaacgatatgttgtcgtcggtagcggctaatgtctgtctatatcttcctgaaaccgacactctttgacagagtaccgataact

SEQ ID NO: 57771 - DNA, 354 bp, Zea mays
cttaccacgccgcgccctggattcttcccggcgggacccgcactggacctggccggcgaggactactcaagctaacgggcggagagtctctacggacctaaggcgacctaagaacggccctcaatttcgaacggtgctccaagaaaatgctctgcccacgctcaaggcggaaaccggggcgtcaagctcacgttcccgtacaaccatggccggactgagcaaacggacgccaccgagagcatcacaagcatgcagaggcacgaaaacagtatacgaattggatggcgactcaccaaaacgagctggccacgggagggctagttatcacggtgcggctgatggaattggggaaac

SEQ ID NO: 57772 - DNA, 260 bp, Zea mays
cacaccgacttcaactatccgaaaccctgtctggtgacataatgtgttccacgtgtctcaaatgaagaaatgtcctccggctccagatcgaaccattgaagtgacacatgtttgtcttgaaccatactctgcctattctgaacatcctattccagtctaggatcaaaagacagggttacccacagaaaactcttcagttttataatatacagcggaaccaacattctgaagatgaagctacttgggaaactcaagacttc

SEQ ID NO: 57773 - DNA, 384 bp, Zea mays
  unsure (1)..(384): unsure at all n locations
nagctaggctaagagggaattggtgttttccttctgcacttctttcctttttgaccgcttaacaatccagtatccacatgaattcttgtgtttctggttcctgttccatggattatgctctatggcacgtgctcaatacaaaatacgctatatgcttactgtgtggctgcttttcgcaagcatgaacaatcctgtgtgaagtgccattcggcttcatatgccaactttatctgatgaaactaaaaccgtgaatttgggacgccggcaccaaaggtggagcaagtgcgcgatacgattagctttgggataccaactaaaccatgagcctgcangaacacattggtgatctttcgtcgctaaacccccatgtacatggcttttttg

SEQ ID NO: 57774 - DNA, 360 bp, Zea mays
tcatctctatatcacgcagccaatcatctgtctcaattggattgtctgaacctacaaacttgggtggctgcatgccgatgaaatctgcaatcttgctcccattgccattgtgatgcactgcaagtctattgttgccaacgttttcttgagcttgagctgtgagggttgtgacaagggcttgaacgagatggttctgctgctgcaacatggctgccaaataaatgggtgctggtgcaccgtgaggcaatggcggtatgtgtccaattgctggtgcttctacagcttgcgtctgagcgcctacgattacctggttgacctctttcacatcttccagagcattgagtccatggactctgctct

SEQ ID NO: 57775 - DNA, 431 bp, Zea mays
  unsure (1)..(431): unsure at all n locations
agctttaactctcgcgagaccttgtcccatttctttcttaccatggngaattcattatcggatgtgatattctatgcatatttactttatttgttctcttgtatggtgtactgtttgtttcctaatttgaaaggatggatgtatgtgtgcttgcaatctcataaaaaacgatccggttgaagagcccgaggaactcgcaagagaagcccctgagcagcagtcggttggtggaggcaagtgtaccttgacctatctctgtcctattcattctttaattcacctcccgcattatacatgtatacttaaggattgactagcttttgttatccatatccttgtttacctttctgggttggattattattgtttagctttatgctattgcttcaactctaatcaatgaacatgataagattatctatgatacgctg

SEQ ID NO: 57776 - DNA, 162 bp, Zea mays
gtttttgaggacctaccgaagaccaaggtcacccaacagtagcccctcacagtattagattggtttctgtaacaaattcatactgcaaaatgaacgaaggcctttatccgaaggttcgaaaaaacaccttcccttcgctagaatagcgagacattctatatt

SEQ ID NO: 57777 - DNA, 348 bp, Zea mays
  unsure (1)..(348): unsure at all n locations
gatgccactgtggcccttattcttttgttntactaacggncgacgacgcagatcggagttcacgcgccacagggcgactctctctctcttctgaatacctgagtgctcaaaggtttcgcaatgtgcttggatggctagggtgaggcggcagcaacttcttatatactgtccgcaaggaaagactgctacagccgctcatgccaccggatcccgaacgaatcgtccagaaattcggagtccattgcgtggttagttgctaaggctttctccggtaaagaataacgtgcgagtccactgttagaccattgccgcaagaaaggatgccagcacaacagctatcgaccacct

SEQ ID NO: 57778 - DNA, 285 bp, Zea mays
gcttctaaaggagaaacgtgaaagttttacttcgtactattcgaaaaagaagaccttggcagcttgtcagcaggtaaacaggggggaagagcgcatcacagcaagaatgtgatgaccacctcaagacccccggagctgctgcatatggacctcttcggacccgtcgcctatctgagcatatggggaagaaagaatgggctaagtattgtcgatgacctttcccgcttcactggggggttcttttcgcaggataaggctgaaacccaagggaccctcaagcgcttc

SEQ ID NO: 57779 - DNA, 441 bp, Zea mays
  unsure (1)..(441): unsure at all n locations
gctttatcaaatggacgtgaatagtgtcttcctcaacggaccaattatngaatatgtctatgtngagcaacctcccggctttgaagacagtgagtatcctaaccatgtttataggctctctaaggcgctctatgggctcaagcaagccccaagagcatggtatgaatgcctaagagatttccttatttctaatggcttcaaagatggcaaggccgatcctacactctctactaaaactcttgaaaatgacttgtttgtatgccaaatatatgttgatgatattatatttgggtctactaacgagtctacatgtgaggagtttagtacgattatgacacacaaattccagatgtctatgatgtgggagttgaagtatctcttacgaattcaagtgaggcaactccaagaaggcaccttcattagccatacgaagtacactca

SEQ ID NO: 57780 - DNA, 435 bp, Zea mays
  unsure (1)..(435): unsure at all n locations
ctatcaaatggacgtgaagagagccttcctcaatttgttattatatgttgagggccatgntgagcaacctcccggctttgaagatagtgagtaccctaactatgtgtataaactctctaaggcgctttatgggctcaagcaagccctaagagcatggtatgaatgccttatagattttcttatcactaatggattcanagtcggaaagggcggtcctactttattcactaaaactcttgaaaaagacttgcttgtatgccaaatttatgctgatgatattatatttgggtctactaatgagtctacatgtgaagagtttagtaggatcatgacacacaaattccagatgtctatgatgggggagttgaagtatttcttatgatttcaagtgaagcaactccaagacggcaccttcatacgtccaaatgaagatac

SEQ ID NO: 57781 - DNA, 420 bp, Zea mays
  unsure (1)..(420): unsure at all n locations
agctttaacccccccgcactcgcgttatattcttttctgttncctttctaaccataatgaatgcggtatctaatgtcatacttgatgcatattcactttatttgttcccttgtatgatgtactgtttgtttctcaatttgaatggatgaatgtatgtatgcttgcaatcgcatatagaacgatccggtcgaagagcccgatgagctcgcatgagaagcccctgtacagcattcgtttggtggaggcaagtgtcccttgacctatctatgtcctattcattatttaattcacctcccgctttacacatttatgcctaaggattgactagcttttgtgatccatgtccttgttcacctatatgggttggattattactgtttagctttattctatcgctcaactattatcaatgaacatgat

SEQ ID NO: 57782 - DNA, 457 bp, Zea mays
  unsure (1)..(457): unsure at all n locations
tcaagcttctacacggagaacacaatgtgtgactaacaaatgttatttttataattacaggggttgtagcgcatgtcaagcaggaaagcaagttggtgctcaccatccacacaagaacatcatgactacggacaggccactggaactactccacatggatctattcggcctgatagcttacataagcatcggcgggagtaagtactgtctagtaattgtggatgattgttctcgctccacttgggtgttctttttacaggaaaaatctcaaacccaagagactttgaagggattcttgagacgggctcaaaatgagttctgattgagaatcaaacagataagaagcggcaatgggacggagttaaagaactcacacatataacgttttcttgaggacgagggaagtaagcatgagttctcttcttctacacacctcacanaatagtgtagtggagag

SEQ ID NO: 57783 - DNA, 417 bp, Zea mays
  unsure (1)..(417): unsure at all n locations
agcttaccctccgaaagatgntgtatctttttatgggatcgagcggcgagatgaccacacaaaagtgcaggttgattctgcgtttgacaacttcttggaatatccactccctattcctatcgctggcggtgatatgttcactcttggcgaagccaaaaattcatttgtgttatggcctaagtcaagcatacaactagcagaggtacactttactaacttcaacctgatgaaagtattattggtattcacaacttggttaatggcatgtacttggttccgacttttacataggaaacaacagttcatgcaaagcctcaacaagtcccagacacatctgctcaagtactccatcacacacctgaaaaggatataatgccaacaccaacaatggataccgagaatatatatgtcacacat

SEQ ID NO: 57784 - DNA, 352 bp, Zea mays
  unsure (1)..(352): unsure at all n locations
tctaaagggagaacacactttatgactaacatatgttctttttgtgaaacacaggatatgtagcgcatgccaagcagggaagcaagatggaattcatcatccacacaagaacatcatgacgaccgacaggccgcttgagctacttaacatggatctatttggcccgatcgtttatataagcaacgacgggagtaagaacagtcagaataaagtggaggaatatactcgcttcactcgggtattctttntacaataaaaatctcaaacccaagagaccttaaagagattcttaagatgggcgtcaaatgagttcggattgagaatcaataagattagaaacgaccatggaacc

SEQ ID NO: 57785 - DNA, 231 bp, Zea mays
cagctgcgcatgcaacttttagaacagctagaatttatttttattggtcaggcaaccactttatctatgttcaaaaaataacaactctaaggccacgggaacaaaatatcctccaaaagggtttttaagacagcattgttcgaccgcttctcaaataaaatttttaagaagggtgggtgctcaaccccactaaaaaaagtttctaaatgtgccgtgtatactctttctcta

SEQ ID NO: 57786 - DNA, 313 bp, Zea mays
cttggaaacctcagctaaaaaagtttttttcttttagagcacctcttccaataactggcctacacaattctctttcaaacatctcgaaacaaactgatccctctgtccacagcatagagatgatgctatgtatgcaaagagcgagagtacgtatcaaaagaattggccaaaacaaaaacctgaataaaacacaactttattaccctactatcttgaccctccttagacactctcttacttcacggaacacgttatttgtgaaccccctagacttttgctttactccgcgacaacgtattttctgaccccttag

SEQ ID NO: 57787 - DNA, 297 bp, Zea mays
gaaagaacggacaagaatggaatgcttgggtgaaaagaatggagagtggtgaggttgtatatataacacttcaaccacttctaactggtgctccctttctaccgaccgccggcggtcctcccctggagatcaacgactaaaatcgcacggttagcatgaacggctattcaacggctatataacatttatgctctcccagatgtcaaataaatggagtcacggacggtccggtcgtgcaccccgaacggtcacgaggatgctataattcattttaccgaaccccgcaccttcgggttt

SEQ ID NO: 57788 - DNA, 358 bp, Zea mays
  unsure (1)..(358): unsure at all n locations
aagctcgcatcaacctgctgtacagaacgcattcttgtatggtgttttataataagaagactaactggagcaacctcatggctagaagatgtgtcaaaacctacgtgagtctgcaacctctctgcttagtaataaattgagctcacccaaaattcatgcatcaaacggagaaatatcaatattcttatataacacggagaatataacattatnttgcctgtctatggagatgacaatgttgctgctagttcattagagaacgccaccacatttntttatgcacgacctacaaatgcaattttctctcaaggacttacgagagctttactaatttcttggtatacaagtagcatgaaca

SEQ ID NO: 57789 - DNA, 374 bp, Zea mays
gctaacacatgcatgggctggctgtggcatccacgcttaacacatgtggggatgaagaaatctccacaagcttctaaagggagaacatgtgataggcctaaccaatgttcatttccaaaaagatagaccttgtgcagcttgtcaagcaaggaaacaactgggaggctctcatcacaccaaaaatgtgatgacaacatcaagacccctggagctgctacatatggacctcttcggacccgccgcctatctgagcatacgaggaagaaagtatgcgttagatattgctgatgacctctcccgctccacttgggtgtgcttttacaggataagattgaacccaagggagcctcaagcgctgcctaatgagagctcaa

SEQ ID NO: 57790 - DNA, 301 bp, Zea mays
acttactgaaactattaactatgccctacttcatcgtaatcggaccatacatggcaatgtgacccggttccccacactcaatacaattttattattgagagcaatcattataaaatgttgaccacttctaggaagaccccttatcatgatcatgaatatatagaatattcttacaaataacgccatgtcaccatcactctcactttcattttcttcatatcgcgatcttctttccaatgccttgagcctggcttgaagcaaaatcattttcactcttgcaactaagacagctggactctaa

SEQ ID NO: 57791 - DNA, 331 bp, Zea mays
  unsure (1)..(331): unsure at all n locations
caagcttcagcggggcaaaanaagggcatttactttcatagccgaaagctgggaacttacaacaccctgtgatataaaaagctgcaagtgggaaggagaaacaacaagcactcgcacccgctgaacagacacccgcacccgctgaacggaggaccactcggcgcccggaaggtgaatagctagaacgctccgatacactgaatggtggaccacccgacgctgggagaataataaacgttgctcggcaaccaactcaaggaaggggacttttggaccttcggcattccgaaaaccgagagaggttttcacggatcgagctcatcacgaaaaa

SEQ ID NO: 57792 - DNA, 389 bp, Zea mays
  unsure (1)..(389): unsure at all n locations
ncaagcttttaatgcttagcattgctctagaaatattatattttttgctnccacaaaacatgatgtggctaatgtgggtgggatgctttctcaaaataaaacttgatgatggatctatcaaaggccttgataggttcaacatcggaaaagatgtacctctgtcaagtaccaactttgggtttgaaatgattaagctgagaccgggcgggtgacttgcacgagaagagagtctcggtgtagtgtctccgtctgagtcgattaaagaccgtctcgatgtaggcttgttgatcgaagaccctttaactggtcacatgccttgtcatgggtaagccttgcctcgggcagactaaggcctgaataagacaacacgatatgggcgtgtagcggtg

SEQ ID NO: 57793 - DNA, 359 bp, Zea mays
aaccaactatagcctagagaactaaaaatctacacacctttgtattttctccccaagatagggagaagctctcttattatacatcttagcataaaggaacattaatagcacaagtttaatccatggaacatctaaactgggagaagatctctagtatacatctctagatagagaatgcggctgcactgttttctgcgtggtcactacatgttcgaataatcacacatgatcttgttagttatccaattaaccacaaccatagcacaagtttaatccatggaacattaatagcataaaggagtgacatcattaaccaaaggtaaagcaatatcaactaataagcgaatcataaacccaag

SEQ ID NO: 57794 - DNA, 310 bp, Zea mays
gcttggtattcttttgaaaggggtttgtgcttgctcaattgtccccttctcaagctttttcaccatattatcacggttatcttgagaaggttgagcatgacactttcccttcaaaagcgttaagctcctttttagccttccaacttcttccttgagctctttattttcttgtgtgatagaaatatcactaattcctgaaatttcttactcaatggaagattggctttcttgagagcaacatttgttaccacatgataatatagtttctacttgagtccatgtgcatatgtgaggttggtatgatttgaaa

SEQ ID NO: 57795 - DNA, 411 bp, Zea mays
  unsure (1)..(411): unsure at all n locations
tcggtatccttgctggtcccttcttcgtgagcccctggcgttcagtcagctatgaagtctgctagcgcctgagattgaattgaagatctgtgcacgtagttgatggtgaattcattgagctccgcggcccactttccaacccttacagtagcttctctgttcctcataatatcctttagaggttgtgatgagggaacaattatatggtaagcttgaaaataatgctgaagcttcctggatgccattaacacagcatacaacactctctccaattctgtgtaatttttctttgataagcttaatacttcggagacaaaatatactgggacttgctttttagttngtccttcaagcttctcctgtataagcgccacacttactgcagagtgcgaaactgtcacatacaataac

SEQ ID NO: 57796 - DNA, 419 bp, Zea mays
  unsure (1)..(419): unsure at all n locations
agcttctaaagggagaacacattttatgattttaaatgntcatnttgagaaagactgggtttgtagcgcatgccaagcaggaaagcaagttggtgcccatcatccacacaagaacatcatgatgaccgacaggccgcttgagctactccacatggatctattcggcccgaatgcttacataagcatcgacgggagtaagtattgtcttgtaataagggatgattattctcgcttcacttgggtgttctttttacaggaaaaatctcgaacccaagaaaccttaaagggattcttgagacgggctcaaaacgagttcggcttaaggatcaagaaaattagaagtgacaacgggacggagttcaagaactcttaaattgaaggcttcttgaggaggagggcatcaagcatgagttctcttc

SEQ ID NO: 57797 - DNA, 219 bp, Zea mays
catatcacaacacaggagcccctggcgtaggcgcgagaaacgtcgtgagaacatcaagcattgcttcaactcttccaaggccgttagttgactagggccccatagaaagacttcggctgactaccacacactcaacaatggtgagattccttctgctgaaccggatataaaactgatgagagatgccagccttcctgtcaatacattgggccccttttc

SEQ ID NO: 57798 - DNA, 410 bp, Zea mays
  unsure (1)..(410): unsure at all n locations
agcttatgaagattcttcatcccaacatggttctttcggcggngccagagccaacccatgttagtcttagcaattaagcaagtgtcgagttcagctctattaaaatcaactaagtatagctgaccctctaacactcccttaaaagctactgaatcatcacttcttctaaagacaataacacctaaatctgtaaaaagatagttgtaacccattttacataattgtgaaacggaaagcaagttataatctaaggaatctacaagaaaaacattggaaatagaatggtcaggagatatagcaattttaccaagtcctttgaccaaaccttgatttccatcctcgaatgtgatagctctntggggatcatggtttttctcataggaggagaacatcttcttctcccctgtcat

SEQ ID NO: 57799 - DNA, 257 bp, Zea mays
aagcgacgggtagcacaataagtgtgcgaaaaacgcctagctccatgaatttcttggagcctttgatcattaactcaaagctcacaaattttcctatcactttctccggagacattaagtcatatcctggatcaccttgaattaaatgaacttgggtgggattaataaaaacgagcgatctaagaataaccttgaccatttcatggtcatcccacttggagctcccgatgttgcgcacttggttcaccaagggtatt

SEQ ID NO: 57800 - DNA, 385 bp, Zea mays
  unsure (1)..(385): unsure at all n locations
agcttgngcattcgattgtgaattttattcttatttcaccttttgaggggtcaaacagtataattttcatagccatacaccacagtgtctcatttccagctataattcgcttataatcatattaaacagggccatggtgtgttgtacaccaatgaggtagtttttttctttttctttcttttgttaaaagatccaagaggtctaagaaaatgggcggtgacctctaatttctcatcacaagccctggcaaaagaagagagagcaacataatcagcagtagaaagcgacctgtacagtaattgagaaaaatatcatggagagatccattaaacaagaggctggagacgcttttcattccattcaaagtaaaatgagccttcttatt

SEQ ID NO: 57801 - DNA, 422 bp, Zea mays
  unsure (1)..(422): unsure at all n locations
cgctctntctaagcatacatggtaacaaccattttatacaattaacaagttatctcaggcaaagcctcatttcacttcttactcaatgtagtacaacgcgtcaagcagtctcattatctgcgagaagcacacgatttgaatcgagttataaaaccttgcaaggtaaacctaaacacacgatatgtaggggtactccgtacccacacacatcaaccgtccccaacgattacccgttcgcggccaggcctcaccgccttggcatacaatgcttcactgaccccggctgccgccgtgcagtgatcgcacttgtacccaccatagctaccatgggagacccactctcacgtcacgtgaggcgtaaaagccgcgcccggctatactcatgtactacgtttaccggttaccatatttactgacatgtg

SEQ ID NO: 57802 - DNA, 390 bp, Zea mays
gagatctatttaatgcgttatagaacaattcggtatataatatgaggagaaaagtttgtcctgctggccacacccacaataaataactattgttataaaatctctctcaaaattataatacctaaaaatggtgcataaatcgatacccaatttcagaaccgtatgagtaattgggtaaaccatgggcactaataaaatgagctggactatacatctctgcatataaaaaatcttgcttggcaacattggcctgatgccgcgcactttactaccaatataagcgcacacattttttctatgtgcctcaaagcacaaaacaaccagtgaatgtccttgggagcgctacaccctgatggtcattttacttgttgaactgaagacaactaatgg

SEQ ID NO: 57803 - DNA, 363 bp, Zea mays
acttactctagggaaacaggaagggcaacaagtcatttgttattataacctggcgctgcaagccgaaacaaggggggagccaccacagcagaagtgataccacttaagacactggacagctgcatttgaactcttcgacccgtcgctattgacatacgggaagaatatggctactattgtgatacttttccgcttactggggtattttaacgaaagctgaaccaaggaccctaacgttctaagaagtcaaatggttgagctcaggaaaagaaagagcaaacggtcgaataaaatttcagggagagtctgagagaggacaacacagatcgtccaccacctacaatggggtaagaaaaagaccca

SEQ ID NO: 57804 - DNA, 420 bp, Zea mays
agcttttgacaaacaaaaactctattcttctattttcaaaatctctcaagtggtagctgatccatttatcgctttggcctttattttctccccctttggcatcaagcaccaaaacgggatcaatcttggccttttaaccccattgcctcaccaaagtcttcaattaaaaacaaatggcaataagatttcatgagatgaacttggaattagttaccctttcatcggagtgcagtggaagtctttcatggtccaagtccaccttttccctttcaatcctccttcgagactaaatcaagcaatctcaagcaaatggttagtctcaaaaggtcaagttgtaacacatctccccctaaacatgtgcatcactttgcaacggacttgtgaggtcagggagtgttggacaacttgagcaccacaata

SEQ ID NO: 57805 - DNA, 390 bp, Zea mays
cacatgtcttgcccctatacatcgccacagaacggtaaaactatatgcatgctccgcaccaccaacaatatgatccgcaccttgctgctccaagcgtccatgcctcctcgctattgggtagatgctcttcatacaaccacttatcttctcaattgccttcccaccaaaactgtccgcgcctctcgtacctttgctggcctgtacaacacacctcccacatatgagcaccttcgggtttttggatgtgcttgctatccgaacctcttctccaccgcgccgcataagcttgctccccgctctactaagtgtgtttatctggggtattctcctgagcataagggttatcgctgtcttgatctatccacaaatcacgtcataacatcttgtcac

SEQ ID NO: 57806 - DNA, 291 bp, Zea mays
aatgactaagggcttccaaggaagaatccaccctctgcgtatcagatccattcataacttccgcccgagtgaccacaaaggaagccagctgcaaaagccacaacacaacttccaattcttaagacaacaacaaagctctttcaagccaccaaccctcaagggcaagggcggcatgggcttctgaggaagggttggggatcagcctaaaaaactatattgcttattctatggtgaagacaaaggccacactataaaaacatgccacgtcaccattcagaagcaaaaagagat

SEQ ID NO: 57807 - DNA, 340 bp, Zea mays
tgtggcgccctcgggcgtcttgtcgtagtcgaagcaccaagttctccacctggaggtctcgggaccgaacccctcgggcgtagtagcgtcgcagagactgctgataccgtgccgagtgtagtaaggccatgttccgagcctcttccagctggtccagtgagttttctcgggtggcctgggtgctatgttcgttgtacgcccttgttctcggggaaccgtattctaagtctgtgggcaagatagcctcggccccatagactaaaaagaacggcgtgaagcccgtggctcggcttggcgttgttcttatactctataccatcgaggggagtttcttcatcca

SEQ ID NO: 57808 - DNA, 411 bp, Zea mays
agctatgcccacaatgtcttccaaaaatatcttacaaacttcacatcacgggcagatacggtggtcttgggcactccatgtagtctcacgatttctctgaaaaacaaattaacaacatgtgaagcatcgtcgctcttgttgcatggaataaaatgagccatttttgaaaatctatcaaccacaacaaaaatagaatctctcttttttcgagtcatcgacagtcctaaaacaaaatccatgcttatgtcttcccaaggaattttaggagcgggtaaaggagtatataaaccatgagggttcaattttgacttagctctgtgacaggtaacacaacgctccaccaatctgatgacgtctctcctcatcttggccaatagaaatgatcactgagcatttcataagtcttctttt

SEQ ID NO: 57809 - DNA, 406 bp, Zea mays
tcctatgatatttttttctccccctaaaaatgtgcatttcagaaaatactagtattgtattcaaataccaaaagcacatgtgtgggtcaaagtatggagataacttatatcatactattcatggagtgcagtgtgtcatacaataaacgtgatgctcatgacatagtatgcactcatccactttctacatcttatgtttttcttatgattcccctttttttgttaattatttctccccttcttaaaagtattctaacacttagttacataatactaaaggtaatctttaatgcaaaatttcttcccctttgtcataaatcttcaaaaaggatacaaagaatataaatggtagaaattatgattaagcgagatgtgaacacccttatatggcacaaaggtaatggat

SEQ ID NO: 57810 - DNA, 402 bp, Zea mays
  unsure (1)..(402): unsure at all n locations
agcttaaacatgtttaaatctctaagggtcttcttttatttattntattaagtaattaaaactatatctacattagttcatatttaatcataaaaattagaatgtgcagacagtagatgaaaccattntatttagacagagaataattctatgaacattttgcaatttgaatcactaaatttggagttcatatgcaaaagttatgaaataaacaagtttgggaattcaaaatatgaaattaggtctaattctgtgaatatttaaaagtccagggctaaatctgcaagattacaggggcctacgcgcgaaaaccagggacggcgagcactaacaagcgggccatgggcgtcagcggcagaagggagagcgcactgaccgagcgggcccagcgccagggaactt

SEQ ID NO: 57811 - DNA, 394 bp, Zea mays
gatgcgtgcaacggctgaaggatgtgtttcattctgtcggagccatctctgcaaaaattacaccttcagctgaaaatctgcccagcacattagaatatattgaaggcgaggttgatgcccttgacgaagatattggtgggcacgccgacttctgcgccctggtagcttctcggggcacagctactgcttttctgaaggctggctgcacgcatggaaatattgtgaacagaccaaacttcagcttgtcagcatcagatctgatagatattccaagcctagcccgaagcattggaaatagattcatgacccagatctgggtaagtggcgggcgaaaaatggcacgtgacgaagctcgaagtcatcttaagtcggtaagaaacttatgtttgttact

SEQ ID NO: 57812 - DNA, 418 bp, Zea mays
agcttgcggagtgcttggaagatgacgtggttatatcttttgtgccagctccatgccacatccccggcgcgcgcagtgaggcacacaggagcggcgagattcatattgaggaggtagagccggcttggtgaccgcagcactttggcgagcagttgccgctgcgggtcgaagagacgcaggatccccttctcgatgacgaccttcaaaccctcctcatccatctgcccgaaactcacaatgttggtcgtgagccgcgggatgtaatagacgccgtcgagccggcggtgttcaccggatctgagggcgaagagcacagtgccctttccctcgatgttgaccaccgacccgtcaccaaacttgacggtgccggtcacgctgctgtcgagctcggagaagacatgacgcgaacccgtcatat

SEQ ID NO: 57813 - DNA, 451 bp, Zea mays
  unsure (1)..(451): unsure at all n locations
ttatcttcctgcattcttcagtcaccaacacagcctccatggttagtatcataaaaattccagctactcccaagatgtaaggccaacaataagaaaaattccctgtttcaaagaaaataacacaaactaaaactcgcaacgtgcacatataagaaggtactaggtccaaagtatgaagggtataacaagtgtggtttcaggataattccttaaaaacatgttccaaaacactagaaagaaacaaggcaagacaaaatgaacaccaaacaaagtcatattaaaaaagcattacagaaagttacaagctcaagttcagacagctaacctgaaaactgagttatcatcttgtgtagtgtatctgtgtagccagtcaaaatttccacacagataatcaaagatgagccatgtcctacatataanaatatatgaaaaacaatgaacatgaaagtgc

SEQ ID NO: 57814 - DNA, 419 bp, Zea mays
agcttctttcttcctccttatcctcattagttctttcgctatcatttgcattagccacacaacacaagtgggagtcgaaatgggaagacagaccttttggagaggtggattcatcgtttggactctatcgttcattttcctcttcttccttgcaagggttagtatcacaaatactaaaggaggtagaggcatcaaatgaactatcatgtttggactcattaaattttgttttaattctagtccaaatatcatgcgcatcatggatagattcattataatttgtaatgaaagcacgacaatcttctttgctaagagaatttcttaagatgtcataagctatgaagtttaagtgtatacatcttcgatcttcctccgaagcactataattagagggcattatactcttgtctataattcgc

SEQ ID NO: 57815 - DNA, 262 bp, Zea mays
caccatattaacttacgcgtttgtttgcagtatttgcaatgagtttcaagaccgcggagaacctcagaacactacgtactggggatcctgtgtccatttcattaaacagcaatgagcctgtggtgtgactataacctatgttcgagttctaagtcttaatcctgtgccctgtgcccaacacataagtgaaagaagccttggagcgtctacacagaaaccactctattataacggaacatatattcatcgcatagttaaaggg

SEQ ID NO: 57816 - DNA, 375 bp, Zea mays
gaccttaagcactgagctgcagcttttacagcctaaagaaaacgttttggtttttctaatcataggcatatgtggaccctttcgcacccagcgaagggaacgctcaaaataagcgtcagatgatgaatgtgatgagggctattcttgaaaccccttctccagtgattccaaaggaggtactcctgctatagctgatgaaggtccccaacaagctgaaaacagtggtggtccccttggtacaaccatgtcaaaaatcgatagacttattgctaacgttgaacctgggaaaaatactggggggcaattgcagcaaggactttagcatcgaacgaaaagagaactaagtaagccttttcggaagacagaagctttgat

SEQ ID NO: 57817 - DNA, 491 bp, Zea mays
  unsure (1)..(491): unsure at all n locations
tctttcttatggtactctaaatatagccttctctataatagtatttatatgtgttattgctctctaacatagtattctaatctgttntttaatcatctctttttcttcacctcataatctgaccgtattgccccttcttttttatgaccgtatctctttgatttgtggttcccataatcccatccccatacatcggagtctccattcctggctttctgcaaacgctgcacgactccctgccgtcggtctctcacctcgacgatggcctccctcctctcggctccctcttcgccgacgtagcaggggtgccgccctccttgccgccagagcaagagcaccttcctcctcgccgtcgtagtatgggcgccgccctcctcaccgctagagcagtagcgcctcccttctcgccgcatatcaggtcatggatgtatgttcctattcatcggagactgacatgttnggacaatacatacatatcaacctgagacaca

SEQ ID NO: 57818 - DNA, 385 bp, Zea mays
  unsure (1)..(385): unsure at all n locations
cagcctgcaagcttccggaggaaaggacctccgttaaatacttctttttactatttattccggaggggttttcgcctcccaataatggaataatacttcaagcactcctatattttaactctggcctggaataatatactttcctattctaaaaaaaacaagtaattataaccgctttcgcattttcctacctcccaagtattgcaatgtctgtgtgatgggtgaaaccctcttgggaaaagtaaaaaatgcagataccaaacttgtcaagtgatcaggggcacctgcagggttgtctgaaggcccatggacaatgacaactgtacgtgggcctaatgacttgngaggttctgcacaacggatatgggaaagatcctatcaaaat

SEQ ID NO: 57819 - DNA, 392 bp, Zea mays
tctttcatcctcctcatcctcatttgtgcttccactatcatattcattattcacacaacatatgcgggaatcgaaactggaagacaaaccttatggagaggtggatacattgatcggtctccatcgtacattttcttcttccttcacaggggtagttttacaaggaccaaatgaagtagaagcacaaaatgaaccatcatgtttggactcatgaaaatcagtttaaatctactctaaaatcatgcgcatcacgaatatgttcataataattcattatgaaggcatgataatcttccttgctaagagaattaactacgatgtcaaaagctatatagtttaagcgtatacatccttgatcttccttggaagtatttttcttatcataactatga

SEQ ID NO: 57820 - DNA, 424 bp, Zea mays
gcagcatgcaagcttatgactgggttggaagagcttctatttatttcagatttagctgtgcagtgtcatcggaaatcaacttctataatcggcggttcactgggctgtattgttgggtgcgtgtgcgaagaaccgtgcagcagcagacgacgccttcgtaccccaagccccaacagaactgagaaagggggcgtgagtgaaaaaacctgagcgacgaatcgttatgtgtgtatccgggggcatgctggataattttattgcaacttcacgctgggggtatgaaaatattgtttttgaagaattctttgaagagcttcggaaattttatgaaattgacctaaaggtctagtttttttttttaagatagagctcacgaatttgaacttggttggatagaaaaaactcgatcacaaatgaaattctt

SEQ ID NO: 57821 - DNA, 492 bp, Zea mays
  unsure (1)..(492): unsure at all n locations
gacatataaatctcatctcaatgacataccgcagatacagactacatggtttatgtatggatcccanagtgttatctcaacgggtgcacaatgataaataacataatacttagagctcttggataaataataatagcaaacatgcacaaaaatctgaaggctaagattaaggttacttattaagattcagatgatccacataaatggatagtctttgtagcagagaacctaaaccggtggttttcaatcaatcaacctaactactaatggtaaggagaaaaggcacacaatgaacaggaaaaggactgccagcatgggttgaacttgtgtaaacgatagctatgaattcttcaacccaaatgagagacaaatcacacgacagggttgaatgttgcttactgagaacaaattcttgcccgtgtaaacactcntctacatgaggtatgtcaatatatacctcaacgacgcgaacattccttgagcgacaccttt

SEQ ID NO: 57822 - DNA, 352 bp, Zea mays
cagcttcgactgccgatacaacgccattattatttgccgggattggtgaaaatcatggccattctgcactattcatacatgatattgaagatgccgggaccacaaggaatcatcaccgtacgcgttgacttccaaggcgccgtggaatgcttccgagtggccattcaagcgggcctcaccaccaaaccacctacgacttcttccgcgcaggcgaactcaaagcctaaggaagacctcgcgatacctgcaaatgaagctcaagccgtgacctctatgcgaccgactgaggagacgaagaaatcaacctcgggttcgctgacgaacgcaaggctgccatcatcagctccagcct

SEQ ID NO: 57823 - DNA, 479 bp, Zea mays
  unsure (1)..(479): unsure at all n locations
tgaagccatggtaagtagcatatgccaataatatactaatttactcatgcctagctacgggtgcataggtttcaccgaaatccaaaccttcgacttgggagtatcccttggccacaagtcgagctttgttccttgtcaccacaccatgctcgtcttgcttgttgcggaagacccatttggttcctacaacattntgattangacgtggaactaaatgccatacctcgttcctagtgaagttgttgagctcctcttgcattgccactacccaatctgaatcttgtagtgcttcctctaccctgtgtggctcaatagaagaaacaaaagagtaatgctcacaaaaatgtgcaacccgagatctagtggttacccccctatgaatatcgccgacgatggtgtcgacagggtgatctcgttggattgcttggtggactcttgcgtggtggcggcctggatcttcatcctccttggcttgatca

SEQ ID NO: 57824 - DNA, 410 bp, Zea mays
agcttgcaaatgccattaaacttttaatcatatctaaaataaaccattatctgcggtttagttccaaacagacccaccactatacatgtatttttcgtatttccctttgtatcattgcccgaacacaattgttattttgctgttacgaaggcatcacgtctctttgggtctcaccagttacgaacacgattactgttacaaatgcatcacatcttcttcaacatgattgttgttttgctgttacccagtcgtcagagccttgctggtgaacaacgcctagtgaaatcttgtgaagaaacagtccaacagagtaacatgctaccatctgagcagaactaggtaccaaaattgcaacacacatgtacaaatcatgaactgtcaacaatagaataaccaattgtgaccatagc

SEQ ID NO: 57825 - DNA, 476 bp, Zea mays
tatgccttcgcaggcttcgctgtgatgcagcattcttctgcttaacgcattagcaatttgggtgtgaaaccacttaattacttatcaaggttcaagaatcaagactgaattcctgattcagtattacagttataataaatatatgcatgttggtaaatctcataggcacgtgagtggtgaaatggagttgcaataatgtaataatgacaagctagtgtacaacagatatgggaaatgaatacttacatgagaacgacatctactgtgagtgatgctaagctctctggtccctgattcaaacttcttaaccaattctgcagctgatacatatggatctgctttctaaaatcgccacacaattcatattagtaacgcttcacctttttacctctatccaatgcccactactggaatacttccctaagaggagaggaatatataccttctcagagcgcatatcctcatgggacctcctc

SEQ ID NO: 57826 - DNA, 416 bp, Zea mays
agcttattagctagtagaagccctgaacttctacaaacgcaagcaatggctgcttggcttgctcgatggttctctctcaaaaccatgtcgttgagtatgagagagatgttctatctatgcatatgtgcccgccactacaagctagtggcaacttgcactttgaactcacgtagctatagggcctcctcgggtgggaagagggatcatatatatattgcatggcccgggaaaatcaaggatatctttattattgtactcaaatttgctctggatcccaagaaaaatgatccctttaatttccaaatgaaaagagcaattatccctacctgatatgggaacgtttatagaggcctagaaccagcagcatgcatgtcgctagtgaagtgcaagcatcttggccactagctagcagctag

SEQ ID NO: 57827 - DNA, 428 bp, Zea mays
  unsure (1)..(428): unsure at all n locations
agcttttggttttgacaacagtatgattaatttggttggttcgactcgatttttctcatcgagtaatacgtttggataatcgtgcacatgggcgatgtaacgtttatgcaaaagatggttgaaaagaaaaagtgttatgatgatgctatgctaataatttccattgttttcatcaacaagatgacgatgttaggatttcagctccgaaaggtatgatttatgaagaggaacctattgatcatggcaaaaaggaaagatattgcttaccatatcctaatattagaaaaatgacaagaagaaagtacttggtaaatggaccgtgtcaaccttgtactcttaattctccattagctcggattggggagagaaatagaanggttaatcctaaatggcttgttgaattaaaaaataagttgagtacagtgagt

SEQ ID NO: 57828 - DNA, 416 bp, Zea mays
gagatgatatgatgcctacgggtgccttgttatagtccattcaattcttataaactcaagctatcaatcttcaatgatctatatacatgattgacccaccgttaattctcaaaattgctatatcttaaactcatatcatctcgagaaagatattatatgttgtatgaagtgaagagatattatatacaaaaaattcaaggcctacaacatggaggaaagtcaaaggatggtgacttctatgcttttaagtgcaaatgttctaaactattatttctcatatatcttgcgtagtcacttacaaatatatagcacttcaaatgtctttaaattgatattaccattctttgaagaacttcctctcatatggtagattgcacattcatcatttccatattatggcaatctacatgctctat

SEQ ID NO: 57829 - DNA, 350 bp, Zea mays
gcagcatgcaactctaaagaaaactttttgtttcttcgtcatttggaaaacggattgtagcgctgccagcggaaagcagtggagcctatatccaacagaaatatgagaccgacaggcacttgagctacttcacataaatctatttcggcccgatcgcctacatagcctcggcgggagtaagtattggcttgtaatcggggatgaatattctcgctttacttgggtattctttttgcaggaaaaatctcaaacccaagagaccttagaggggatcttgagacgggcttcaaaagaagttcggttaatgatcaagaagattataagcgacaacggaacggagttcaagaact

SEQ ID NO: 57830 - DNA, 411 bp, Zea mays
agcttgtgaacagtacaaattcacataggttaaagcagcttcggcagatcagccgaagcccatgctcttatgtgaggacatagcagagcagaaggtgctgttgggctcccaattatccggagaacaggagaaaaccttgataaggtttttgttcaacaacaaagatgtttttgcatggtcagccaatgatctttgcggagttaacagggatgttattgaacactcgctcaatgttgatccatccttcatacccagaaagcagaggcttctgaaaatgtctgatgacaaggccgaaggagctcggaatgaagtcaaaagactccttattgcaggagttatcatagaagtaaagtacccagaatggctagctaacactgttatggtaaaaaaggccaatgcgcaatggcgaat

SEQ ID NO: 57831 - DNA, 428 bp, Zea mays
tgagtcagttcttctacagagaattattgatgcccaaagaactctacagggtatgaagtgcattcttgagaaaatggaaaccggtaaagcaaattgctttataaaggatgaccaaggaataatatggtttaatgatcgcataattgtgcccaaagatgctgaggtccaccaaaagatcttggatgaagctcatcttagtcgatattccattcaccctgcgagtactaagatgtatcaagacttaaagcaacattattggtggacaaaaataaaaattgaaatagcacgctatgtggcaagatgtgacagctgtatacgagtcaaggccatacatatgaaggctactggaccactgcaatcttttgccataccaacttggaagtgggaacatattatcatggacttcattgtgggagtacctatgacag

SEQ ID NO: 57832 - DNA, 430 bp, Zea mays
agctttaattgtgttgccatcaatcaccaaattagatgatatctaaaactctcttgtgagttttggagtttggatgacaactcaattaaaggactaacaagtgtactaagtgttgaacaggtgcttaaggtaaagcctacagggttcaacacaagtgaacaaatgtgatggtccaagaactggattatggatacataatggacatcacaagtaagatggacattgcaaaagtgatactcgggtgcgtagctcggagacaactgatcaagccacagacgaaggcaagaaaagcttcgaggtaccaagtgcacgggaaaatgtcaatgaggctgaagaacccaaagccaagggtgaagaagaagtcttgcaaagtcaagggtgatcgagttgagaacagctaccgcacatcaaggatcactacataatgacg

SEQ ID NO: 57833 - DNA, 380 bp, Zea mays
agccttggaatagaacagacaagggccagaatttcttttatttatgaaaatcaccatattaccagctcttgatgaaacaaatgataaccacttggcacgaacgaaacaatactggtatccgcctaggatccattctcaacaatagatattaccgctctcatacgaagaaatcatcagtagttgatagtcgcctagagggggagggaatagggcgaaactgaaatttaaaaaaataatcacaactacaagccggggttagcgctagaaatatcaacgagtccgcgagagaggaccctaaaacaaatcgccagcaaataaggagagtgccacgtggatttgtattaccgaggttccggtctcgcaaacctactccccgttga

SEQ ID NO: 57834 - DNA, 355 bp, Zea mays
  unsure (1)..(355): unsure at all n locations
tcttcttatgtgatgtaagtcttcgctgatagtgactgtttgtttttcttggcctgancgacggggacaatcttggtcccgtcttggctctgcagctgtgccttgtcgtgctgattatctgttgggctggcgggcgccgggacttcgcgctgggtcgtgagacagtgcatgtttctttgaccaggcatgaagtcccgctctatgttgcgcgccgcctgtggtttgcgtagaccgtatagcgcctagcggacctggtatcttcatacatatgtacagccccgggatggcagcttctaacttattgatggagccccggcccatgatggccgtgtatggatataccatgttcaccata

SEQ ID NO: 57835 - DNA, 358 bp, Zea mays
agcttgtgaaagttcttcatccccacatgtgctatactgcgatgccacagcccgcccatgctagtcttaactattaagcatgcattgagatcggcctcctccttcgaaaaaatcaactaaatagaagttggtgactagtatacccttaaaagctgatgaaccatcactccttctaaagacagacacatttacgtttgtaaataagcaggtgtaacccatattacataattgactaacggacaacaagttataaccgagcgattctactaaaaacacattaaaaatggtaagctcgaagaaatagctattttactaagctttaaacttccttgataccagtacgaataaatagagtcct

SEQ ID NO: 57836 - DNA, 314 bp, Zea mays
cattatagagcatactacgagccaatttaaatttctcattttctaattcatgctcggcaattttagcatctaattttgctatatgatcattttgttgttaatcatagcaatgtgatcatggatagcatcaatattaacatctctacatctagtgcaaatagagacatgactgacagtagatgtagagggtttgcaagcatttaattcatcaatcttagcatgtaaaataacattcttatttctaagattggaaatagaaacattgcaaacatctaatttcttatccttagcaattaaattttcattctcaatct

SEQ ID NO: 57837 - DNA, 249 bp, Zea mays
tcggacctacacgagctgcacttgactggcaaaaaggattctctacgcctattttgaaccgaggactcggaagtatatcctacggtcgtatggctccagataaaaccacttttacgccacacccaatgataccgccggataagagcacaaaatctccactatccctacgagacgatggctgaatcgagcttgagtcgttgtttgcacttaaatgacaatccactctttagcacacaaccctttaacggc

SEQ ID NO: 57838 - DNA, 326 bp, Zea mays
aatcatgaacgatacttccaatataaagagctataagttagcaattcgatcacaaccttatctgcaactcgacgtttgctccccaggatcaaaatctatactacctattaaagctctaaggggtaggctgcctctgcttggttctgccttctgacgatctcaaccgtccaatacactttagagtctctcagccgtccgatgtgcagccgtccgatgcgcacactctcaccccccacgcatctgcccgcccccagatcccgtgtcccccacggataccgcagccgcgccgcagacgctcccttccgtgctcccttcgcgcccgcctg

SEQ ID NO: 57839 - DNA, 420 bp, Zea mays
  unsure (1)..(420): unsure at all n locations
agcttggctcggttgcattgcaagctaaaatatgtttttttgctcaaactcgcgagctagcacactaaattctatttaaaatataaattatatatttttattatatataaaataaaaatgtatgtaccaaaaaatcaaacaacatattgtaaactatatctagcaatgaattcataaaaaattaattaactaataacatattaatgtaattgtataacgatataacatatgtcattatacggctcttgagcctaacaacgtgcaagcttgactctgcttangtagtgtttggttcgatgtcaacgagggatgaaacaaaatcaaccctggactgacttcgttccttattttttaagatagcctcgtctattattttttaagaatatttcttaacaataactcttgacttctaaatcaaac

SEQ ID NO: 57840 - DNA, 448 bp, Zea mays
gactgtgagtggatgaaggtttctctgaaggtgtcaaaccacttgtctgtgtttataattaggggtaccctcaaggctcctaattcttagctggtaacccccatcaacataaagctgtaaaggcctgatgggtgcgattaagtcatggatcggtccattctagggacacgatcacgcctcgcccgagcctatcctctgacaatggcatccaaccccggaggatctctgcctcgctcgaggccaccctccagacgctaacgaattatcggctcgcccgaggccctgtcttcgtcaagaagcaaccctgaccatatagtcgcgccgaccgaccaaatctcatgagcatttaatgcaaaggcagcctgacgcctttatactgacgcacgcactttattccgcagagccgaagtgaccgccgtcacttcgctcgtccactgaccgggctgac

SEQ ID NO: 57841 - DNA, 284 bp, Zea mays
ttttaaaactaatcttcaccaacttacccccgaagcaatcattatggtgaatatcctcgtgtgggcccggaaaagcccagggctggaacccgaagtgaaagtttcgcacctacataattggataccagacaaaccctgggggaaggagcaggaacataaaaatatcgggctgctacagattctgatcctcggtctagggtcaaagaatgtcccctggccacacctcttcggaaagaagaatggcccggccgacctgcgatgacatcaatgggttttattgtgaa

SEQ ID NO: 57842 - DNA, 336 bp, Zea mays
acaacgaaaccattacgtgagatttgaaaagtgttctttattacacacaatataaaactgaatggaaaagactactattcaagtaggatatctgtcaataaatgtgcttcgactctggcacaatgctattgactgtgcgaacttcagactgttctctgaaaaccattggtgttgagcataatggcccccttctggctgttggccttgttgcaacggaggtgaaagcagacgctgttgccaagaaacttgaagttgactcgcccaagctacagaaacatgatggtggttgcctacatattctgggatataaggcgaatgataccaacagtgtgcatg

SEQ ID NO: 57843 - DNA, 404 bp, Zea mays
  unsure (1)..(404): unsure at all n locations
agctngacggccatgtaaggataaccttattgatagtccggacagcagcaaatcgaagcacaggcttggatgaactcaagtataactgtaacaaagtaattgctggtgccaattcacggcttgtaacatccatctctgttatcttccgggcagcttccaaagccaccatttctgctttatgtctgagggatgattccagaaaatcaaaaaatggacggtcaccattttgagtgttcatgcttgactcacacataacctgcaaattgtccattatattttaggaattcccatatttacctagttttatatggagcaagataccggttattgggttacctggcttgtgtaacgaatcaaaagacattgtgcaagaggagaacggacagatccccttgtcaaacttg

SEQ ID NO: 57844 - DNA, 362 bp, Zea mays
tattggaactcatacatactgatgtgtgcggaccaatgagtacgacagctatgggaggattccaatacttcataaccttcactgatgattttagtagatatgggtatgtctacttaatgaaacacaagtctgaatccttagaaaagttcaaagagtttcagaatgaagtataaaatcagcgtggcaagaaaattaaagcactgcgatcagatcgtggtggtgaatatttgagtcatgagtttagcaatcatctaaagagttgtggaatttgtccacagcttacgccgcctggaacgcctcataggaatggcgtgtctgaacgacgtaatcggactttattggatatgggtcgatcaatgatg

SEQ ID NO: 57845 - DNA, 411 bp, Zea mays
agcttaagcaaaagccatcaagctaaatctctaacacctacatcaaaaaggtgaacaaaaaggatgctacaccatatttgatcaaaaagaaaaagaacggaaaggtgatagcaatcaaggccaacaagcaagccaacaaaggaaaaggagccaaacgcatctgggtgccaaaggagataatttcaaccatgaaaagcaccaagaaggtttggatcccaaaagtgaagtgagtggaccgaacgtctgcgggaaattttgagacttggcaaatatgggatgtatatcatgggatacatcatgttggatcaagttattgccaagtgggttaatgaaaattttggacccaaatttcccacccatgtctaaaggaactaattttattgtatttctcgtattagatatgcgtatcta

SEQ ID NO: 57846 - DNA, 388 bp, Zea mays
  unsure (1)..(388): unsure at all n locations
tggcgcaaaaagcgaatgccaagtcagcgtgaattgtcctttatactgctcacctatntatagacaagggacacagcccttacaaaattacattcatgccctatacattagataataacgctatagtaatctatcgaggtctgaatagccttttcatctttaagtcggttcactctttgctgttgtgccgaagcttttctggtcaacaccttccgctctgtatcaagcttcgtattattccggtctgctgcaatgccgactttagtctgagggtacctgttcacacattgtactacagaaatactgttaaatactggttttgaggaccttctgacgccgaagggttcccacagcgagatgacataagcatgggttaagcgctacatat

SEQ ID NO: 57847 - DNA, 303 bp, Zea mays
  unsure (1)..(303): unsure at all n locations
catcgaaatcaactaagttaggtgaccccttacacccccataaatggctctgaaacactacttcctttaaagacacgaacacctacattaagaaaaagaccggcgcagcccacattgcataattgagaaatatgaaagccaaactcgtaatctaaaggaatctaccaaaaaaacactggaaaaggaatgggcacgtggataacaaatttaccaaaggccttgaccataccttgaattccatacctcaatgtgacagctttttggggatcatacgntcgtcttcgaagaggaagacatcctttt

SEQ ID NO: 57848 - DNA, 263 bp, Zea mays
cttttctgtcatcaacaaaaaaggattcaaccgatccgaactaatattcatctactaggcatcatgtaagaaaaactcacaaatatacgtgaccacacttacatgtttttcaaacatatcggccaagatgaacgcattaacgaccaacatacatgcctgcattatatcgacaatacaacgttggggtaccctactgtcatgcattgatccacaaagtccataaaacccggtacgtgcttgtacaacgaggtgtgattacaaat

SEQ ID NO: 57849 - DNA, 376 bp, Zea mays
acccggatccttaagtcacctgcagcatgaagctttactgtgtgtaggcgtgactgtcttcttcttcggaggggtgctagaagatttgatcgttttcagcacatctagcacattaaccattctccttcttttccgagtcactgctggcactttttgattacttactgtttcaatggttgccacaagactcaaaacttctgatgttttggagtcctcgggtgcttcctttacctcttccattttttctgtgaatggcgcttcggccttctctctcgttttctgataacaaaatttttgattgctccaattttgtcttcgttggtatttcggctttttctgtgacttctggcagcaaagttggctcggctggtttttc

SEQ ID NO: 57850 - DNA, 329 bp, Zea mays
gaaccggaagagcaaatcgtgcctccatcgatttggagcacatagatttattgtgaaatcacaacgaatggtatgacaagcctaactaacatttagtctttttccctcacacaaatatgcatattctattatgtctcttactgcaggaggctcctgatggtgttgaaccctgattcattgacgtttacatggagggacaccgatggtcagatccaaagcatccagaagttttatgtgatgacaacgcgacagaaaagctggtaggtgtaaataataactatatattcttaactaacttgtgactcaattataattaacataaatatgtt

SEQ ID NO: 57851 - DNA, 329 bp, Zea mays
tgaagctcacgtccctaccatagctgtggtcttcccccgcaagagaattcgctatggaacccccaaaactattacgagggcactctaaaagtttataaagcataatggaataagttcgatttcacgttagacgatgaaaatctttatgatgggggtattataataataacaaagtgatggtgatgctagaataatgttcgattctgatttttatttgagcgcaatgatcctatggaatgatggccataagaacattaaaattaatcgataacgttaaacttgaggtcgaaagctaaacccctacaatttttctctattcttcacttatc

SEQ ID NO: 57852 - DNA, 333 bp, Zea mays
tttcttgtgtgagatattctgattgttgaaaaagacttcaatttaattctgtgattatggcttcagcattcgctaataagccttcgactgtttgaagctcgaagtctttcttttcgatggcagctgattgctcttttatcttgttttctaaggtctcaaatataacttcgtgccttttatcctctaagtcctactgcatttttaaggccttgctcaaaagcatactctatggacaaataaccttcgttagaaaatatttgtgttattacaaatagtaagggttagacacaagatgtttaccttaaaattggaatagaacaaactgccgacaat

SEQ ID NO: 57853 - DNA, 388 bp, Zea mays
tagcttgaaacaaggtaagtatcatatgcatattaaaagccaattgactccagcctaactatgggtgcatatgtttcacccaaatacaaaactttaacttgggaatatcccttggccacaaagtcggctttggtccctgacaccacaccatgctcatcttgctttgtgcggaaaacccacttggttcctacaacattttgttcaagacgtggaactaagtgccatacctcattcctaatgaagatgttgagcttctcttgcatcgccaccccccaatccgaatcttgaaatgctttctttaaccctgtgtggctcaatagaagaaacaaaagagtaatggtcacaaaaatgaacaacacaagaacgagtatttacccccttttggata

SEQ ID NO: 57854 - DNA, 309 bp, Zea mays
tctatagggggagcacatattgtgactaacatatgtttatttttagaaagacagagactgtgacgcatgccaagctggaaagcaagttgggttccatcattcacaccagaacatcatgacgagtgacaggccactggagctcctacacatggacttaattggcccgattgcttacatatacatcggcgggaagaagtactgtctagaaatatgggatgataattctcgcttcacttgggtgttctatttgcatgacaaatctcatacctcaaacaccttatagggattcttgagaccggctcaaaatga

SEQ ID NO: 57855 - DNA, 350 bp, Zea mays
gggagacaatagaggaagtcaacttcatcagcgctgctggataccaaggatccttgtggataccttatatccctggcatatagtctaacttcgtcaaactgctcttccagcaattggttccctgaagcatgtcacacgataaactccatatcctcgacaggtgtttcggcagcaggagacactttctcacgtacactttcttcatccaaagttaaaagtgcttcggtgggaacagaaggtccagcctcagaggtagcctgtgccatgccaacttcgccagatttctctaaaggtgcgcactctggatcacgtgctgaagcaggagtttgtaccttcataaattccatgac

SEQ ID NO: 57856 - DNA, 115 bp, Zea mays
tgcaacgaggctttggataacctttttgaacccttcctttcctcgaggaatacggtttctaccctgctgagggaaagcaccttggtaagtgtccccttgcgagggaaactgaata

SEQ ID NO: 57857 - DNA, 384 bp, Zea mays
agcttgggaaggttcttcatccccacatgtgcttatctgtgatgccacagccagcccatgctagtcttagctattaagcatgcatctagaccggcctcttcttttgcaaaatcaactaaatagagtttgtccgctaatacacccttaaaagctagtgaaccatcaattcttctaaagacagacacgtctacatttgtaaatagacagttatatccatatgacataattgactaacaggtagcaaattatatccaagactctccactaaaaacacattagagatagaatgctcattagaaattgcaattttacctaacccttttaccttgccttgattcccatcaccgaatataattgaatcttgggaattcttattcttgacgt

SEQ ID NO: 57858 - DNA, 444 bp, Zea mays
  unsure (1)..(444): unsure at all n locations
ctaagcttctaagggagaacacgtgataggtttgactaacgtacaatattaaaaatatataccttgtgcagcttgtcaggcaggtaaacaggtgggaggagcgcatcacagcaagaatgtgatgaccacatcaagacccctcgagctgctacatatggacctcttcggacccgtcgcctatctaaacatatgaggaagtaagtatggtttagttattgttgatgacttttcccgcttcacttgggtgttctttttgcaggataagtctgaaacccaagggaccctcaagcgcttcctcaggagagctcanaatgagtttgaactcaaggtgaagaagaaaggacgacaacaggtccgagttcaagaaccttcaagtggaggagttccttgaggaggaagggatcaagcacgagttcttcgcttcctacacaccacaacaaaatg

SEQ ID NO: 57859 - DNA, 403 bp, Zea mays
  unsure (1)..(403): unsure at all n locations
gcaagcttaaagctcaaggaacactcaactatgctctctatcaagttggntctcatggtgtcaaccccaatgaatacaatcatgaccacactcgtctattaattggcaaaatgatcattgcccatgaggatccatctagaaaggtacaacatacttaactcaaaggcatgttgaattgggtgaaaccccattatcagtccattgggaggaaaggtataaaaaaaaaaagcatgaaaggatatgaatttaaaaaaagaaatcttgaagaaagcacttaaagatgttgaactcaaaaatataacttgggatttggggacttcaaaacacaacattgggacatgtgtctgtcgcacatttcatagaacctaaataggtgatgcaatgatgcggaccaaaatttgtt

SEQ ID NO: 57860 - DNA, 297 bp, Zea mays
  unsure (1)..(297): unsure at all n locations
aagcaaatgaaagttttccttaggagtacaaaaatgctacatgaatgacattntttcctattagtttctcaacttctttgatattgaacatgttatcactttgatcattgtgggttttttcccatgataccatggagaaccatacaaatatttaatttatccagccaaaaaggtattgccttcttagtgcatctctagccatgctattcttgcccacaccaaaccaggaatcttcacaagtctgcagcaatggcctaggttcatcaggtagtcagctcattatataatatnctctaa

SEQ ID NO: 57861 - DNA, 400 bp, Zea mays
  unsure (1)..(400): unsure at all n locations
agctttaacatatctttgtttagaagaaaacatgtgttcttgcagnggtgntattctatttttcttctttattaacagctattgtcctaactcctaagattttaacaacttatacattctgtaacatgcacaatgtatttgaagcgaacaaaattgtgtctggtctttaaagacaactacacaatctgcttttgccccttaagcactatagtactatacacttgacacttcatcgatatgctgttatgtacatctatttttgcattgactcaatttataccgggtacatggctcttgcaactttttacttctgggatggatgatttattcttaattttgttggacaagtcaaatncacaccagatcaaccaagttaactcatttctgcagcaattgatgg

SEQ ID NO: 57862 - DNA, 352 bp, Zea mays
  unsure (1)..(352): unsure at all n locations
ggacaacgatgcacatctgcgcttgcacaagacgagctgggttactctttaatttcattcaaacgacgactgtcaattactacttccaagtntgttttttagccaaattacctgtatccgcatatacagtcccactgactgtcgattgctcggagacttttttcctaaagaaaatattccgtagaaaatttgaattctggaggtccgatcaagttgcaatgaactactgaacgagagcgctgagcatcgcgataggatgcgctgcaacctcgtcagtttgcggcggacaacacgtacccctcggccctcgccgactactttcgtaaaatctccggggtgcagacaacgctac

SEQ ID NO: 57863 - DNA, 453 bp, Zea mays
  unsure (1)..(453): unsure at all n locations
acccggaactcanaggcagctgccgcatgcaagctgtaaatgaagatgacaaagttttctttttttagaagaatattccgaagaagaggaaagtatcatctccaaagcagaaagtatccgacgaagaggagactcccgcatcacgctctgccactaacgtggaagagattttgaaggtaatgactgaatccctgcctgtgaagctaagtccattggggcctcaactgacaaagttttttcagaaggaaaaggagcccgaaaaaacgaagaaaacaactaaaacaaagagacaaagaatcatcgcagtaacagaagtcattgacaagacaccaccgagagcttcagctcagaagataccagcggctgaggaaataacaaatattgagtcacaccttcggaggtcgcggctaccgaagctgcctcaattgaagatctgaatttggccagcacaat

SEQ ID NO: 57864 - DNA, 300 bp, Zea mays
  unsure (1)..(300): unsure at all n locations
cctacatcgaaagggccttaatcgactcagacggagacactacaccgagactnccttctcgtgcaagtcaaccgcccggtctcagctctattattttcaacccaaagtttggtacctagcagaggtacatcttttccgatgttgaacccatcacagccatgatggatccaccatcacaagattttctttttaaaacattcccacccactgaagcatcacttttgttttataacataacaatttgttttcaaggaaggaaatgcagcaatttgtgtaacacacaactcctatcacctaatg

SEQ ID NO: 57865 - DNA, 362 bp, Zea mays
taatgctagtatgatactcatcagttcaaaacgcacgcaagcatagaaaactcacatctgctggatatcgccaagagacactttgccaatatcaggcaaactggcctgaaaataaatccacaaaaatgtgatctggggtaaagaagggaaagtccctggctggccaggaacaacgaagggaatggagcccaccccaaccagaatgaaactttcactctggagggaccacaaacacaaaaaaagggggcccgcggcagcgcgggaaaacaaccctcatacaaactctatgcccaaaacacaaaaaaattgcccctctttaaaaccccgagcagaggttatatggcggggggctaaaaaaaaaa

SEQ ID NO: 57866 - DNA, 362 bp, Zea mays
cttaagcttctgtgaccaagagaacaaactctctgagttcctctaagtttttattctgagcacctgttaggggaaggcaagtgtcctctgacctattatgtcccatttactttataatttatcagcccgcataccatgatcaacctaaggattgactaactatgtatttaccttgtccttgaatacactttgggttattatgtgtagcttcatgctattgcattactttaatcaatgaacatgatgtgaacacttatgaaacgaggctgtctctatgattattgatgttggactggtgatactttatggggctcgagcgggatcttgagtgcctctacctaaggacctgttcgttggatgat

SEQ ID NO: 57867 - DNA, 317 bp, Zea mays
tatttgactagggttagaaaaaatttggagaaagtttatatctacctagtgacctggttaaaatggttaacctttctggccacccattaagtaagttttggcccctatttggccatatgccttatggttaaacaaatataaaaagtgatttaacttatggaacccaagggacccccttttttggttggaatccttattcatataatgccctggaaaaattattcttccctgggtagttaaaaaagtgggatccctttattggaaaaacagggtactcttaaaacccttaaaattcctccaggggaaacccccccctt

SEQ ID NO: 57868 - DNA, 357 bp, Zea mays
ttttttatcagggcccatttctttaaacacagaacattttaaaatccaggggctgggttttatgggatcaaaagctaataacttcttcttcttataagcaaatcattatttttcaatatcatactgctcaccttccgcaccaaaaggaccttctgcaacagttccccctgtcacaactaaaccccattgtctcatgactctggaaatcggagctgtcttcggggcctcaatctccttttctttacgagttaccctttgcaatctacgtactctgggcatttgatgaacttttgcggttttaacaagttgatgctttacagttttgacaacctccctttttataagcttcttttttac

SEQ ID NO: 57869 - DNA, 390 bp, Zea mays
  unsure (1)..(390): unsure at all n locations
agcttaagacatttgnatttatttgactgtttatttggacttcctctattccaattcgtaatgcaactaaaagaaccaaaatgtcttaaaatttggaacggaggagtatttcttttgagttcaaaaatgaactcagtttatttaagttgcagaaactttcacgtattgagatctctatagcaattattattaagtcgatgaataaatattgaaattctgtgaaagggcctctacctgaattggttaggtggtttgagtagcactcctcaatccctgagttccaattccagtgggagcgaatattaggctaaagtaaaaaatgtcactcacttggtttcccttgtggtgacaccagatggtctacctataggggcggatctcgggagggct

SEQ ID NO: 57870 - DNA, 434 bp, Zea mays
  unsure (1)..(434): unsure at all n locations
tctggtgagtccttaatgctntccatgccttttaattggttattatcgcgccgcggtcttgggaccaagcccggcgaacctcagtgtccaccctaaaccaagcagcatggaccgtagtccataacagtccgattgggggtagggcgtgggttggttatgctcacggaagatgtcggtatgctcgtcgtttcgatggaggctgtcggcggcgagctctgaccacaacagtcatgtgtttgacgcggcatggtcgaaggaccaatggacataaataaaaccaaactgagggggtcaggtgcaaatgacagtgactcaggtaaatagtatcacgtggcgcttcacgatcgtttgaacgtgcgagggcctctgtgttaaacctaccacacagtcgcgtgcgcgcccaaattatgtgatgcctggactgtatgggtcgg

SEQ ID NO: 57871 - DNA, 416 bp, Zea mays
cctgtagagcatgcactgcatgcgtgcacgaccaccgccatggtaattatgatcagcgcctgagctgccaattgactcacgcctagctacaggtgcataggtattaccgaaatccaaaccgttaactagggagtatccctaggacacaagtctagctttgttgcttgtcaccacaccatgctcgtcttgcttgttgcggaagacccatttggttcctacaacattttggctatgacgtggaactaaatgccatacctcattcctagtgaagttgatgagctcctcttgcatcgccaccacccaatccgaatcttgaagtgcttcctctaccctgtgcggctcaatagaggaaacaaaatagtaatgttcaccacaatgtgcaacacgagatctaataattacccccttatgaatgt

SEQ ID NO: 57872 - DNA, 439 bp, Zea mays
tcttgtagctgctgccaaaaatgagaggtgaactgctgtcctctatctgacactattatcttcggcacaccatgaaggcagactatccgtgacatgtataactcagctaacgttgctccggtgtatgttgtcttcacaggtatgaaatgggccacctttgttaagcggtccacaaccacccacatggaatcatatccggcccgggtacgaggtaggccaactataaaatacatcccgatctcatcccacttccactgaggaatccgtaatggctgcaacaatccggcgggcctctgatgctctgctttggttctctgacagctatcacagatggcgacatattctgcgatctctcttttcatgccataccaccaaaaccttcgtataaatcctggacatcttctcacttcagggtgatggagaagctgctcatgacttc

SEQ ID NO: 57873 - DNA, 290 bp, Zea mays
aaccccccctttcaatcttttcgtttcttcaccatatgtaaggaattcaatgtctacttgaagcatattcactttaaaggggcccttgtatgatgaactgtttgtttcccaattgaatggatgaatgtatgtatgcttgccatcccatataaaacgatccggtctaaaatacccaaggactcccaagaaaagcccctgagcattagtctggtggtggaagcaagtggtccttgacctaatatttgcctattcattatttaattcatcccccgcattacacatttatacct

SEQ ID NO: 57874 - DNA, 308 bp, Zea mays
  unsure (1)..(308): unsure at all n locations
gatcatactggtgaaagacagctctctgggcctgcgagtattcaagagacagccgaatatgttctgtatgatccgagagaacttgtgggtagcatagactcgatagaagagctatgctgataatcgtagaagaccactggaattcgaagagggtgatcacgtgtacctcaaggtgtcaccaattcttggaatgagaagattcaaagttaaaggcaagttatcccctcgctctattggacccttcaaaatctttaggcgagttggggagatggcctaccaattggagctacatgatcatntgtctgatg

SEQ ID NO: 57875 - DNA, 278 bp, Zea mays
atgacaatttcattgggcaccggtggtgcctgcgcccttcaacgcaagaaccttctgacatacgccttgaggtattcttcatgatcctgagtgcactggaacaaggcttgagcagtgaccggcttcgtctgaaacccttgaaagctggttaacaacatattcttcaacttctgccatgaagtgattgttcctggtcgaagggaggaataccaggtctgagcaacactcttgacagccataacaaaagaatttgccatgactgcagcattgccaccata

SEQ ID NO: 57876 - DNA, 407 bp, Zea mays
gctttggacacggagtcgctatataggctatcttttttcttgaccaaactctgggctctgtagatggtgccaaattggtccctggtggttcattgcaaactgcttctggtggcgaccttatgtcaagtcatcaattgatctctcacgaattgggagtcccttcgttcttctccaatctccacgtacggagatatattttggcctgacttttacaccgtacggactgctgtcaacacgctcatctgttctccatattaggcattggtggacgagatggctaatcaactgaagttgcaaggggcttctgttccaaaggaacttatctcttgcacgttggaatccggagttgctccaacatcgcgtctctgatttggaggcgacgaacgcacgttaatactcctttgctt

SEQ ID NO: 57877 - DNA, 268 bp, Zea mays
  unsure (1)..(268): unsure at all n locations
aaccagcttncactcacactttttggaatggctgagattattgttctagacgctgtcattaccatcttttcttttggggcactgatgcccctatggttttgctgtccaatgatgctgtagactaaaactttgatgtttggagcctagttgctttttacctctcatttttctggacggcctttgtttctttttgttttgaaacaaatgttgatgtctgatttatctggtggcacttcgcgttctggacttggcacaggctgctcatatt

SEQ ID NO: 57878 - DNA, 274 bp, Zea mays
cgcgcgcactaggcacggggaggaaacactttttagtgacgaagctgacgaaggcagcgcaccgaggaaacggagagcgcccgcacggccgaaagctgttccgcctgcgtcgggctaaaacaagaggtcgccctggcgcacgggcccaaaacggaagctccgggcaccaactcgaaaataagctcactacaagcatgtggaaagacaccgaacacacacgcgtatgtctttggtgaaaggcacaatggaactgagggaaaactacacggaggca

SEQ ID NO: 57879 - DNA, 350 bp, Zea mays
aacccctcattttcgggccagacgcgaggccgaacagacatgccagccgtcgtcttgcgccttcgtgccggattacctccgttccggcatgcccttcacccaagacatacatttatctactgtgatttacacatcatggacgataataattgggggtcgagcacgaacttgggttcccccctgtccatgggcagaccatgtttttgccaaaccaaggcgaaatcatgccgcccgagcatctgccttaccaggcatacgtgacttcggtcttccaccttgattggtttttttgcggccaaccacggggtttgcacctggcctggcgttcgtcgaaacgtgccttccggggt

SEQ ID NO: 57880 - DNA, 345 bp, Zea mays
aacggaccaatcaaagaagaagtctatgttgagcaacctcccgactttgaagataatgagtaccctaactatgtatataaactctctaaggcgcgttatgggctcaagcaagccccaagagcatggtatgaatgcctaaaagaatttcttatcactaatggctttaaagtcggaaaggctgatcctactttatttactaaaacacttgcaaatgatttgtttgtatgccaaatttatgttgatgatattatatttgggtctactaacgaatctacatgtgaggaagttagtacgatcatgacacaccaattcgagatgtctatgatgggggagatgaagtacttc

SEQ ID NO: 57881 - DNA, 391 bp, Zea mays
  unsure (1)..(391): unsure at all n locations
tatcattctcttcatataaaatatcctcttgctnttctaatagtctattctcttcatttaaagcatcaatcaattcattgattttatctactttagttctatctaaacctttgaataagcttgtttaatctacttcatcatcactagagtcatcatcacttgaagtagtatacttatgagtatctctagcgcttacctttttctcctttgccatgaggcaagtatgacacttgttggggaagagagatgactngttgaatgccgaggcggcgagtccttcttcgttgagtcagaagaaaacaatctgattcccatttttgccaggtgcgcctcgcccttcgcttcttgtggccttcttcttctcctcttaccgtcttttcttgttctggca

SEQ ID NO: 57882 - DNA, 268 bp, Zea mays
tataaccccatggcagctaagtgccgctggaggccaacatggaaagccaatcttaccttctatcgagtggtgcaccggacagtcccgtgcaccaccggacagccactgtagcagtctggtgctcgatattctttcatacagggtgcagcttaccggtggttctcaagaacggttagcgcaccggacactgtctagtgtgcctaaccgaccgttggcgcggaccacgtgtcacacgttgatcacgccgacgacccgtggctgctggcgt

SEQ ID NO: 57883 - DNA, 425 bp, Zea mays
  unsure (1)..(425): unsure at all n locations
actcagcttcacatgttggcacttgttttaattggcgtatataacctataacaacgcaacacaatgttaaaacgtagagaccttcgcccttgaattgttatctcttctggataacgatttaatgacgaaggcaaggtataatcgaatggaatacacgaagtatgatgaagatatgagaactcatctcctgtgctttagcattntatttctcttctcatacaagtttacaatcataccttcggtttcttgatgcaagatagcacgaaagtgtttctaaggttgagctatacgaagctgtagcatctggctaaatgtactttatgcgagatattgatcatctatntataggggagatgaaccgacctaatacaggagtacaattgtgcccttcactgtttacaaatgccattangacagtaatgtag

SEQ ID NO: 57884 - DNA, 408 bp, Zea mays
agcttatgaaattatctacaacttcttttatctatctaaagtttaattctgttgataaaattgactaaatcttaagagaacagattatgtacagaattgtgacactgaaaaactgctataatcaaactgcaataactttctgatctgatatccgattgaggtgttcttcacggccacagaaagatctacaaattatctacgactcatatatatactttttatttttttgaggcaactaagaccatggaaaactggcatgaacagaaactgtcgaatctgccattctgcaggaaactaaattcgagatcaaaacctaaccccacatctaatccaacctctaatccaacctctaatcctttaatttccatgatccacaacctccacaagcacataattacagggaggaac

SEQ ID NO: 57885 - DNA, 457 bp, Zea mays
  unsure (1)..(457): unsure at all n locations
tcgagtgagttcaccggaggtgagcgccaatgtttgtcacttgttctcaaatgctatgagttaataacaaggcaacacaaatgttaatggttaaagaccttcgttcttcgaagcattatttcccttatggtataatgatcttcagacgaaggtcatgaaggacataccttcatcatttcaatatacaaaaatatagacagggacatatgaaacatataaagaccatgaataattatatgaaatcatcaaatcattcatattgacattatataatcatgagcaaacattaatgatattaaactacatttgtaccttctgcttgacagaaggtaaaaatccgagagtgacgtgcaagcgattacaagtaagcgtgaacagtacagtgttattattcatctatttataggcacacgacgtagcctgtgtaaaattacatttatgntcctgacatttacta

SEQ ID NO: 57886 - DNA, 418 bp, Zea mays
agcttgtgaagggtcttcatccccacatgtgctaagcggcgatgccacaaccagcccatgctagtcttagctattaagcatgcatctagaccggcctcttcttttgcaaaatcaactaaataaagtttggcgtctaatacacccttaaaagctagtgaaccatcacttcttctaaagacagacacatctatatttgtaaatagacagttataccccatgttgcataattgactaacagatagcaaattataaccaagagactcaactaaaaacacattagagatagagtgctcattagaaattgcaattttacctaacccttttaccttgccttgattcccatcaccgaaaattattgaatcttgggaattcttattctcgacgtaggaggtggacatcttcttctcccccgtcatat

SEQ ID NO: 57887 - DNA, 475 bp, Zea mays
  unsure (1)..(475): unsure at all n locations
tctatgcaganttcaagtaaaattactggggggttaatttctaattgctatctcagatattaaacaattgtccttttctgttgcatcccacgttaatgaagctgtggctagtggatggctctttttccgctatttggtcattggaggttcatttcttctatctacttattattcaatatattcctactgataagtgtagtgtctcttgactcacgattgtttggtgtcttctgtatttgctaatgcagcttatgttggtcttgctactatagcgggttatgtttggtggttcgtttattctgataatggccctaaattaccatattctgaattggtatgttgagaatatggagttgttttcctttttccattggtgccagtgtgatntactggaactattgttcatggcctgtgtgagtgtatcctcacaatcaataaactttgacttcacatggtagcctgatagtcttgatga

SEQ ID NO: 57888 - DNA, 422 bp, Zea mays
  unsure (1)..(422): unsure at all n locations
ccggaccttaaggcacctgcagcatgcnagctctatcaaagggacgtgaagagtgcctttcttttggaccaatcaaggaggaggtctatgttgagcaacctcccggctttgaagatagagagtaccctaaccatgtttacaaactctctaatgcgctttatgggctcaagcaagccccaagagcttggtatgaatgcctaagaggttttcttatcgctaatggctccaaagtcggaaaagccgatcctacactctttactaaaacacatgcaaatgatttgtttgtatgccaaatntatgttgatgatatcatatatgggtctactaacgaatctacatgtgaagagtttagtaggatcatgacacaaaaatttgagatgtctatgatgggggagttgaagtattccttaggatttcaagtg

SEQ ID NO: 57889 - DNA, 455 bp, Zea mays
tgagaaccacgatctatccagtataacgcaccaatgctgtttaattgggtacgtatcaatgaaaggttagccatcgatatgtgaatggaaatacaaaaattatctgccttcattaattaaagaaaggttaaatatcacttgtcattctctatgtaacaacaataagccaataacaataatacgaccagttatagcacagggtgtgacaactctaacaacaattgaacattacataaaatatatagtgaaatacctgtctatcataacaaaatatataccagcgccggacacttccctccttgattgagactgtacagtctaaagtaatgaaatcagagaataagatgtcaggtttcatttttcttcaatgcccctatcaattgcctatctacagcaatacttgagactcgatactacagtatgtacttcgtacgagcatactttaaatgaacctg

SEQ ID NO: 57890 - DNA, 332 bp, Zea mays
agctttcaaggaattctgtgtacatattgttcgaagattcattttgcatcggtcaaacatccggagtcaaatggacttgttgaaagagccaatggtattataatgacgggaataatgaagttaatcttcaatcagcccacaggaaagtggccagatgaattgatcaaagtggtgtggagccacaacacaaaaatatcaaggtcaacaggttttacaccattcaaactattgtttggtgacgaagcaatcaccccagaagaagctaaggcaggatcaataagaacagtggcttctgcagaagacgaagctgattattctgtggcaaaaatgct

SEQ ID NO: 57891 - DNA, 429 bp, Zea mays
gacctatgatactcaagcttcggctttaaacagtttttagtgtttccgaagatgtccctaatgccgaagatactgcaatgtcagcagccttctgaggcgcgaaaaagaaaaggctgaatcgggtatttgatgccatcgggtttgtctaccctgactattgctaccccattcgaaggcagaagagaaaaaatacaacctctgcaaaagatgaaactgcagctgctcctagcgagccagaaccaaaaaggaagaagataaaggttcttacgcatcggccgcgttatattgaaccagcttcggtgcctgagtttaccggagagacttcttcggccaccgaagctgaaaaaccagccgagccaaccttgctgccagaagtcgcagaaacagccgaagtaccaacgaagaccaaattggagcaatcaaaaattt

SEQ ID NO: 57892 - DNA, 401 bp, Zea mays
  unsure (1)..(401): unsure at all n locations
agctntagtgttaagggagagagatttgttgtggtcttttgagctcttgcgcttggattgcttctttctttcattctttcttgcgatcatctcatttgtaagcaaggcaagagacaccaattgtgtggtggtccttgcgggaagtttgattcccaattgatttgagaagagaagctcactcagtccgagggaccgtttgagagagggaaagggttgaaagagacccggtctttgtgaccacctcaacggggagtaggtttgcaagaaccgaacctcggtaaaacaaatccgcgtgtcacactctttattcgcttgcgaattgttntgcaccctctctctcggactcgattatatntctaacgctaacccggcttgtagttatgattaaagttgtaaatttc

SEQ ID NO: 57893 - DNA, 390 bp, Zea mays
ttatttaaacgaagaatgaaaaccaatgcttgaactgttgccaaggtaggatatcttctagtagatgtgcttcgactctggcacagtactgttgactgtgcgagcttcggactcctctctgaagtctcgttgctgatgagtgtgctggctcccttctggctgctggcctcgatgcattaatggtggaggtggaggctgttgccaaaacacctgaggttggcttgccgaagcaacaaaagctgcatgatggttacccacatactctggaatgtatggtgagtgatatgaagcagtatgcataacttgcttcgactggctctattgggctgcagcttctgctatctctttctgtttctggatggtgacatggcacatccttgtagtatgggc

SEQ ID NO: 57894 - DNA, 215 bp, Zea mays
aaagaacacgccccttacggagaggccatccaagaaccgcgcgagccccctcgaatgccaccaacataacaacagaaaacaaaacgggaaaccacgagccacagaacacccacgagaacggcactcaacaaaggcgagcaaaagccgaagacgaagcaatcacaaaccaacccaaatacggaaacaaggacatggacaacaacaaccatgaaaac

SEQ ID NO: 57895 - DNA, 439 bp, Zea mays
  unsure (1)..(439): unsure at all n locations
tcagagcgccgaaggtctcanaaaacaccttccctgagctctttgtcgagaaacgattggattttcctgcgcgcagcggccccaccttgcagagatactgttcggtcactgcggtccaccgtacagcgagtgcgagcgggtgtccgcctggtgtaaaactcctggcgcttcaccttcttacctgcggcactatataaacagacgagtaggtgtgaagttaccacagcatttactgttatttgcactgttttgctgccaaaatttttaaccatcgccgaagcttgtttgtcagatttgaacgaagctccatcttgaagcctgcttcggagaaaaaagtatcaaagtttcacacgttcataattaaatggccagagttcgctctacagctatggttgagcgtgagggggacgaaactgaagcttccgagactgtgcccatc

SEQ ID NO: 57896 - DNA, 446 bp, Zea mays
  unsure (1)..(446): unsure at all n locations
aatattgcagactctactgttttctttcctgncatcattctgggtggaacgaatcgattcgacatgtatacgatgaaaccctcctccgaagcccctggctatttcggagaatctgtgaacttcctcccttctctgtcgaaagtcattgtcggcgcggatgtattcatccatcttctgaagcaacttctccagagtctgagggggtttcctggcgaagtattaagctgaaggtcccggccaaaagcccttgatcatggcctcaatgacaatttcattgggcactgtaggcgcttgtgccctcatgcataagaatcttcgaacatacgcctgaagatattcttcgtgatcttgggtgcactggaataaggctagagcatcgaccggcttacgttgatatccttaaaaactggtgatcagcatctncttcagcttctgccatgatgtga

SEQ ID NO: 57897 - DNA, 343 bp, Zea mays
  unsure (1)..(343): unsure at all n locations
gcttctgaagtgaccatcacatccgtgtagattggttatcagtaacacacccaaggtgcaactggcaagtggagtgtgccaatggcatgatcctacagagcctaaagccgaggatcttcaatgacctgaacaagttcggcaggcgatggctcaccgagctcccttcagttatctagagcctgaggactactctgagtagagccacggggttcacaccattcttcctgatctacggggccaaggctatcctacccaccgacctatagtatggntccccaaggctgcaggcatacagcaaacgcaacaaccaagtcagctatgaagactcactggaccagctgga

SEQ ID NO: 57898 - DNA, 125 bp, Zea mays
  unsure (1)..(125): unsure at all n locations
tatcataacanccttgggtggtacagctttggtgctcgctctggatcaagctgtcccgtgccaacctttctgaagagatggcccggngaatggatgaaagaatggttctatgttaaaaatgattt

SEQ ID NO: 57899 - DNA, 498 bp, Zea mays
  unsure (1)..(498): unsure at all n locations
agcttggacccgcatcatatcatcttcggtacaacgtatggggaacacactacttttcaagacattggtcttgagccccgaggcttccccaaaaagccgaaggatctccaggaccaaattgatgtctgaagccaccggcctaagaaaaaccaccgcgtcatccgcgtaaagagaaagcttgtgatgcaaagtcccagctgatagctgctgaagtaacccttcatcggaagccttttgaatgagcaagttcagaacatccataaccaaaatgaacaacataggggatagtgggtctccttgccttagacccctctggtgcgaaatgatctccccatgaacgccatttagcaaaattcttgtggaggaagtagccaacagcccacaaacaacatcacaccaaatcttgccaaaccccattttcctcanaaccccaatgagaaacggccatgacacggagtcaaaagcgctggcatcaaatctatgaccttgntgcaccct

SEQ ID NO: 57900 - DNA, 360 bp, Zea mays
  unsure (1)..(360): unsure at all n locations
agaacacattttaggactaacaaatgttcactttgagatagacaggatttgtagcgcatgtcaggcaggaaagcaagttggaacccatcatccacacaagaacatcatgacgaccgaaaggccgcttgagctactccacatggatctattcggcccgattgcttacataagcatcggcgggagtaagtattgtcttgtaatagtggatgattattctcgcttcacttgggtgttctttntgcaggaaaaatctcaaacccaagagaccttaaagggattcttgagacaagctcaaaatgagttcgggttaaggatcaagaaaataagaagcgacaatgggacggagttcaagaactctca

SEQ ID NO: 57901 - DNA, 455 bp, Zea mays
  unsure (1)..(455): unsure at all n locations
agctntaccaaatggacgtaaaaagtgccttcctcaatggaccaatcaaggaagaggtctatgttgataaacctctcagctttgaagatagtgagtaccctaatcacgtatacaaactctctaaagcgctttatgggctcaagcaagccccaagagcatggtatgaatgccttagagatttccttatcactaatggctttaaattcggaaaggccgatcctactctattcactaaaactcttgacaatgatttgtttgtatgccaaatttatgttgatgatattatatttgggtctactaatgaatctacatgtgaggaatttagtaggatcatgacacanaaattcgagatgtctatgatgggggagttgaagtacttcttgggatttcaagtgaagcaactncaagagggcaccttcattatccaaacgaagtatattcaagacatttctcat

SEQ ID NO: 57902 - DNA, 359 bp, Zea mays
  unsure (1)..(359): unsure at all n locations
tccagtctanagataacatagctccaagaaagggttcagtcccagaatacttagaacaaccaacaaccagtaaaggggccatatttctgtgaagatgctaatgtcagtccttgatcgataactgaatcaatgagcatatccagccagaatgggtttccaaccattgctttagactttggaaccaggttagaaatttgcagctactgcttttaagtatgaaatatgatatcaaagtttaattgtcaagtattaatggaatattgaaaaacaatgaatgtcaccggaggggagaggatcgccacctgaattgcattactctttntatgtggccaaaacgcctgattttattacagcagggg

SEQ ID NO: 57903 - DNA, 449 bp, Zea mays
  unsure (1)..(449): unsure at all n locations
agcttgtggaggaccacatcatcgaagcatattatttcctggatgagaagtggtcacccaagttttgttgatgaagcactagaagaccaatcaaagaagaaatccatgtggaagttcgcaagaggaaggtttgcgtgtcggcatcgatgcttcttcaataagctagctgccaagcgaaacctagaagcctgaagatgatctttgagtagccagaatcagtgtttgcaaacggcaaccagatgctcctcaaaggtcggattttggtgaagttccatctccttgaagagtctgcaaagtgaagatatgtagctaaagtaaagctatacccataacccttctaagccgaatctcgaggacaagattcattntaagtggagtagatctgtagcatcccaaaaattcaaatcttgaanatttctcacactcgctctaaattcanaatgaatttc

SEQ ID NO: 57904 - DNA, 256 bp, Zea mays
gttggctatcttatgcggttagcaaatataaatctaattcctatatctaacttggtcaaaaagtctaagtgtcatgtgtgtgttgaatcaaaacaaccccgctagcctcacaatgctgttgaagcgatgagtctggcacctctataacttgttcattctgatctgtgcaagatgaatggaattctgaccaaacgtgggaaagatactgtctcacttttatagatgactccactacattttggtatgtgtatctctt

SEQ ID NO: 57905 - DNA, 410 bp, Zea mays
  unsure (1)..(410): unsure at all n locations
ggatccttaagtcacctgangcatgcaagcttgtgttatctttgttgcctggcttgctgatattgtaaccgcgactgttttcgagctttgacattttgttttaactaaatctgagatggtcgaagacaaaaggagtaaagaccccgcactggttgggttttacgaagctatggagaggactaatgttgagaaaataactgatgagattttagctaggttgtctaaagattctggtgacagtgaggactttgatattgagagtgaaaatgatgatgctgaagatcgaccgcggaggccgagtcacgcggtcttcagtaaatcaactgtgaagaaaggtcatgttgaggctatgaagggtagatattttcatgatgtatctatagtgagaaccggcggtgaaaatactgttc

SEQ ID NO: 57906 - DNA, 434 bp, Zea mays
  unsure (1)..(434): unsure at all n locations
tctaaagggagaacacattgtatgactaacaaatgttcattttgagaaagatagaatctgtaacgcatgtcaagtatgaaagcaggttggagtccatcatccacacaagaacataatgacgacggacaggccgctcgagctactccacatggatctatntggcccgatcgcttacataagcatcggcgggattaaggactatttaattatcgcggatgattattctcgcttcactcgggtgttcttcttgcaggataaatcccagacccaagataccttaaaaggattcttgagacaggctcataatgagttcgaattaaggatcaaaaagataagaaagcgacatgggacggagttcataaattctcaaatggaaggatttcttgaggacgaaagcatcaagtatgaattctcttctcactacacacctcaac

SEQ ID NO: 57907 - DNA, 454 bp, Zea mays
  unsure (1)..(454): unsure at all n locations
atccttatagtctaactgctgcatgcgagcttctctctatcatcatcaaccttatcatataaccattccgagttacaccctgctgcccatttgcttcggcagctaatcacaggacacttcgaaggtttccgatnagcaaaactatagcaaccaaagttgtcatgtaatccatcctttctatcctttgtctgatagtgcagctcatgaactcggcaaaagctgtccgcaaacggttgcaccgcctggcttcagagtgcccaaatataaacattaagcctaacgatagcgttaggggttagctggcgaaaatagattccaaaattattcaatatctctgcaataatcccgtgaagggggaatctcaacccagcctttaagaagctgttaaaaataacaatctcatctctctgcggctgtggggtagtctcttctgctccgaagcgtaatagcttct

SEQ ID NO: 57908 - DNA, 442 bp, Zea mays
  unsure (1)..(442): unsure at all n locations
tgacccgaactgtcagtcttctcagttagctctgaaagtgttaccagccgtgattaggagtgttgggggtacccctaattatggtacccgacaacagcagaagcagccagtccttcatcatcggagtcggatgaagagtaatctgagttccattccttaccgatgtgcacctcgcccttcttctttctatagaactttttctccttctctttcttgtcttaatcctgagcattctctttatcgagacattgagcaataaaattaccatacttaccacacttgaagcatgaacgctttccccttgatctgttctagttggggtagtccttggtgtccttcaacgcagtctttgagagcacctagaggggggtggataggtgatcctaaataaatcanatactaatagccacaaaacttgggtaagtggtagtacgactaagta

SEQ ID NO: 57909 - DNA, 407 bp, Zea mays
  unsure (1)..(407): unsure at all n locations
tatgaagattcttcatcccaacatgggctagtcgactgtgcctgagccaacccatgttagtcttagcaattaagcaagtgtcgagttcagctctatcaaaatctaccaagtatagctgaccctctaacactcccttaaatgctattgaatcatcacttcttctaaagacagtgacacctacatcagtaaatagacagttgtagcccatttgacataattgggatacggaaagcaaatggtaatctaatgaatcaacaagaaaaacattagaaatggaatggtcaggagatatagcaattntacccaaacctgtgaccaaaccttggttgtcatccacgaatgtgataactcgttggggatcttggntnttctcgtaggaggagaacatcttcttctnccctgtcatg

SEQ ID NO: 57910 - DNA, 406 bp, Zea mays
  unsure (1)..(406): unsure at all n locations
agcttgctacatgccttcttcttttctccatatcaagaaccttactgtaatactaccccacttaanaagaatgagggtagaactattgaatcttggggatttgaactccttgaagtaccacataacaagggtgttacgggtccttctgctgctgttgctgcttgagcaagctgcggagagatgactggcacaaggttgattctgggagaaccttcttcttatcttctcttcactatcttcttttcactgaccctttctttctctttgctcttcccactggaggattctatcaaagagtattactatcatacactagaggaaaccaaagactatgaaccatgtgcaacagtcttcaacccaagaatcaccaagcattgtgatcttatgggcgagggagtggaaaatg

SEQ ID NO: 57911 - DNA, 241 bp, Zea mays
  unsure (1)..(241): unsure at all n locations
actcgctgcacgggtcacttatggtatttgttgtactaccttgctgtattactacctttcagtctgaagctcatgacgaataagatcaatttgttaatagtagtatagtacattgcgaagtctaacatattattgcgaaaagtgaactgaataagcagttgaagtctagaagatcaacagtcagtccagcattggttctgccatctntaanataataatgtgatgttagagactaatctat

SEQ ID NO: 57912 - DNA, 453 bp, Zea mays
  unsure (1)..(453): unsure at all n locations
tgtggtttatccaatgtaaaacaagcaccatctcttaacatagattttctatggataaactcaacataagagatggcattagtagcacaagcactagtttcttatttagcaaccattttatatgtgggaggcaagcgagttgctaaaatagagaaacctcataatatagactaaatttccttgaaccctcatgcacaatatattttgaatgacatggataatatgcatggttattcaatgaagcctagagggatgacttaatccatattatggtgtgtgtctaatatagaagaatcaaatccaaattaactagatagagaatacatcacataattgtggattgttcaccatatgataatattcattcaacttccaattagacctttatttcataatcaacaactgatgtatatcctcaagtgcttcttttnccttagtggctacacaagtcac

SEQ ID NO: 57913 - DNA, 498 bp, Zea mays
  unsure (1)..(498): unsure at all n locations
agcttatctaaacaaagtggtaagtccattttggtgttccactgaattccttttaatgtcttagagaaatttatcaagatttctagttgaacttattagagcgagggttatctttcatttctttccttctatttctcttatgcttttaaggtgggtttgaactacaagttaacttaataaatttccaaaaattctgaaaacattatatggtcttcttactagtgtatgactctgtctcaaaatttggggttcaaaaagtgaggggttctctctgtataaaactatcaaatattacggcagaggggggtgttttgaactacaactcctttataacagagggttattctctaagacatatntttgctggcatctagatgttataacatgaccttgtacaaaattctagccattaatacttattntgtattttgctatgattntctaaaagttctagccaaaggggtgctttctactaccactatactgagcttcttactg

SEQ ID NO: 57914 - DNA, 438 bp, Zea mays
  unsure (1)..(438): unsure at all n locations
tcctccaacactcttgagcccctcatgcattcgaagatagctatagatgccactgggaattatgaagctagtcttcggctcatcttccttcttcatccagaattgatgatagcctgaataacaatccaatagactcatgagctctgaagaagctgctgcatctacaagagagtctattcttggtagcaggaattcatcttntgggcatgcactgttaagatctgtgaaatcaatgcacatttctcatttgccattggccttcttcaccatgatagtattggctaaccactctgggtatttacctctctgatgacaccaacactgagaagcctttcacttcatgccgagtaccttcggctttatcatcagacattgtctaaatgccttgctttcttggcctgaaggatgggtccacattgagtgaatgtcaatgacatc

SEQ ID NO: 57915 - DNA, 259 bp, Zea mays
agcttgaactccgacgatccacaagacgtggaccttgatctcaagctatgattctaaaatgtccctagctccctttctcccctctcctcccttcgttgtgacgcgatagatttgttagtctgcttcatgggcattttcacttgtggtgcaataagtttctgaattggtgccactagcgctagtcgtcagaaccagtgcaatgcaagaggattatatttgccgccttttctgtaacgatatcgatgcctgccacaagcta

SEQ ID NO: 57916 - DNA, 215 bp, Zea mays
cttagccattaagcatgcatgtggaccgggctcttcttttgcaaaatcaactaaataatagtgcgccgtgtaggacacccttaatagctaccgaagcatcacatcgtctaaagacagacacatgcacatttgggaatagacaatgatatcccattgtgcatgaatgactaacagataacagagtgtatccaagcgacgcgactaataacacatta

SEQ ID NO: 57917 - DNA, 324 bp, Zea mays
ctatggtgagccacctcccgactttgaagatagtgaataccctaaccatgtttataaacgtctctaatagcgctgatgtgggctcaagcacgccccaagagcatggtatgactgccttagagatttccctatatataatgtgcttaaagtcggaaaagccgatcctactttattcactaaaactcttgaaaatgacttgttcgtatgccagatttatgttgatgatattatattcgggtctactaacgagtgtacatgcgaagaattattaggatcatgacacaaaaattcgagatgtctatgatggtggagttgaaacatttc

SEQ ID NO: 57918 - DNA, 393 bp, Zea mays
cccacatgtgctaagcagcgatgcctctgtcagtccatgctagtcttagctattaagcatgcatctagaccggcctcttctttcgcaaaatcaactatataaagtttgccgtctaatacacccttaatagcttgtgaaccatcacttcttctaaagacagacacatctacatttgtaaatagacagttataccccatgttgcataattgactaacagatagcaaattatatccaagagactctactaaaaacacattagagatagagtgctcattagaaattgcaattttacctaacccttttaccttgccttgattcccatcaccgaatataattgaatcatgggaatccttattcttgacgtaagaggagaacatcttctccccgtcatat

SEQ ID NO: 57919 - DNA, 409 bp, Zea mays
  unsure (1)..(409): unsure at all n locations
cacattagcctccacactactgaatntaccaaatgtgcttacaatgatgattggttgtcttggtattcaaaatgatatccataaaggatatgatgaatctgtgatagattcgaaaaatttcagatcattaatgaccatcaacaatgaattgtcatttccaactggttatggttggagtcaagaattttgcacgctcctgacttgtgattaactgcatgtactgtatgtacaagttcccctatggtttttagtacgtgggaatccgtgaaatatttcccatgcgtacattgngtatgttcccaatctcaccaccgcagcgtacatatatgggcacacaaaanaactggggatctatgtgagaattcattctncgtcgatcattaagttntagaatctcttcatgagaatc

SEQ ID NO: 57920 - DNA, 393 bp, Zea mays
tgtcaacatcaaggccactggaattgcttcacatggatctatttggaccaacaacttatgctagtgctggtggcaacctctactgtctagttattggtgatgacttttcaagatacacttgagtgttctttctccatgataaatctaaagttgcatctatattcaagaagtttgccaagaaagctcaaaatgaatttgattgcaagatcaagaagattagaagtgacaatggaaaagaatttgataacaccaacatacatgaatattgtgatgagattgggatcaagcatgaagtttcagcaacatatacacctcaacaaaatagagttgttgaaaggaagaagaagaccttgatcacacttgcaatgacaatgattgatgagtaaaacacac

SEQ ID NO: 57921 - DNA, 115 bp, Zea mays
cacctgaggcgtgcgagcttctaaagggagagcacatgtgaggactatccactgttcattgagagaaacaccgggttgttaacccatggtgggctagggagaaagttgtggttct

SEQ ID NO: 57922 - DNA, 306 bp, Zea mays
  unsure (1)..(306): unsure at all n locations
ttctctaaacttaggttanggtttacccctttaaccactatttatggttaagtcctttaaccagtgttctatttgcaaaaacaataaaacttgcttgaaattcttgcctaatgaatgcacacttggtgctgcaaacatttgcaatgccaatgctatgatgccatgctcaagttttagttatagtaacaccaggggtggtacacacacaagtcgcaacaagagctcacaacacgactcaatgagttcacaactcaactagagctctaatttgctatccaaggaatcaaagcgcggaatcgatgtctt

SEQ ID NO: 57923 - DNA, 453 bp, Zea mays
  unsure (1)..(453): unsure at all n locations
agcttcgcatcaaaattcttcttttcttgctcgaagctttctgactttaggaggacttcactatttaatctagcaatttcggcttgggattctgccagtgaaccctccattgtttgaagaagaaaatctttcttttcaagagcagcttcatgatctttgattttactttccaagccctcaattataacttcatgcttcttatcttcgaggtcctgttgcatcctcaaggctttacttagtaacatactctgtgcaaaataacctttcatcagaaatcaccttcatcgcaaaacaataaaaagttgagggataaaccttaccttanaattagaatagaataagttgccgacgatacgctatcgtcagtagctgctgatgtcagcttcaagttntggaaaaccaacactcttcgacagagtgctgataatctttgctccagttcgatctcgaatg

SEQ ID NO: 57924 - DNA, 496 bp, Zea mays
  unsure (1)..(496): unsure at all n locations
actaagcttcttagggagagcacattntatgactaacaaatgttccttttgagaaagacagggtttgtagcgcatgccaagccgggaagcaagttggcactcataatccacacaagaacattatgactagtgacaggccactagagctcctacacatggatttattcggcccgattgcttacataagcatcggcgggagtaagtactggctaagtattggggatgattattctcgcttcacttgggtgttctttttgcaggaaaaatctcatacccaagagaccttatagggattcttgagacgggctcaaaatgagttcggcttaaggatcaagatnattagaagcgacaacgggacggagttcaagaactcacaaatagaaggcttncttgagganganggcatcaagcatgagttctcttctccctacactgcacaacanaatggtgtagtagagaggaagaatcgtactctattggacatggcaagaaccat

SEQ ID NO: 57925 - DNA, 436 bp, Zea mays
agctcttgaccggtcgggcactactactcttatcttttagtagttggtcaaatgcgccgtactactatgtaacatctcaactggaatggagaaaaacaaatgacgtgctagcctcgggctgtcccaggcataaccatcgtatgagctgggattactcttttcagccactttgcggacttgttgagctcagctttacagttcatgacgagacgtatctttccgtttcccaactgtctaaacgattccgaagtacagaccgcatcgaagatgagtagtagagttcttggtttggtgccctcccaaaaagaccatggtcccccattcgaatgcaaataatggcatttttatgaggtcaatgaaagcgataagcacgttattatccttcgtattcgtaatatagtacagcacagcgtgttgcggccgaatcttacttgca

SEQ ID NO: 57926 - DNA, 443 bp, Zea mays
  unsure (1)..(443): unsure at all n locations
gacactttaaactaagcnttggacaataggaatttgttcagcttctcactctgtgttttaaataaaaagaaacaggcaacaaatatagtgaatatgctcctcccgtccctgtcgcttggtggatcacccccacggaaccaccctatccaaagacaggtatgtgcatgatgttattcttggtagcctataatcatctttgcctcaaagtgcttctataggtaaatgaatgtagtgcaagtttttatttctattntctgctccaactgttttctatgctacttccttagtgttagttcaccatgcataagtcatctgcagaaagtgtgcttcttcctaaccaactgtatatgctattaattgtcttctaatttcaatagtataaaagtggtagatcgttanggaggtacacaagtgcagccaccactgtgatgtccttgatgtat

SEQ ID NO: 57927 - DNA, 404 bp, Zea mays
  unsure (1)..(404): unsure at all n locations
agcttaccgcattngaagcatgatcgctttttcttggtcttagtcttgcttggctgtcccttgcgactctttaatgccgtcttgaatcttttgatgatgagggccatctcttcatcattaagaccggccgcctcaatttgcgccaccttgctgggtagcgcctccttgctccttgttgccttgagagcaatgggttgaggctcatggattgggccattcaacgcgtcgtccacgtatctcgccttcttgatcatcattcgcccgcttacaaattttccaagaatttcttcgggtgacatcttgatgtacctatgattttcacgaatattgttcaccaagtgaggatcaagatncggtaatgaccttatcattatgcggacgacgtcgtgatccgtccatcgcgt

SEQ ID NO: 57928 - DNA, 228 bp, Zea mays
ttctgcatcccgacatgggctagtcggctgtgtctgagccaacccatgctagtcttagcaattaagcatgtgtcgagttcagctctatcaaaatctactaaatatatctgaccctctaacacaccccttaatgctattgaatcatcacttcttctaaaacagtgacacctacattcttaaagagacagctgtagcccatttgacataattgggaaacagaaagcaagt

SEQ ID NO: 57929 - DNA, 499 bp, Zea mays
  unsure (1)..(499): unsure at all n locations
tctcccggatccttaagcacctgangctgcagcttctaaggggaacacattntaagactatcctatgttcattntgagaaagataggatctgtagtgcatgttaagcaaggaagcaagttggagttcatcatccacataagaacatcatgacggtcgagaggccacttgagctactccacatggatctattcgggctgattacttacataagaatcgacacgagttagtattgtcttgtaattgaggatgactattctcgcttcacttgcgcgttcttttgcatgaaaaatcacatacccaagataccttatagaaattcttgagacaagctcaaaatgagttcggattgagaatcaaaaagaatataagcgacaatgtaacatagtcaagaactctcatatgaaggatntctcgagtaagaaggatcaagcatgagtccttttctccctacacacctcaacaaaatggtgttatggagagaaagaatagaactctaat

SEQ ID NO: 57930 - DNA, 374 bp, Zea mays
  unsure (1)..(374): unsure at all n locations
gtatcatatggacgtgaaaagtgccttcctcaatagacaaatctatgaagaggtctatgttgagcaacctcccggctctgaagacagtgagtatgctaaccatgtctataagctctctaatgcgctttatgggctcaagcaagccccaagagcatggtatgaatgccttagagatctccttatcactaatggattcaaagtcggaaaggccgatcctactttgatcactaaaactcttgaaaatgacttgtttgtatgccaaatntatgttgatgatattatatctgggtctactaacgagtctacatgtgaagaatttagtaggatcatgacacataaattcgagatgtctatgatgggggagatgaactact

SEQ ID NO: 57931 - DNA, 302 bp, Zea mays
  unsure (1)..(302): unsure at all n locations
tagctcctgatctggtgtgaagttttctgttcatatcatanaaagaaccttgacagagagaacagaacttggttttattaacatctcttgttcttttgttcgccattctgaagtaagctgtgtcacctgaatcccattcctgtgctccaacactaactaatcagaattaattcaggaccataacttgagaaaacccaatgcttatcaacattgaactaattggtccaaataatttaaccacctttactgaaccattccgcaacatgtgaaaataacatcccagtttttttctccaaatcacc

SEQ ID NO: 57932 - DNA, 328 bp, Zea mays
tacaagttggagcacccacatttataatagctctaattagttatgatctacttctatgacatgctcatgaattattaacccaagaaatttctagccggcaccccaaaggaacatttgtgtggattcgtctttaaaccataccaacacatcttctcaaaaggatttatgcaaatcagctagatgagaatgcaaatcgacagaattcactactatatcatcaatatagatttccacaatgtttcataacggctcatggaaaatcaaattcatggccctttgataagtagtgtccgattctttattccaaactcatgacagcccactcaaa

SEQ ID NO: 57933 - DNA, 478 bp, Zea mays
  unsure (1)..(478): unsure at all n locations
agcttcngctatgggtaaattttntaacagcgcaatagtgcaatggcaatgaatgttgtggtaactcctcaccaatctgtctatttatatagtatcgcaggggggaggtgaaccgccaggccgctcgcactcgctgacctgtggaccatccggggcctggaatattataattgtttctcgacaatgagctcagggaaggtgttttttggaccttcagcattccgaagccttcgtgtttttcgcggatcgagcttgttatgaaaaacgatctagcaccgcgaaggggctactgttgggggccttcttctccgccgagggtcctctaagaaaaaacaccttcggtaggataatacaagcaggtgtaacatgaagatataagccgaagctacgatngaaggagcttcagcatggtgatgtgctaaagacaaaggaccataccgacttataggggaaaagactgtgtagtccctgatgatct

SEQ ID NO: 57934 - DNA, 412 bp, Zea mays
  unsure (1)..(412): unsure at all n locations
tgtgaaggttcttcatccacacatgtgctaagcggcgatgccacagccagcccatgcaagtcttagccattaagcatgcatctagaccggcctcttcttttgcaaaatcaactaagtaaagcttgccgtctagtacacccttaaaagctagtgaaccatcacatcttctaaagacagacacatctacatttgtaaataagcagttatatcccatattacataactgactaacagatagcaagttatattcaagagactctactaaaaacacattggagatagagtgctcattggagatgcaattntacctagcccttgtaccttgccttgattcccatcaccgaatattatggaatcttgggaatccttattctttacgtaggaggtgaacatcttcttctccaccgcatat

SEQ ID NO: 57935 - DNA, 486 bp, Zea mays
  unsure (1)..(486): unsure at all n locations
agcttccaaaaaaagtcatcagcatcatatatttaagaatggaggtagtatataacttgactattggtggtcgaattntgtcaaatttcactttccctgtacaaaatacacttataattttgggatgtagtgagtttatattatgggagtatttttttcatgtagtaatagcaatgttatttttttccaatctatatgattgtgtagctacagatggtcaaagctaaaaacttttgacatgcgacaagcctaaaatgacttatattcacgttgaagtataatgttacatgagatagtttggtctcgtgtgaggcatgctttctatatgcatatcaggtcatgtatattatctctagatntaattttattgagacatgtgagcttcagaatagtctaatgtaactaatgcaaacaacacaatannatttgaaacatgatttcttgttaggttggcgtgacatggatgttttaacaacacatttgatc

SEQ ID NO: 57936 - DNA, 329 bp, Zea mays
  unsure (1)..(329): unsure at all n locations
aaaactaagcttctaagggagaacacgtgataggtttaactaacgtgcaattcgaaaaagatagaccttgtgcagcatgtcaagcaggtaaacaggtgggaggagcacatcacagcaagaatgtgatgaccacatcaaggtccctggagctgctacatatggacctcttcggacccgtcgcctatctaagcatatgaggaagtaagtatggtctagttatcgttgacgacttttcccgcttcacttgggtgttctttntgcaggataagtctgaagccaaagggaccctcaagcgcttcatcaggagagctcataatgagtttgagctc

SEQ ID NO: 57937 - DNA, 493 bp, Zea mays
  unsure (1)..(493): unsure at all n locations
agcttccaatgttctacactgaccttaagaatgggttggttgagcagaatgcagaaaacacagatgaccttgcacactctgtcagttctgatagtgaattttgtgacaatgattatgaggtggaactaggagatgcaaatttgcttgatgaactaaaggcacaaagttgaaatccacaaggggttgatagaaacttaggagacagtgatgacaatgacatatatgctaaaaggctagacatgccacagtctaactcttatggngatgaatctatctttcagacatttgaggaagaagatatggccaatccttccttctatgttagacttatgtttagttgagttgaaagactcatagaaggtatcatagagtataatgtcagaaataggatggagattaagatggctaggaatgataggattagagtcagagctcactatgctgaanactatccatggagttggatgcttcatatatacaagagctaagtctt

SEQ ID NO: 57938 - DNA, 415 bp, Zea mays
agtgaaggatctgtatacgcacatgtgctaagcggcgatgccacagacagcccatgctagtcttagctattaagcatgcatctagaccggcctattcttttgcaaaatcaactaaataaagttagccgtctaatacacccttaaaagctagtgaaccatcacttcttctaaagacagacacatctacatttgtaaataggcagttatatcccatattgcataattgactaacagatagtatattatatcccagagacgtaactaaatacacattagacattgagtgctcatttgagattgcaatgttacctaaccctcttaccttgacttgattcccatcaccgaatacaattgaatcttgagactcgttaatcttgacgtacgatgtgaacatcttcttcttcccgcgtcatat

SEQ ID NO: 57939 - DNA, 477 bp, Zea mays
tgcgatcttcaacccacttgacacctgtgggtgatctcattttatagagccaaatcaaataaatatgacatagagaacaaactgtatttatttagccttcaccctcatatattcctgtgactaaatcagagtctttgacaccaaacacatcagatgtactcactttcccctaataagactaagaaagaaaattggcttagtttaacttcatcaggagatatcaatgactaactgcgtaaacagacatgcatccaaagcctgcttcagatacaacaggaatcaaattcacattattacaagtctaaagtatctaacccaatccatccttgctctatttcaatctgaacacccctcccccaatcttatgaaaagagaaagggactctatttgagccacataataatatctggtccttttctttagatacaacatacgcaggcgtcaactcaatgggcttatgtctctctatagtacata

SEQ ID NO: 57940 - DNA, 428 bp, Zea mays
tgaggtcatatgatggattatgatgtagtcttttatacctggaaagactcgttataactaagcttggaatagaccattggtgaggtcataagataaaaacgttactttcaccaaaaccaccgaatataagctgttttaactggaaagacttgtttcttgcggtatttggcctacaaaagttgactggtttactatattggcatgttcatgttggaatgaactactcggacatataaaatgtctattatgcacttaaagtatttgaactcttaaagctattttctctaatcataactacaactttatgattgattgatcatcattaccattagttgttgtagtaattcttgtggattgagatcatattttcttggtatcgctacgtaaaggttaaaattcatgacttatttagacgacataaatacata

SEQ ID NO: 57941 - DNA, 437 bp, Zea mays
  unsure (1)..(437): unsure at all n locations
agcttanaacttcagagacaaaggatactgaggcttgctttttgatttagcctaatttctcctgcacaagcgacgcactcactgcagagtgcgaagctgccacatataatagtaacagagcccctggcgcaggtggagttaatgttgttagatcaatcatgtattgcttcagctcttcgaaggctttctgttgagctgggccccactgaaagacatcggccgacttttgtatttcaaagaatggcaagtttctttctgctggtctagatataaatctggtcaatgaagccaatcttcctgccaaccgttgggcccncttcttcgtacttggcgaatccattcgaagtatggcttcgatcttgcttggattggcttcgatccccttcgttgaaactaggcatccaaggaacttacccttctttactccaaagacacat

SEQ ID NO: 57942 - DNA, 319 bp, Zea mays
tctatagggagaacacattgtaagactaacaaatgttcatcttgagaaagacaggatatgtagcgcatgccaagcatggaagcaagttggcactcatcatccgcataataacataatgacgaccgacacgccactggagctcctacacatggatctattcagcccgatcgcttacataagcatctgagggagtaaagactggctagttatcgtggatgattatacacgctttacttgggtattctgtttacagaataaatctcaaacccaagagaccttaaagggattctcgagacgggctcgaaatgagttctgaata

SEQ ID NO: 57943 - DNA, 464 bp, Zea mays
  unsure (1)..(464): unsure at all n locations
agctnggatattcttcatcagaacactatggatgttgttgtgataaatgaaaattcttcttcacgaagcatgaaaagaaaggaaggtgttttttcgtcaaagactcaaaaacggtacgtatgtaaaatttcatgcatcgtaaagaattgaaccataaaaaaaaggggacaagtatattacattcaggattacaagatattatacatattatatttcagatgtttttacaatagcacctattcttccctaagtactacttccgcagcttcattcaggagttgattaacaacttgatccatgatagcttcagccatctttntaatttcatcgtcatctttcggaggagggcccggagacgctttagtaggatctganggaggacaggatacggctacattgctatttacaaattgcgaacgaagttaaaatcaaaatacaacacaataaaaccattagtaatccta

SEQ ID NO: 57944 - DNA, 350 bp, Zea mays
  unsure (1)..(350): unsure at all n locations
tgccttcgcctccgtatatcacccgcaatctaacggcatcgtctttcgcgccaacggcaagattttcactgctatcaagaagaggcttctcgatgacaagaatggtaaatgggccgaccagctgcctgaactaatctgggcactcaacacaaccgaatgccaggcaactggattcactcctttntgactactatatggatcataggccatgaccccgcaagaaataaagcatgggtcacctcgaacaagcgcatcttgtgtccccgacgtcgacgaacccatgtgcaaagacctcatcgactgagaccgcgtcttctgcctgcatacccttaacaaataccaagctcaaa

SEQ ID NO: 57945 - DNA, 418 bp, Zea mays
  unsure (1)..(418): unsure at all n locations
agcttaaagccatggtaagtagcataagaaagttatatacgaattgactcaagcctagctacgggtgcataggtttcatcgaaatccaaaccttcgacttgtgaatatccctttgccacaagtcgggctttgttcctcgtcaccacaccgtgcttatcttgcttggtgcggaatacccacttggtacctacaacattttgattaggacgtggaactacatgtcatacctcattactcgtgaagttggtgagctcctcttgcatagccaccacccaatccggatctcttagtgcatcctccaccctgtatggctcaacagaggacacaaaagagtaatgttcacataaatgagcaactcgagatctagtggttacccncttgtgaatgtcaccaaaaatggagttcacggggtgatctc

SEQ ID NO: 57946 - DNA, 274 bp, Zea mays
  unsure (1)..(274): unsure at all n locations
tgctgcccttgtttgaacaatttggagattaaatcttgattcattataaagtttcttgcacttggttgcagttgtactgttttttttataataaaggtccaatcgatctagtgtcacaaaatcctttccggatctcttgtttgttgccttattatacttgtcaattaatctaccatcatttntcattatgaagcattttcactgtacaatgtcaccacccatcgtacccaaacatcttgaatttcatctgtttaatggagattgttgctattat

SEQ ID NO: 57947 - DNA, 480 bp, Zea mays
  unsure (1)..(480): unsure at all n locations
gcttctaagggaaagcacattntaagattatcatatgttcattttgagaaagacaggatttgtagcgcatgccaggcagggaagcaagttggagtccatcacccacacaagaacatcatgacgaccgacaggccgcttgagctactccacatggatctattcggcccgattgcttacataagcatcggcgggagtaagtattgtcttgttattgtggatgattattctcgcttcacttgggtattctttttacaggaaaaatctcanacccaagagaccttaaagggattcttgagacgagctcaaaatgagttcggcttaaggatcaagaaaataagaagcgacaacgggacggagttcaagaactctcaaattgaaggcttccttgaagaggagggcatcaagcatgagttctcctctccctacacgccacaacaaaatggtgtagtggagaggaagaatcgaactctattggacatg

SEQ ID NO: 57948 - DNA, 406 bp, Zea mays
  unsure (1)..(406): unsure at all n locations
ctcagcttacgaattcagattgacttgtgctagatcctctattctttcccacgcgttagcagacttcattgctgactggacaccatgggctcatgatgaagaaacaaatatagatgccgaagcttggatagtgttctgcgacagatcctgtggaaccttctgtgcatgtgcggctgctgtcttatttgcaccttccaatgtcagaacatgttatgcggcaaggcttgacttcagttgtacaaataatattgctgaatacgaagctctacttatgggcttcgaaagttaaaggcaatgtgaataagatcgaccgtccttaatacagactctcatagtatttctggtcatattgacaagagttgcaaggcaagagatccanagtttgagaaatatctagacacagttc

SEQ ID NO: 57949 - DNA, 403 bp, Zea mays
tgtgttttccttcatcattttttgatatgcaagtacacctaatcatacatctcgtggatcagataaaaatattagggccactacatttacatcatatgtttcagttggagcgatacttgggagtattaaaaggttatgtgcgaaatcgcgctcacccagagggttcaatcatggagggatacactacagaagaagtgattgagagctgtatagattacatcagtgacggaacaatgataggtgtgcctgtacctaaacatgagggtaaactatgtgggagagggagaatgggcaagaaaacttttcgcgttgaggattacaagctagtacattgtgctcatggtagtgtactataacatctcacgatagcttgaccttacatagaggaacacctggatgagct

SEQ ID NO: 57950 - DNA, 490 bp, Zea mays
  unsure (1)..(490): unsure at all n locations
ngaagccatggtaagtagcatatgccaataatatgcgaattgactcaagcctagctacgggtgcataggtttcaccaaaatccaaaccttcgacttgtgaataccccttggccacgagtcgagctttgttccttgtcaccacaccatgctcgtcttgcttgttgcggaagacccacttggttcctacaacattttggttaggacgtggaactaaatgccatacctcgttccttgtgaaattgttgagctcctcttgcatcgccatcacccaatctgaatcttgtagtgctttctctaccctgtgtggctcaatagaggaaacaaaagagtaatgctcacaaaaatgtgcaacccgagatcgagtggttacccncttatgaatgtcgccgaggatggtgtngacggggtgatactcgtggattgctnggtggactctggggtgtggcggccttggttgtcatcctacttgcttcatcatttgcatctccct

SEQ ID NO: 57951 - DNA, 478 bp, Zea mays
  unsure (1)..(478): unsure at all n locations
agcttataaaattctctacatctaagagttgtagtcatgtcagtttgattagaattgatattataaaacacttccaattcagtcagcccttcttctcaaatttgtgaacttcacttttgttttgtggctttgcatcccacttctatttcttgatgtgttggactcttagcatgtataaagtgtcttaaatatgaccttgtaatgtattctatgggtcttataatgtattctttgaggtgttgcatcctcaaagcctcagtccaatccacatcacatcatgtgaactacaaagcacaaacacttgggaaacattagtccacaaggttatgttgatcataaaacaccaaaatcacttagccaaatggcctggggtccattntccttacaggaataaatgataatacatataaacttgagtttcactgaagtttanggtagttccaccttaatatatagattgaagctatatgtggcactc

SEQ ID NO: 57952 - DNA, 474 bp, Zea mays
  unsure (1)..(474): unsure at all n locations
cagcttagctgattagagtcccttggtggattatccccttatttatcttttccatttcttgacacaaagtgttgtcagatgtcttcaccataagacagtggcaggaagccttacggctcattgcatctgccaccacattggctttgcctgngtgataatggatctccagttcatagtctttaataagctcaagccatcgtctttgcctcatatttaattccgactgggtgaaaatatacttcaaacttttatgatctgtatatatgtgacagatatttcccagcagatagtgacgccaaatctttatggcatgaaccacagcagctagctccagatcatgagttgggtaatgctcctcatgtcggcgcaacttccttgaagcatacgcaattactcggccctcttgattaatacacagcgagtcactgctgacgcatacatatacataaaggcttatgatgccggtgactatac

SEQ ID NO: 57953 - DNA, 434 bp, Zea mays
  unsure (1)..(434): unsure at all n locations
gatggtccttaagcctctttgagatccttaaggccccgtgtgtttcctttcatttcgaggaattggaatcttactaatggaataggctatttttgtagaatatgacattccaccactttccaaagttatcatataagcctacctcaaattcatgaggtgagagatggaaatggattctatagatttacatgctatttttccgatgtacaacttatagcacattcttctacttgcgcctttataacataaatgtagtatataactatctctctcatatgatttaggataatatacaaatatattacatatataaatatataaacttaattagctgtgttaaattatattataaaatggattcaattcaacgaaactacgggccctaaganaatgcttanatattngaacatgctttagtagtgctaaactgcatg

SEQ ID NO: 57954 - DNA, 442 bp, Zea mays
tcaccgacatctgggaattttttatcgggagatggctcaagaaatcataatgagaagtgagaaaggtattcaccatgctagaaaagtggcacaggctgctgacaaaaatgcggatctcgagaggcgaatacgtattgactactaacttttggctttatgttgtaattttatgacttcggacttatttacactttgtaacacagccgcactatctccttccctatagcccgccgagccattagcaaaccccgaagcaaaaaggggatgatgaaattagaaaaatggtcgaagctattatggataaagttgttgatcaactactaaatgaagctgcagaaggtagtttaagagaagattagttgttaattgaaagacatttggaatgaatatttgctggcaatatgtgaatattttgaatcttgatgtatatataagtgtctat

SEQ ID NO: 57955 - DNA, 447 bp, Zea mays
  unsure (1)..(447): unsure at all n locations
agctctgtgatgatctttcanaaacttggtgaaaatgttaaaattcgaatgaatcttagtgctgagattttttaaaaaacttttctcttgaagctcaactggcttgaccagctgaactagttcagctggaggaggccagctgaacttcggagctgaacttcagctcagctgcttttaaccagattttaccaggaccatcctggtcaaaaccggttgaaccggcattgaagaccggttgaaccggtctctgacaggtcagcagcgtgcaggtctgtcagatgctgttcttttgcagggcgcgcagaatcttttttttaaccagtcgcttctgcacagctttgtcagctcgcgcgccagatattttntntggagctgtccggtcacagccaggcatgcagcgggtcagggtgccatgcagtaatttttttgtcacagctatgctctagt

SEQ ID NO: 57956 - DNA, 254 bp, Zea mays
tcagcttcgaaggcaccagttgttgagagcacaacatctaccgaagctgtaccttcggaagctacagctaccgaagctgccacagccatagatattcacttagaaagcacaattgctaatattgataaaatatgctagacatggccgcagaagaagctgctgcagccaccaaagagactactgtcccataacctgagaagaagaaagaaatagccgaagacacttcggaagatgaaatttttaactttcaaaac

SEQ ID NO: 57957 - DNA, 405 bp, Zea mays
catgcacttcttcaaagatttttttaataatattccacgaagagaaaaagagcacgccgatctgctagccaagtcagcggcgcaggggctgcctttaccttcgaatgtattctttgaaacaataaaaacactttcggtggaacttcttgaaagagcagtgctcaatatatctcctgtttatagcgaagaatggagaaccaagatcatgtcttctctccagggcaatttcctttcagatgacaaagcttattataagagaatagaggccagagctccaccatatgtgataatagaaggggagttatataaacatggagtctgttctccattgctcaaatgtttatctagagctgaagggatagaattgatgaaagaaatacacgcacgcctgtgtggttctcacat

SEQ ID NO: 57958 - DNA, 458 bp, Zea mays
  unsure (1)..(458): unsure at all n locations
ntgtacaacaataaatctggttggtacggtttgttttgcgagattcttacaagaacacgtgatgttggcacacgtcaacatgatgacagagcaaggctaatgtggccacctctggtgcgaggaaaccggctggacttttaataaaagagaccagtagttaagcatgtatgtctcagaactaaatcttctcaaagacacaaacaagaccccatgaggttacccgatccacgttaaaaaactatcacataaatgctggaggtaccatcactttgtgcantatgactgattctgttgtccttattaaggaatggataatatagtctgtacaatggatagtttcatacgttatgtctgatatatacatacaactgatacaagaggtaatgtgtgtagatatacctccatctatgtaaaacttatgtcatcttctatccattaattggttgcatatcatttga

SEQ ID NO: 57959 - DNA, 480 bp, Zea mays
  unsure (1)..(480): unsure at all n locations
agagtaccaagatgaactcattcgtgttaagcacttggagtcaagccaagattctggcatcaaagatccgcgcgctttcacagatcaatcgtccaggagctataagctgctcggctggctgntatggctggagaatacacttctaccaccttgaaggctcaacacgacaaggctatggacaaagccattcgcgcanggcggatcttgatgagaaggccgggtgtgattgtattagaaataggggcaatgtgctcgaatattctattagaaaatgttctcggtactaaacgctattattatttntctggtgttggaattcaacagtcgctatgattgcagaagtaagtgcagagtgatggtgtngaaacttcctcctatttcgcggtgcatggagatcgccctaagacgagcaatcgagaacgtgcttatgctgaatcgagtattcgcgagcatgtcgtgctganttaagtcactaccgac

SEQ ID NO: 57960 - DNA, 439 bp, Zea mays
  unsure (1)..(439): unsure at all n locations
tatcaacagtataagcataaaagagagaaggctgcttcagctgatcagccgaagcatatgctnttgtgtgaagacatagcagagcaaaaagtatttataggatcttagctatctggtgaacaggaaaagactgtgctaagattcttgttcaacaacaaagatgtctttgcttggatagctaatgatctctgtggtgtcaatagagacgttattaagcattcactcaatgtggacccatccttcagaccaagaaagcagaggctttggaaaatgtccgatgataaagctgaaggtgcacgaaatgaagtgaagagacttctaagtgccggtgttatcagagaagtaacatacccagagtggctggccaacactgtcatggtgaanaagctaatggaaaatagagaatgtgcattgatttcacagatctcaacangatatt

SEQ ID NO: 57961 - DNA, 403 bp, Zea mays
agctctattccagtgcacccaggaccacaaagaataccttcatgcgtatgtacgaaggctcctgcgtctgatggcacaagcaccaacagtgcccaatgaaattgtcattgatgccatgattaaggggcttcggccgggacattcatctcaatactttgccaagaagccttctcaaactttggagaagctactccagaagatggacgagtatattcgagctgataatgaccttcgccgtagaagggaggaagcatacaggttctctgaaatgaccaagggcttctgaggaagattccatccgaagcacgtcaggtcaattcacaactctactcagagtgatgatagagggagtcaacagccaaggccacagtactcctcgcaagcttcggagcaacatcaaagc

SEQ ID NO: 57962 - DNA, 416 bp, Zea mays
  unsure (1)..(416): unsure at all n locations
tatgaaggttcttcattccaacgtgtgctatacggcggtgccagatccagcccatattattcttagcaattaagcatgcatctagatcgacattctcttttgagaaatcaactaagtagagcttgccgtctaatacacccttaaaggctaatgaaccatcacttcttctaaagacagatacatcaatatttgtatataaacaattataacccatatgacataattggcttacaaacaacaaattgtacctgagcgattctactaaaaacacattagagatcgaatgctcggttgtgatggctattttgcctaatcctttgaccttgtcttggttcccatctacaanaatggtagtgttggngactngttctcaaatactatgaatcaagaacaaggcaacacataatgtaaatatc

SEQ ID NO: 57963 - DNA, 471 bp, Zea mays
  unsure (1)..(471): unsure at all n locations
agcttactcacgcgccactactccaacttnctgactttggtaagacttttgaactcgaatgtgatgcaagtggagttggcattggtgctgttttgatgcaaggaggtaaacccgttgcatattttagtgaaaaattgaatggtcctgttcttaattattctacttatgataaagaactatatgctctcatacgatctttgcaaacatggaaacattatttgtggtctaaggaatttgttattcattctgatcatgagtcacttaagcatcttcatagtcaaacaaatctgaaccgtagacatgctaagtcggtagaatttcttgaaacttttccttacatcattaaatacaaaaaggggaatgataatgtgattgccaatgctttgtctagacactanttgtatgtgtctcaacttgattggtcgtattttggacttgaaacaattaagggacaatatgctcttgatgatg

SEQ ID NO: 57964 - DNA, 434 bp, Zea mays
  unsure (1)..(434): unsure at all n locations
ctaccctgtagtctggactataagatggttacgttaggtgtaccttatgcagttgaccatttccaacatttgcataatgagaactgtagggaaaagcctcgtagtgagacccaagccattcacctcggaagtgaatatgggtctaggtaacccgagctagaatggaatcatgactcatgggtaaagatgcggcacctctgcagagtgtaaaactgatatatcatccgtgctcacggttaagagcggcctggactcctcacatgataattgaacttgaagatggaaataaatcgagatctgatgatctgccaatggtttgcttaagtggattcacttaactggttttgatatactcttatacctttgtttaatgggaatactcgggattcacacttattagtaagacatgtgtngttaataaaatgttgccaact

SEQ ID NO: 57965 - DNA, 433 bp, Zea mays
  unsure (1)..(433): unsure at all n locations
agcttgacaacaccattagacatcttaaataaaatttctgagatcaagtatatttaattcattcctcaacatgccaaagcgggtcttatcaagtggcttagtgaaaatatccgctaattgatcttccgacctcactccttctaaaatgatatcttctttcgcaacatgatctctaaggaagtgatgacggatatcaatgtgcttggtgcgagagtgttgtacaggattattggcaattntaacaacactctcattgtcacacaacaaaggtaccttttctagaactacgccatagtctagaagagtttgttcatatataaaatttgtgtgaacaagcaccacgaaatgtattccgttcggcgatgacaaagaacactattttgcttttggatgtcatgatatagcgatctctgagagccctagaggggggatg

SEQ ID NO: 57966 - DNA, 377 bp, Zea mays
  unsure (1)..(377): unsure at all n locations
ctaagcttacttgggactgtgaaccttccagtggccttggaagcanggcgcccgatgtcattgctgctgctgccgtccctgctgttgatgctgctaccgctgccgctgcccccgcggtgacagcgaccggtctgacgtaagcggcggctgtggtggtgtctaaccccaacgatgtggcggtggagggctcacacccctctgcccgtgctggacccgaggatcggcctacttatccccaccagctgtcttctgacgcttctggngggagtccaaatcgaggggaaggtccgagacaaatgacccatcggcgcgacgcagtcggtgtcgccttactccctacgacctcccggcgacatncggagtggaggagctgcatg

SEQ ID NO: 57967 - DNA, 488 bp, Zea mays
  unsure (1)..(488): unsure at all n locations
agcttgacaacaccacttgacatcttaaataatatttctgagatcaagtatatttaattcatttctcaacatgcaaaagcgggtcttatcaagtggcttagtgaaaatatccgctaattgatctttcgaactcactcctaaaatgatatctcctttcgcaacatgatctctaaggaagtgatggcggatatcaatgtgcttggtgcgagagtgttgtacaggattattagcaattntaacagcactctcattgtcacacaacaaaggtaccttttctagaactacgccattgtctagaagagtttgtttcatatataaaatttgtgtgcgacaagcacccgcggcaatgtattcagcttcggcggttgacaaggcaacactatnttgcttttcggatgtccatgatactagtgatctcccaagcaaatggcacccnctagaagtacnttttctattcaatttgcaaccggcataatccgaatcggaat

SEQ ID NO: 57968 - DNA, 431 bp, Zea mays
  unsure (1)..(431): unsure at all n locations
tctttatgattntattttactacactaaaaacttatatatattattaaataactctccattatttattaaaaagaaaagaaaaacaagaaaaagagagggtaacacctgaatttggtggatgttagaaaataaattgtataccctcaaattcagggtgttacaaatctaacccccttaacagaatctcgccctcgagattcaagaagaggctagcaaggaaaacaaggttggttcattggttgttcacggttttattaagttgactttgaatctgcaagcttaacttgtggactggttgctttgacctttatatgcttgagaccgatcgatgcaattcttgatgatcccttggacctgtgggttaagacccacacatgcttacgctgcttcactttgatcttgtttgttatgttgatcacattgtcttcat

SEQ ID NO: 57969 - DNA, 491 bp, Zea mays
  unsure (1)..(491): unsure at all n locations
agcttcctcccttctctggcggaaattgttgtcagctcggatgtactcatccatcttctggagaagcttctccaaagtttgtggtggcttccttgcaaaatattctgttgtcggtcctggtcggagccccttgatcatggcttcgatgacgatctcattangtaccgttggcgcctgggctctatgtcgcaagaaccttcagacgtatgcgtgcaagtactcctcatggtcttgcgtacactggaatagagcttgagcagtcaatggtttcgtttgaaagccctggaagcttgtgactaacatatncttcagcttcttgcacgatgtgattgttcccggccgaagagaagaataccaagtctgagccacactcttgactgccatgacanaggactttgccatgacagcagtgtttgcaccatatgatgatatggttgcttcgtagctcatgaggaatngctttgagtcggagcgcccgtcatacatgggga

SEQ ID NO: 57970 - DNA, 361 bp, Zea mays
acttggctccatctatgttatggattgcttttgaatctgtccagtttcctttggcctttctggcagcttcctgacttccatgaatagcaatatgcccttgatccgaaggtgtcttcatgcaaagatatgttggatgaagaattgcttcaaaagcattgagagtaccacgtccaatgattgtgttgtaagggtactccatgtcaacaatatcaaacacaacttgttcagtccttgtattgttgataaatacgaaggtactggcattgttatcttgccaagtgctactatctgcctttcttcaaagccacaaagaggatgtgtggcgtcatggatcttatcttcaggctcttgcatctgtgtg

SEQ ID NO: 57971 - DNA, 434 bp, Zea mays
  unsure (1)..(434): unsure at all n locations
gcttgtgaacagtacaaattcagaatggattatgcagcttcagcagatcacccgaagcccatgctcttatgtgaggacatagcagagcagagggtgctgttgggctctcaattatccgaagaacaggagaaaaccttgataagggttttgttcaacaacaaagatgtttttgcatggtcagcccatgatctttgcggagttaacaaggatgttattgaacactcgctcaatgttgacccatccttcagacccagaaagcagaggcttcagaaaatgtctaatgacaaggccgaaggtgctcgtaatgaagtcaaaagactcctcagtgcaagagttatcagagaagtaaagtacccagaatggctagctaacacttggtatggaaaaaaggccaatggcanatggcgaatgtgtattcgatttacagatctcaa

SEQ ID NO: 57972 - DNA, 485 bp, Zea mays
  unsure (1)..(485): unsure at all n locations
tacggaactataaaactcagcttatcccacttgaactctntatctttctccagtagatatgtgagtggtctcactaacttcgaaaaaccttcaataaatcttctatagtatcctgccaatccaagaaaacttctgatcttggacgcatccttatgttgcttccaatccagtatctcacttatctttcctgcgtccactttaattccaccatcggtaacgatatgccctaagaaagcaacttccttcaaccaaaaatcacacttcgagaacttcgcatatagctggttgttacgaagtttttgtaggactagccttagatgatattcatgtgtttcttcattcggagagtatatcagtatgttgtcaatgaatacgaccacaaatngatccagatattccatgaantacttattcatcaagttcataaagtatgctggtgcattagtcagtccaaacgacattgacaaaaactcatataatccata

SEQ ID NO: 57973 - DNA, 382 bp, Zea mays
cgcgagtcattctttattggtgaaactttcaagcagacataatcgcctaccagaaaacataaaggttgtcgtcctcagtctgcataactcttttgtcgagtctgagctttcttcatattatgaataattatctgaaccttttcttcgacctctctcaccatatcaggcctaaagaagtatctttctccatgttcagaccaatttagcggagttcgacatcgtcgcccatataaagctctaaaaggtgccatcttgatactttcttgataactgctattgtatgaaaactccgccaaaggcaaacattcatcccatttctgcgagaagtccaaaacacatgcccgcaacatatcctcgagtatctgattaactctctcagtct

SEQ ID NO: 57974 - DNA, 295 bp, Zea mays
ttatgagtggatacttcatttatgtctatctcaggattcatatcttatataagcttgttaatctcttacattgtgggctcgaagctttcacctccagtagcctcggtagatctggcttcagtagcttcgacttcggtgtaccttcggcattgtcagccatagcaattttttccgccgaacccgatggcggtgtcttttcgatggcctacatgatgttcatcattcgtcgctttttcggacccccgacatgtccaccactagccaaaataatcttctttcctgccaagcttcgttc

SEQ ID NO: 57975 - DNA, 385 bp, Zea mays
agcttcagctcgtcattcttcaactttattattctgtacatattaatacgaaatgagaaaggcgcagaattcaaggagaatgtaaaagttacaagtataagtttctcactggcttaaagtggctccgagctttgtcaccaaccatttttcgcccgccgtttatccaaatctgggtcataaacctgtttcctatgctccgggctaggctggggatgtcaaccaaatctgccggtgacaagataaagtttggcctatttaacaattttccgtgcatgcagccagccttcatgaaagcggtagccgtacctcgagaagctaacagggcgcagaaatcggcatgcccagcgataacttcgtcaagtgcatcaacttcgccctcaatgta

SEQ ID NO: 57976 - DNA, 361 bp, Zea mays
aggagagcacattctatgatttacaaatggttttttgagaaagacacgatttgttgcgcatgccatgcggggaaacaagttggagtccatcatccacacaagaacatcatgacgaccgacgggccggttgagctacttcacatggatctattcggcccaattgcttacataagcatccgcgggagtaaatattgtcttgttattgtggatgattattctcgcttcacttgggtattctttttacaggaaaaatctcaaacccaagagaccttaaaaggattcttgagaccggctcaaaatgagttcgccttaaggatcaagaaaataagaagcgacaacgggacggagttcaagaactctc

SEQ ID NO: 57977 - DNA, 423 bp, Zea mays
agctaggcgactaccagttcgacctctgaaaacagttctacgttgtcgcatgtaagatgcgtcgttgtggatgacaagctccggcatagccgccgcttggacgcggtccatagcggctgcaccgcgctgtccattgtcaaccagggggacctcatggtcgtcgctaacttcggcgactcccgggttgtttaggcatcacatccgacgacggtaccatcacgccgttcagctcatcgtgcacctgaagcccaacctaccacgtaagtcgctactaaccggcatgaattcttgtgcgctgggactacaaccgttgctgacgttgtgtgagtgtcctcgaacatgatgtatgcagaggagtagcgcatccggtggtgcaacgactaggtgtactggctcactaatgagcccggatgcacttcgtct

SEQ ID NO: 57978 - DNA, 414 bp, Zea mays
ttggctgtcttatgcagctagcaaatctaaatctaattcctaaatttaacttggtcaaaaggtctaagtgacatgtgtgtgttgaatcaaaacaaccccgccagcctctcaatgctgctgatgcgatgaatttgacacctctaaaacttgttcattctaatctgtgcgagatgaatggaattttgaccaaaggtggtaaaagatactttctcacttttatagatgactccaccagattttgctatgtgtatctcttataaacaaaagatgaggcgtttaattattgtaagacctataaagctgaagttgagaaccaacttgagaggaaaataaaacggttaacgtctgatcgaggtggagaatatttctctaatgtgttcgatgagttctgcgtggaacatggtattggtcatg

SEQ ID NO: 57979 - DNA, 379 bp, Zea mays
  unsure (1)..(379): unsure at all n locations
agcttgtattccctactgcaagcaccctggtgcaagataatataagcctcatccttcctctgctagaagtaaggccctcttagcccgaaccaggataaatcttgtgtttcatcttgcatcaatccatccgggcagggacacgcgacataaaattcactattcggttcggttgtgggtcctccgggtccgaaacaccgacagttggcgcaccangtatgggatcgctgcgtgttgacaatactctcccgttaagttccagatggacaatcttcaatagccttttcagcccgggatggtgctccgctttgggagtctcgagttcatgttcctcgacggcagctacgacatgatactcctcccatcgcagcacgacagcaac

SEQ ID NO: 57980 - DNA, 465 bp, Zea mays
  unsure (1)..(465): unsure at all n locations
tatgaagattcttcattccaacatgggctagtcggcggtgcctgagccaacccaagttagtcttatcaaccaagcaagtgtcgagttcagctctatcaaaatctaccaagtatagctgaccctctaacactcccttgaatgctattgaatcatcacttcttctaaagacagtaacacctacatcagtaaacagacagttgtagcccatttgacataattgagatacggaaagcaaattgtaatctaaagaatctacaagaaaaacattggaaatagtatggtcaggtgaatatagcaatttacccaatcctttgaccaaaccttgatttccatccccgaatgtgatagctcgttggggatctgggttnttctcatatgaagagaacatcttcttctacactgtcatgtggtttgtgcacccactgtcgagtattcaacttgagcccnccggatgcataaacctac

SEQ ID NO: 57981 - DNA, 491 bp, Zea mays
agcttctccagagcacacaggtatggacatatatgttatcacattttccgccgattgtactattgtcggcaatgatgaacctgtcgctgctcaatttgattttggttctaaaaaagccgccttcactaaaccaaaggaatcagtaaatcatttgaagccgctcttcgtgcgtggtcacattgatgggataccgattgctaaaatgttgatagacggggggctgtaaatctaatgccttatccattatacaaaaaactaggtaaacaagacgatgaacttgtcaagaccaacatgaccctcagcggcgttggaactgataagtcgatcaaagccaagggagtcacgttcgttgagttaaccatcgggactaagacccttactactgcattcttcgttgctgatgtaaaaggaaattacagtctaatcctatgcagggatgggattcatgctaaccaatgtgtaccttctattgtacatcagatggtactaca

SEQ ID NO: 57982 - DNA, 419 bp, Zea mays
  unsure (1)..(419): unsure at all n locations
tcacactctanacatgatgatcttgtaatgctctcattcatttcatacattntctaacctttattttcataaaccttcaaatacattgaagtaaattattcttaatcattggcaccaggttggaaaagatgtcatattatatgctatgttgagatctaatttgcctgtggctaaagggacaattgtttcaactaaaccaagcaccacagttggaggccagatccttggaaggcaatattgtgaagttattgtaacttgtgtgctaaaacgacatacagttctgactcgcccttgtgccaatgtggaaactatggctgatgcttacatgatgttagttgcatggccgtacaagaaaagaatattctatatcttatcttggttatatttagatttatatgagccatcaacttaatgatgat

SEQ ID NO: 57983 - DNA, 375 bp, Zea mays
  unsure (1)..(375): unsure at all n locations
tgctcataatcaagcgatgtatttagtgagtacacataatacgaactctaaattattatatttcaatacaacatcttcagtagtaacacatatgtgtttaacagttaatgcagcaacagggcatgacatcaaattttccaccgccaccacaatggagccaatttgcaaacacaccagttccaccaccacagttcaccacccctccgacacatatacctgcacctggagatatggtacgttcgataactcttcattaatttatacacttgtatactttntgatatttgcatttaacgtgttgatatttgctaacttgcatatgttacgcctgaagcgggtggcagtgggtctgatccagcaatagggactggattt

SEQ ID NO: 57984 - DNA, 359 bp, Zea mays
cttctgtgtcgagtgctatggtcattacactcggcaaagacactctttgtcgagtgttacactcgacaaagtgaccagaaatcccgcttctcctttgttgttattattccatccaaataaacagaacttatatcacatatacatcacaaagttcacaagatgatcacatacataatagagaccacatatctcacaaaaaccacaaatctcacaagttgttcacaaacataaatactatcaacaacataagtgtcacaaagacagaaaatctcacaagtttcataaacataagtattatcggacccacacaaacataagtatctcaagttggaaactacgtaagtctcacaagcacaact

SEQ ID NO: 57985 - DNA, 501 bp, Zea mays
  unsure (1)..(501): unsure at all n locations
agcttgcacttacgaccaaaccgcacccacatccatatcacattcaatggctcaacaatagtggtaaggtcaaggtaaccaagttggtacgaaattaatttgctattggttcatatcgtgatgttggtgactgtgatgttgtgcctatggatgctngtaatattctgctaggtagaccatggcaatttgattcagattgtatgcatcatggtagatcaaatcaatattctctcatacaccatgataagaaaattattttgcttcccatgtcccctgaggctattgtgcgtgatgatgttgctaaagctaccaaagctaanactgagaacaacaagaatattaaagctcgtggtaataacaaagatgggataaaattgaaaggacattgcttgcttgcaacanaaactgatgttaatgaattatntgcttccactactggtgcctacgccttggtatgcaaagatgctttgatttcaattcagatatgcagcattctttaag

SEQ ID NO: 57986 - DNA, 335 bp, Zea mays
  unsure (1)..(335): unsure at all n locations
cttccaaatcggacatgagatgtctccgtggtggcaaaaacgatccanagatgtttatggtgatggtggatctcgtggtgaccaatacgtggtaaaactcataactctaaatgaataaactaagaccagcaactcgacacaaccgatgcatccattaactcaacatgccctagctaagtagtactagtaaatgctcaatggtttataagattgcggtcaaactaatctactattttgttggctttttctggactataggagataatataaacagcgaagaatagtaaatctgtcaccgataaaccttgctctgattaccaactgatgtgcacccc

SEQ ID NO: 57987 - DNA, 399 bp, Zea mays
gatgatgtggtgattaagacattattctcataatacttcattgaggatctgcagctggtcttcaacagcttgaggcagtatcggtggaagctcaatccaaaaaaaatgtgtctttagagtgccagcaaggaagttgctcggattcattgtcagccaccgaggatgaaacttacccggaaaaatcgaggctatcatgaggatggaagcaccacgatcacaaaagaaagtacaaaggcttactggatgcatggcaaccttaagcaggttcatatcaaggctaggtgaaaaagggctaccattctacaaattgctcaagaaagtggacaagttccagtggaccacaaaagcacaggaagctctcgatgcactaaagaagttcttgaccacgccacctgtact

SEQ ID NO: 57988 - DNA, 340 bp, Zea mays
  unsure (1)..(340): unsure at all n locations
tggaggcgtcgattggttgtcgagttggtgtatcctccttcttctttttctccgtcgccttgaatgcgacaggttgagctccggatgtggagggttcgtcaagctcgttgatcttccttgagccttcgaccatgcactcaaaactaacaaaatgcccgataacttcctcgggggtcattttagtatatctacgattaccacgaattaattgaacctgagttgggttaaggaaaataagggatcttataataaccttaaccatttcgtggtcgtcccattttacgctcccgaggttgcgtacttggttcactanggtcttgaaccggttgtacatgtgttg

SEQ ID NO: 57989 - DNA, 459 bp, Zea mays
  unsure (1)..(459): unsure at all n locations
agcttgaattatctccctgttggaagccaatgccatccttaatgtcagggcgtctcccactatagagcatgcttctagcaaatttaaatttctcattttctaagtcatgctcattaattttggcattaagttgagctatgtgatcattttgttgtttaattagagctaagtgatcatgaatagcatcaacattaatatctctacatctagtgcaaatagtaacatgctcaacggaagatgtagatggtttgcaagttttaaattcaacaatcttagcatgcaatatatcattatcatctctaagattggaaatagaagcattgcaaacatctagttccttagccttagcaatcaatttttcattctcattcctaagggccagcagagaggtattcaattgatcaatcttagcaattaaattggcgttatcatttctcagactgacaatngaatcatcac

SEQ ID NO: 57990 - DNA, 469 bp, Zea mays
  unsure (1)..(469): unsure at all n locations
gcgtgaatacaatgaagattgntcactatttgatcctgtttgggcttgctcatattagtctcggctcggagaggctctcgagcctgagtcgagcctacatttgtagctcgtttaaacaacgagttcgaactggctcgcgagctggcctggtaacacggttacattattacgttctatgttatcaatctattttcttatttttttatgaacacaatactagatatagtttagaatatgttaccgattttgtggtacatatatttttaatttatataataaaaatgtacaatttatgttctaaatgaaaattagtgtggtgctcgtgagctgtcttgagtccgatccgaacctaatcttctagctcgcaaatgtgaacgagccaacagctagctcaggatgtatataatatcacattctatcatacattagttagatacatgtacataactatggtttctatatattatat

SEQ ID NO: 57991 - DNA, 461 bp, Zea mays
  unsure (1)..(461): unsure at all n locations
agctngccaagaactgccacacagcctcgcacctctgacgatctgagcttactgaagccatgaggccggcaccaagtgtttccaggcccacgtcaacgtcgacgatttcgccggcagcgccaccaccggcagccgcgaagctggcgtcctcgccgtggcactcaacggtgccctacctgttcggagggctagccgccatgctgggcctcatcacgctggcgctcctcatccttgcctgctcgtaccggaagctcaacaactacctcagcaccggcgacgcttcctcttccccctccagacccgaagccacggatggcaacggcttcaagtcgccggcggccacttgcccggcctctccagcgaccttcgccgacctcgttgccgtcgtcatggccggagaaaaaatccncacattcttggccgcgccgatcgtccgacgaacgcacggtaacgacagcgct

SEQ ID NO: 57992 - DNA, 382 bp, Zea mays
ctaagcttctaagggagagcacactttacgattaacaaatgttcatttttgttaaagacaagatttgtatcgcatgccatgcggagaagcatgttggagtccatcattcacacaagaacatcatgacgaccgacaggccgcttgatctactccacatggatctattctgcccgatagcttacataagcatcggcgggagtaagtattgtcttgttattgtggatgattattctcgcttcactcgggtattctttgtacaggaaaaatctcaaacccaatagactgtaaaggggttcttgagacgggctcataatgagttcggcttaaggatcaagataataagaagcgacaacgggaacggagtcaagaactctcatattga

SEQ ID NO: 57993 - DNA, 358 bp, Zea mays
  unsure (1)..(358): unsure at all n locations
tttgcgaatcacttgaagcgttagtacttgtgtgaatgattntgtaaagtgtttggaaatatgtgcaaaacataataacatgtgtaggttttgcgaatgattttgttgtggtgcttgttgatggtttatgtgatgtggatctatcattgcgcaatactatataaatctgtatatctatgtgattatgtgtataaaacttggtgatttgtgatgcttttgtatatataacagttcgtgaatgctaattaatggtatattatcattattaacgactataactatgggcaactttctggtggttgctaatgtatagataacgactcacgcttggttgctaatctatagacaacaacccacg

SEQ ID NO: 57994 - DNA, 325 bp, Zea mays
tgagtgtgcatctaactgaacttgaaatctcaaaccaaatttgagttccgaatctgaaacaacacaaagattgaatactgcactcagaaaataaaaagggagacaacacctgctcgagccacatttccttagcccatatcgtccctgcccttctttcttctgcgaatgggccaaaatagccttgaccggtccatttgcacccccttgtctcttactttttggttgctggctgtcgcatgggcccggttcgcaagatcattctcgtcgcgccggtacaaccctgtcgcgacttgcccagccgctttctcctgtaatgtcacgccac

SEQ ID NO: 57995 - DNA, 466 bp, Zea mays
  unsure (1)..(466): unsure at all n locations
tttaagtcctggctggcaaattgtttgccggtgtcaactgtgagctcggacgggactccgaatcaagaatttctgggcagtcttcgatgttatcgtggatactgccctcgcctcgatccacttggtaaaatactcgacggcgacgaaggttaacttgaggttcccttgggccgtgggtagcggaccgacaatgtccaagccccaacgctgaaggggccacgtgtgggcaattagctttgtgaactgcgaagggtttcctgagcgtggagaaaatttctagcaggcttcgcaggacctcgtcacccgattcgcggcgcatatcatagcatgccagtagaagccttgacagatcaccttggcggctagggccctgngccctgcgtgagagccgcaagttccgctgtggacatcgcgcaagatctggacgccttctggctcggtgacacatttaatgcatgggttgact

SEQ ID NO: 57996 - DNA, 325 bp, Zea mays
tacgcgacactatataatacgtaagcgtgtgaaggttcttcattcgcacatgtgcttaacggctatgtcacatccagcccatgccaggctttacaacgaagcatgcgtgtataccggactcctgttttgcaaaatcaactaaattaagtgagccgtgtagtacaccctttaaagctaatgaaccatctattcttctaaagacagacacatctacattggtgaataaacagtgatatcccatattacaaagttgactcacatacaacaagtgatatccaatcgactcaactaacaacacattagaaatagagtgctcggatgaaat

SEQ ID NO: 57997 - DNA, 407 bp, Zea mays
  unsure (1)..(407): unsure at all n locations
ctcttgagctgtgccaaaatgatatgtgtctgcgttcctcgatctgacactatcttcttcggcacaccatgaaggcagactatccgtgacatgtataactcggctaacgttgctccggtgtatgttgtcttcacaggtatgaaatgggccacctttgttaagcggtccacaaccacccagatggaatcataaccggcccgggtacgaggtaggccaactataaaatccatcccgatttatcccacttccactgaagaatccgcaatggctgcaacaatccggcaagccttngatgctctgctntggntctctgacagctatcacagatggcgacatattctgcgatctctcttttcatgccataccaccaataccttcgtttaaatcctgcacatcctctcacttca

SEQ ID NO: 57998 - DNA, 360 bp, Zea mays
cagcacaacagtgtcttttatgtaatgctatggtaacttcacacctacccgtctggttatatattgctgcacgtgggaaagtgaatcgtcaagccgctcgcacccgctaaacagtcgcccgcactcactgtacggtggaccatagtgcccaagaaggtgaatcaccagatcgcgcgtacccgttgtatggtgggaccacctttcactcgggatatttaaatcgtttctcgacaacgagctaagggaaggttttttcggaccttcggcataccgaaacctgagagaaattttcacggttcgagctcgttacgaataacaatctggcaccagaaggggttactggtgggggtctgcttcgtc

SEQ ID NO: 57999 - DNA, 428 bp, Zea mays
  unsure (1)..(428): unsure at all n locations
agcttaaaggatactattcaactaaatttttatgatgttgattagaagccaaggtatgaaaacttcctctcctttagttgttntagtattctatccttagtgggatgtaccataatataggttaaattccttgtaatataaaatgttcaatagtgcatataactttgacatcaactatatgtgtgcactatattaaaggagtttagtctatcctcttgggtttcaataatgatgattcatttgccatccacatataaagatcatcatttgtgaaaccctctcttgagttttaacgctctcttttctaagtgcttcaacaaggtccttccaagttttttgaagatggattcaaaatctacggatatatgagtcttggttctttcaatcattgagtttcaataggtcttatatcaagtatgatagaatca

SEQ ID NO: 58000 - DNA, 464 bp, Zea mays
  unsure (1)..(464): unsure at all n locations
agctttggcagtcctatgttgttatttactttgtggcagatnttaatgtgcaagcagcacaacaagggatggtgtacatagatgaagttgataaagatcacaaataaggtatgtcatatcaatctttggcttggattttccctcctggtgtgggcgttgattagtttgtgatttggcatgcaggctgaaagtcttaacattagcagagacgtatctggtgaaggtgttcagcaggcatagctgaaaatgctggaaggcacggtaaggcacattatttttttttctcgaacgcacaggagaactgcgcctcattatatattaagcagaanaagggggtggtctaaaaagaccaataaggcacattattgacctcccaatggtctgngtcgcttcgtgttctttggattggtgtcatattgtagaatataaagagaatgtcacctttctctatcaacttaagctgt

SEQ ID NO: 58001 - DNA, 471 bp, Zea mays
  unsure (1)..(471): unsure at all n locations
ctaagggagaacacattgtgggactaacatatgttcattttgagaaagacagggtttgtagcgcatgccaagcatgaaagcaagttggtgttcatcatccagacaagaatatcatgacgaccgacatgccgcttgagctactccacatggatctattcagcctgatagcttacataagcatcggcggaagtattgtcttgtaattgtggatgactattctcgcttcacttgggtgttctttttgcagcatatatctcatacccaagagaccttaaagggattcttgagacgggctcaaaatgagttcggcttgaggatcaagaagataagaagcgacaatgggctggagttcaagaactctcatatagaaggctntcttgaggacganggcatcaagcatgagttctcttctccctacacaccacaacaaaatggtgtagtggagaggaagaatagaactctacttgacat

SEQ ID NO: 58002 - DNA, 422 bp, Zea mays
  unsure (1)..(422): unsure at all n locations
agcttctgcataatttctttcatattgagccaacatccattacgatcattcattctattcaaaaaatttctgttccaaaaccggacatgaggttttcatctcatacggcttctccattctatacatagcactaagcaaaaaatctatagaataaaaatcgaatttgtcccatctcattattgaccgaagggggtggtattttccaagaaatctctagccaaccttccccaagaggtatttcgaaacaccaatgaattatattaatgctagaggaaaacaatagctccaagaatctctttgntctcaatgcctcctatttagaggaattagctacttcaacgacctttgatggtataagggtatccgagtacaaacatgatggttgtttattatcccaccattcttccaaccctgatccaatc

SEQ ID NO: 58003 - DNA, 407 bp, Zea mays
  unsure (1)..(407): unsure at all n locations
cgtgaagattcttcatcccaacatgtgctagtcggcggtgccagagccaacccatgttagtcttagaaattaagcaagtgtcgagttcagctctatcaaaatctaccaagtatagctgaccctctaacactcccttaaatgctattgaatcatcacttcttctaaagacagtgacacctatatcagtgaatagatagttgtagcccatttgacataattgagatacggaaagcaaattgtaatctaaagaatcaacaagaaaaacattggaaatggaatggtcaagagatatagcaatttttcccaaacctttgaccaaaccttgatttccatccccgaatgtgatcagctcttggggatcttnggttttctcgtaagaagagaacatcttcttctcccctgtcatg

SEQ ID NO: 58004 - DNA, 456 bp, Zea mays
  unsure (1)..(456): unsure at all n locations
agcttatacaaaatcctcatcaagtgtttctatgttgttgtactgtctctgttttcctagtaaagtatcgcctattacttattagttgttcatagtaaaagaaaaataaaaagatgttgcattgcagttcaatatgacgtacagcgttgctctaataataataataataatgaataaatgcgttntgtgtggtgggcctgggggagtggatatcttcaattntcgtccggcctgtgatgaaaactgtgcttgtgcagggccgttgggccacgtgcccacgtcaaagtattctagtcgaaagagaagcaacgaaagcccactactactcctatgcaccgttgccacgagacctgtccgcactcatctcatcgtttagcaccaatgcgccagtccgcagtccgctgtaccagcttaaatattcgtccctaccgcgctccatcgccgagctcagtagcg

SEQ ID NO: 58005 - DNA, 342 bp, Zea mays
  unsure (1)..(342): unsure at all n locations
tgtgttntctgtcatgcatgtctggaaccatcacttcttctgtgtatcgatgcaaccagaatgtggtggcttacctgatggaggtgtgctgcagcaaattgaaaaagattttggctcgtttactaattttanggaagagtttatccgctcagccttacaactattggggtctggttgggtttggcttgtctgtaaatttctttctattttctctgaagacaagctaccgatttcctgaattgctctttctaaagctaatttctaagtttagtttatatttcgctgaatatgtgttgcagtgaagagaaatgagacaaagctttcagtggttcatacacaaaa

SEQ ID NO: 58006 - DNA, 286 bp, Zea mays
  unsure (1)..(286): unsure at all n locations
aaattcaaaccttcgacttgtgaataccccttggccacgagtcgaaccttgttccttgtcaccacaccatgctcggcttgtttgttgcggaagacccacttggttcctaccacactttgggtaggacgtgggaccaaatgccataccttcgtcctccggaaaatgttgagcttctcttgcattgcatcacccaatccgaatcttggagtgcttcctctaccctgtgtggctcaatanaggacaccaaagagttatgctcacaaaaatgggcaacacgagatcgagt

SEQ ID NO: 58007 - DNA, 386 bp, Zea mays
  unsure (1)..(386): unsure at all n locations
nngaatgtctgtgaatgtangtgaactacaagaccggtggtatccattgtgttattgacagtggatgcacacaacatatgacatgcaacccacggatgttcacctcactagatgagaatgttgatggtcaagataaaatcacattcggagacaactcacaaggaaaagtgcaaggacttggcaaggtggcaatctcaaatgatttatcaatatcaaatgttctcttagttgcacctttgagcttcaatttattatcngtgggacaactctgtgatcttggacttcaatgtttattcactccatcagaggttatntgtaacaaaatggatgatgaatcaatggtattcaagggatttatatacacaacctctacttagtggattcac

SEQ ID NO: 58008 - DNA, 285 bp, Zea mays
tctttcccacgaccttcggtgacgaagcatggacccaacataacaattctaccaagacctttgaccaaaccgtgattctcatccccgaatgtaatagcttctgacgggatactgcgttgtatacacagtgaagagaacattcatttataccctgtcatgtggctagtgcataccctgtcaataatccaacttatgctcccgggtgcataaacctgcaaaacaatttaagccgtgctcgtaagacccaaacggtcttgggcccttcacattacaaacaatgacctc

SEQ ID NO: 58009 - DNA, 374 bp, Zea mays
  unsure (1)..(374): unsure at all n locations
tctatagggagaacacatcttgtgactaaccaatgttcattttgagaaagacaggatctgtagcgcatgccaagccgggaagcaagttggcacccatcattcacactataacatcatgactaccgaaaggccgcttgagctactccacatggatctattcggcccgattgcttacataagcatcggcgggagtaagtattgtcttgtaatagtggatgattattctcgcttcacttgggtattctttttacaggaaaaatctcaaacccaagagaccttanagggattcttgagacggactcaaaatgagttcggcttaaggatcaagataataagaagcgacaacgggacggagttcaagaactctcaaatcg

SEQ ID NO: 58010 - DNA, 260 bp, Zea mays
  unsure (1)..(260): unsure at all n locations
ctgaagcatgcaagctctaagcttccatgtgttatgccttaactttttttataccaaaatagatgaaatcacatttcaggactagcgggtgggctccgtggtatgtgcataagatgcccaataaaaattttcagcatgtcccggaaagatggtcttcttgaatctccgaattgcaagcattcaccaatcatgttccacagcttcccaagaagtactacacctactactcttgaatattgaggcggnggcttcttttcttt

SEQ ID NO: 58011 - DNA, 309 bp, Zea mays
  unsure (1)..(309): unsure at all n locations
tgtttcgaaagattgtgaaatcggcgtggtggtgaggtccttttgctttgggctaatactctctcccctttggcattaatcgccaaaaacggagtctttacagccctctttaaattctctccccctttggcaaacaatatgtgagtgaaggattataccaaagtggataacgacgcggagtgtctgcgaatgataaatattacgatggagtggagtggatgccttgtctttcgccgatgaactcattntccttttcaatctatgacttggcatgaaatacactngacaacacattagtcatagcacatg

SEQ ID NO: 58012 - DNA, 392 bp, Zea mays
  unsure (1)..(392): unsure at all n locations
tgccgtcagttagcagaatggcgtaaccagaatattcatatctccggcgttatccgtgaacttgtcggcgctgcactttcgcagtaatcaactgcctaatcaggtgtctgatgcaatgcacgcctgtggtattgacggccaccagctgacggtagaaatcacggaaagcatgatgatggaacacgataccgaaatctttaagcgcattcagatcctgcgtgatatgggcgtgggctcatcggtagatgattatggtacgggcttttccggattatcccgcttagtcagtcttccggtaacggaaatcataattgacaataagttttgtcgatcgttgtctgaccgaataacgcatccttgcttacttgaagccatnaccagcattgggcaaa

SEQ ID NO: 58013 - DNA, 378 bp, Zea mays
tatttgttctttattggaacgagagatttggtccaagagcatatcgccttcagagtatggccgctcgcggaaaaatgggaaatgccacaagagactttaaaggaggctgacgaaggtggacttatcaggctgaagtatactttcaaattcggagacaaattcgtaaagccagatgatgactggctaaaaagcattgaaaatgtaagtgatgaactacttgggggttattcaaaggccgaagatactgcattgtcagcagcctttggaggccggaataagaaaagactgaaccgagtgtttgacgcaattgggttcgtgtacctcgactaccagtatccaacgctgtgccaaaaaagataaagcgcaacttctgcacag

SEQ ID NO: 58014 - DNA, 470 bp, Zea mays
actcaagcttggcgccgatggatatacaataatccttgcagtctttgttgttcatctgtcttgcattgccaactgtcatcacagacggtactccgaagtggcatacaacgttctgccagaagaatttttgtgcagtctctgacgttattgtagaaacagccctcgcctcgatccatttggtgaaatattctacggctacgaacgcgaacttaaagttcccctgagctgtgggcaggggcgcgacaatgttcataccacatcagctggatacgccatgtatgggcgatcagctttgtatactgctaggggcttgctgaccgacgagaaaattctgagcaggcttccatgacctgatacccattctgcgccagatatttgcggcacgaaaaccattggagacactttggagctaaggctttggcctgcctgcgaccgccctgccatgtggacttaccaagaactgatgcctt

SEQ ID NO: 58015 - DNA, 353 bp, Zea mays
  unsure (1)..(353): unsure at all n locations
actggtcctaccatgtatatatgtgttggtatggcataggcgttnactcacgtttttcctatgcataaaaaccaacagcagcatacaagagaacattgaggctctaatatcatcgtatggatcactagctccaaaaagatacatgtactcagaagtaacaaatataacatcatgcattaattataagcttggagaaagtggttatggggtgggtttcaaaaggagggtttatgacagtcgtctatttgcagtgaaattcctgcatgactcccaaagtgatggtgaggagtttgtgaacgaagttatgaatattggcacgacatctcatattaatattggtagcttatttgggt

SEQ ID NO: 58016 - DNA, 421 bp, Zea mays
  unsure (1)..(421): unsure at all n locations
agcttgctctaagtgaagagtacgatgtgtngtcatattctcataataaaataattgatgatcatatcatgcttaatgttgctcatgaggttataattacgaacttaaattcatgtgaacctcattctcgcacgtgtgcgcatttgaattgtatatcaccatgtgctaacccctgttgatgacaagaaagcctatgtcagaataagcatgatgatgcagtgtcacgcaagacttggcgtgggaacagtacgaaaagacaactaaggagaagacgcattgctcaactctctcaagatatccacgggcgcgtggtgaagaagcttgataaaggaaaaactgcagcatgtgttgaacttcataaatagattgcttctaaagatgaagacatcaacatgagcttggaaaaaggtgaagatttact

SEQ ID NO: 58017 - DNA, 396 bp, Zea mays
ctgtgaagattcttcatcccaacatgggctattcggcggtgccagagccaacccatgttagtcttagcaattaagcaagtgtcgagttcagctctatcaaaatctactaagtatagctgaccctccaacactcccttaaatgctattgaatcatcacttcttctaaagacagtgacacctacatcagtgaaaagacagttgtaacccattttgcataattgagatatagaaagcaaattgtaatctaatgaatctacaagaaaaacattggaaatagaatggtcaggagatatagcaattttacccaaccctgtgaccaaaccttgatttccatccccgaatgtgatagttcgttggggatcttggtttttctcatatgaagagaacatctttttc

SEQ ID NO: 58018 - DNA, 218 bp, Zea mays
tctccacaagatggatgaatacatccgggttgataatgatttccgccagagaaaggaagaagcctatatgttttctgagatgaccacgggcttcggaggaagaatccaccccaggcatgtgaaatcaatccataattccagcctaagtgatgacagaggaagccagcctcaaaggccacaacacagctgccaatcttcatggcaacaataaagctctt

SEQ ID NO: 58019 - DNA, 480 bp, Zea mays
  unsure (1)..(480): unsure at all n locations
agcttcttgtagaagggatgatgagctcatttctccgntcggcacgagcgcactgtntgccaacagactggacaggcgtgccgtctgctggatgaccctaacgtcgtctgcttgcagattggacagggcgcattaaatgctgagagggcacgtcgcccgtcagcgtggtggcaggcggtgcgtcctcttcgcaataaatgcagaggctgcacagctatatgggccttacatcaagcttgacccgttggcttatgtcacgggccacaagccacgcggcagcagcaggactccgcctgagcggtgagcgtanggcaaggtctggacacgtgccatcaccggaccttcgctcgcgccggggtctcccacgtcccaaggccttgctaaagcccggaccttactcggatggacccccccgagggacccggcatgtcttcttgggaagctcgaactcgtacgcatangggttcggtgttcctctac

SEQ ID NO: 58020 - DNA, 453 bp, Zea mays
  unsure (1)..(453): unsure at all n locations
aagcttgtaccttgtggggtggagtccctaccttgcaaatacttgggtctccctctttctctacacaaactaaccaaacagcagctcctgccctttattgagaaaattgcagatcttctcccaagctggaaggcagagttgttgaacaaagctggcagaagaattctagtgcagcatgtcctaactagtatgacaatttatactgcaatggctattgattttcctaagtgggctntggatgcaattgataaaattagaaggggattcttatggagaggcagaaagggatgctaaggaggtcactgtatggtagcctgggaaaaggttgtaggcctctacatatgggaggcctcgggatttctaacctgactaagctttgttgggctctcagaatgagggtggtgtggctgcanaaaactgattcttcgaggccatgggtggacctacccattc

SEQ ID NO: 58021 - DNA, 417 bp, Zea mays
  unsure (1)..(417): unsure at all n locations
agcttcgtctagaccatgctcttgtatacctgcaacctgattctgaagatacctgctcgcatacttggaaaacattgtcaaatcatgtttttgaggaccttcaaaagcccaaggcccccaacaacagtccacagcagcttttggtggacattagcccaaaaagtccaaacaaagagggccttaaatagctggcgcaaccggtataggttccaaaaatagtttgccccacttgtcattacgcacgtccgaacacaccgcagatggaaggtgtgaatcatctaggccccttagtgatgttntggtaattaatgacaactgcttgtggactaacggttcttggagaaataagaatgcagggttggactacatagaacaggaaatcttggagattcataagcattggttgtggatcaagtg

SEQ ID NO: 58022 - DNA, 264 bp, Zea mays
tcgtagatacattcttcaaggctatacttcagagatcaatattgtttctccttgttacttggcatggattgccctcttttcaaagcgtttttccgaagattgatatcatatttccttatgccatatgcagtatgatgtatgatgcttatgttatgcaaagatgatgtgatgatgctatgctatgtaaagtgatattccgaagatacacgcatatttgcgcgataaaacacataatctttttgtgaatcaacattgacttttcgc

SEQ ID NO: 58023 - DNA, 450 bp, Zea mays
  unsure (1)..(450): unsure at all n locations
atgaagttacgagacttcgaaattccttggattatattccttggaagaataagaaaccaaaataacatctctaaaagagaatttagccgaatctaaaaatattaggaacatagtaaaaaagcccatgaagatgatgtgatgaagatgaaagagcaagacagttctatcaatgagattcgcgctagccttgaggccaaaagagaacattattggtaaagactgctagaaactttgagttagcttcgggataattgcttccacgtcgcctcctggtgttgtgattctttgaagatcttctcctctgtcgacgcaactttgagagccagttcatatgctagcagggataccgtaggagcacttacttggatngagaagtatttaggagaggtngaagccataatcaacgcccaaagcgactattgtgcaatgattgggtcgtgtggtatgaca

SEQ ID NO: 58024 - DNA, 399 bp, Zea mays
ctcttgttgggtcctacaagggtagtcacataagaatttggaacccagatgcaagttttgtctctcttgcacttatgccccatatttctagcaactactttatcattttttctcaaaagaacaaatgaagcatcataagtttgatagagcatggttggtccatttgatgcattcctatacgcatgataagcaacatgatggcgcctatgtctattcctaccatgagcatatgaagagctagatgatgcatacatggcatgagaatcaaagacagcatcatgatgagtaggtaaaatagcatgaatataacacctatcatgatgggcaatactagaaacgttcttaacataagcatatagataggcatgggtctttttgcatgtgaaaatgaaactacta

SEQ ID NO: 58025 - DNA, 434 bp, Zea mays
accaccatataggataagggctttaaccaggttctatttccaaaaacatttaacaacacaacttgtttgaaatttttgcctagtgaatgcactctatgtgcgtcaaacatatgcaatgccaatgcttatgatgtcatgctcaagtttctgttacagtaacaccaggggtgttacaactgtctcaaaaaaattatttctataatcaaggaaagcgagtcatcgagaatgagccaactgtattttttcattaatggaagacaataagcttacataccaactctttgcgagttgatgcttccctactattactacattacattactactactactatactacactatactactctacattactactactactatactaacactatactactctacattactgctacattattctaactacactatacttatatctaa

SEQ ID NO: 58026 - DNA, 348 bp, Zea mays
atctgctgagcaccatgggactctctttgcttgctcgctactcgcaacaatacaaacaaacatgggtcaagtgaaattaacatcacaccatacatgagaacatactggataataatattctatgcattgcaacgagatcgtaagttcgagaatcactaaattcagaggtatggctaaagagttatgaattttccacagattcaagcgtttagtataaaataaattaagtggataaatctaatgtatgttggatgataaaacaaaggtaccaggtgataaacaaaattaatacaaaattaatgcaattcgaacgcatcgaacaggagttaacatgaatttcctatggat

SEQ ID NO: 58027 - DNA, 511 bp, Zea mays
  unsure (1)..(511): unsure at all n locations
gttacctgaagcatgtcagcttgcaccanaacatctaactagaggtatattattttttatttatagaaaaaacacacaagcttcgggccctatgtgtcaaccacaggtaaaatttgacactcgaacatgtgattgccatctttaccaacccaaggtgcagtgctcttactatatcaaatctgtatcataatagntattttcgcccccaaattatggatccaaattttattattaatgtatgcgtgtgcgtcctctttataaaagggaagcgagctaataattgtagtactactatattataatagttgagttgactttcgtattactcgcttaatccttcgattcgttctaaaaattttgaccttttatctggtttacgccatgtttggtttatttagtctagagactaaaggttaggtaggggactaaaggttagtccataacatgtttggttctatggactaaaatatgtacaatatactaaatgacttataagaagactataatgatc

SEQ ID NO: 58028 - DNA, 341 bp, Zea mays
  unsure (1)..(341): unsure at all n locations
tgacgcatgcaagctcttgtggaatagagagaagatttgatctcttttgtgtgtcttgtattgaatgcctagctcttgtaagtggttggaagtgtgaaaacttggatgcaatgaatggtgggtggttgggggtatttatagccccaaccaccaaactagccgtttggtggggctgtctgtcgcatggtgcaccggacagtccggtgtacaccggacagtgttcggtgcgccagccacgtcaccangccgttaggtttctaacggtgtatacttgacttctgtgaccggctgcgcgctgcggtggacaacagacatgcactgtataatgtccagtgcgccac

SEQ ID NO: 58029 - DNA, 214 bp, Zea mays
agccttcggcgttgtctgctcttttatatgaacaagggacttagtacaagagcatattgccttcaaggtgtggccgcttgcggagaaatgggaaatgccacaagaaaccgtttaaaatgccgacgaatgtggacttgtcaggtttaagtacacttttaaattttgagataatttattgagccagaccatgagtgggtgaaaagcattgacaatt

SEQ ID NO: 58030 - DNA, 408 bp, Zea mays
agcttcttgcagttaccaagttctctcggaatattcccattaagcccagcactccttgcatatagacgagtcagatttcccagcttgccaatagatgccggaagttcagtattgaaatcattccctgaaatatcaagctttctcaaacttctaagatcaccaactgtccaaaggatgcctgtgagcttgcatccagggacatcgagctcttccagcagctttagttcaccgatctcttctggaatgctctcattgaaaccattatgtcccaatattatcagttgagcattccgtagctgaccaatctccctatgtagtggccccaccaaagcatttgaagagagatcaactgtaactaggtttgccattgcaggtattcctggaaatatcgagccgcagatattattc

SEQ ID NO: 58031 - DNA, 347 bp, Zea mays
acatgtgcttagcggcgatgccacttccagcccatgcctgtcttatccatttagcatgcatctagaccggcctcttcttttgcaaaatcaaccacgttaagcttgtcggctaatacacccttaaaagcgagggaaccatcacatcttctatagacagacacatctacatttgtgaacaaacaggtatattccatattgcattattgacttacagatagcaaattatatcccagagactctactaaaaacacattagagatagagtgctcatttgagattgcaattttacctaacccttttaacgtgccctgattcccatcacccgatattattgaatcttgggaatc

SEQ ID NO: 58032 - DNA, 467 bp, Zea mays
  unsure (1)..(467): unsure at all n locations
agcttcgcgcgaacggcgacatgagaacgattttcgccgtcgggaggagtacgaccgggatcatggcatcccgactcagagccaggccaccaggactgagtcggcaacagcctcaactggcggaaccacccggtgacggtcgaggaaccacaatcacaactcccctccccgggacagacatcgtccccgacgacaggaggacacgtgcggagtgtccgcacttactccgcgccttatggccatccaatggcctcccaacttcaaggtatccaatgtcgacaaatatgagcctaagaaggatcaagggggttggctagccgtctacaccaccgctgctcgggctgccggagcatncgaggacgttatgaccgcgtatctgcccatcgtccttgggcaagatgcgctacagtggctacgacatctaccccgacactgcatcgacgactggtgagacttcagtcgacgtt

SEQ ID NO: 58033 - DNA, 492 bp, Zea mays
  unsure (1)..(492): unsure at all n locations
agcttgtggaggaccagatcatcaaatctttttttntctggatgagaagtggtcacccaagttttgttgatgaagcaccagaagaccaatcaaagaaggaatacatgtggaagttcgcaagagaaaggtttgcgtgttggcgtcgatgcttcttcaataagctagctgccaagcaaaagctagaagcctgaagatgatctttgagtagccagaatcagcgtttgcaatcagcaaccggatgctcctgaaaggctagattttgttgaagtttcatctcctcgaagagtctgcaaagtgaagatatgtagctgaagtaaagctatacccataacccttctaagccgaatctcgaggacgagattccttttaagtggggtagaattgtagcatcccananattcannatcctgaaatttctcaaactcgctctanattcaaaatgaatntcanatttcatttcanaatgttgggtgcgagttgatataacaaata

SEQ ID NO: 58034 - DNA, 219 bp, Zea mays
tacggaattaaaactaagctcaatgggcgatcgcctaagattaggctgtttttgactggattattgcacatctcaaaggtctaccagaccgcgatttacccactgttcagcactaccagacagacatttctcacgcgccgattgggaagagaagagagaaacctgcctagagatcgcggggggctgacaggactgcagaactccattgacccgccccgc

SEQ ID NO: 58035 - DNA, 492 bp, Zea mays
  unsure (1)..(492): unsure at all n locations
agcttaagagactntnttcacggatcaagctcgttacgaanaacgatctagcaccgcgaaaggggctactgttgggcctgtgcttcgtcgccgaaagtcttttatgaagaagcaaccttcggctgaagctgtttgtgtaagatggtcgaaggttcctcttcatgaagcttcggtattacaaaccgacttaaagatagaatgaccttttagtccataaaggtctgagtcaatgttgtaaactttcataaggggcatacttgtaatctctcacaggctgcgccctgtgcctataaatagtgaacagtattcctctactgttcacggattccggtatctgcaatcgcattattcggaaaccaatctttgccaaagcagaggtataaccgtattcagtaattaaatatgctgaataaatgcaatatggttcgtttatgaaatcgttacctttgatactctatactnntatgatatttatacaatctattaaactac

SEQ ID NO: 58036 - DNA, 388 bp, Zea mays
tcgcatctctgaactaactcggctgcatcgttcttcttcgtctgccaatataatcctgacctgaaaaccttcccgactagtgttctggatgctgcatgtactccacactgccctgcatggacttcctccagaagttgctttccggtggacgggagaacgcacttcatgaggacgcctgacgcgcccctcctgtataatacctccccaatgagtgtataatgagctgattgtttggcaatgcgctctgccgagttcttgtcatctggttcttcttcattccttatatacttaataatacggtgtctccagtcatcagagtctgactcgggttgatctatgatgttgcactcttctatttgatccgtcgagatgctcggctggagaattc

SEQ ID NO: 58037 - DNA, 296 bp, Zea mays
  unsure (1)..(296): unsure at all n locations
aaaatggttcatcataatccacaccttgaacctacttgaaatctttagttatcaatcagccttatggatgtgaacatttgcatccatatcatatcaactcttttttattgaaaatccatttgtactaaatggtttgaacaccatccgatggatcaactaagttctaaacatgatggattctattttggatatcatggatccaagccatttctgaaattctagttccatcactatttgtatgtagnttaagagatcatcattatccaacaattatttgtcatgttgctctatgatta

SEQ ID NO: 58038 - DNA, 292 bp, Zea mays
tcttcaccatgtgatcacgggtatcttgagaatgttgtcattgcatttccctttaagttgtgtccagctcatttttagcctctcattttcttctttgagctcttgatatgtgtcatcattagctcctgcaaattctagctcaaaaaaagatttgcttgttgacggacaacaagcattaacacatggtaatatagtatcaatatgaacacatgtgcaagagtgaggttgttgggattttaaactttctatcacaacctcatgagcaatggttaatatgatatgatcatctcta

SEQ ID NO: 58039 - DNA, 462 bp, Zea mays
  unsure (1)..(462): unsure at all n locations
gcttcagaagatgtctgctgatatatccgaatgggcaagaaatgaagttaaaaggcttctcaacgccggagtgatcagagaagtaacgtacccagaatggctagccaacactattatggtaaaaaaaggccaatggaaagtggagaatgtgtattgattttatagatctcaacaaggcgtgccccaaggatgaattccccttaccaagaattgattccctcgtagatgaagcagccacttcgaagctcatgagcctgctggactgctattcangttatcatcaaatatggatggaaaaggaggacaagcctaaaacaagcttcataactcctaacggaacttactgctaccttccaatgccagaggggctcaagaatgctggaggaagcttccgcagaatgacttccaaagtcctcagctctcagattggcaggaatgttctgacatatgttgatgacatca

SEQ ID NO: 58040 - DNA, 467 bp, Zea mays
  unsure (1)..(467): unsure at all n locations
ggaaggagagaagaaagaaggggaacttgttcgactgccctaccactacaagttcaagaaatatttcaaagcaccctgccaagaatggctggaaacaatcgaagtaatgtgcaccaaaattcttgggaattattctaaaaaggaagatcaattgatgacagcagccttcggcacccgtccgaaacgaatgctaaacagagtgctagatgctataggctgtgaatatcctgattatgaacgactcgacaagggtgccaaagggcagaaaagaaagagtggctggcgctgtgaacaaagacgatgaagatcaatcaaagatgaaaaacaaaagtttgaagcgaaagtattagcttcgaagatagaaaggactcgatcccagagcataaatcaattgatgaagaagagaagacttctgcaacatcttctgatgttgaaatagaagaaattctanaggtaatgactgaaac

SEQ ID NO: 58041 - DNA, 404 bp, Zea mays
  unsure (1)..(404): unsure at all n locations
agcttaaacttgttttgcaagatcactccttctatggatcaagttgggtgctcgataatgaatatataaatcatatttggagatagtagcaagggtggtaacaactaaatctcaagtgcatattattttcaaatcttatctcttttgtgacttgtgtagccactaaaggaaaagaagcacttgaggatatacatcagttattgattatgaaataaaggtctaattggaagataaatgaatattatcatatggtcaacaaatccaaaactatgtgatgtactctctctctangttaattggaattgattcttctatattagacactcaccataatatggatttagtcagccctttagactttattgaataaccatgcatattatccatatcattcanaatatatt

SEQ ID NO: 58042 - DNA, 483 bp, Zea mays
  unsure (1)..(483): unsure at all n locations
tagctggacggtgttctgtgatggttcttgaggaaccttctgtgcatgagcagctgcagtcctagtagcaccttcaaaagtcataacatgttttgcagtcaagctggacttcagttgcacaaataatattgctgagtacgaagcacttcttttggggcttcgaaaactaagggcaatgggaataagaagggccatcctaaagactgattctcaagttattggtggccatgtggataagagcagcatggcacgagacccgaagctagaaaaatatctggatgcagtccgaaggttggaagcttccttcgaatggttttccgtcaaaaatattccaagagatgaaaatgagcatgcggatttgctagccaaatcagcggctcaagggctccctttaccctccgaagtattgtttgaaacaataaaagcaccttcggttgagctcatataaagagtagtgctcactatntctccagtgcacagtga

SEQ ID NO: 58043 - DNA, 482 bp, Zea mays
  unsure (1)..(482): unsure at all n locations
gcttcatatcatcttttgggacctgtaaaacttattaagtacattttggtacccatttttggatgggtccaccaaggttagctaataagtacttatgcacccaaatggcctttgtgctagttttaggtgaactaattacctttctaacacaaatgtcatttttgggtctcctaagcgaatatgaatgaattgacatggtaggcttaagaagtttaccctttggacaaaccttgaatagatgacctttntcacggcaattgtagcaaatgcgatgcttgtccttgcaatgcatttgccttttgctttcatcctctttgatgagcatctttcttgatcgtgcaaggtcttgattcttcatgtggaggcatgaatcaatttcatgggccttcttcttgtatncatagcacctnctatncgttctctttgatctttcttttgtgaagcacatangtacatttgtagagcaaatcatatgagcatta

SEQ ID NO: 58044 - DNA, 368 bp, Zea mays
  unsure (1)..(368): unsure at all n locations
acacttgatactaagctttcagaaaatcatctactagacatgcagttacattggctctttataagcttgcaagctcatctaagattgcatctgctgcaatcgagccatatgccttttctgtgaaaaaagaagattatttgcaggggaggaagtctaacgttcaacaactaatggacgcatgaatgcaaggttttacttgactcattattatgcctctttggtggtggcctttcaattttaatacttttattaaatggtccgtgttcattttttgtaactgaatggtggagtgcatatggaggagaacacaaagaactacaaatgcttgcacgtcngattgtttcacaatgtctatcctctaatggatg

SEQ ID NO: 58045 - DNA, 495 bp, Zea mays
  unsure (1)..(495): unsure at all n locations
gcttcttcaccatgtgatcacgattatcttgagattttgagcaatgcactctccttctagttgtgtcaagctcatttttagcctctcattttcttctttgagctttagatatgtatcatcggttgttcctgcaaatcctagctcaaaggaagatttgcttgtcgacggacaacaagcattagcacatggtaatgtagtttcaatttgaatacatgtgcatgagtgagattgctgggattttaagttttctatcacaacctcatgagtaatatttaatatgatatgatcatccataagaatttcatgagaacataggagcatatcatanttttcttgaaaagctagattgtcatcttttagctcttctacttagtccttaagcaaggcatcctatttactaattgagtgatacaatgtaaagcgttatcttgctcaattgaaaatagttcatacctttgaaccaaatcacatgagagcacttaacttctcatgtct

SEQ ID NO: 58046 - DNA, 287 bp, Zea mays
tctaacttggatgctttgactttaaaaaaatttgattggaatgaagagagtactacctaagccttttgcccccacaaaaaatacatgataaatactgttgaatacagaggtaagggcacgaacagcataccggatcatgcttgatcacttcaattctgtaggtcgagctccaatcgtgtgaatcaatcatataatatagcagcaatattgggaagttgcagtagcataaacaaggacagtataagtaaagttcagttatgtggcggaactggattcctccgtgatct

SEQ ID NO: 58047 - DNA, 488 bp, Zea mays
  unsure (1)..(488): unsure at all n locations
agcttctaattgacatcacggcacanatcaagctttccaagatatatgcatgaactcaatctcttctaatcattcacaagttcttcttttaattagataatagatattactttaacactttatggaaacattcagttttggactagtattcttatgagtgataggtgataaccaatcatggttaatgcacaaatttcacatgatcatgttctatatattacttaccccggaagagataatttgataaagaaatcaagcatgtgagagtgagttaattccagactccataccctttttaaacgcatgaccattctaagtgtcattaggctactacaacatcatgcaaaactataagaacaccatttactatttntaaacatatacactatgtataaatcatttcaattacttaataggtatcgatccagttaaaccattaacctcgcaccacatatcatgaaatcttgaccaaacattaagactcacac

SEQ ID NO: 58048 - DNA, 397 bp, Zea mays
tcgcccaaactcgccacgaaattcaaactcgaaggtgaaacgcccgttcctcgaacgactcgagcacgtgcaacggccgcctcgtgaattgcccgtcccatcgcattaactcctcggcatggcgagcgacacctttggcaggagaagcgggcgtcgtttcacctccgccatgatgaccgcgtcaaataaggtgcgccacactatgtaaattcatatgcttttcctcttcccctttctctctcttgctacagggaccgagaaaggggatatttcgaaagggatccttctcagcgaatgaagcgggccctgagccctgctacttatcaagggttcgaaggctggaccctcggaagggtttgacatccgccccagatcactcgggctgcaacccattact

SEQ ID NO: 58049 - DNA, 438 bp, Zea mays
  unsure (1)..(438): unsure at all n locations
agcttctaaagggagaacacgtgataagtttgactaacgtgcaattcgaaaaagatagaccttgtgcagcttgtcaagcaggttaacaagtgggaggagcacatcacagcaagaatgtgatgaccacctcaagacctctggagctgctgcatatggacctcttcggacccgtcgcctatctgagcataagaggaagtaagtatgggttagttattgttgatgacttttcccgcttcacttgggtgttctttntgcaggataagtctgaaacccaagggaccctgaagcgcttcctcaagagagctcaaaatgagtttgagctcaaggtgaagaagataaggagcgacaacgggtccgagttcaagaaccttcaagtggaggagttccttgaggaggangggatcaagcacgagttctncgcttcctacacaccacaac

SEQ ID NO: 58050 - DNA, 284 bp, Zea mays
  unsure (1)..(284): unsure at all n locations
tctaaatggagagcacatcntatgactaacaaatgttcattctgagaaagacaggatttgtagcgcatgccaagcatgaaagcaagttggcactcatcatccacacaagaacatcatgacaagtgacaggccactggagctcctacacatggatctattcggtccgatcgcttacataagcatcggcgggagtaagtactgtctagttattgtggatgattattctcccttaacttggtggttctttttgcaggaaaaatttattacccagagaacctaaaggg

SEQ ID NO: 58051 - DNA, 399 bp, Zea mays
agcttcatgaagaggaaccttcggccatcccatacaaacagcttcatccgaaagccgcttcttcctacaagaccttcggcgacgaagcatagtcccaacagtagcccctttcgcggtgctagatcgtttttcgtaacgagcttgatccgtgaaaaaagtctcttaagcttcggggagccgaaggtccaaaaaacaccttccctgagctcgttgtcgagaaacgattcaatttcccagcgcgtggcggtcccaccttgcagagttactgtttgactctgcggtccaccacgcagcgagtgcaagcgggtatccgcctggtgaaaaatcctggcgcttcgccttcttacctgcagtactatataaacagacgagtaggtgtgatagtaccacagcattcat

SEQ ID NO: 58052 - DNA, 322 bp, Zea mays
  unsure (1)..(322): unsure at all n locations
acgtgacactatatatatactcagcttaagtagaataaaaccaccataaagcagatctggtgggtgaatctcctcttcataacttgatggtcacgagcgtaaaccaacagaccgggtttataatggcgtaccttaccgatgtggcgtacatatatgtgctacctatttacaaaggagaaaattgtattcaccaacgttgcttttatggggngaacttacggaggtgctctattgtcngggaccataattatgggtaccctcaagactcctaatctcagctggtaacccccatcaacacaatactgcaaatgcctgatgggca

SEQ ID NO: 58053 - DNA, 446 bp, Zea mays
  unsure (1)..(446): unsure at all n locations
gcttgtataattcggagatattgtgggtttctcataccaggcaaaagagctatgctgataatagaagaagaccactggaatttgaggaaggagattatgtgtatctcaaggtgtcaccccttcatggaatgaggagattcaaagttaagggcaaattgtcccctcgctatattggaccattctgangttttaggcaagttggagagatggcgtaccaactcgagctacctgcaggtctatcggatgtgcacaatgtatttcacgtgtcacaactgaagaaatgtctcanggtacctgaagatcagctaccaatggagaaccttagtgttcaagatgatctgacttatgctgagtatcctaccaagattctggacacattgactcaagttacaaggaataaggtgataaagatgtgcaaagtgcaatggagtcaccacgatgaagat

SEQ ID NO: 58054 - DNA, 426 bp, Zea mays
  unsure (1)..(426): unsure at all n locations
tgtggacccgtagcctatcaattggaattgccacctctcatgtcatcagttcacaatgtgttccatgtatctcacctgcggaaatgtgtccgcctacccactgaagtgctacctgaaccagatcttgagatataaccagacttatcttatcaagagtacccagtcaatgtattggatcaaaaggagagatcaacacgggcaaggtcaatcagaatgtataaagttcagtggagtcaccattcagcagaagaagctacatgggagactgaggattttctacgctcccacttccccgactttctgccaaaggagtcggtacgtaccccaaaacctcacccacacctgcccttngaatacaattataagaaaaacttagataaccaggatagtctaagtttgggattaactaaaaaggcttncttctga

SEQ ID NO: 58055 - DNA, 360 bp, Zea mays
tgcaagcttcagctccatctatgttatggattgctttctagtcagtccaatttccctcagcccttctggcagcttcctgactcccatgaatagcaatgggtccttgatccgaatgtatcttcatgcaaaggtaagcaggatgaagaattgcttcgaaagcattgagggtgccacgaccaataattgcattgtaagggtattccatgtcaacaatgtcaaacacaacttgctcagttctggtgttgttgatgaatccgaaagtcactggcatggtgatcttgcccagtgctacaatctgtcttcctccgaagccacaaagagggtgtgtagcatcatgaatcttatcttctggctcttgca

SEQ ID NO: 58056 - DNA, 362 bp, Zea mays
tgaccgtcgattcctcgaagctcatgaacagatcgcaatctattctcgtcacacagcgaataccaacaggcacaaacaatcagacatatgtatatgcataagaacattacatcattcaaataaaacataatgaaatatgcagaacgaaatatagcgtgttactacggtcacgcgagggataaggaacccgacagtctaagcttcgatcgaggagttataacgtttacgctacgcaagtagtagctaggacatttaattcgacattataaaatataaattataactgctatgtatgttgattcaatctgctacactaacaactgtcaaattaataactaatataatttgcacgagagattcta

SEQ ID NO: 58057 - DNA, 445 bp, Zea mays
agcttattaaaaaaaagttgctactgctgtattaaacttactactcgactttttaatgaaccacacaatacatgaactgcacaaagataagatggttgtgcaaaatggcttgtgaaaacaattcaaacaaattgatatatcatcccaattcccaagtacatacaggaggtactcaaagactaagtaattccattgcaacaaatctagagagggaacaaacctgtctggaaaagcggctgtattgaaagggcacatatgattaacctctttcaaattgacattgctgtagagaagcttcttattgctgctatagatgacagttggcctatctgacgaagcgaacacgtgggtggtaccctttgatgagaaagtacgaaagctgatgggttgggtcccgaaggtaaccttctttctatcagtcagttcacctgtacttgcattcagt

SEQ ID NO: 58058 - DNA, 331 bp, Zea mays
tgtgcaaagtccactcgaactaatcttcggagaaacccggtctcgctgcaacatgacacccgtatgtccaacacaacaagcaatgattgaattcagaattattgcagagcatatcagtacaagggacctggttcacgagtttttggctttcaaagtttttcccagtttgaaagaatgggaaatgccgaagctaaagggggagaagaaagaaggtgaacttgtacgtttaccttactatttcaagtttaaaaagtactttaaaacaccttgccaagagtggctagatacaattgaagtaatgtgcaatgaaatacttggcaattattccaaa

SEQ ID NO: 58059 - DNA, 405 bp, Zea mays
  unsure (1)..(405): unsure at all n locations
agcttctgcatagctntaacattaatagaagtattgttcanagtgatagagaaaaccttattaataacacagtaatcttcaagcacaggcataaccctgttctcacgagtgtgacatgttctaattagtctaagcccaataagtcaatgtttttttttaatagccggtccttataaatataatgagcaataatcctccttagctttatcactgtaaatatcagatataattgcgatagaagaaacatatggtatgtatacgaggaattgttgaagccaaactgtatgtagaggacaatatttaagggaagattatacaatgtattagataatatagataagacgagatgcntagagaaaantggtggagagagccttactgcatgacatgaagcacatggccact

SEQ ID NO: 58060 - DNA, 311 bp, Zea mays
taccgcatctgaagcatgaacgctctcccgtggtcttggtcttgcttggctgtcccttgcgatcctttagcgacgtcttgaatctttcgatgatgagggccatctacttattattaagtccagctgcctcaatttgcgccaccttgctatgtagcgcctccatgctccttgttgccttgagagcaatgggttgatgctcatggattggaccattcaacgcgtcgtccacgtacctggccttcttgatcatcattcgcccgcttacacatatttcaaggacattctcgggcgacattctggtggacctggga

SEQ ID NO: 58061 - DNA, 74 bp, Zea mays
cctgggcacacatagcgggcagctgtgctccgtttcactgcaactcagtgactctggctcggccagctcgggcg

SEQ ID NO: 58062 - DNA, 365 bp, Zea mays
  unsure (1)..(365): unsure at all n locations
gcctatgaagattcttcattccaacatgggtttgtcggcggtgccagagcccacccaagttagtcttatcaaccaagcaagtgtcgagttcagctctatcaaaatctaccaagtatagctgaccctctaacactcccttaaatgctattgaatcatcacttcttctaaagacagtaacacctacatcagtaaatagacagttgtagcccatttgacatatgtgggatacggaaagcaaattgtaatctaaagaatctacaagaaaaacattggaaatagtatggtcaggtgatatagcaattntacccaatcctttgaccaaaccttgatttccatccccaaatgtgatagctcggtggggatct

SEQ ID NO: 58063 - DNA, 333 bp, Zea mays
gcttatacaggaggatagaagcatgagctcggccatatgtcattatagaaggggagctatacaagcgagggatctgttccccgttgctcaagtgtttatccagatccgaaggcatagaattgatgaaggaaatacacgcaggcctgtgtggatctcacattggatctaggcctttgcttgggaaagtttttcgtcaaggattttattggccaaaggcaacttcggatgcagcggatttagtccaaaagtgcgataggtgtcagaaatgtgcaagagatcaaaaacaaccttcgtcttaactcaattaatacaacccactttgccgttgcaaag

SEQ ID NO: 58064 - DNA, 436 bp, Zea mays
  unsure (1)..(436): unsure at all n locations
agcttgtgaacagtacatatacagaatggagaaagctgcttcggccgatcagccgaaacccatgcttttatgcgaagatatcgcagagcagaaggtgctactgggatctcaattgtctgaggaataagagaaaaccttgataaggtttctgttcaacaacaaagatgtctttgcatggtcagctaatgatctctatggtgttaacagggatgtcattgaacactcgctcaatgttgacccatccttcagacctataaagcagaggcttcggaaaatgtctgacgacaaagctgaaggtgctcggaatgaagtaaaaagacttcttatcactggggtcatcagagaagtgaaatacccagagtggctagccaacactgntatggtgaagaaggccaatggtaaatggagaatgtgtattgantttactgatctcaat

SEQ ID NO: 58065 - DNA, 447 bp, Zea mays
  unsure (1)..(447): unsure at all n locations
ggctaaaagtcttctcatctaagggctgggtgaagatatcggctaattggttgtgagtgctaacataggcaatttcgatatcccccttttgttggtgatatctcaaaaagtgataccagatgtctacgttcttagtgcggctatgttcaacaggattatccaccatgcagattgcactctcattatcacataagagagggactgtgctcaatttgtagccatagtccctaatggtttgcctcatccaaagtaattgtgcacaacaatgtcctgcagtaatatactcggcttcggcggtggatagagctactataatttgtttctttgaagcccaagacactatggatcgtcccagatactgacaagttcctaatgtgctctgtctatcaatcttacattcggcatantcaacatcagaatacccaattagatcaaaggtagatccct

SEQ ID NO: 58066 - DNA, 399 bp, Zea mays
agcttgaagatggcgaacacggatgcaacgtttgtctatgcgaagtcatcctcggtgaggggtgcactgtggtgtcgtatcccttaatgaaaggatggtagtatccggccaatcctaggaatccatgtggcgctcgcaagaactacaggacttgctaagcatcaatgcgtgcaccatctaacgatccatggaaacacccatattgcacacgacgtgccacgggtaggacactgtgagcacgccaaaggtgcacttgacatgcttgaagataagttggtgctgctgtaagacctcgagcaccaagaggacatggagaagatggcagcccatgactcattgtatatcacgatatcactgaagaagacacagatggagtagcaaagataccgacccaagatg

SEQ ID NO: 58067 - DNA, 169 bp, Zea mays
  unsure (1)..(169): unsure at all n locations
cattgttcacgatagtgacggctatattttatatcctgctaactatcctgagcttaaataggagaattcatgctagaaaacctaccactgnttctaatcttgcatttttgattaaaaatgaggctttttttcttaggcatccactcatggtttaatggcttaaaagaaa

SEQ ID NO: 58068 - DNA, 378 bp, Zea mays
caattgcttctcatgctcttgctcactctgggaatatatgagaatatcaacaatgaacaccactactaactttgtcaggtagcccatgaacacactgttcatcaagtacatgaagtaagctggcgcactcgtcaaaccgaatgacatgactgtgaactcatacagaccatactttgtgatgaatgaccccattggtatatctgaaggtccgattttgatcagatggcaacctgaccttatatctatcttcaagaacacactagctcctctcaactggtgaactaaatcctctattctgggcatggggaacttattcttaatagagacctcatttcaggatctgtattcaacgcacattctctttgttcattcttcctc

SEQ ID NO: 58069 - DNA, 162 bp, Zea mays
tgtcaagcttctggagccataatacagcatatagtaccttctcaattctgtgaattgttctttgatgggctgagtacttcggagacaaagtatattggtgcttgcttttttgtctggccaacttgtttctcttgtacaagtgccgcactaagggcatgtttg

SEQ ID NO: 58070 - DNA, 339 bp, Zea mays
tcggcctctaaccatagagggtccctctaacctgcggtatatgctggacaccatggtgttgataaagacactgattctctctcttctcacatgtgattcccacagacactatttaacgtacggtgtatatagtggtaaaaatatgtgacttacaacataaaggccatacacaacttctgtgggttttacgaggctatacatttgaacttgcagaattaaacactgaatgtgtttgcacgttcatacatactcaagttattacatgcgccataagagtgatagatttaaaattagcccatgatgtaaactcgcggcgccgaaaggtaagtgagagtttaa

SEQ ID NO: 58071 - DNA, 92 bp, Zea mays
tcttgccacgacatatttcgtgtacgtacgatgggactgcttcattaccactcatgagccgatctacattgactcatcattgctaacatgcc

SEQ ID NO: 58072 - DNA, 292 bp, Zea mays
acggggttccgtgaggcaaaatgccctaaccaactcgcaccgagaactttgtcccataccagtcctttttgctgcaatgacacggtcagccgcatggtgttttatcgcggggagatgcctgaccataaccgatagtactgatgactagaacgcgccttgatcattacactttggctgaaaccacctaagccattttttttatttcctaagacacagtaacttgcacaactgagagatggtaccctacaactgttggccaatagatattaccagatatgctaaccacttgaat

SEQ ID NO: 58073 - DNA, 426 bp, Zea mays
  unsure (1)..(426): unsure at all n locations
ctcagcttgtaatgaggtaacggcgtcttcaacggtggctattgtctgcgcgctggactcctccacgctaatgtcgaagtgctcctcaaggcccatcacaatctcaacctgcaacgaatatgcnaggacctttatcacgtctttcattcgtctgtcaagatatatacaccctccggcctgaataaatacatctctagagatgtcctaatccttttttttctttttaagttcgactgaagttgatagaaaaaactgatatttatgacaaggaatttgaatagtcagatacagcatgaaacatattttcatggtattcctttttgttgcagagtttttagtacctcttgtatgaaaatgatcaaactggtgcaactctagaagttgattcatccagagatggagtatgcattatctgnggtactacac

SEQ ID NO: 58074 - DNA, 336 bp, Zea mays
tgttgatattcatgacatacacattctcttacatgggtatgatttctaaactattaaaggtgcacatagtgatccctactctctataattttggaaacccatattttcatatcttagaaatctacttaaatcggcattcatatgcttcacattgaattggatcactaaggtgtgaatatcatgcataacttgtctttatgatatgaatgcttgtgcgactaaccttgataaactatgtgcacccaaaatcaaggtgtgttcatcatccagaaggcgacacacaaatgtatttataaaaggagaaaaggctcctattcttaactctaagtgttatct

SEQ ID NO: 58075 - DNA, 330 bp, Zea mays
tctcctggacaagtgctgcacttaccgctgagtgcgaagctgtcacatataataataaaagagcccctggcacgggtggagttaatgctgttagatctattaaatactgcttcacggcttcaaaagccttctgctggattggtccccattgaaagacttctgctgacttcagcacttcgaagaatggtaagttctctctgctgatctggatatgaatctattgagagatgccaacctctctgtcaatctttgggcccccttttttttgtagtggtggctccatccgacgcatagcctcaatcttacttggattgacttcaattccctttg

SEQ ID NO: 58076 - DNA, 416 bp, Zea mays
  unsure (1)..(416): unsure at all n locations
atgcaagctttaactctcgcgagacctttccccgtctctttcttactatggtcaatncactactgcatgcgatattctatgcatagttcatctacttggtctcttgtatggagtattggtggcttcctaatttcaatggatggatgtatgtatgtgtgcactcgcataaaaaacgatccgggtgaagaacccgaggaactcgctggagaaacccctgagcagcagtcggctggtggaggcaagtgtcccttgacctatctcttgcctattcattatttaattcacctcccgctttacacatttatgcctaaggattgactagcctttgttatccatactcttgtctacctatctgcgttggattattattgnttagctttatgctatcgcttaactcttatcaatgaacatgatga

SEQ ID NO: 58077 - DNA, 378 bp, Zea mays
  unsure (1)..(378): unsure at all n locations
ntatcaaatggacgtganaagagccttcctcaatggaccaatcaaagaagaggtctatgttgagcaacctcccggctctgaagacagtgagtatcctaaccatgtctataagctctctaaggcgctttatgggctcaagcaagccccaagagcatgggatgaatgccttagagattttcttattgctaatggcttcaaagtcggaaaagccgatcctacactctttactaaaactcttgaaaatgacttgtttgtatgccaaatttatgttgatgatattatatttgggtctactaacgagtctacatgtgaagagtttagtacgattatgacacagaaattcgagatgtccatgatgggggagttgaagtatttctt

SEQ ID NO: 58078 - DNA, 437 bp, Zea mays
  unsure (1)..(437): unsure at all n locations
tctacaaggagaacacattctgggactaacaaatgtacatttttgttatagataggantcgcagcgcatgtcacgcatggaagcaagttggtgttcatcatcctcacaataacactatgacgactgacaggccactctagctcctacacatggacctattcggcctgattgcttacataagcatccgcgggagtaagtatcgtctagttatcatggatgactatcctcgcttcatttgggtgttctttctgcatgaaaaatctcatacccaagaaaccctacagggattctcgagatcggctcaaaatgagttccgcttaatgatcatagagattagaagcgataacgggacggagttcaagaactttcatattgaacgctttcttgaggacgagggcatcaagcatgagatctctctctcctacactccacaacaa

SEQ ID NO: 58079 - DNA, 382 bp, Zea mays
  unsure (1)..(382): unsure at all n locations
tgcaagcttctattttttgggaacaattactttttattctggtacagntttntgcttcttcaaagcctcttggtcttttttaactgaccggatagcctccctacttagaatactgaaaatccttttcttcttgattcctccagccccttcaacaagcctttcgtaattaggatactcaaagtttagagcatccatcacacggttcagcctttgctttgggtgggtgccgaaagcagcagtcattaactgatcttctttctttgtatagttaacaagaatttcattgcatatggtatctatcaattccaaccattaagtacatggttctttaaatcttttctgaaacttgaaacgatacggtagacagacaagatcatatttc

SEQ ID NO: 58080 - DNA, 458 bp, Zea mays
  unsure (1)..(458): unsure at all n locations
aagctatgaagattcttcatcccaacatgggctacgcggcggtgtttatttctcccatgttcagcttagcaatcaagcaagtgtcgagttcagctctatcgaaatctaccatatatagctgaccctctaacactcccttaaatgctattgaatcatcacttcttctaaagaaagtgacacctacatcagtaaaaagacagctgtagcccatttgacataattgagatacggaaagcaaattgtaatctaatgaatcaacaagaaaaatattggaaatggaatggtcaggagatatagcaattntacccaagcctttgaccaaaccttggtttccaaccccgaatgtgatagctcgttggggatcctgcgttttctcgtacgaagagaacattatcttctcccctgtcatgtggttagtgcacccgctatctatgatccaacttgtgccccctgatgca

SEQ ID NO: 58081 - DNA, 307 bp, Zea mays
  unsure (1)..(307): unsure at all n locations
aaatgcggaggatgcccgacgccgtattctaacacacgcgcctcagtcggtcacgccgaagagaccacggtcactctgtccctcctctatactgtctgatatgacaagaatatagcgccgcccgcttcgctccgactgtcatgtcagccacaccggcaacgactgacaacaggttacgatcaaccaccgaagctaagcctcgggcgcaacaggaagctacgtcttgaccgacctcacactccagnctcgggaggaggtgttcgactcgaccgaccttacgcttcggactagggaggaggtcttctcc

SEQ ID NO: 58082 - DNA, 381 bp, Zea mays
  unsure (1)..(381): unsure at all n locations
tcgncttgaccagacacttgtatacccgtaacctgattcctaagatacctgttcacatatttcacttggaaaacattgtcaaatcatgtttttgaggaccttctgaagccgaaggcccccaacagtagcccctcacaattttaatatgctggaataataaattcatattgcgatatggacgaaggctttaaaccgaaggtccgaanaaacaccttccctttgctagaatagcaacagtcattgacaagcgggaccctccagtctttaacgcactatgcgtataaataagagctcaccacgagtttatttggcacgctttcttgccatctgctcttgctcactcaacatttagtctgtgcgcgacaacatttgttgactttt

SEQ ID NO: 58083 - DNA, 480 bp, Zea mays
  unsure (1)..(480): unsure at all n locations
tatatgttntctaaaatgactatgggcttcagatgtatatattcccctatgcatgtcagatcaatccataacttcagtcagagtgatgacagacgaagccatcttcagaggccacaacatatctcacaatattcagggcaacagcaaagctctttcacgccaccagccctaatggcagaggcgcgangggcttctgatgaaggtatggtgatcagcccacaaagatctactgcttctgtggtgaggacaagggccacactacaagaacatgccaggtcaccattcataagcaaaaggagattgtcgaagtagaagcgcggtagaatcagccaaagcaagtcttacatactgcttcgtgctactctccctaaataccagaatacgtgggttattaacctgcaacttctggtgcttcngcaagtcatatacatactttcttggctcagcttccattaccaccaccattgccacttactcaca

SEQ ID NO: 58084 - DNA, 330 bp, Zea mays
gacctcgtaaggctctttgtatttatgagctaacttgcccttgatcccaaatctctggacacccttggtgggtgacaccttaagataaacatgatctcctacctcaaactgtagaggctctcgcctcttatcatgatagctcttttgcctggcttgagcaccttcttgttctttttgatgatcctgacctttgtctctgcttcaagtaccaaatctggcccaaaaattttcctctctcctgcttgagaccaattcagaggggtcctacatcttctcccatataatgcctcaaagggtgccatcttcagactggactgatagctgttattg

SEQ ID NO: 58085 - DNA, 399 bp, Zea mays
  unsure (1)..(399): unsure at all n locations
aaccaaaagaggacaaagttgtcattttcaagagcttcttcagagcaggacttcggttccgcttaaatgacatgataggggaagttntaaagaactttgagatataccttcatcaattaacacccaatgctattgttaggctcagtgtttttatatgggctctccaaaaccaggctatggatgctaatgccgaagctttttgccgggtgcgtgaactgcactatcagacaaaggctagagcagatggtcttcataagaactttggctgctacaactttgcatatagaaaagatacgaaggctccaataattggctatcacactaaatggccaaccgggtggacaaattgaatggtttatgtgaaagctgcgagaagaaaaggggagaaatgatgactat

SEQ ID NO: 58086 - DNA, 310 bp, Zea mays
tttatcccaagcccatgcttttatgtgaagatattgcagagcacaatgtgctgctgggatctcaattgtctgaagaacaagagaaaacccttattaggttcttgttcaacaacaaagatgtctttgtatggtcagccaataatctctgtggtgttaacagagatgtcattgaacactcgctcaatgctgatccattcttcagacccagaaagcagaggcttcaaaaaatgtctgatgacaaagcctaaagtgctcggaatgaagtgaatagacttcttattgctggagtcatcagagaagtgatataccc

SEQ ID NO: 58087 - DNA, 326 bp, Zea mays
acaagagggagaaaaagaagaactattagaaggccaagggcgaggcacatcttggcaaggagtgggattctgattgctcctcgcccgactctgacaatgaaagactcgccgccaccgccttcaacaagtcgtccctcttccccaacgagcgtcacacattgtttatggcaagggagaagaaggtatgtactcgagactctacctatgcttcttcaagtgaggacgaatctagtgatgaggatgaaatagattattcatgtttatttaaaggcctacatagaaccaacgtagataaaatcaatgaattgattgatgcattaaatgat

SEQ ID NO: 58088 - DNA, 374 bp, Zea mays
catgtattctcatgtgaatataaatattattgtatctcttaccattgacattaataagctacgtgatgcgaatattgtgaagaagaatatcttcctacataccacaacaaagatataggagcatcatcgctattcttcacaacatggaggaattgagtcaataaccccgaccataatgattatgaaaaatcccgggctttgtgatgtcgcgataaatgtgtcaaggagaggaaccaacttcctcaagaccatatgcttttgcatgtgatgaaaggaagggtataaagaaggtcctcactccaaattccttccgtgaagaagacgacgaataacatacggatgacgatgaagataatcaatcatctacatcatcc

SEQ ID NO: 58089 - DNA, 226 bp, Zea mays
  unsure (1)..(226): unsure at all n locations
ggtagtctcggtcttattttgtcttacatagacagggggagttgctatatcccgtgcatctatgtttgccatgaagaactatgtttgggttggatctttgtaatgagttgcaccacagagtgggcatcccctgcattttgtttacctattatgttaatggaggtagttatatatgtgggaaacctcttgttccacttttctctatctganaagctgtgtgggctgt

SEQ ID NO: 58090 - DNA, 352 bp, Zea mays
tactcttcttcgagaagccatatcctatcttcccttgcacggcaaccgcatggcttgtatccgaagcgtactttctctataaatatcgagtgagcctttcatacttcactcaaccttgcccttacaaactccacaaccatgaatccctacttagaaaacaattttcttgtgcggttgatggaagaaatggaagaggaagaagaagagttgcagttggcgaggcacatggtcaatatgaggcgacgtgcacgcaatgagcgtcgtcatggtggttcgattccagggcgtgttaggattcatcgtgatcacatgagcggcgatgcaagaattcgagcggactactttggagcga

SEQ ID NO: 58091 - DNA, 418 bp, Zea mays
  unsure (1)..(418): unsure at all n locations
atgcaagcttgtgaaagttcttcatcctcacatgtgctaagcggttatgccacagccagcccatgccagtcttagcaattaagcatgcatctagaccggcctcctcttttgcaaaatcaactaagtaaagtttgtcgtctaatacacccttaaaagctagtgaaccatcacttcttctaaagacagacacatctacatttgtgaatagacaattatattccatattgcataattgactaacagataacaaattatatccaagagactcaactaaaaacacattatacatagagtgctcatttgatattgcaatnttgcctaagcctttcaccttgccttgattcccatcaccgaatatgattgaatcttggggatcctcgttcttgacgtaagaagaaacatcttcttctccccgcat

SEQ ID NO: 58092 - DNA, 371 bp, Zea mays
tctatagggagaacacatatcgtgactaacaaatgttcattttgtgaaagacaggatttgtagagcatgtcaagtatggaagccagctattgttcatcatccacataagaacatcatgacgactgacaggccgctcgagctactccacatggatctattcagcccgatagcttacataagcatcggcgggaagaagtactgtctaagtattgtggatgattattctcgcttcacttgggtggtctttttgcaggataaatctcaaacccaagaaaccttaaagggattcttaagacgggctcaaaatgacgttggcttaaggatcaaaaagattagaagccgacacacgacggagttcaagaactctcaaa

SEQ ID NO: 58093 - DNA, 386 bp, Zea mays
  unsure (1)..(386): unsure at all n locations
cctataaataagtgaacaggaattcctttactagtcacgcatctctggtaactgcaatcgcatctttctgaacccaaccttctgccaaggcagaggtattattgtattccataactcaatatattaagtgaacataatgtaattcgtctatgattcatttattccttctataccttttattttatgtcatcttataatttctactgaaatattattacgaaggtttaacttttgaaatatactcttataaaccttccgccaagatccattattctgaaaggaatcatgtttcatggactaaagacggtaacatttaacactttactntgccttgctcttgattcatagcaattgagaacaagtctccaacagtggatccttctaaa

SEQ ID NO: 58094 - DNA, 387 bp, Zea mays
cgtcctatcattcgaggaacaaaatacacttgcataccatattaacaaatatgaatcgatggtttgtaattaatgtgacgaacatatatagggtttttgaaaatactacatgaagaccacttgatgctatagcaaagaaaatgagccagagtgcattcataaatctagcaaaatttaaagagctttaccttgaaccagaagaccaattcaagacgcctcctgtgtccaagcctgaatgggttatcagttgtttgactgcaacacaaatcttcagtacgtgagaaatataacttgtaccacaaaaataattcactgtcagttgtagtgatgctcagcaatacaaaaccagaacctgataatcttttctttcttgcctaaatctgaatt

SEQ ID NO: 58095 - DNA, 152 bp, Zea mays
aacacgatttgtagcgcatggccagcatgatagctagttcgtgctcatcatccacacaagaacattatgaccaccgacaggccgcctgagtacctcacatggatctatttggctcgatagcttacataagcatccgcgggagcaagtactat

SEQ ID NO: 58096 - DNA, 402 bp, Zea mays
  unsure (1)..(402): unsure at all n locations
atttcagtgtacccaggaccacgaagaatacctccaggcgtacgtncgaatgtttctgcgcctgagggcacaagcgccaacagtgcccaatgaaattgtcattgaggccatgattaaggggcttcggccgggaccctcagcgcagtactttgccaagaagccaccacaaacgttggagaagctgctccagaagatggacgaatacattcgagctgacaatgacttccgccaaagaagggaggaagcattcaggttctctgatatgaccaggggcttcggaggaagaattcacccgaggcacattaggtcaattcacaactctgctcaaactgatgatcgagggagtcagcagcaaaggccacaatactcttcacaagcttcgggctagcagcaaagttcttt

SEQ ID NO: 58097 - DNA, 279 bp, Zea mays
tccttcggcttttctagcaactctctgaccccataaacatcaatgggtccttgttccgaaagtatcttcatgcataaatatgctggatgaagtattgcttccaaagcattgagtgtcccaccaccaatgattgcactgtaaggatattccatattaacgatgtcaaagacaacctgttcagtccttgtgttgtggaccaacccgaaagtcgctgacatcgtgatatgccgagtgctgcaacttgtcttcctccgaagcacaagagggtgtgagcatcat

SEQ ID NO: 58098 - DNA, 417 bp, Zea mays
  unsure (1)..(417): unsure at all n locations
catgtgctagacggcgatgtctntgtcagcccatgttagtcttatcaagtaaacatgcatctagattgacattttctttactaaaatctactaaataaagttggatgtcacatacacctttaaatactaatgaacaccacttcttctaaagacagttacattaacatttgtaaataaacaatatatcccatgtgacataactgactgacaaaaggcaaattatatccaagcgattctaccaaaagacattagagatggaatgctcgatagtaatcactattttacatatncccattaccttgccttgattacccatctcgaagataaccgtgtcatggaaatccttattctcgacgtaagaggtcaacatcttcttctcccccgtcatgtgggttgtgcatccgctatcaatgatct

SEQ ID NO: 58099 - DNA, 418 bp, Zea mays
  unsure (1)..(418): unsure at all n locations
tctgccatgatgtgattgtccctggctggagagacgagtactaagtttgtgctacactcttgactgccatgactgcattattgcccccatacgaagatatgattgcctcgtagctcattcgaaactgctttaggtctaagtgcccgtcatacatatggagctgaggcggcttgtatgatgggggccatggggtagcctgcagctctgctgccagaggagaagcaccatcaaaagcaaaattgccatgatgaaaatcatcataccattcattattgttgtatgaattgtcttgacgaagctctttgtgttgaggccttcggtcttggtcatcctgngtgagatgacgcatttcctcatcggcctcatcaatcttcctctgaagatcggtgagacgaagcatcttttctttcttcttctg

SEQ ID NO: 58100 - DNA, 176 bp, Zea mays
ttttcaaaaaaaagaccttgtgcagcttgtcgagaatgttataaggcgggaagctctcatcatgcccaatatgtgaagacaacatcaagaccccaggagttacttcatatggacctcttcggacccactcagctatctaaatataggaggaagcaacgatggtcctgttataagtg

SEQ ID NO: 58101 - DNA, 157 bp, Zea mays
cacatgccagccagcttcacttaccattccagtaacctggcctttcacatgcttgggactggatatgaatggacctttcaagaaagctcaacggggatatactcatgtattggtggcgattgacaaattcacctaatcgatagatgtcaaacccatt

SEQ ID NO: 58102 - DNA, 453 bp, Zea mays
tatgcagcttttaaagggaaacacattttatgatttttttatcgccccttgagaaagacaggatttgtagtgcatgccaatcagggaaccaagttggagtctatcattcacacaagaacatcatgactgccgataggccgcttgagctagttcacatggacctattcggcccgatcgcttatataagcatctgcgggagttaggactgactagttattgaggatgattattctcgcttcacttgaatgttctttttgcaagaaaactcttaaacccaagagaccttaaagagattcttgagacgggctcaaaatgagttcggattgatgatcaaaaagattatatgcgacaattgaacatagttcaagaactctcaaattaaaagattctttgatgaggaggggatcaagctctgattctctcttccttacacacctcaacaaaatggtgtag

SEQ ID NO: 58103 - DNA, 461 bp, Zea mays
accttagaaactcaacttgaagttgcggacgaccttcgaaatattaatatattctttctagtaacaaacagtcgctctaaggaacgcagagtaagttgctgaagttacaataagccgctctcaagggagcgcagagtaagttttttgctccaaagactgtcctaagggaatgctgagcacacagcgaaaagtcaacgctgataccgcctaagtaaaaggcgaagaagctccaaagacgttcctaagggaatgcagagcttataccgcctaagttaaaggcgaagaagcttcatagacgttcctataggaatgcagagcttacagcgagaaatcagcgctgatacaaaaatattgtgtggggatatgtgtgtatctctctgaacaaatgtcatctacgtaacattacatcatcacatcatttcgcatagcataagcatcatacatcattgtgcatatggcac

SEQ ID NO: 58104 - DNA, 394 bp, Zea mays
agcgccaccatggatgatctcatttgggatccacaccctaagagtgcaagaaaccctaattggaaccctagaaaaccctaaacctaaaccctatggggctaagtgcaaaaataatgctcctttggactaaagtgcgaaaaccatgagtataaagagtcttaagtcatatgggtcacacataagtaagtgtcgcaagttaaaccttgaggtttggactaattggcaaaagaaccacacttgaaccctattgactaagtctgaaattagtgtaactaactcaacctttggagccctatatctgccaaattaataagttttgccctaagtcccacataatttggagactatcataagaaataacttgaataacatcctcttcgtgtacacaaattga

SEQ ID NO: 58105 - DNA, 205 bp, Zea mays
ccaaggggttatttatagaagggaaaggcaaccgctcacttctaaccgcggtcactcaacagtcgcaaggcattcaataaacactttcacccacccgaagacacgtcagacagcggacgcccgttcatgcaacactacacccattgggactccagtcaacagcgcaaaggatatgattacactagcccgcccatcccattactac

SEQ ID NO: 58106 - DNA, 501 bp, Zea mays
  unsure (1)..(501): unsure at all n locations
catgcaagcttatgtgttattcggctaagacgctctctgttgtgattatgtgcccaactgagaaattcaattaaatcctataaaaatctcaaaagcccatgcataggtatggctagggaatggtggaacaaatagtgttatattgctagtctaagtagagtggaactagtttaaatatggtggctacactcactcaccaagtcatggatgaagggagagagtgtggagaaccacacgcgcgcgcgctggcctgagctatgcgaaaggcgcgggcgcccgacatgcacgtgaatggtccgccaaaattcggcccctcgccttgcgggggagcggcttccttttgccagtttattntttggttgctaggctggtaagtttagagccctaaccgatcatgataaagatctgagccattatcggaacgcgagtctatcngttcgtggataacgtgtagattggatcacggatctgtatctggtcgcagatacgaccctatataag

SEQ ID NO: 58107 - DNA, 415 bp, Zea mays
  unsure (1)..(415): unsure at all n locations
ctccagctcaccgtctcncagtggagctatctaatggcttggatcattctgtngacggcgggaaacggttccgccatggtggttgtcctccggcggctctggtgggtcatgcggaggtcgccggagctatgggcgagctctggggaagttggcacggtaccgagggtgcaaccgagaagctagctaagcactggggagggctatataaccgtggcgcgggcgtggtcacagggcggccgcggtcgcgcgggggtttgcgcacgggcgtgctctgagcgcgcccccgagtgtcaagccttgtcgaacacgtgtgggtttgctcttgacatggttcaacaaccgatctgagcaccttatcgngcagatcttggcaaaacccctgggacggctcctccctgaccaatactaccttttg

SEQ ID NO: 58108 - DNA, 359 bp, Zea mays
  unsure (1)..(359): unsure at all n locations
tggatgacgngtcgtcatcatcataatacgagctatcatcttagtcccattcaacttagtaggctgtgacatcttacttcttggtataggatttacttctcttcttgtcattatcatctttgcccttcctattcttgcttggacaatatattgctatgtgaccgggttccccacactcaaaacattctctatcattgaaagcatctcttctagatgtttgaccacttctaagttgagctcgtttcatcttcatgaacttattgaattgtcttacaaataaagccatgtcaccatcactctcactttcatttgcttcatcattgctatcatacttttcaattgcctctgacgccttgctt

SEQ ID NO: 58109 - DNA, 449 bp, Zea mays
  unsure (1)..(449): unsure at all n locations
cttcatccccacatgttctatacagcgatgccacagccagcccatgctagtcttagcaattaagcatgcatctagatcggccttctcttttgcaaaattaactaaatagaggttgtcgtctagtacacccttaaagctaatgaaccatcactccttcttaagacagacacatctacatttgtgaataagcaattatatcccatattacaaagttgactaacagacaacaagttatatccgagcgattctactaaaaacacattagaaatggaatgctcggatgaaattgctattnttcctagtcctttaaccttgccttggttcccatcaccgaatatgattgaatcttgcgaatccttgttcttgacgtaagaggagaacatcttcttctcccccgtcatgtaggttgtgcatccgctgtcgataattcagcttgacccccggatgca

SEQ ID NO: 58110 - DNA, 412 bp, Zea mays
cctatgaaactcagcttgcccccggacattggtcctcttcctattcttgaacaatgtggaccagtggcatatcgactccaattacccgaaacattgtctgctgtgcacaatgtgttccatgtgtctcaattgaagaagtgtcttcaggttccagatcgaatcattgaagtgatggatgttgccttagaactagacttgacatattcagaatatcctattcgagtcttggatcaaaaggataggattacccgaagaaaaactcacaagttttataagatacaatggaaccaacacacggaagatgaagctacctgcgaaactcaagactctttagaaaagaatttcccaggctctttatcttcatgtaatctgtgagatatatacaattgttgtaatataggagtaggcccca

SEQ ID NO: 58111 - DNA, 364 bp, Zea mays
gcagcttctttagatagctcccgaaatgtttgttgtttgacacacaatcggccttgaaccatttacttccttttgatcctctcgaaagtccttgcctctttcttctaagaacagctgccgaatcttggtgaagttgtcatcatccttctgcccttctttgaactcccgctctaaggtgggctctaactccactgttacttcttgcgtactggtcaagaaactgaggctcaatctgtcgaactctttggctaactcatacagcatcgggtacgaggccaacatattaacttgactctttctgctcagagcatctgcaacaacattgtgcttggctggatgagaatgtatctccaactcatagtct

SEQ ID NO: 58112 - DNA, 352 bp, Zea mays
actttactacactcaatcgttgtacgcttgtgatgtgcacttaagtgtacgagttgcttgaaacccttagttgcatgaattctagattcctttttgagatggatactagtatcctaggtcgagtagctgctttgctaattaagatctcggtaaaagtcgagtgatttttctagcactcgcgcgaggtcatgaatggattgtattgatcttgataacgggatctataatggtctatggacttggacctatggtggatgccttgtccatgagacgggaaaaggaattaatgagtaatgtgtggatacctgagtcaagcgtttgaacgtactaaacacatgtcgggaaatatggt

SEQ ID NO: 58113 - DNA, 450 bp, Zea mays
  unsure (1)..(450): unsure at all n locations
cctacacttaaaccgtttcttcatgttttacgaanaacccatcaatgtgacaggagggaaatggggctcgcgggacaatgagctctgggattccgctaaagccagcaccgggatgctctgagcggggctcgcccgcggcaaatcaacgagcaagctgcagttgcagcgattaaacaagctaagcgctcgaagaaactgggagggagtgagaagtctatccattactgacacgtggggccgcggtgttttgcgcccatttgttagctgtctatgggccccaccttcttttgatattagccttctttgtttttatcacacatatcttctttgcaggttcatttcaaaaaagagacctcaacctcggcgaatcatcattggcgtcaagtaacncacagcgacgtcagaccattggtgtaaactttcctacgtggtagccgatgtgggtgtttg

SEQ ID NO: 58114 - DNA, 294 bp, Zea mays
acacaacagtgctcaaagcacctcaatacctgactgtgactgactacccgcatcaaaagatgaccacgggttatatgtgttctctcggcacacagagagagagagagagagaaaaccatgggaccatcatcttgccctcgacacgggcacgtacgtcagatattgccggagaacgatcaagagatagttgccgtcgaacatctctgctgctgcctgctgcacaaacatacacacgcgactcacgcgaacacgatcacggtggtcgctggctaaactggcagccattgcattcac

SEQ ID NO: 58115 - DNA, 445 bp, Zea mays
  unsure (1)..(445): unsure at all n locations
tgagagagatcttatgactttagacaataatctcatgtggatttccatctagtttaagtcatggatcatgnaacctttgattctttcactcatatntcttcttttcctcaaactagctccaaaatagtgatatgttgatttcgagctttccaacctttctagaagtgttgaattggttccttggggtatttagaacttatccaaagagtagaactattggtagttcatctatttcatgttttacccctatttggttgagctgattctgacttaaaaactgaaatgctgaacttatgaacctgtgaatgaaagactaggtaaactagtttgtctgaatggctgtgaaggtcatcaagcaccaaaatataagaaaatggttatggccatttcccttttgaagcgtctcaatcctctatgactcaaatatgatacaattactaatctc

SEQ ID NO: 58116 - DNA, 353 bp, Zea mays
  unsure (1)..(353): unsure at all n locations
tgcagcttaaggcgtcgataggtgtttttttanttttactcccncctctcttccgtcggcgccttgaaagcgaccgagtgcgcttcctacgcggaggggctatctacctcggtgattttctttgagcctttgatcatcaattcaaagctcacaaaattccctattactctcttcggaggtattaccgtatatctaagattgtcaccaattaattgaacttgaatagggttaaggaaaacaagggatctaaaaataaccttaaccatttcgtggtcatcccatcttgtgctcccgagggtgcgcactcagttcaccaaagtttagagcagagtgtacatgccttgaggctcctt

SEQ ID NO: 58117 - DNA, 420 bp, Zea mays
tccacgtgttcgacgcgagctggcatccgggggcgcgctcatagcactcccgtgcgcgaacccccgcgcgcccgcggccgcccgtgaccacgctcgcgccacggctataaagcccgccccagtgcttggcttccttccccgttacctcctccgtacctcgccggacttgcccaagccagccattaactccggcgacctccccgcgacccgccagtgccgtccgagagcaaccaccgtggccagcccctctcccgtcctcctccattcgatccaagccctcagttagcttcctggtgaagccgtgagacttgctcaagcttgaaccggtggccctcgtcaccggagtagcccaatcgcgctcaccggagttcaagaacccgccggcgcacgtgaaccgggtaagcccctggcaccgttttc

SEQ ID NO: 58118 - DNA, 293 bp, Zea mays
tgagcgaaccaatgattcaaccttggtgatcaagagttcatgttctctgagttctacaacgtggaagaccctaaccatcgatttagagaaggccagtgtgtttctgaccaacttatgtcctattacatgaaaacttacatctcccctcaacatgattcaatctaaggattgactatacttttatttaccatgtccctgtttaccctatggagtggattcgaacgatcatctttaatggtagcacttaaacttaatcaatgaacatgatgagatacatctatgatacaatgttc

SEQ ID NO: 58119 - DNA, 378 bp, Zea mays
  unsure (1)..(378): unsure at all n locations
gagaacacgtgataagtctttctatttctcaattcgaaaaagatagaccttgtgcatctttgtcagcactgtaacatgtgggaggagcgcatcacagcaagaatgtgatgaccacttttagacccatggagctgttgtatatggacctcttctgacccgctgcctatcttagcatatggggaagtaagtatgggctaattattatcaaagacttctcccgcttcacttgggagttccttttgccagataagtctgaaacccaaaggaccctcaagcgcttcctaaagagagctcaanatgaggttgagctccaagtgaacaacataatgagcgacaacggtccgagttcaagaattttcagtataagagttcttgagg

SEQ ID NO: 58120 - DNA, 384 bp, Zea mays
  unsure (1)..(384): unsure at all n locations
ttctactacatgtcatcctcatactgatggttttactgaagntgngaatagaactttgcctactatgttaaaggcagttctaaagaagaatattaagatgtgggaggactgcttgcctcatattgaatttgcttataatcgatcattgcattctactacagagatgtgcccatttcagaatgtatatggtttgttacctcgtgctcctattgatttaatgccttagccatcttctgaaaaactaaattttgatgctactaagcgtgctgaatcgatgttaaaactgcaccaaactactaaagaacacatatagcgtctgaatgcttgatataagcttgctagtgataaacgtagataggaaattaactttgaacctggatattt

SEQ ID NO: 58121 - DNA, 420 bp, Zea mays
cattacggaccttgaaactcagcttcgccggcatttccaggcatttgcgtgcgcccttgaatctcctgggacctctggagctgccggcaacagccgggagagtctctccgggactacatccggcgattctcgaagcagcgcaccaagctgccccacatcaccgactcggatgtcatcggcgcgttcctcgccggcaccacctgccgcgacctggtgagcaagctgggtcgcaagacccccaccaaggcgagcgagctgatggacatagccaccaagttcgcctctggccagaaggcggtcgaggctatctttcggaaggacaagcagccccagggccgcccactggaagatgcccccgaggcatcaactctgcgcgactcccagaaaaagggcaagaagaaatctcaagcgatacgcgac

SEQ ID NO: 58122 - DNA, 412 bp, Zea mays
tgcagcttacatctctggacaactcggcagttttttcttcgctggtgccaatagaaaccagatctgaaagcctttctgaccagagttctagacgctgcatgtattccgcactgcccgacatggatttcatctaagagttgcttctcaatagctgagtgaatgcacttcatgaggactcctgtcgcacctcttctgtacaatgtgcccccaatgagggtgtagtgggctgactgccttgcgatgtgttccgatgtcgccttgtcatccggttcttcttcatttcttatgtacctgatgataggctctctctagtcattggggtccaactttggttggcttaaggtgttgcactcttccgtctgatctgagaagatactcggttgtgatatttcttggacaaagatcccgggtg

SEQ ID NO: 58123 - DNA, 416 bp, Zea mays
tgtctttctaagagttgcttaagtagtggtttgagaatattaatatttcagatcatggtgctctacttcgaaggctaacagagtatactggggcataccctttatctccacctctagtaaaattagacacatgtctaaaataaaatgattaaaagttattagataatcagtttagtgaagggacacttggcttctttgaaactactgttgctcagactgttcaaaagttttctcttcagtgattgtgaactgctctaaacgtaacgaatgacgaacaaatatatatacatagttagctagggtgtacttaatttatagtaattagttaactaatttactttatattatgtatagattgatatctatttacttgttagtatacatatgtagctaagtattgatagttggtcattatg

SEQ ID NO: 58124 - DNA, 168 bp, Zea mays
gaggacacaaccagagggggtgatacgtaatccgcaaatacaaaaccgtcgcccaaactcggtaaggttacccaacataatcaatcggtaagaccactcttgtaaaacaatggcccgaaaaaacagcccagagacacgggatttatccggggccacaagatacacttg

SEQ ID NO: 58125 - DNA, 487 bp, Zea mays
  unsure (1)..(487): unsure at all n locations
actaagcttatcgaatcgatctcatggcagccttctcttcacaccccatttcgtataaatctctggcttgacaatccctacggtaatcatgacatagttcgcggagtctaataaaattcccatgtgatgctctttttgctagcattctctgcttaaactcgagtcatattattattcctctgagccatattctcaagggctccatctatctgtgctatgtgaaattctcattggttacgcttggtaatatggtattaaggctaacgactgaaggtgccgcgacgaaaccgagagcctcctgtgggcgcgcacacaatgttgagctgctcggcatgcgctggtatcgctgttcatagtcatgatccattatagaactacacggatatgctatgtttcgtggacattctctcagagngatcacgacaattctgtttaatatgtcatgatattcggtccaaatctatcttctgtatcttgtcagatgaca

SEQ ID NO: 58126 - DNA, 389 bp, Zea mays
gtatgtcatgaataatttatttatttttccttggggccaataacagtaccataacaactttggttgctgcagcttcgcctctcggtccggggcaagctgttccgtaccaacctttcggaagagatggcccggggattggatgacagaatggtttatgttgagaatgacttattattaccagaagacatcacaggtataattatgcctcctatttggcaaagcttctgccttcggaagtcgaaagttgaaatgaacgaagccgtcgaagagtgcccaagagccttcggcgttgtctgctctcttataggaacaagggactcagttcaagagcatattgcctttatggtgtggccgcttgcggagaaatgggaaatgccacaacaaatcgt

SEQ ID NO: 58127 - DNA, 307 bp, Zea mays
tcaagaacccgccgacgcacgtggaccgggtaagcccctgcaccgttttccaattctttgcgcgcatggcctctgtgtcaccctgtgaagctcctcgtgcaccctaattgaactataccgccgtgatttggccggagcaagagccgccgacgacccctgccgcctgtgctcgtggccagagtagctccgaccaccttctacaccgacccgcacaccgacgtgaccgtctcgacctcccggacgtcactgaccaccccgccggagctctactgccgccggtaagcctcacccgccgaaactatgccgt

SEQ ID NO: 58128 - DNA, 279 bp, Zea mays
tacatttaacattttatgttgccttggttctaattcatagcatttgagaacaagttcccaacattggcgcccaccttccgtgaactcactttcactttgtgagctgatggcttcgttcaatgatcaagctggagctgcttctgacccgaagctggtgctcccgatcacaggtggttcgtcctcagagccagcccacaagaaacataagaaggaagctcatagaagggtcagcattgtggggtgcaggacccttcataagtcaaatgtgtttacattcta

SEQ ID NO: 58129 - DNA, 382 bp, Zea mays
  unsure (1)..(382): unsure at all n locations
ntgaagcgtcgcgttacataggacgactgaagaacgccactctgttctctccttggtgaaagacggcgccgatacccgtaccggatgcgttgcagtccacgactaatgtcttctcgaagttaggcatctgaaagaccggacccgtggtcaaagctgttatcatctgcttgaatgcggcctgagtgtctgctccccaagagaaagcatcgcgccgcataaggcgcgtgaaaggtgccgcgatgacaccgaagtcgctgatgaactttcttgagtagccggcgaggcccaagaagccccgcatgccacgagcggagtgcggtgctggccactaagagactgccttcaccttggccgcatccatggccacccccgccgcggagat

SEQ ID NO: 58130 - DNA, 198 bp, Zea mays
cgagtcactacacgacgcttgtcttgcccccaaactttttgagccgaccaaagagccctcccctcgagcaatgacaaacaaattgaagcttcacggcagaaagaaaggtgtcgactaagcatacacttgaaatgcttctaagacaccagcaccaagttagagtttccaaaaggtaattcttggatgttaacttttgac

SEQ ID NO: 58131 - DNA, 411 bp, Zea mays
  unsure (1)..(411): unsure at all n locations
cttcagcttcctggaacagcccncgcctccagccttgntgtctcaatgccagcagccagaagggagccaatatgctccacatcaaagggacttcagagaacagttcgaagctcgcacggtcaacagcaccgtgccagagtcaaaacacatctattgacaaatatcctaccttaatagcaatctttttcattcagttttattttttgaaaaaaggacattgtttaggtttcatgtaattagtttcgttgattcctacaagaaaaatatgttttcttcacaggttcgtgataataaaaaggaccttcggactatcgaaaatccttcgaagcaacaaacagtcgctctaatgaacgcagaggtagtctgacgaagtcacaaaaaggtgttccgaacggagcgcagtgtgaagtt

SEQ ID NO: 58132 - DNA, 384 bp, Zea mays
  unsure (1)..(384): unsure at all n locations
ctcagctattgacaaatttttggcagcacaacacggcattattcttgaatgttgcgagaactccacacctacccatctgtttatatagcgccgcacgtggggaggtgaattgtcaagtcttccgcaccgaacgaacagtcacccgcacacactaaatggcggggcactgaaccccgaaaggtgaatcgccaggacgcgtttacccgctgcatggagagaccatatcgcgctcgaaattatgngaactgttctcggcaacgagctcacggaaagtggttttccgaccttctgctctacgaagcctacgagattctatcacggatcaagcttcgttagaacaacgatctaacaccgcaaaaggctactggtgtgggtatgcttctt

SEQ ID NO: 58133 - DNA, 383 bp, Zea mays
  unsure (1)..(383): unsure at all n locations
acctgtcgaagcaacagcacatgccagctctattatttctaaccataccagatacttggcctttctcatgccgaggatcggatatgactggaccctttaaaaaagctcaatgaggatacacccatgtattggtggcaattgacaaattcactaagtggatagagtttcagcccattgactctttgacctctgctaaatccgtggaattcatacaaagcataatattcagatttgggataccaaacagtatcattactgacttgggatccaactctaccacgttagaattttttgacttctgcgagcaaaaagcattcagaacaagtatgcatctgtatgccatcctagagccaacgggcatgttgagcgagccaacngaatga

SEQ ID NO: 58134 - DNA, 375 bp, Zea mays
  unsure (1)..(375): unsure at all n locations
tttgtttcatgcacgcaagatcacaattaatctcttacgcggatgtccgaaaggtcttgcgtttgttggcacaatcgcccatagtacccaatgaaattgtgattgaagccatgatcatggggcttctgtcangacctatggcccaatacttctccaggaagccccctcagaccttggagaaatagcttcacaacaaggaagaatatatcagtgctgacatagacttncggcagagaaaggaggaagcttacaagttgtctcaatgaccacgggcttttgacggagagtccaccccaagaacgttatataaatacactctactcacaatgacgaaagaagaggtttgcatcacagagcgcaatattccttctatac

SEQ ID NO: 58135 - DNA, 482 bp, Zea mays
  unsure (1)..(482): unsure at all n locations
gtgcactttaaatattcacccaagggctattctttttgccagagccaacccatgttagtcttagcaattaagcaagtgtcgagttcagctctatcaaaatctactaagtatagctgaccctctaacactcccttaaatgctactgaatcatcacttcttctaaagactgtgacacctacatcagtaaatagacagttgtagcccanttgacataattgagaaacagacagcaaattgtgatctaaagaatctacaagaaaaacattggaaatggaatggtcaggcgatatagcaatcttacccaatcctttgaccaaaccttggtttccatccccaaatgtgatagctcgttggggatcntgagtnttctcgtagaaagagaacatcttcttctcccgtgtcatgtggtttgtgcacccgctgtcgatgatccaacttgagcccccggatgcatagacatacaaaacaagttagttcttgac

SEQ ID NO: 58136 - DNA, 417 bp, Zea mays
  unsure (1)..(417): unsure at all n locations
cttgggaagggttcttcatccccacatgtgctaagcggcgattttcagccagcccatgctagtcttagcgattaagcatgcatctagaccggcctcctcttttgcaaaatcaactaaataaagnttgtcgtctagtacacccttaaatgctagtgaactatcacttcttctaaagacagacacatctacatttgtaaatagactattatatcccatattacataattgactgacagatagtaaattatatccaagagactcaactcataacacattagagatagagtgctcattggatattgcaatcttgcctaaacctttcaccttgccttggttcccatcaccgaatatgattgaatctgcgaatccttattcttgacgatgaggtgacatcctcttcttcctcgcatatgggtt

SEQ ID NO: 58137 - DNA, 428 bp, Zea mays
  unsure (1)..(428): unsure at all n locations
agcttaacctctgcgtattccggccggtattatctcgccggagagcgcgctcgtcgccgtccaccgtcgtggacctgacgctgcgaagaaatagaaatgcaggggcctaactgcgaaggtcagagacacagaggaatagtgctaaagacttttaacgggttatttgaatgactaaggtcctcggtgtaaaattgccagcgtgaacgtgggcgcgcgcatagttttcctgtctgcatgccgacttgggctgaattgagcccactactattcattggttctctttttctttttgctgatagattagggaatgtatagaaaattctagaaaaatgctaaaatatgagacncaatttactagattcctaaattccctagtatttaatagaaataggtccaagattgtaaccccaccatgaatttttatattt

SEQ ID NO: 58138 - DNA, 350 bp, Zea mays
  unsure (1)..(350): unsure at all n locations
ttcctgcttacaccttcggcgctcaccaaccttcgtattattctggtctactgtgatgcctgactcgagtccgaagatacctgttcacacattatactccagaaacactattaaatcctatttttgaggaccttccgatgccgaaggtccccaacagtagcccctcgcaatattaatttgttcaaaataaatttagattgcgatctggacgaaggctttacgccgaaggtccgaaaaaacaccttccctttgctagaatagcaacattcactgacaagcggggtctttcaattttcaacgcacttggcgtataaataatgccataccgcaaacgcattngacacgctctc

SEQ ID NO: 58139 - DNA, 319 bp, Zea mays
taatgacgactgacaggccactggagctcctacacatggatctattcggcccgatcgcttacataagcatctgcgggagaaagtactgtctagttattgtggatgattattctcgcttcacttgggtattctttttacaggaaaaatctcaaacccacgagaccttaaatggattcttgagacgagctctaaatgagttcggcttaatgatcaagaaaataagaagcgacaatgggactggagtcaagaactctcacattgaaagcttacttgacgaggagggcatcaagcatgagtttcttctcctacacgcccaaca

SEQ ID NO: 58140 - DNA, 254 bp, Zea mays
tccttcttttcctccgtggccatgaatgcaaacggctgaacttctgatgtatatggatcatcaagctccgtgatcttcctctagccttcgatcatgcactctaaacttacaaaaggcccgattacttcctcgggggtcattttatgatatctaggactaccacgaattagtcgaacttgagtagggctcaagaaaataaaagatcttagaataacctgtaccactttatggtcatcccactttacgcttccgag

SEQ ID NO: 58141 - DNA, 271 bp, Zea mays
gcttgacaatgaagagaaggcgctcgtcattatattctttcgttcaaatcccaaacagaggagggggaaagactacaagtcccgctccaacaaaggttgctacaaatgtggtaagctccgtcattttattgctaaatgtcctatatcaagtgacagtgaccgaggcgacgactagaatgggagaataaaggagaataataggttttacaagaagaaaggcggccatgcccatgtttgtccggagtgggacttcgactagagctcgagcgac

SEQ ID NO: 58142 - DNA, 122 bp, Zea mays
ttattaggccaacatacaggatttataccatcaatacctttctcgcattatcattgagtgcactgactccactaacattcattattgcgtgatcatgctaatcaacctgaaattgacaacac

SEQ ID NO: 58143 - DNA, 378 bp, Zea mays
acttctttcttttttgagcaccccggttagctaccattataaccgcactcaccacactatgttggctgcctgcgatgtgcactttaatgtacgagttgcttgaaacccttagttgcatgaatcctatattcctctttgagaaggatactattatcctaagtcgagtatctgctttgctaattacgatctcggtagaagtagagtgatttttctagcactctcgcgaggtcaggaatggattgtattgatcttgataacgggatctatcacgagctatggactcggacctatggtggatgccttgtccatgacacgggataatgaattaatgatttatgtgtggatacctgagccaagcgttcgaacgtccttaacaca

SEQ ID NO: 58144 - DNA, 433 bp, Zea mays
  unsure (1)..(433): unsure at all n locations
catgcaagcttgcacacatagctcattgaaaccttttatctatctctcctataagctaagactaatgtgttttcaagtctatttcacaccaagtcataagtatattgaaagggaattaaagtcttcggcgaagacaaaagcttccactccgtaactcatgcttcgccatcactccgagcaactctctattccttgggagaaatgagcataaaaaaaacggactctattcttgggggagagagtaaaagctcaaaagcaaaaggaccggacctcgtctttggtataatcttaactcatttacttatgaccaaaggggaggaacttactaaaagggctctaatgattccgtctntggcgattcatgccacacagggggagaaatgagctctaagcaaaaggaccgcaccaccaccacccaattcaaaaacttagt

SEQ ID NO: 58145 - DNA, 451 bp, Zea mays
tcttcatccccacatgtgctaagcggcgatgttccaaccagcccatgctagtcttatcaattaagcatgcatctagaccggcctcttcttttgcataatcaactaagtaaagcttgccgactaatacacccttaaaggctagtgaaccatcacttcttctaaagacagacacatctacatttgtaaaaaagacaattatatcccatattgcatagttgactaacagatagcaaattgttaccaagagactcaactaaaaacacatttgagatagagtgctcattagaaattgcaattttacctaacccttttaccttgccttgattcctatcaccgaatataattgaatcttgggaatccttattcttgacgtaggaggtgaacatcttcttcttccccgtcatatggtttgtgcatccgctgtcgataatccaacttgaacccccggatg

SEQ ID NO: 58146 - DNA, 373 bp, Zea mays
  unsure (1)..(373): unsure at all n locations
agctctttancttcgggtagaaagacatgttttcttatttccgaatagaagatgtctcaagacaagaagacagttgctgagacgaagctaaccgaagaggagaagcttcttgcggagaagactgctggatttgttgagtcaatagcgaaaacgaatacagagaagattactaaagaaattttggagggattgtctgaagatactgatgatagtgacatctatgatgtggagagtggaggcgaatactctgaagattgggcctggcgaccaagtcatgcagtcttcgggagatcaactatcaaacagggtcatcttgataatatgagaagaaagtattttctagatatgtctattgtgagggctgacgtagacc

SEQ ID NO: 58147 - DNA, 291 bp, Zea mays
cgcgcgagcatgatacgtggtcccgcgccaccggaatatctctatcttgctcgctggagattggaaccccgccggagcacgtgaaccttgtaaacctctgtaccatttctcaatttggagcccgcatgggctctacatcaccactgtggagcttctcgtgcactctaatttgaacccaccgccgcgggtaggccgagtatgagccctcgacaaccccgccgctgcgctcgtgggcaagcagattcaccacctctgaccccgaccgacaccgagtgaacgccgggacttccc

SEQ ID NO: 58148 - DNA, 431 bp, Zea mays
  unsure (1)..(431): unsure at all n locations
taccagctccagccaccacaggcgacgagccgaccattgacgtgaccctcgtgacttccccgacatcaccgaccagcccactggaacttcaccgtcgccggttaaccgtgccgcnacgttttccctttctattactgtatccgtgaactaaggaccgcgggttagatgccagaaaatgccagggggttaagtgttaagccacagactcagttgaatagtagaccgaggactcctttgtaaagaaagaaaaaaattttaaccagtgacccgagtgcaaagaatattctcttctgcttctcaatttataagttattttaaatctgcacaaacttgataatgcataacttgaagagattcatccaaatctggcaaatctaatttgaagacttagtaaatatgaacttctaccaaaatagtaactcatgtttcta

SEQ ID NO: 58149 - DNA, 181 bp, Zea mays
aaagaacccaattaacagcgaacgtgctctatggacgaaacgcaacttaaggggccttcctgaataagtttcaacactagaaggtttgactcggccattaaaacttctacgaactgacaaaaacaccccaaggtcgggcatttccccagtaagaaatgctgcgacgattaaaccagccttt

SEQ ID NO: 58150 - DNA, 338 bp, Zea mays
gaaccaaatccgccgtggagccgcctctcgccgtgggtagcgtcgctgttgtcgcctccaacctcggtgagtagcgcatccagttagttgcgctaagggcaacgcgtagtccgtaagaattgagttattagggccctaaccctaagattggccgaacgccggccatggcgctgtcacaaggccgctttgtgccgtggttagcttctcgtgcacccatgccaccagaaaattagtcattagatgattccctaggtcctccatttcatttatctcgcacttggagtagcaatcgaggctccggtctgtaatcgggatttttctcggtgatgctccgccgt

SEQ ID NO: 58151 - DNA, 326 bp, Zea mays
agaagccagtgcacgctcggcggagctctcgaccccgccggagtacgtggaccgggcaaaccactccaccacccttcgattccttgcgcacacagacgctgcgtgaccccgcgaagctcaccgtgccctccgatagaaccaatgcgccgaggggtggccggcatactcgccgccgacgaggacacccgcctgcccgcgtggaccgggcgattccggccatctccgacgtcgaggcgtacctcgacgggaccgccagaggctccccgagccgaccccaccctttggcggaccatcctcgccggcgggaagccgcgccgcccttatct

SEQ ID NO: 58152 - DNA, 489 bp, Zea mays
  unsure (1)..(489): unsure at all n locations
ctcaagcntcttggaaaacacgccaagcagcggaccgccgggcccttgttctttttcttcgcgacacaaagatgaccctcggacagaaccaatgcagaaatccgagtctacactatggaccgtccggaggataaacgcggaccgtctgagacctcgctcggaccgactggcctcaagcgcggaccgtccggtaggcaaggatctgaaaaacccgaagtgacgggttcggaagaatgaattatagcagcctcgtggaccgttcggtgtgcacgaccggaccgtccgcgactgggtctgtctgacatctgatgacgcattacatgcaatatactccgttgatataacacgntactgctgatcgatgcattttcagacgctgatttatatgggcggatcgtccggaccttggtggcggaccgctcgcctcagcaaatggagtacggctagaagtgttgggggtataatacaacccaacccctatattactac

SEQ ID NO: 58153 - DNA, 391 bp, Zea mays
  unsure (1)..(391): unsure at all n locations
gcaacttctaagggagaacacgtgatacgggtatctttgtgcttttcgaaaaagatagaccctgtgcagcttgtcaagcaagttaacaagtgggaggagcgcatcacagcaagaacgtgatgaccacttcaagacccctagagctgctgcatatggacctcttcggacccgtcgcctatctgagcatatgagggagtaagtatggtttagntatcgttgatgagttttcccgcttcacttgagtgttctttttgcaggataaatctgaaacccaaaggaccctcaagcgctttctcaagagagctcaaaatgagttcgagctcaacgtgaagaatataaagagcgacaacgggtccgaattcaagaacctttaagtggaggaattccttga

SEQ ID NO: 58154 - DNA, 337 bp, Zea mays
actcaaacctagctaccggtgcatagagtgcaccgaaatccaaaccttcgacttgtgaatatcccttggccacaaggcgggctttgctgcttaggaccacaccatgctcatcttgcttgttgcggaagacccacttggttactacaacattttggttaggacaaggaactaaatgccatacctcattccttgtgaatatgtggagcccctcttgcattgccaacacccaattcgaatcttaaagcgcttcctctaccctgtgtggctcaatagaagaaacaaaagaggaatgttcacacaaatgagcaacacgagatcgagtggctacccccttatg

SEQ ID NO: 58155 - DNA, 383 bp, Zea mays
  unsure (1)..(383): unsure at all n locations
ccttgcttctgccgacgggtcttttatatcttcagattataattttttctcgctngngccaaagatttcacatgatcgcagcctctactctccanaatagtggcaatccctctagcacccgaaaaggcacatacgttttcgcggccattcaaaacttcctcaaaagctacagcttcctggctggtccattcaattgggccctcgaggtctgcctttacgaaattatcctcgcttgaatacgcgccaccgttggtgaagctagtttttattttctttacacactctatagacttttcataacacctttccttggatgcacgaagatcttcaacgtgtttctctaaatgatttgcgcattggtcactgatttctcgtttagctct

SEQ ID NO: 58156 - DNA, 296 bp, Zea mays
tgcttgaagcatacgataacgccatggttattacaaacaacttataagatgctcacggcatgcaaaagagctatcatgacaagaggcggtagcccctacaagttgaagtgcgagatcatgtttatcataaggtatcacccaccaagggtgttcagagatatcgaattaaaggcaacttaactcctctttacattggaccctactagatcaatgaaactcgtggacccgtaacctatcaataggaattgccacctcacattgtcagcagttacaatgggtcccatgtatctcaactg

SEQ ID NO: 58157 - DNA, 237 bp, Zea mays
  unsure (1)..(237): unsure at all n locations
aaaccacngaccgnccttcaccccccntttgggcgacccaaacaacgacacaacggagaccgcccgcaaaaagggacaagggcaaagaacacacaccgaaagacagccaagcaaacgacggcaggcaaaccgggacaaaacaaaaagcacgacaccacgaaagagcaaacaagcccgccgcagacagcgaaacagcgaggaaaaggcgcgcaaccaagccagcagaaagaaggggaa

SEQ ID NO: 58158 - DNA, 174 bp, Zea mays
  unsure (1)..(174): unsure at all n locations
aaaactcaactttaaaggaaacacacatgcgctagcaaagttatttttataagacaggctgtacgcatgtcaagcaagaaagcaagttggaactcatcattcacacaagaacatnatgacgaccgataggccgcttgagatactccacatggatctataccgcccgattgctta

SEQ ID NO: 58159 - DNA, 432 bp, Zea mays
agcttctcccttcctgcgcgtatctctgcttactgctgctcctgtccgctcgtccaacagctgcccaagtccggcctctgcttggatctcgtctgtgccatggagctctcccctgccgcgcccagtccaagctcctcccctgccggcgtccagcacccggccggatctctgatggcgcgcgtgcccttctcttggcggcgctcactttctgcttctctctgtctctagctcgccgcagtgctatttccttgctcccatggcgcgccggccgctcctctctgcccaacatagcagcttctttctctgcttctcccagtcggccgaggccccgcccgtccgtgctccttcttctagctccagctcgcgagcgtccctctgctgagccatggctgtcgtgcctccgctctcttgtcttccctgcgcgcaacaaag

SEQ ID NO: 58160 - DNA, 420 bp, Zea mays
ctgtgccacggattgtcggtagccacgacgtggctctgccaacgtcgcacaagcggaggcggaggaggaggccctgctcctggcacatgcaagcatcgagccatctccagcggcaccggccgcagcggcactcctccaccttgatgagtcgaaagcacgcgctttcctcggcgacgggtccaacaaggacatgatcgaaggatggtgcctcgacaccggcgccactcattacatgaccggccgacgggagttcttcaccgagcttgactctatcgtccgaggcttcgtcaagttcggggacgcctccggcgttgagatcaatggcgccggctcaatcgtcttcaccgccgcgtctggtgagcacacgctgctcaccggagtctactacattcccgcgttgaggaactctatcatcagctt

SEQ ID NO: 58161 - DNA, 302 bp, Zea mays
actcattaattgatattaatgtttcgataattaaattgacaattatgacattaacccgatggttaaaacaacattattacatattaattggaacatggagtgaccacccaggataacagtgcaaccacgagtactatcatggctctggctttggtaattaactttatatgcttagtgcctggcaaccttacctgaaatatgggcaagagggggagcggtggtgttggcaacccacgttatcatggagacgtattcttggctaaggtacctcacccacggggtcaccaccatcggctttagaa

SEQ ID NO: 58162 - DNA, 441 bp, Zea mays
  unsure (1)..(441): unsure at all n locations
cgatgtntanaatgacatcagcctctcccaaatctttcatctcgaaatggctcgatagaagactnttaacttcctcaatcacattgagatttgatccaaagattaaaatgtcatcaacataaaggcacagcataacagactcacccccaccataccgatagtatacacacgtgtcagattcatttacaacaaagccagctgctgtaagagtattatcaaactttncatgccattgcttangtgcttgttttatgccatacaatgattttatcaacctgcacaccttgttctcttgaccatccgcaatgaacccttctggctgatccatatagatctcctcatccaactctccattaaagaaagctgtcttaacatccatctgatgaatgataagaacataagaggcttgcacggctattaatgtgcgaatcgtagtcaatc

SEQ ID NO: 58163 - DNA, 342 bp, Zea mays
tagcaccaaaactctcacttggaagcctcggaggcgaactcttcgagcagggtagcgtcccagagactgctgataccgcgctgagagtagtaaagccacgtcccgagcctctctcagctgggccaaagaatcttctctgatggtgcggttgcctcggtcgtccgacgcctttgtcctcagggaaccgtattctaagtctgggggtaagatgggctctgtcccatagactacgaaaaacggcgtgaaacccgtggcccagctcggcgtcgtcctcagaccccacaccaccgagggtagctctttcatccatcgcttgccaaacttgttgaagtagttgtagat

SEQ ID NO: 58164 - DNA, 392 bp, Zea mays
  unsure (1)..(392): unsure at all n locations
tgccttcgcttcagtttatcacccgcagtccaacagagttgtgtatcgcgctcatggaaaaatcttcacagccgtcaaaaagatgctcctcgacgaaaagaagggcagatggaccgtattattacccgaggcggtctgggcactaaacacgactgagtgcagggcgaccgggttcactcctttccgccttttataccgatcggaggccatgaccccacaagaaataaaacatgggtccccacgaacggatccgtcagccgaccccgacgtggacgagccaactntaaaggattccatcgacggagaccgagtcttcgccttataggcactaaacaaaataccaagcccgacaaaagcatggtgcgaccactcagttatcccgagggagttca

SEQ ID NO: 58165 - DNA, 422 bp, Zea mays
ttgctaaaagtcttttcatctaaaggttttgtgtttatatcacctaactgggtgggggtgctagcataagcaattttgatatctccctttgttggtgatctctcaagaagtgatactggatgtctatgtgctctgtgtggcagtggtcaacaggattgcccaccatggagattacactctcattggcacataggagagggactttgctcaatttgtagccatagtccctaagggttttcctcatccatagtaattgtgcacaacaatgtcccgcaacaatatactcggcttcggcggtggatagagctactgaattttgtttctttgaatcacaaaacactagggatctcccagaaactgatatatctctgatgaccctttctatcaatttacatcacgcatatcaatatagatactcaata

SEQ ID NO: 58166 - DNA, 451 bp, Zea mays
  unsure (1)..(451): unsure at all n locations
atttggcagcaaaacagtgcanatatgcttgaatgctgtggtaacttcacacctactcgtctgtttatatagtactgcaggtaagaaggcgaagcgccaggattnttacaccaggcggacagccgcttgcactcgctgcgcggtggaccacagagaccaaacagtaactctgcaaggtgggaccgctacgcgctcggaaactgaatcgtttctcggcaacgagctcacggaaggcgtttttagaccttcggcttcccgaagcttaagagactttttcttttcacggatcaagctcgttacgaaaaacgatctatcgccgcgaaaggggctactggtgggactatgcttcgtcgcgccgaacgtcttgaaggaagaagcaacttcagctgaagctgtccgcgtgcgatgaccgaagcttgatcttcatatagcttcggaattatgaaccgac

SEQ ID NO: 58167 - DNA, 493 bp, Zea mays
  unsure (1)..(493): unsure at all n locations
gcttgtaccataatgatcagcaactaaacttattattttctcaggttcaaaactgggcctcccaggatattaaggacaagataacttcagcaaccaagcataaagtattaacagaagagtctgttgttcctactatattaccactatacaatgcaatacttgaatactttcattgaatacgacataaaaatgtgagggtaaaaaaattgagagaactgataatctaaacttgcagaactccccataaaattaagatggtgaaaggaagaccaagggtctgtttggttcagctgtagattcctgaaaatctgattctagctgtgagctgtgagaaagttgttgtgagctgacaattataaaaaatgacatttgtgtggttgaaacaactgtcaactatagattttataagaccatgacaacttgtaacgtggatgacaggaatctagaanatctgggtaggaggtgattctgaatttaactagagaaatctaaa

SEQ ID NO: 58168 - DNA, 359 bp, Zea mays
  unsure (1)..(359): unsure at all n locations
gtgtaatgttatgtcactacaatgtctctgcgttgtgacgacacanattattcgatgaaaagttagagcacagcgattatatggaaacgatattcatttgcgatatatgaccatcaatgtagatgatcgttttgtcacaaatattttcataaatcatatctttctcttaccaattttatcatggggctaggggcatataggggatggtaacgagaagacgtatcgagtggtggcattgggcgagcacagcgtaggggaggggtcaacgcctnatgagaacaccaacaactagcgaagacatgtggcgattgagactagatcacttcatccaacacgccctatgcttagacggagtggtg

SEQ ID NO: 58169 - DNA, 476 bp, Zea mays
  unsure (1)..(476): unsure at all n locations
agcttcaacacanaaatctcgttaatctgctgtggtgctgcactagaggagatcaagaaaagatgcttatatatgaatacatggaaaataaaagtctagattacttcatatttggcaaggaccatctcttctacatgtgtaagttgcttacagtatgtcaacagttttgataaattgtacatcttttgcagataatgtgaaaggagcagatctaaactggtcaaaacgcctgcacataattaatgggatagctcaaaggcttctttaccttcacaattattcacggttatgcgttgtccataaggatttgaaagcaagtaacattctctcggatagtgaaatgaatccaaaaatatcagaatttgggatggccagaatattctgttcaaacgcgaaagaatcaaatactacaagaatagtgggcacacagtaagaacatatggatctgtngcacttgagtacatntaaaaattata

SEQ ID NO: 58170 - DNA, 407 bp, Zea mays
  unsure (1)..(407): unsure at all n locations
tatgaagaattttcatcccaacatgtgctagttggtgatgccagagccagcccatgttagtcttagcaattaagcatgtgtcgagttcagctctatcaaaatctaccaagtatagctgaccctctagcacacccttaaatgctattgaatcatcacttcttctaaagacagtgacacctacatcagtaaagagacagttgtagcccattttgcataattgagatacggaaagcaaattgtaatctaatgaatctacaagacaaacattggaaatagaatggtcaggagatatagcaatatttcccaaacccttgaccaaaccttgtgtttcatccncgaatgtaatagctcgttggggatcctggctnttctcgtaagaggagaacatctttntctcccctgtcatg

SEQ ID NO: 58171 - DNA, 407 bp, Zea mays
  unsure (1)..(407): unsure at all n locations
tcgaggatntcttctttcctaatgctatgccatttcgttttatatggtgacaagattagattaagtgtcccttctttgagcatttaaaacaaagtctatcatccttgttaatagccaagccatttttaatgtagggacatgacctaatcaagtgtcccttttcaaagcattcactacactctttattgcgaagtgtggcttgatcattaccttggatgttacttttcatggaggcatggttgaggcttttcgaggaggtgtcgatttcctttctttgttccttcctcttggcaatcctcaagtccttgacattttcttcaagggagctagtgcatgcttcggttattcccgtctcaagcttcttcaccatgtaatcacggttatcttgagaagggtgagcaatacac

SEQ ID NO: 58172 - DNA, 381 bp, Zea mays
  unsure (1)..(381): unsure at all n locations
tgtgaatggtcttcatccccacatgtgcgtaacggcgatgtcacatccagcccatgctagtcttagcaattaagcatgcatctagaccggcctcctctcttgtaaaatcagctaaataaagtttgtcgtctagtgcacccttaaacgctaatgaaccatcacttcttctaaagacagacacatctacatctgtgaatagacagttatatcccatattacaaagttgactcacagacaacaagttatatccaagcgactcaactaagaacacattataaatagagtgctcggatgaaatagcaattnttcctaaccctttcaccttgccttggttcccatcaccgaatatgattgaatcttggggatccttggtcttgacgt

SEQ ID NO: 58173 - DNA, 430 bp, Zea mays
actcaagcctaggtgcgggtgcatatgtttcaccgaaatccaaaccttcgacttatgaatagcccttggctacaagtcaggctttgttccttgtcaccacaccatgcttatcttgcttgttgccgaaaacccacttggttcctacaacattttggttaagacgtggaactaaattccatacctcatttctcgtgaagatgttgagctcctcttgcattgccaacacccaattccaatcttttagagcatcctccacccttgttgactcaatagaggacacacaagagttatattcacacaaatgagcgactcgagatcgagtagttaccccttatgaatatcaccgagaatggagtcacggagcgatctctctgaatgcttaatggactctggtgaaaggtcttgaccctgttctctgacatcttcttgc

SEQ ID NO: 58174 - DNA, 335 bp, Zea mays
  unsure (1)..(335): unsure at all n locations
tggtgccgatggagaagcaaacatccttgaagtctttgctgtctaactgcctgccgatgtcgactgatagttcggacggaactccgaagcggcaaacaatgttttgtcaaaagaattcttgggcagtctctgatgttattgtggagacagcccttgcctcgatccatttggtgaagtattcgacagcgacgaaggcgaacttaaggttcccctgagtcgtatgtaggggcccgacgatgtctatgcccgatcgctggagaggccaagtgtgggcgatcagctntgtaaattgcgaagggcttcctgatcgatgggaatacttctggcaagcttcg

SEQ ID NO: 58175 - DNA, 332 bp, Zea mays
  unsure (1)..(332): unsure at all n locations
tcttcagacagagcttgaacttcagttcgactctcaataaagtctcttttagaattttaaaggatttctccttctctccaatgtcataccgaagctcggatacttcagatttaagcttcacaatttccttggggcagcttcaacctccacatatttcttattnctcaaggctttgctcatgaataggccctataaaaagtaaaaacaaaaaacatctgagttttgaataattcaatccaaaacacaaaagagaaaattaatgcgaacattacctttagatgagtgtatgcgaggcaatccgagaaatattcgaggacagagttgataacatg

SEQ ID NO: 58176 - DNA, 326 bp, Zea mays
ataatgaaagctacattctatatcctgctaattatcctgagcacaaaattatgaagattcatgctaggaaacctcacactgtttctcatcatgcttttatgtataaaaatgaggcttctagctctatgcataccacacatgttaaaatgcctataaagagaattcctactgcatctaatgaacacaatgtgttatttaagacttttgatgcatcttatgctttaactaacaaatcatgcatagaagttgccaaatattgtgggggcaaacacaagagctccaagacttgtgtttgggtacccaaggtgcttgtttctaacgtcaaa

SEQ ID NO: 58177 - DNA, 434 bp, Zea mays
  unsure (1)..(434): unsure at all n locations
agcttcncanaatgtccgacgaanagacatttgtcgtccangcggaggtgcaccgcctcctagaggctaaattcattgagccagtggcttaccccacgtggctctccaatgttgtaatttactctgttggaagtcacggtcatacgaaagtcacggtcatacgaagttaaatttactctgttggaagggcaggaccaataaatttccatgagcagggacagactaatggatgaataatcagggagccaaactcaatatttcagaatggcaacaatttctatacatgtatatcagcactggaattttatcagaaaagtaaaccattcttaccagacgacacaatttccacagaccanagcaatgcaagcattccaacctacatgacatgggagattattgaagtattcatggctattaagactacatgattatat

SEQ ID NO: 58178 - DNA, 318 bp, Zea mays
tggatatcattcatcagaacactaccgatattgtcgtgatatatcaaaattcttcttcacgaagcatgaatagaatggaaggtgttttttcgtcaaagactcaaacggtacgtatgtaaaatttcatgcatcggaaagaattgaacaattaaaacaagtatattatattcagggctacaagatgttacacatgttacatttcagaagattttacaatagtacttaatcttctctcaaaacaacttccgcagcttcgttcaggagccgattaacaacttcatccatgatagcttcagccatctttttaatttcgccatc

SEQ ID NO: 58179 - DNA, 469 bp, Zea mays
  unsure (1)..(469): unsure at all n locations
gcagcttctggtcatctgtcagtataactacttagtcatcccagntaccttcggcgccctcatcacgcccaccattggtattagcatgcatctcatcaaatcgcctcaagagtgcgacaaggctcttgtcaatatgagcaactgtcatttccacatttgcaagtttggtgtttgtgtcgatctgtgtggcctccaattgccccatcttttcattcgtcacctgcatgtcattatcaaagcctttcatgtgcgtcttcaccagccttacaaagtgttgtatgatacccttggtgcgaggagagtgtggcatattacgagaagcatcatcaacctccaatcctgccatggttagacgaacagaggcaacaagaaaaaacgtgaaggaataaaaactctacaactattaagatgtagctactgcaaagcgctcactctcaacctgccacacaagctcttaccaattcttacc

SEQ ID NO: 58180 - DNA, 295 bp, Zea mays
  unsure (1)..(295): unsure at all n locations
ttacggaacttaaaactcagctgaggccnatanaaagccgccccatatactctgtatccgaagttcttagtttatcaaagaaaaattatacacaattggagaaagtattgtatgatgntttgatggcctccangaagcttcggcattattttcaagcttacaatataattgttccttcttcacaaccattgaaggatattatgagaaatcgagaaactattggaaggattggaaaatgggctacagagctcaatgaatcttgtattgattatgtgcataggccttcgattcaatc

SEQ ID NO: 58181 - DNA, 313 bp, Zea mays
aagccaacccatgttagtcttagcaattaagcaagtgtcgagttcagctctattaatatcaactaagtatagctgaccctctaacattcccttaaatgctactgaatcatcacttcttctaaagacagtaacacctatatcctgaaaaagatagatgtaacccattttacataattgagaaactgaaagcaagttataatctaaagaatctacaagaaaaacattgaaaatagaatggtcaagagatatagcaattttaccaagtcccttgaccaaaccttgattttcatctccgaatgtgataactctttgg

SEQ ID NO: 58182 - DNA, 349 bp, Zea mays
  unsure (1)..(349): unsure at all n locations
cttcatccccacatgtgcttagtggtgatgccacagccagcccatgctagtcttagctattaagcatgcatctagaccggactcttcttttgcaaaatcaactaaataaagtttgccgtctaatacacccttaaaagctaatgaaccatcgcttcttctaaagacagacacatttacatttgtaaatagacagttataccccatgttgcataatngactaacagatagcaaattataaccaagagactcaactaaaaaacacattatagatagagtgctcattagaaaattgcaatttacctaacccctttaccttgccttgatttccatcaccgaatataattgaatc

SEQ ID NO: 58183 - DNA, 347 bp, Zea mays
  unsure (1)..(347): unsure at all n locations
agcttgcctagcacctgtcgcacttacacacatgctacttcttttattggttgtcatccaaataccaaaatccacaagtgagctttcacagaccgtctgtgctgctgtagagagattctccaagacttgttccccatgagtgggatctacggatcgttcgtgtataacctaacagagcgccaacacactttatggcaactctgctggtgatgactacattntanatttattaaatcgcgccctatgactattattaagatcgcaccatcgtgaccctaagcttacatattcagccgactatggaaaggcttgccggtcacgaacaacagcgattctaagatctcatg

SEQ ID NO: 58184 - DNA, 401 bp, Zea mays
  unsure (1)..(401): unsure at all n locations
ttatacccttactaccattatttctatacttttcagccatcttctcaaagtgtgccttagttgaagcatgaagtttcaaaataaattcactacgctccttaacatcactatgtacttgctccgtagtaagtagacgctaaagatcaataagagcacgagtgttaaaaacattcactacctgataaagacttaccttggtggtggagtgttccgcnctataatatgcagactccacatgcggtcaacactctatccacatttcaaaattgtattaatattgctccatcgatgacacaatgtcctattccaacctctgtttgtcatacgttgtgatgaaactggtaaaaacagattttgtcccattttgtcataagtcgccataatgactaagaatttactac

SEQ ID NO: 58185 - DNA, 196 bp, Zea mays
cggatcaccctctggagaactctctcgagaccaccaagtttccatatctgataagaggcctaagatggagaatacagggtatgcctgagccggcgctcctctctttttgggcaagcgctcaggtgcaacaacacagtggaccacggcctacttcgtatggaggcacaaatgcaccaacttccagcccattcccacc

SEQ ID NO: 58186 - DNA, 412 bp, Zea mays
  unsure (1)..(412): unsure at all n locations
ancttgaaatttattttaaactaacgtaatatattattttaactcacacacgagatggtgatcttatctagcacatgcatcatagaagccacaaccaagttaccaactgaaccatgagttaagctgtaccaactgaagtcacaattcactgatgcaggcaactagcagatgacagaaattgcgattacacattacacaaaaaacagctaatcaagaaagcatacaggagaagcctagattacacataacaccaaaaatcagctaattcactgatgcatagatgctgatggcctcgtcattaaagttaggtatatatatatcttctctctgaagctatgaagtcttgaaacaagtgatatgaaacacatggttgaactgattggttttacgagctcgatcgattcgtttcatg

SEQ ID NO: 58187 - DNA, 483 bp, Zea mays
  unsure (1)..(483): unsure at all n locations
tggtggtgtggaccagtagtgttgaactataggagtcattttacttgagtcctaatctaaggttgaagcacggtaccttcttanatccctatgtgtctcgtcctgtgtgtcgagttcttttttttaaagtcatgacaagcaacaataattgcactaaaaattggacagtagcaagcagtgaatacttactttcctatcttcttgaaataagcatcacatgacattactntcctgtcttcttatcaaatgttcttcttgacataagcatctcatgacattactttcccatcttcttatcaaatgttctgaagacctctgccacagtcaaacaaccctaatgcagtcacagatcaaatattatcaatacggaaatagaaaattggttgccatgtaataaaaatatgaatattatccatacgcgaatagaanatgttctgaatatgccagcacagatcattacctccttaagatgatctagttcac

SEQ ID NO: 58188 - DNA, 359 bp, Zea mays
  unsure (1)..(359): unsure at all n locations
taatgagttgactaactgctctcatgttgatntggtccataagtatgaatctattacaactgagcaagatgactctttattttgtatcgctcaatctagaaataggaatgccttgcttaaagaccaactataaaagctaaaagttgaaaatctaccttttcaaaaaaaatatgatatgcttctacattctcatgaaaatcttatggatgatcatatcatattaaacatttctcatgacgttgtgatagaaaacttataattacaacaacctcactcatgcacatgtattcaaaatgaaactatattaccatgtgctaatgcttgttgtccgtcgacaaacaaatcttcctttgagctat

SEQ ID NO: 58189 - DNA, 388 bp, Zea mays
  unsure (1)..(388): unsure at all n locations
acgcactctatanaccactcaagcttgagtttgagggccctatattgcataggaccagagactctctctattaatgactttgccacccagatttgtctaagactactcttgtttggtggacctatgaatgtaactttaacctttccattngcaacctttcttagaacataatgagcattgaaagcaaatggtcttgagtgcttatgcaaaggagttggtggctaggctttgcagttgtgggccaaatgtccttcatttccaccactccagcatttgataggcttgaaatctgctttggcttgtattgagtggtaactttcttttgcacaaaagcaatgnatccaataccactcttgatgttttcataactgtgtcataagcagctcat

SEQ ID NO: 58190 - DNA, 362 bp, Zea mays
  unsure (1)..(362): unsure at all n locations
tgccttcgcttcggtctatcatccgcagtccaacggtgtcttggagcgtgccaatgggaaaatattcacagctgtcaaaaagatgctcctcgatgaataaaggcagatggaccgatttattaccggaggcagtctgggcgctaaacacaactgagtgcagggcgaccgggttcactcctttccgccttctatacggatcggaggcgatgaccccgcaagaaataaagcatgggtccccgcgtacagttccgtcagccgtccncgacgtggacgagccaacttcaaaagatctcattgacggagaccgggtcttcgccctacaggccctaagcanataccaagcccagaccanagcatggcgc

SEQ ID NO: 58191 - DNA, 372 bp, Zea mays
  unsure (1)..(372): unsure at all n locations
agctntaatacacaaattctncctctttgacatcaaacaccaaaaaccatactcaagcaagaacatatgatgatgtcaagggacagcagggtgttaaggaggaaaaacgactatcaaaactcccccttacttattgagcatatgcactatcaacatttaggtgagatacatatatgcaaaaagattaatacttccttttgtacctttaccatgttgtagtgtacttctcatcttgaaagtatttaatctcttgagagcttctccacacttgtgcctgaatcattctcctaactttttcttgttgctaagacaccaaacttagaacaagttatagtattgggcacaagaagaaacttctattctaatgattat

SEQ ID NO: 58192 - DNA, 477 bp, Zea mays
  unsure (1)..(477): unsure at all n locations
tgatttatctatggatgtaggtgaactacaagaccgatgggagccattaggttattaacagtggatgcactcaacatatgacaggcaacccacggatgttcacctcacttgattataatgttgatggacaagacaaaatcacctttggggacaattctaagggaaaaattcaaggacttggctaggtggcaatttcaaatgatctattaatttcaaatgttctcttggttgcacctttgagcttcaacttattattagtaggtcaactttgtgatcttggccttcaattcttattcactccaacagaggttattgtatcaaaaatggatgatgaatcaatggtgttcaaaggaattagatataacaatctctacttagtggattcacctctgaagatcagacttaagacttgccttttaccnagcatacttgatggtatgtataaaggttgctgacatccaaaatcaatctgaattt

SEQ ID NO: 58193 - DNA, 466 bp, Zea mays
gcagcttctgtggaagattcatcttttattctttatggttgttctcctactccgcggagaagacaagggacaaggacattcccactcactatccacaagccgaaagaaacagctgaagctgaagcatgacaaaatcatccgtagcaaggcctgcataccgccttgtgctatttcccatatatccctcaatatgtgggcaaccaacagtccacaacatcaatcgcttctgcaaaccactctaaaactacatggaccccgctaccaccaccaccacccaaggctccaatctttgtttacaatcaccaacttcaatggcacccgcacgcacaacatcttgatacacgtgaagagtctgaagctcggacagaaacaacactgtgtcagagtcaaacacatttactaatacaatacagcgcctcaggaaacaccttcatattcaacgcactcttgccttcttatcttaatt

SEQ ID NO: 58194 - DNA, 308 bp, Zea mays
tgctgctggtcgaagaccgtgatatcagattccatggcattgctatatatccatggcgcgccgcgaactccgagctccgtgaaccatggcgtgatacccgcgcggacttcctgatctcggtgcataagaacggatccgcacccacccctctttcatacgctcaccctgttccaagccatggggcactgtgaatttcttgccgtagaatagtctttgccgtcggtccgccctgcgccatggctggccctgctcctaccttcttcatcgatgaggatatactatgtgaactcagctcattctctatacgg

SEQ ID NO: 58195 - DNA, 380 bp, Zea mays
  unsure (1)..(380): unsure at all n locations
agcttgagaagattcttcatccttacttgtgttantccgcggngccagagccaacccatgttagtcttagcaattaagcaagtatcgagttcagctctattgaaatcaactaagtatagcggaccctctaatactcccttaaaagctattgaatcatcacttcttctaaagacagtaacacctatattcgtaaagagacaattgtagcccatttgacataattgagaaactgaaagcaagttataatctaatgaatctacaagaaaaatattggaaatagaatggtcaggtgatatttgcaatttaccaagtcctttgaccaaaccttgatttccatccccgaatgtgatagctcgttggggatcttggtttttctcata

SEQ ID NO: 58196 - DNA, 401 bp, Zea mays
  unsure (1)..(401): unsure at all n locations
ctattccagtgcacccaagatcacgaagaatatcttctngtgtatgttcgaagattcttacgcctgagggcacaagcgccaacagtgcccaatgaaattgtcattgaggccatgattaatgggcttcggccgagaccttcagcccaatacttcgctagaaagccccctcagactctggagaaattgcttcagaagatggatgaatacatccgcgctgacaatgattntcgacagagaagggaggaagcttacaggttctccgaaatagccaggggcttcacagggagaattcatcccagacatgtcagatcgattcattccactcagaatgatgacaggggaagccagcancagaggccgcaatgttccttcaagcttcacggcacaagagagctatcctc

SEQ ID NO: 58197 - DNA, 417 bp, Zea mays
accggaagcccgagatcgacctcaccggacttgggtcttccgccgccgcgcgtggaccgagctatccagtgagtcttcacccaattccttgcgctcatatcttctctggcatcccgtgaacctgcctgacccatccaattgaactatctcgccgtgaccaggccggactcctcgccggcgacgagcatccccgcctgcgcgtgtggaccgaccgactccggccatctccgacggcgacccgcacaccgttgcgatccccgagactttcccttcgtcctcgaccacttcaccggagcaatctcgctgtcggaaagcccttcgccctttcttcgcgcggtactgctgacgagaaaaagcctcggtaagattgagaaccgagggttctgtacgcaggactcatggaatatactaagactg

SEQ ID NO: 58198 - DNA, 326 bp, Zea mays
  unsure (1)..(326): unsure at all n locations
tgatgttcatattcactttttaaatgtattgaatgcatgctcgctttattaacacnacgagccctccgaggtttctgagtgtgttgttggagacctccctgagaacaacctggtgaaggcaagtgtcctctgacctaatatgtccgacatactctataattcactgtcccgcattactttatgaaacctaaagattgactagncttgatttaccctatccttgtctacactttgggttatcatggctagcactttgctattgccttaacattaaccaatgaacatgatgtgaacatttatgatatgatacatgtaatcctgattat

SEQ ID NO: 58199 - DNA, 168 bp, Zea mays
cccgcttgtcattgactgttgctattctagcaaagggaaggtgttttttcggaccttctgcttaaggccttcgtccatatcgcaatctgaatttatcattctaacaaattaatattgcgaggggctactgttgggggcctctcccattccatatgtctcaaaaacacg

SEQ ID NO: 58200 - DNA, 368 bp, Zea mays
tgccagaagttttctctccgctcgggcaacccttcacagttctccaagctgattgccaacacatggccacattaacgttgggggctggatattgtcgggccactacctacggctcaagggaacctcaagttcacctttgtcaccgtcgaatacttcaccaagtggatcgaggccagggcagtatccacaataacgtgtaagactgcccacaagttcttctggcaaaacattgtttttcgattcagagtcccattcaagttcacatttgacaacggctaacagtttgacagccaggacttcaggtacttctgcctctccatcaacaccaagcttttcttcacctcggtataccactcgcaatccaacgg

SEQ ID NO: 58201 - DNA, 220 bp, Zea mays
gagtaccctaaccatgtttacaaactatcaaaggcgctttattggatcaagcaagccccaagagccatggttgaatgcctgagagatttccttatcactaatggtttcaaaatcgggaaagacgatcctactctctttactaaaactattgcgaaagaattgtttgtatgccaaacttatgttgatgatatcatatttgagtctactaacaaatcaactt

SEQ ID NO: 58202 - DNA, 405 bp, Zea mays
  unsure (1)..(405): unsure at all n locations
gagtggagatgtgctgcanagagctagagcaaagtcttgttcgcactgttactctgccggagtgctatcaagaagaatgtaagcagccgcagctttgttgtaacccaactcaacatagtggaaggctctatctgtcatactggcagatctgagcaaacgtaggaaggagttgaaatagactccaagcccacgtgtggctaactccaacgaggactatgcaagcatttcaggcttggccgaacctcgggataaattcttgcgtctgtgtgcttcgctatgtattgtgtgctaactctctgtcttactcacttnttatatctgcactctaacacttatctgtggtacaagttatatttgaagtgcagggcattctgagacatgatcttctattccgctgctaacgat

SEQ ID NO: 58203 - DNA, 333 bp, Zea mays
ctattcacgccgagactctagatacacaatatgagatcaattgtgctcttatatttggatgtgccaaagctttatattcattggtcggacaggagacaaacacaacgatttctgcagtttgaacttgaatataaactggttcaatcagcaaccaaatgagttaccacttgcaaactagcttcacgccagtatacaacgtccatattagacaatcttttgcttcgtacggttaccaaaatatatatgttgctaacgtgtacttgaattgaagtgatcagatgaatagaatattctaacgttatgtggacacttggctaacctgaataacatatt

SEQ ID NO: 58204 - DNA, 385 bp, Zea mays
cgactattcattgtctcttttgacaaagacatgattcgtctcgcatgccgagcaagaaagctatctggcgtcccctctccacacaaaaacatcatgacgaccgacaggtcgcttgtaccactccacatggatctatccggcccgattgcttacataagcctaggcgggaagacatcctgtcttgcgatagtggatgaataccttcactcacttggaggtccttttggcggaaactccaaccccaaacacttataggagcctgacacacctatactatcctgtcaaggataaaaattaaagcgcaccggacggactcagaacttcaatcaagctcttgagagaaggattaaatgatctctccccacccccaacaatgtgacgggag

SEQ ID NO: 58205 - DNA, 289 bp, Zea mays
cactcacgttcattctagtttaatacaggatctgtcgcgctatgccacacatggacatcaagtggcattcttcgttcaaccagaacttctgacgaccgacatggcgcttgagctacttcacatggatctattcagtccgattgcttacatatacatccgcgggagtaagtattgtcttgaataaagcatgactattctctgcttacttagggattctttttacatgaaagatctttaaccctagagacctgaaagggattcttgtgacgggctcaaaatgagttcggct

SEQ ID NO: 58206 - DNA, 478 bp, Zea mays
  unsure (1)..(478): unsure at all n locations
agctngtcaagcatattttggtacccatctcttgatgggtccatcaaagttagtcaacaaagatctgggaacccaagagtcctttgtgttagcactatgtaaactcattacctttttagcacaagttgcaattttgggttgcctagttacatgagaattaattgacaagctatgagtgggattgttaccaatgggacaatccttgcattgatgtcccttctttcggcatatgtagcaaaagcgatcttcaagtcttgaagattcttccttcctcgtttcttgcttgctacatgggtaagaaatattttcttttctagccctatagccttttgcttcaaatggggacaagatttatacagtgtccttctttgacatttaaacacagttatcatccttgtaataatccagccatctttatataaggatatgatcaacccagtgccccttttaaagcattcactacacatcttaattctat

SEQ ID NO: 58207 - DNA, 411 bp, Zea mays
  unsure (1)..(411): unsure at all n locations
taatgcccctaagagattgtctaactttgtgaatggcaatgttcctatggttcaagatagtgagggttacattttatatcctgcaaactatcacgaacacaaaattaggaagattcatgctcagaaacctcacactatatctcaccatgtatttatgtacaaaaatgaggcttctagctctaggcataccacacatgttaaaatgcctagaaagaaaattcctgctgcatcaaatgagcataatgtttcatttaagacttttgatgcatcttatgttttaactaacaaatcangcatagtagttgccaaatatgttgggggcaacacaagagttcaaagaacttgtgttgggtacccaaggtgctctgttctaacatcaaatgacccaagactgtttgggtacctaagaac

SEQ ID NO: 58208 - DNA, 339 bp, Zea mays
  unsure (1)..(339): unsure at all n locations
gagtccattaacacctttgctatcttttttacccntattggagcttatttagtatactatcaaaggcttatatttcgggctaagccctgattttatatttctcatagtctgttgcccctcttcttcaattctactcaaaaagctcaattaaggtcggattaagggttcaacacttcgctcttctgaaaatctcatttggtttgaacatgactcctttataaataacttagcggatctttcatcntaagttaatttgaagcctcatgcctaacttcgctcacatcaaatgttgactctgggttagcaacttgaacaaaccctaattgacacctgggcgtc

SEQ ID NO: 58209 - DNA, 396 bp, Zea mays
  unsure (1)..(396): unsure at all n locations
cctatanaaactcaagctcatgaatggtgccttnngcgtcacgtacgagcagcttcattctattctatttctttctgcaggaccttctgcgacgaagcatggttccaacaccacgcaaaggccggaccctcgaggacgatgatgaaggacttggccattgtggcgtcgccccctccggatgatgcgacaatgacttgagagctcatgatgtattgtgctgggtcggtgctgccgttgtacttggggtaagtccctgccctgaagttggcgggccatggtgacacttggagttgcagtgataaggggcttctctcatcaatgtaattgacgcctcggaagctgccgcgtgccggatgaacggcccgtgctggggaatgaataagtttctggattgtg

SEQ ID NO: 58210 - DNA, 323 bp, Zea mays
tgccgctcactctaccggccaacgactgtctttttcccacccgaggcgagccccgactactatcactacccactcgggagaaacaagggcggaacagaggcttgtcgactaccggcaggtctcgccagtgggtggaaccgaccacgacaacctcgtctgacggaccctccgcctgtttctctctgacaccgcccgaacctggctgagagcgatgcccccggcgcacatcaccaactgagaagacctggtcagagccttcgccggaaactccccaggcacatacgtacgccctgagaactctagggatctccgaagctgtcacc

SEQ ID NO: 58211 - DNA, 393 bp, Zea mays
  unsure (1)..(393): unsure at all n locations
acacatagaaactcaagcttnttgtaaacgaggaacatacctcacgagtgtgtattttccacatgaacacaatgcctatgctcccacgatgcgatacaatgccgacgacgaacctcctgccaaagaacccaaaatattcaatggagaggcacaagcaccagtaagggcacggtactccaccttagcatggatgaacgacatgctcgcatgctatacatggactcgaatatggaaaaaatgcgacgatattgatgccagtctttctcttcccacaatatatctgcaatggaccatatttaatcaatcatttgccgaaagcaagcttgacgacgaaaattggacttatcccacagcctacaacaaatgctagatacatgcaccgcatggagcaag

SEQ ID NO: 58212 - DNA, 375 bp, Zea mays
  unsure (1)..(375): unsure at all n locations
aatgatcctaaatgttcccatatatgcaccaattgaagcttgtatgcgaaaaccaaccaaatgcgcgaaaagccgaatcttgcagcgaccaaatgaaatcactaaaaaaattctgagcgatcgttattgattggttgcccgaggcaattncagacatataatccttgaagaaagaaatcaaccctcgcactttatcaatagcattctcaatgagcatatacttggcttgcaaatgcttgcttactgtattaacaacatataatacctcataccacatgactattgccactataaatttatactctccaaactcgttattaaccacatagttagcctcactacgtcgttctgcatcattatcaacatctgctacct

SEQ ID NO: 58213 - DNA, 228 bp, Zea mays
atgcatccaggggctcaagctggattatcgacagcggatgcacaaaccatatgacgggggagaagaagatgttcacctcctacgtcaagaataaggaatcccaacatttactaataatctgtgatgggaaccaacgccaccgaaaaggcgtagataaaatagcactctcaaatgagcactctatttctaatgtggttatagctgagctatctggatatatattactat

SEQ ID NO: 58214 - DNA, 341 bp, Zea mays
actgctgcatgcaaccttcaattagtgctactcttatcttatcatcgttatcatcggcctgaactcaattccttcttgtttgaccacaaatacaacgcaacatacatatatttgcaacacttatctgttgaacatgtccttcttacgtcaaatactttgcaccatacaatataggaggtctaatcattgtcttatagactcgccttttatcttgtgtggcacaatcatttcatacaaaaccatagatgattgatgctactttaacgcatcatgtttgattctatggctaacatcttccgcaatacctccttctctttgtacactagtcccaaatactgaaa

SEQ ID NO: 58215 - DNA, 387 bp, Zea mays
  unsure (1)..(387): unsure at all n locations
ctgccaacgcagatctcctaggactatagtacgttatcgctttggtcttagaagctgggtgttgaccattacccgtnccaacaaccagtgtaccatatctagctgttcaacgcatctgactccgaggccgactacatcggttcagctgaagtttaccctgaataccagtttattctgtagattgtattattcgcagaataaagtttaaatatagatatagatatagatatacatatggataagctactgaagatagtctgacctatacattttagtactagttcttcgaaaaacaaagtattgtctgtctcttcagatagttggggaatatctgatataacacgaaagtcacgaaccatggatgcactcatgattgcataaaagttc

SEQ ID NO: 58216 - DNA, 472 bp, Zea mays
  unsure (1)..(472): unsure at all n locations
agctttgccatataaggcgcatgattatactttttatatcttctcgntctgacatgtcattcttcacataaaaccattctgtcatccaatcgccaggccatctcttccgaaaagttggcacgggataacttgacccggagcgagaaacgaaactgtagcagccaaaattattatgatactattctttaccccaaggttttgtttcgtaagataattcgtgtatattgcaaaagctttttgcatcaagcttcagaccttggcttctcacggcccacacgaagatattcaaccttataattgcctcgggggtaagttggtgaagatagacttcgaagattttcaacacctccacgacgaagttgctcaaaggaaatcgcagcccagctttcataaagctccggtatactacgacttcatttctcttagggtgccgacaagtcttctcccttcgttcgtcctacaatggacaaat

SEQ ID NO: 58217 - DNA, 279 bp, Zea mays
  unsure (1)..(279): unsure at all n locations
ctcaagctggtgaacgctctctattcacacatgtgctaagcggttattttcaatagcccatgcgagtcttagccattaagcatgcatctacaccggcctcttcttttgcaaaatcaactaaactaagantgtcgtctaatacacccttaaaagctagtgaaccatcactctcttcaaagacagacacatctatatttgtgaacagaccgctgtattccatatgacataattggctaacagatagcctaatatattcaaagactctctactaaaaataca

SEQ ID NO: 58218 - DNA, 344 bp, Zea mays
actgagctctactttaagacttttattatttgtttagaattgcattgagaacaaatgttactctgtaattcggcataccttgtaatatatctttacctttccatacgtgtgtgaattgctttgatgtggacgaaacttgtattctttgaggcgaaggctgaaaacacctttccttgttttcatacacaatgaatcgtatctctgcttctttatggtcatcgaaacatcgtcatcaaagccaaagtatctgtttgactttatgtatgatgatgatgacctacaatgtctacatgaatgtgatgaatgaatgaatgatgtatgtatgtgatatgaatgtcaaatac

SEQ ID NO: 58219 - DNA, 363 bp, Zea mays
  unsure (1)..(363): unsure at all n locations
gattagagcatctaacanctctaacgtcttcattatccgactttgagtccagtgtccgctttgtctttgtatcaacgggtgtagcctctaactttgaattgacttgagcatcaatcaactcaaacgtctttataatccgcttttgagctcagcttttgctttgcctttctatccatagggagcaccatgtatccccaagctttgaattgatttgagcattaatcaattcaaaggtctttacaatctgcctttacaaaattgtagtttactataacaatatgggctgactaagatctgcctgactgaacccgcgctgactgaaatttggtcgattgagacctgaccaactggactcaagccgat

SEQ ID NO: 58220 - DNA, 353 bp, Zea mays
  unsure (1)..(353): unsure at all n locations
cagcttgacgagcctttacctcggttgcttcctttntccttgagatccttgtccatttttccgtagaagaggtggacagtggagttctccgggtagacggatcctctgctcctggcttgcaggaggtagtcttcgctcggagcgctggagggtgcgctttttcctgcttctttccggcttttccggagaatgttgaggaaggctntctctccggcggatccgcgatgcgatgtagagttccctcttcgtctgccacggatgaaatggttccgaagccgaacatggacccagggcggaggatgatcttgtgctggaaagtgatggccattgagctagcttggatcggtgacaca

SEQ ID NO: 58221 - DNA, 430 bp, Zea mays
ctaccttgaatcccacaagccagcatatccttgagagtctttttctttatcgggtaagacttgcaaaagtacactccgtactcagggttttcaaacccatgttgttgtaggtgatgaaacaaccgagttttgttgtttctgcttgaaggtggtgccaaaggaggaggcacatcagtgaacttgttggtgggaggatgttttacctccatgatatgtaataatatgctatgcactcagacacccggtgttgtaataaatactctctctatattttatatatgaatgtaaattatgttattggaatcctttcgcttattcttacttcgattatgtgtgtaatgtctacgtgatgggtgaagcgctctcttgggcgatatgatgacgatacagatgaccgaacttgtcgagtgattatgcgcatccacagggt

SEQ ID NO: 58222 - DNA, 371 bp, Zea mays
  unsure (1)..(371): unsure at all n locations
ancttgttgacctctgctatgaacgcggagtttgttctggagagatctttgatgtcggccatgtccttcagtataccatggaaagaggaggaagatgtcgtcgtgctgcctgccattcaacaattgttccctaccgcaacaatatctgctttggatcatctaaaaaatcacgttgccatttcttgagggcccgtccaatagttcaccaggtaatgaaattcttatactgactgacgaacatgtggcttccaagccgcaccaccctagctatggctctagtggcgaggttagggtagatttcgaggggatttcctagaatacgattctccgtcacacagccgccagtacaaacacgaagccatgtatttggc

SEQ ID NO: 58223 - DNA, 237 bp, Zea mays
agatcctcgaggagagggagccttttaagcactgcatcaagtcgggtgccattaaaagttgagagacggacgcctcttcaacaaggtgctctgttataaccaacgctatacaatagcagcctatatagccaacatatgtattaatagtgctttcagaatatgcagctaggctagaacataacgcgaattattgcacgagaccataatatcataactcataacctgaacgcggtggtt

SEQ ID NO: 58224 - DNA, 308 bp, Zea mays
  unsure (1)..(308): unsure at all n locations
agcttcataattacaaaccgacttaaagattttatttcttntattccataagagtccgagtcattggtgtaaatctttacgaggggtatgattgtaattcctcacgggccgtgtcctatgcctataaatagccgaaggtgccgaaactaccccaacctccgaagtgataaaacgctcagggctagtagcatcagaggatgcacctgccgctgaaactgagcacgatgccgaagaacttgagtctgaagatgattacagcgcagtgccaactaaacccagccacctgggagttgggaaatcaaccattt

SEQ ID NO: 58225 - DNA, 481 bp, Zea mays
  unsure (1)..(481): unsure at all n locations
tgcataggatcaatggaatntctcctttcagccatttcagatctatctatccgtagatttctactgcatagntccctgaagaaggtccccagctctgcaattgcttcatatacatccttcctcaccagtcctctaaggctagcgggtatgattctctgtacgagtatgtggcaagaatgtgttttcagttctccaaccacctttgaaccatcttcacttatgtatcttgctaggctattcgcaaatccatcaggaaacttgatacctntgaggaacttgcaaaactcgactttctaatccttccccaacacatatggagcacgtggagccctgcatgccgagttgccatcttgttgcaagtgcagttcaggtcttatgcccatatcatacaaatctagccttgcattatgtgtgtcttggacnnttctgtatactgagaatgtgcagagatatntcacatccattttcttatgtcatacat

SEQ ID NO: 58226 - DNA, 379 bp, Zea mays
  unsure (1)..(379): unsure at all n locations
agcttctgncggtcacagattattattctttttccttacaatctggtctggtgagaattaagattggccaagctcatgcatgcgaccaaacctatttgggctatatatatatatctatatctatctgcgtcaccgcacaagaattgaatacgcacgtacgccatagtttccagcaacttcaaatacctgccttcttgatggtatctaaaaaccgaatttgatcattgccttaatgattgaaactaagcttgtatcgtactacctcctgtcacaaatatatgacacaattaactttgtgtcgaaactttgactactcattttatctaaatatttattcaaaaatataaaagtttaagtccagcccaactaccttaagtga

SEQ ID NO: 58227 - DNA, 385 bp, Zea mays
cagctctggctggataggttacagcgagagtcttattatatctcttctgattatagctcaacctgacggatctgagttcagagttgagaattgcctttgtgtgggttaaccaattcatacccaatattacatctatatcctggcctttcagaacaatcatgttagcaggaaagttccgttcggccattgttactggcactccataggccacttctgtagtaaaaatatgtcccccacgtgaatgaattttaaatccctcctttgattcatggtatgcaatgtgatggtgctccacaaatttcttgctaatgaatgtatgtgaagcaccacaatcaaaaagaataattgctgggtgactggcccggtaaacgtacccatcatcacc

SEQ ID NO: 58228 - DNA, 332 bp, Zea mays
tatccacacagcactgtgtgtgaatgcatgcagctccatcttttacatctctcttcctcacggtcacggccatggtcgatcgaaccgacagcatatatggcgtactacaccacaaagatcctgatcctgtccttacatcttgtatgaatgtactgtactgcaaggatcagtggaaaaaaaagaagatatgagttgtctagtctacctgccttcacaattccattctatatttcacagccatatcttcatggagtcatcgtcagcagtaacggttacagcggccatcgacgacacccacccaccttacgtcacgcacacgtatggaggagcag

SEQ ID NO: 58229 - DNA, 195 bp, Zea mays
tattatacaaaccaggggaggcacaaactcctctcgataagtttaataaacaaaagaatctaagtggaggacccagtcctcccgcacttcagacttttttttcctcatttggtaccaccttggagcagaaaccaacaaaatttgtcgcttcctcacctaaaaacaacaaaaggataaaccctgagtatggaatac

SEQ ID NO: 58230 - DNA, 437 bp, Zea mays
  unsure (1)..(437): unsure at all n locations
ctaagcttaaagatgtttcacggtcaagctcctacgaaaacgatttttatcgctatgggctactgggggggtctgcttcgacgccgaaagtcctgcaagaagaaacaccttctgaagatcaacatagaagcaacgccgaagctaccatctatggagcttcggcataataacaagctttgagacgaacggtagcaccgacttaaagatgaaaagaccgatcgggccatgataatctgtgtcatgattgtaactatctataaagggcatgaatgtnaatgcacacacgctgcaccctatgcctataaatagatgaacagtacccccgtactattcaccggtacttggactcattcgcgtgtcacgcctggacctttggcgtttgtgaagcgaaagacaaatggaattcatatcgtcatgtcttcctgagagttaaaaac

SEQ ID NO: 58231 - DNA, 426 bp, Zea mays
  unsure (1)..(426): unsure at all n locations
agctttcttgacctcgtatggccttatgtatctaggagctaacttgcccttgatcccgaatctctggacacccatggtgggtgataccttaagatagacatgatctcccacctcaaactgtagaggcttccgcctcttatcatgatagctcctttgcctggcctgagcagcttccaagttcttggtaataaccttgacctttgcctctgcctcaagtaccanatctggcccaaaaatgtccctttctcctgcttgggaccaattcagtggggtcctacaccttctcccatataatgcctcaaaaggtgccattttcagactggactgatagctattattgtaagaaaactctgccaaagacagacacttgtcccagtcctttccatagtagtatgcacatgcccgcagcatgtcttccaaaatctg

SEQ ID NO: 58232 - DNA, 439 bp, Zea mays
gcttgggaagaacttcatcccacatgggcttgtccgttatgttctagccaacccatattaggcctagcaattaagcaagtgtcgagttcagctctattaatatcaactaagtatagctgaccctctaacactcccttaaatgctactgaatcatcacttcttctaaagacaggaacacctacatccggaaaaagacaattgtagcccattttgcataattgagaaactgaaagcaagttgcaatctaaagaatctaccacgaaaacattggaaatatagtggtcaggagatatagcaattttaccaagtcctttgaccaaacctttgattccatctaagagtgaattaagcttacacctcatcttttaattgattttggtgggtgaattgtgtgggggccctcggcttccgaacggccttcaaaacatgatttaacaat

SEQ ID NO: 58233 - DNA, 461 bp, Zea mays
  unsure (1)..(461): unsure at all n locations
acctctaaaagtcacctgcacgcatgcaagcttaatgatgaactggctagtcttattgtttaacttaagactagcaagaatgaattcgataagctaaaatttgcaagggatgcctacacaattggtagacacccctcaattaaggatggacttggcttcaagagagaagctaagaacttaacaagccataaggctccccttcccgccaaggagaaagggaaggcccctatggctagtaatgtgcaaaagaaccatgcttttatgtatcatgataggagacaaactagaaatgcttataggtgttataatgctcttgatgatcttgattctcatgccatggttgcttctagttcttnctatatgcatggtagaaatattactaggagaaatgttgttcctaatagaaatgttgcacatgttcataaaaaggtagtgaatgaaccctctacaatttatcgtgc

SEQ ID NO: 58234 - DNA, 458 bp, Zea mays
tctttctctgcttctcccagtcggccgaggccccgtccgttcgtgcttcttcttctagctccagctcacggcgttccctctgctgagccatggctgtcgtgcctccgctcccttgctttccctgcgcgcagcaatgaggtttctgccgcctagccttcgctctcttcaacctgcagctcgccacggcgctacggcctgctcgatgttcctttgatcgcctatattcccccttgccatggacgagcgtgccggctcactgcttgctcgaccgcgttcctggatcggccagcgtcgcgtgtagtttaagtgtttgcggtcggaggatcctcgtcgtcgatactgcgcttgctgatggccgaagctcgggtcgttcgtggtgctgtcgcgccatcgcctcggtctgggcgtcgccaagacctctaatactcagttcctgttcgacaaatgcccctgtttct

SEQ ID NO: 58235 - DNA, 476 bp, Zea mays
  unsure (1)..(476): unsure at all n locations
agcttctaaataacacaccaaatatttctaatatttattcactcaccaaaacatactctantaaagggacttaatgatacctgcttcttaatacatacgtgtgactacattttatataatctcaatagagagtatctactccctccttcactaaataaactaattaatagatttatcttaagtcaatctttatttgatagaatttataaaaattatagcaatatgtattgcaataaatagaaaaaaataaaaatatattcataacatatctacgcattttaatttaatatcataaatcttcatactctgtcttacaaatcgagtcaaccctataatagtttggctaatgcaactctaaaanttacagagtagcatatcaatacggtctgggttaaaacattgatcacacaagcacgtacttatgtcattaatgaattcttgtttagaaccagactaataatatacgactgtcgact

SEQ ID NO: 58236 - DNA, 365 bp, Zea mays
ttaagagattggagctcattggtgctacttacattgtggggttttcgtattaagtcggagcgaaaccagatctgtcgcccgttgccgaaccactatggtggtcctgtccatcctgaagtcgggcaagaatttctcctttgcttcctggatcagctgctcctggcgctcctcgaataagagttgatcttcaaccgaccaggtttcccatgacggcttgatgatattgctggtggaaactttagagctatcatttgaaccggccattgagggccgatctcgataggtctatatgatattggccccagcggagtcaccaacaagtatgttgacacctttttagggcgccaatcactcaacacgaacca

SEQ ID NO: 58237 - DNA, 464 bp, Zea mays
  unsure (1)..(464): unsure at all n locations
atgctagcttgtgaaatgttgtgaagattgtgcggttatgcctgtctgagaataatcctggtctatttgtntgtcgagcgatgtaagtgatctgagctgattggtcgcctctaatgcccgtctgtttagcccccagctgtgaccattattttatttggcttgcacattcagagggtgatgctgtaattggaacacaccaggccaattttataatctaatgctgatttagccactttaagaatgagtccttgagagatcaatcattttatgtgaagaaacagcttgtttgatgggtaaaaacgcgctttcggaactctaatatctaccatgggtcgcatccatgggccattggccagcgcatatgcatggataactcgagtactacatcctcactatattcacaaaccaatgctaccttaaagatatactgtaagaatttctgtactgcataataatagactcat

SEQ ID NO: 58238 - DNA, 442 bp, Zea mays
tgttggcactgctaaatgctcactatctggggtctgttctgttctattgttcaacttcctgcaatgaaacaattgattctcttacgacttataaagctgatgtcatagtactatgtttgcgattcaaatctcattgttcaatcatttattctaccatttcttttctttagatctatttccccatgctctgtggctgattcatatattgggttacgtgcagcataactttctgccctttctgcgtccgtgtgaagcacgtgttcgagaagctcggagcaagctacaaggccactgacgtggattaggaaagtgagtgcacttaaatagttaaatttgttcgtttttcttttcaggactatgaattatagttggctgatgcaccgaggtttaccttactgaaaaatggctgtttattgactgtttgtgataaaaaaaagtataa

SEQ ID NO: 58239 - DNA, 444 bp, Zea mays
  unsure (1)..(444): unsure at all n locations
ctcgacccgggaactctaagtcacctgcngcatgcaagcttgtgatgggcagtggcacatatgttttgtattcatacgcacccgaacacacgaaggtggttgtatgaaggacaggtgcccaagagagcaaagtaaggggccctgtgagaaaccgccttggtggggaggcgattgtgcagatagatagcagcggccaacccctcaacccaatatcgggcaagaagggatgcctggaacaacaaggaacgcatgatgttgttcacggtgcggatcatgcgttcaacctttgtgttctgagaggaaatgtagggccacaacatctcagctgaatgccattggaaaggaagaaagaatgggacgtggagttgtcaaactcccgcccgtcgtcactggacaagccggacggtgcgttcaaactaagtggaaacccaagcgaagaagtga

SEQ ID NO: 58240 - DNA, 344 bp, Zea mays
tgtcgttcactgtggtaaattctaccctagcaaacgtttgttacccacccatcataactcacacctagaaggaaggagccaacaaccatctatggctaaaacatgtgtgaagaaaccggaagcctacatctagcttccttggtgattatgcactccagcgaacctccacctacacccgctgctctaatacaacattgtcatgcacgttgagttgctagaataaattatcgtattgcagaccttaaagtgatgtcttaagagctactctggtaagtcctcatgcacttgcccgagcacaccaaccactcaccacaatcatcgccgaatgtataccccaacatgaa

SEQ ID NO: 58241 - DNA, 401 bp, Zea mays
ccactgcaacatgacaccagagggtcaaactccacgggccatggatgaattcagaatcattgcagagcatattggaccatggatctggttcaacgaattcttagcattcaaagttttccctactctgaataaatgggaaatgcctcagttaaacggggagaaaaatgaaggcgatcttgtccggcttccttaccacttcaaaatcaagaaatatcttaaaagccctgccaagagtggctggacacagttgaagtgatgtgtaatgaaaatcttgtgaaatattcgaaaaaagaagatccactgatgacagcagcccttcgtacccgtccgaagcgaaagctgaacccagtgcttgatgcactgggcttctaatatcctgactatgcgcaactgacaatgat

SEQ ID NO: 58242 - DNA, 403 bp, Zea mays
  unsure (1)..(403): unsure at all n locations
tatcaagntagcttctcaatgcaaccagtcccacgttatttttagattcctagaacaagttattgtcaaaatactgaatgctgcgcagaagtcaaacagtcacacggaaatcaactctgcagatctcccgaagaggctccttcacattagctcgtgaaaatacttttgttttgtgtttatacatcgctaaggctcggtgttactagtataaatacccccctatgtctaagatgtaaggcagcttatgataatctaaaacagaaccccttttgttcagctgtgtgctaacaaatattgagagtgatctctacccctttgctcttgagaattccttcgcgggatngcagaaagcggggcttcatccgctcncaattggtgctcctactcccttcgaggtctcctc

SEQ ID NO: 58243 - DNA, 397 bp, Zea mays
  unsure (1)..(397): unsure at all n locations
cactganagtcgcctagaagggggtgaatagacgaaacctaaaaattataaactttgaacacgcacttcacctagggttagggttagaaatgaataattgtgaattcaaagtgcggaagatagttcttcttgctatgagttgctcaatcaatgtggataactttgggagctaactcaacaatgtgagcaagagaacttttataaagagaggggagagggggagaaacaaatcgaatggcgaagaacaacacaaatggacattgatgattgcttcccgaggttcagttccaaagaacctactccccgttgaggaagccagaaaggccgggtctatttcaaccatttccctctctcaatcggtcacctagaccggtcgagtgcttcttcttaatctcac

SEQ ID NO: 58244 - DNA, 442 bp, Zea mays
  unsure (1)..(442): unsure at all n locations
ncatgaacagcaaccttcggtcatcacgtgcatacagctttatccgaagctgntncttactgcacgaccttcggcgacgaagcatggtcccaacaatatagaccagaacttaacagtattctctagcagaaaaagaaaaatatacaattcaatcatgctaaaagcgaaggaagcatgagcgcatgacagaatgtggcgttagcacttatcatatntttcccatgccatacatttacatacggtgaacaaaaatgtacataagaataggtcatcttcaactgatgtctcatccagacccgactagaattntatagaccccatttatcattgcctgcatgatgttatggaaaaacaaacctaaaaggatatcgtttcttatccaggcccaactcgagcgcgggagttctactataacatagcatggattactgtaaccactata

SEQ ID NO: 58245 - DNA, 461 bp, Zea mays
  unsure (1)..(461): unsure at all n locations
ggatcttaagcacgcagctgcagcttctaagggagagcacatcttaagattaacaaatgttcattttgagaaagacagaanttgtagcgcatgccaagcagagaagtaagttggtgttcatcatccacataagaacatcatgacgactgacaggccactggagctcctacacatggacctattcggcccgatagcttacataagcatcgacgggagtaagtactgtctagttattgtggatgattattctcgcttcacttgggtgttctttntgcaagaaaaatctcatacccaagaaaccttaaagggatccttgagacgggctcaaaacgagttcggcttaaggatcaagaaaattagaagcgacaacgggacggagttcaagaactctcaaattgaaggctttcttgaagagganggcatcaagcatgagttctcttctcctacacccacaacaaatg

SEQ ID NO: 58246 - DNA, 336 bp, Zea mays
  unsure (1)..(336): unsure at all n locations
ntccctgtacaccaaagatacacagatctcggacgacaggacacaatatgattgccccgacagcaaatatttatagtcccaagtgttgtattccctatgtccctgggcccacgtgtcggggcccagtaccattgtgcatgcccccctttcagctataaaaggggaggcatgtgaaacgtaaacccaacgctaggcagacactctcaaattcatacaagctcccaagcaatacatcacacagtggagtatggtattatgctccaacggcccgaaccactctaaaccctcgcgtgctctcgtgtgttgatccaccagtctcgtagcaagcaaacgctt

SEQ ID NO: 58247 - DNA, 483 bp, Zea mays
  unsure (1)..(483): unsure at all n locations
agcttaaagccatggtaagtagcataagcaagttatattcgtattgactcaagcctagctacgggtgcataagtttcatcaaagtccanaccttcaacttgtgaataacctttagccacaagtcgggctttggtcctagtcaccacaccatgctcatcttgcttgttgcagaatacccanttggtacctacaacattttgattaggacgtggaactaaatgtcatacctcatttcttgtgaagttgttgagttcctcttgcattgccagcacccaatccgaatctcttagtgcatcctccaccctgtatggctcaatagaggacacaaaagagtaatgttcacagaaatgagtaactcgagatctattggttacccccttttgaatgtcaccaagaatggagtngacggggtgatctcgctgaattgcttggtggactcttgggtgtggcagtcttgactctaaattcttgacatcttctttt

SEQ ID NO: 58248 - DNA, 378 bp, Zea mays
  unsure (1)..(378): unsure at all n locations
tggggagggtcttnatccncacatgtgctaagcggcgatgcctctgtcattccatgcaagtcttatccattaagcatgcatctagaccggncgtctcttttgcaaaatcaactaaataaagcttgccgtctaatacacccttacaagctagtgaaccatcacttcttctaaagacagacacatctatatttgtgaatagacaggtatatcccatattgcacaattgactaacagatagtaaattatatcctagtgactctactaaaaacacattagagatagagcgctcattagaaattgcaattntacctaacccttttaccttgccttgattcccatcaccgaatatgaatgactcttgggaattcttattcttga

SEQ ID NO: 58249 - DNA, 405 bp, Zea mays
  unsure (1)..(405): unsure at all n locations
catagcagcttgacattgtctttctgtnggaaaccaatgctattcttaatgccagggtgtctcccattataaagcatgctacgagcaaattctttaaatctttcattgtcgagctcatgctcggcaattttggcagctaatttagctatgtgatcattttgttgtttaatcatggcaagatgatcatccatagcttttacattaacgtctctacatctagtacaaatagaaacatgctcaacagttgatgtagatggtttgcaagcatttacttcttctatcttagcatttaatatgcgattctcatttctaagacaagaaatggaatcattgcgaacattcgattctgtaatcttagaaactagactagcatcttcatttctaatactacaaaatgaatcatga

SEQ ID NO: 58250 - DNA, 356 bp, Zea mays
  unsure (1)..(356): unsure at all n locations
agcttgatgatccatctacatccgaagctcaacccgtcgcattcaaagcgacggaggaaaagaaagaggaggctacaccaagtcgacaaccaatagacgcctccaagctcgacaatgaggaaatggcgctcgtcatcaagagcttccgccaaatcctcaagcaaaggagggggaaagactacaagtcccgctccaagaaggtttgctacaaatgtggtaagcccggtcattttattgctaaatgtcccatatctagtgacagtgaccgaggcgacgacnagaaggggagaagaaaggagaagaagaagttctacaagaagaagggcggcgatgcccatgtntgtcgagagtgggac

SEQ ID NO: 58251 - DNA, 340 bp, Zea mays
  unsure (1)..(340): unsure at all n locations
tcggctttganaacagttntttagtatttccgaagatgtctgtttacaaaaattattgctgagacgaagctgtctcttgatgaagagaaaaagaaaactgctggtgagacgaagctgactcttgatgaggagaaaaacttggggtttcttatagcgatgtcgaagacaaacacggaaaaaattaccaaggaaattctggaaggcttgtctgaggatactggtgacagtgacagttatgatgtggacagcggtagcgaagactccgaagatcgtccctggcgaccaagccattcagtttatggtaaatcaactatcaaagagaatcatcttgtcaacatga

SEQ ID NO: 58252 - DNA, 168 bp, Zea mays
agcttcacccgcccaggattagaataggacttgtctgtcccaatctggcgaaaggatattctcccacctaatcctgttcgtccgtgaatggatcgaccgtccgcgatcgtcaccaaccccagacagtagagaacccagcgccgccacggcaatagagccattgcggcg

SEQ ID NO: 58253 - DNA, 393 bp, Zea mays
  unsure (1)..(393): unsure at all n locations
tcanagaaatctggcgaggccgacatggtgcacactatttcttgttctggaccctcggaagttcccgccgaagctagaccttctgaaagcgcaccaataatcctataaaaagagggggcttctgaaaaacccaaatctcttgctcctgaagcacctgctaaagagttggaattcattgtgcgacatgcttcacggaagcagttatcagaggagcagattgccgaagcaaaacaatatgccaaggatctgaagtacccccgaggatccttggtgtacagtgacaatgacgaggatgatttcttttattgtctgccagacaagaaatatatatactgtttccaagaaatgatgaaaaatatggggtacccaaagcttgaactcggcctatctgca

SEQ ID NO: 58254 - DNA, 416 bp, Zea mays
  unsure (1)..(416): unsure at all n locations
taggagctaactagcccttgatcccgaatctctggacacccatggtgggtgataccttaagatagacatgatcttccacctcaaactgtagaggcttccgcctcttatcatgatagctcctttgcctggcctgagcagcttccaagttcttggtaataaccttgacctttgcctctgcctcaagtaccaaatctggcccaaaaatttgcctttctgctgcttgggaccaattcagtggggacctacaccttctcccatataatgcctcaaaaggagccatcttcagactggactgatagctattattgtaagaaaactctgccaaagacagacacttgtcccagttctttccatagtgtagtgcacatgcccgcagcatgtcttccanaatctggttcaccctttctgtctggcca

SEQ ID NO: 58255 - DNA, 359 bp, Zea mays
  unsure (1)..(359): unsure at all n locations
tgtgaagattcttcatcccaacatgggcttgtcggctatgcttgagccaacccatattagtcttagcaattaagcaagtgtcgagttcagctctattaaaatcaactaagtatagctgaccctctaacactcccttaaatgctactgaatcatcacttcttctaaagaacagaacacctacatccgtaaaaagacaattgtagcccatnttgcataattgagaaactgaaagcaagttgtaatctaaagaatctacaagaaaaacatcggaaatatagtggtcacgagatactagcaatttaccaagtcctttgaccaaaccttgatttccatctaanagatgaataggcttacaccta

SEQ ID NO: 58256 - DNA, 427 bp, Zea mays
  unsure (1)..(427): unsure at all n locations
agcttgagacaggaacaaccgtggtatgctctatattccttgaagaaaaagtcaagaatttgaggatcgccatgaggagggaacaaaatatgaaattcaacacctccttcaaaagcctcaaccacgccttcacaaaaggtaacatccaaagtaatgatcaagccacacttcacattaaaaagtgtagtgaatgctttgaagaaaggcacttgattaggtcatgtcctatattaatggcttgattattaccaaagatgatagactttgttttaaatgttccaagaaaggacacttgcttatatcttgtccccatttaaaacaaaaaggcatagggttagaaaggataagttttactaaccatgtagcangcaacaagcaaagaaagaagaanacttcaaaacttgaaaaacgcctatgctacacatgc

SEQ ID NO: 58257 - DNA, 494 bp, Zea mays
  unsure (1)..(494): unsure at all n locations
ttacggacctatgaaactcagcttgtagagaagtgatggtgggtaactttgtacaatcttattatgtggaaaaggtattgagtcactctggttttagtgactgtgatcctgatccaacaccttatgaccctagcatgctattgagaaagaatcggagaatagcaagggatcaattgacatactcccagatcattggctcgctcatgtaccttgcaagtgcaacaaggccgaacatctcatatgctgtgagtaagctgagtcggtttgtgtcaaaaccaggagatgatcactggcgtgttcttgagagagtgttgcggtatttgaaaggtactatgacatacaatattcattatactggaaacccaaaagtgctggaaggctatcgtgatgccaactggatttctggaacgcantgtgatagaaagtgcatcgagagaattgggtatgagatcaatgtganatctactctattggtaacatgctctatgtgatcg

SEQ ID NO: 58258 - DNA, 485 bp, Zea mays
  unsure (1)..(485): unsure at all n locations
agctntcttcggcgccatagcgaatgtctatatcttccgagggtgttcacgaagactcgaagtggaagtgagttcaccggaggtgggcgccaatgttggggacttgttctcaaatgctaagagttaagaacaaggcaacataaaaagtgttaagtgttaaagtccttcgtccttcgaagcattatgtccccttcgggaaataatgagtctgggacgaaggtcataagagaaataccttcgcaaacataacagataatgacgagggacttatataaagcatgaaatataatataagcatcatcgcagaatcatttctattttattaacatggaaaaatagaaatgatttcaaactacaaatgtaccttcggtcctgagagaaggtagaaagtacaagcgtgacgcataagcaaatgccaagtccgcgtgaacagtacgggagtactgttcatctatttatagacgcgggacgcagcccacgtaaaa

SEQ ID NO: 58259 - DNA, 360 bp, Zea mays
actcagcttgggcttgaagctgacatgggtgttagattgttttcatttctctagtggactaactgaggaaaaatctttgaacagttcaagggtgtatcaactttgctacctcctgttgagatccctgcatcatacttcaatacactgaaggagtaagtgttccttgataatctacgagaaccaagcacacagctttcctcaagccagatgtgcaatgctaatggtgttatggtactgaagttcttggatgctgcatctaagctcggcttggagcattcagaagtgattttgttgaagttcaagctcaatagaaagttcggtggatcaaatcttgtacttgtgtatcataattatacatta

SEQ ID NO: 58260 - DNA, 328 bp, Zea mays
cagcccactcgatcgcccaattccgttcagccagcttgccctgccaatagctaacgtcagctcttaactcatttatacgctgaccgccttctacccacaccctgtgtctgtgacagaaactctgaccaaagatgcttcacttgggcttctaaggctccgatggagacgtgactagccatgctgctctcttcattccttggacccacctgatgccgatgcaccccaataagtccggaggacttacaagcgggtatcctcgtgcacggcggcataattgcctaaagaggaaaactctattagtatacgctttacacatgatgcatgcata

SEQ ID NO: 58261 - DNA, 399 bp, Zea mays
  unsure (1)..(399): unsure at all n locations
tcttcttccacaccacatgttnccaatcaccctgtgttattctctgttgctgtgcacgccgcacggcagcacagacgtctagaactccatcgagggcgaccccaggagcattgtcagcagccaaggagttgttgcgacacccttcaagcttcatatcctcaccgggggccatgaagcaatggcggtacgacgtcgaccgactactctgtatggcgcattctacctcgaccaggtcaaggacacggtcatcccggcgccaatacgaggcatcggcgcctgtgcactcgccctcagtaaggggcgctcagaccaacgacctccgggcagaactcgaccgcaggcgtgcgggagaggatgcccgggtctccttggatagggcgcgcgagtgccaccaaaaca

SEQ ID NO: 58262 - DNA, 401 bp, Zea mays
  unsure (1)..(401): unsure at all n locations
agcttgcggactgggtggntcgggcgaaggactccgatcctccccgctgtcgtagcgtcccccacgcctgaggtggtagcctcgacgcaccttctcatcgaggtgggctcgacggtcgcgacggtggtgctcgtggccgaggcgacccggggctgcangcgttgcgtcccgcgtgcgcccggtgtggaccgaggcttcccgcatgaatcgggaagtcgcgacgcgatgctccggnggtacccctaccttcgggaggcagagctttcggctcgtcggaccacgacatcctccaggagattctagagttctccctggatacgcctcccctcggtggtggatggctccggcatcgctcgaagtagtattgctgccgcggccaggttctggccgaccccactgga

SEQ ID NO: 58263 - DNA, 405 bp, Zea mays
ttacggacctatgaaactcagcttcgggggtagctgataaaggtatatctcaaatgtcttcaatacttcaaccaacattttgtgcaagggaaaacgaagcccagccttcataaaactcttaaaaccactacttcgtttgcttcaagaagtggaaaggtgttttctcctttagctctcactatggatatgtcgtggaaatattttccctccatcgcttcaatttgtcctttcttaatagttaattttctgaaaacaacatggcttggcctccatggctgatctttggcatcttcattatcactctctacatcgaaactgtcactatcgctggaatccccagacagcccagccaacatttcatcagtgaatttttacgttggttttttccatagcttcgtaaaaact

SEQ ID NO: 58264 - DNA, 394 bp, Zea mays
acatgtgctaagcggcgatgccacaaccagcccatgcaagtcttagccattaagcatgcatctagaccggcctcttcttttgcaaaatcaactaagtaaagtttttcgtctagtacacccttaaaagctagtgaaccatcacatcttctaaagacagacacatctacatttgtaaataaacaattatatcccatattacataattgactgacagatagtaaattatatccaagagactcaactaaaaacacattagagatagagtgctcattagatatggcaatcttgcctaaacctctcaccttgccttggttcccatcaccgaatatgattgaatcttgggaatccttattcttgacgtaggaggtgaacatcttcttctcccccgcatatg

SEQ ID NO: 58265 - DNA, 297 bp, Zea mays
  unsure (1)..(297): unsure at all n locations
caagtgtgatttgtattttttggttgaaggctggtctcttacagatttctcctgttatcctctctgacgggctcaacccacacgttcttctatttcagcccaagacatttacaaggcccattcttgacctgagaaacacacctttggacgcttcgaaccacgaccccgcctttggtcgctgntgtcactctgctgctgctccatctcaaccaccgatgccgtcgtctgctcgttgcccgtgtgtgcttgtggctcccgccttggcatgtgctaacacgtcatgccacccaaaaccat

SEQ ID NO: 58266 - DNA, 347 bp, Zea mays
gtagcataagccaataatatacgaattgactcaagcctagctacgggtgcataggtttcaccgaaatccaaaccttcgacttgggagtatcccttggccacaagtcgagctttgttccttgtcaccacaccatgctcatcttgcttgttgcggaagacccatttggttcctacaacattttgattaggacgtggaactaaatgccacacctcattcctagtgaaagtgttgagctcctcttgcatcgccactacccaatccgaatcttgtagtgcttcctctaccctgtgtggctcaatagaggaaacaaaagagtaatgctcacaaaaatgtgcaacacgagatct

SEQ ID NO: 58267 - DNA, 416 bp, Zea mays
  unsure (1)..(416): unsure at all n locations
tacatagacgaacaacgagaacagatgcacaatatcatatgtgttatgcaaaacgattgtaggagactagtacgtgcattngataaatctagtatagcaaattttccttcacacgaggttgaattaggagataatacatgtaatacatcggttaaaggttgtcacgaccagtcacaacccccttatgggatgccgatggacacgtaccctgagcaaacgcaaatcggcagtaaaccagccgatctacacatgtccggaccgtccgctcgcgagcgcggaccgtccaggtcagccacagccgggcccatttttaatgagttacctagacacgcacccgagccaccacatagggcaccgaatntaaactatccagtcggacggtccgcatacaacgacggacggtccgcatataatca

SEQ ID NO: 58268 - DNA, 360 bp, Zea mays
  unsure (1)..(360): unsure at all n locations
cttgtgaaaccaatcacaagtttattgaataattatatttagttcaatnggccttctaagcggaatgaagcccttgagcaattgaagacattattaaccactgcttcggtattggctcaatcggacatcactaaaccttttgatgtatattgggatgcatctggcagtgggctcggctgtgtactgatgcaagaaggccgagtaattgcgtatgcttcaaagcagttgcgcccacatgaggaacattacccaactcatgatctggaactagctgttgtggtcatgccctgaaaatatggcgtcactatctgctgagaaatatcttgcacatatatacagatcataaaagttttgagtaca

SEQ ID NO: 58269 - DNA, 377 bp, Zea mays
  unsure (1)..(377): unsure at all n locations
tatgaagatccttcatcccaacatgggctagtcggcggtgtcttttcttcccatgntagtcntagcaatcaagcatgtgtcgagctcagctctatcaaaatctactaagtatagctgaccctttaacacacccttaaatgctattgaatcatcacttcttctaaagacagtgacacctacatcagtaaaaagacagttgtagcccatttgacataattgggaaacagaaagcaatgtgtaatctaaagaatctacaagacaaacgttggaaatagaatgcgcacgagatatagcaaatttacccaatcctttgacccaaccttgaattccatccccgaatgtgatagctccgtggggatcttggctcttctcatatg

SEQ ID NO: 58270 - DNA, 403 bp, Zea mays
  unsure (1)..(403): unsure at all n locations
cttgagttggttcgccgaagcaacagatttctgttggtggttgcctacatattctgggatgtaaagcgaatgataccaagcagtgtgcatgacctgcttcggctgagcctgttgtgctgctgcttcggctatttccttttgcttctggatggtaacatggcacattctggtggtatgacctttgttctcaccacaaaataagcaaaagattcttctcggttgatcgccaaatcttccgccgaagcccctggcgcctctgcctctcagagctggtggtcaaaaagagccttgctgttgccccaagtctgtgcagagcactgtggcctcttgctgtggctcccnctatcatcattttgggtagagatatgaattgatctaacgtgccttggataaaacttccttc

SEQ ID NO: 58271 - DNA, 285 bp, Zea mays
acagccgtaacatccaacagttctccactccactcactgatcggaccaggccctcgacaggccatcgcgcaccgagatggaccacatgcagcccccaacgacgggatatgacgccaccgaggcctgaggcacaaggaccgttatgagcgaccatgttataagggaactgcagaagctcataatactactctctctccccagcgtcgagtgcatcgccgcgcaacccctcgcaagtcgcaaccgtacacgtgatcaacatcgacgctccactataacctacctctc

SEQ ID NO: 58272 - DNA, 355 bp, Zea mays
  unsure (1)..(355): unsure at all n locations
agcttctttctatctcccggctggcagatatctctttgttttctgggagacagtacaaaaaatcttcttgccagctgccattagacactaatgcccccttngggtatttcagtttttgggcataatgttgagcttctcgttcttcttccttagaaagtatctttcccgaagcatgtcggatgatgtaatcaatgctctctttcaaagcttctggagcaggagtggcaaccttttaggcgaaattgctctgaggtttttcttctgtgcttttcttaatttccgaagatttatttacgggcttgaaagccactttggcccacttgaatactgcagttcaattccgctgtctgttcac

SEQ ID NO: 58273 - DNA, 297 bp, Zea mays
  unsure (1)..(297): unsure at all n locations
tgaaagactgcttcngcgggagagcttccgaacgtgatgactctttctgtccacggagtcgctttatccgagcgcangttacttatcgcagaaggggacgagtgaggtatccgtatcccggaggcgtatgagtccctcggctcggtcagccttggctgcttacgtgtaccccgtcgtttccaggatccgctttccgaagtagtcaagaagcacggaagaaatcctgctaaaaagaggtcctttttcgaggaaaaaattcgacgcatagggggtctccccccttttagcccccgaggg

SEQ ID NO: 58274 - DNA, 353 bp, Zea mays
acaagcatcccgtgcctcgtatagatgttctctttgaccagctgagcacggccaaagtggggtccaagataaaccttcgctctggctaccatcagatcaaaacacgagcaagtgatattccgaagacggcattctcaaccagatatgggctatatgaatacatggggatgtcattcgggctgacaaatgcaccagcatatttcatgtatctgaagaattctggttttatgccggaattggacaagctcgggagggtttcatccatgaaatctggcgtactccagaacgaagaaaacatgccggcatttgatgtagtgcttaacgtctgcagagcaccaccttatgccaagtat

SEQ ID NO: 58275 - DNA, 460 bp, Zea mays
catgggcaagaacatttattgttatcgtgagccgactcgagatgatcctcaggggtaaggtttcaaacgttggagcttcagtggcatactcggcttggaacctgccttctcccaaagatttcactctttttgtgtccaatccacccgtgacagatagcaatttgggtcttagagttcgaccttctgctgaagaggtccgttccttaattgctttgctcggggagatacctgatgatgaacggcagaattattttgaagtgcccctgaaccctagtgacgcagacataaatgacatgctcgatctgctagctgaggaatcatctgataccgctcctgatggtacattggcagtggtgccgcttccagaggttgatgtgaccttggatgtctcgaagcctgccaatactcgcccgaggcgttccactcgaaccagtcagcccgagccttctgctgacgagca

SEQ ID NO: 58276 - DNA, 349 bp, Zea mays
gcagcttgttgagatgtgccagtctgtgatgtgctgttcttccgagccttgaaggcggaccgttcgcgatcctccagtggggtccgaagtctgttcacttcggacaggtcctgttcatttgtactacagaccgtctgggccttggggccggatcgttcgtattcctgaccagaagaggttgctctcggcacaacccctgaattatagtgcggaccatccggccttgatgggcggaccgttcgtaggtgccaaatttgtgttgggcaaggactgtgtggtttttggggtttgtactacggactgtccggaggataagtccagatagtactgactcttaagtcacggaccg

SEQ ID NO: 58277 - DNA, 361 bp, Zea mays
tgggaagattcttcataccaacatgggctagtcggtgatgctagatccaacccatattagtcttagcaattaagcaagtatcaagttcagctctattaaaatcaaccaagtatagttgaccctctaatagtcccttaaatgctactgaatcatcacttcttctaaagacagtaacacctaatctgtaaaaagacagttgtaacccattttgcataattgagaaactgaaagcaagttataatctaaagaatctacaagaaaaacattgaaaatggaatggtcacgtgatatagcaattttaccaaatcctttgaccaaaccttgatttccatccccgaatgtgatagctccttggggatct

SEQ ID NO: 58278 - DNA, 396 bp, Zea mays
gagaaagacagtggtttgtagcgcatgtctagcacggaatcaagtaggtgcccaccttccacacaagaacatcatgacgaccgacaggccgcttgagctactccacatggatttattcggcccgatagcttacattagcatcggcgggagtaagcgctgtcttgtcattgaggatgactattctcgcttcacttgggagttctttttgcaagataaatctcaaacccaagagaccttaaagggattcttgagacgggctcacaatgagttctgcttaaggatcaaacagattagaagcaacaatgggacggagtcaagaactctcaaatgaaagctctctgagacgacgcataatcatgagtctttctcctaccacacacaaatgggtagggaaga

SEQ ID NO: 58279 - DNA, 353 bp, Zea mays
agcttgacaatgaagagatggcgctcgtcatttatagcttccgcccaatcctaaagcaaaggagggggaaggactaccagtcccgctccaagaaagtttgctacaagtgtggtaagcccggtcattttattgctaaatggcctatatctagtgacaatgaccgaggcgactaccagaatgggagaagaaatgagaagaaaacgttctacaacaagaagggcggcgatgcccatgtttgtcgggaatgggatttccacgaaagctcaagcgacttctccgacgacgaggacgccgtccacatcgtcgtcaccaaaggactcctctttcccaacgtcggccacaagtgcctcatg

SEQ ID NO: 58280 - DNA, 443 bp, Zea mays
  unsure (1)..(443): unsure at all n locations
acggaactatnaaactcagcttgtgctaaggtatgagctccatctgattgggagcactcttctttttctccagcatgagaatccgccttctacgagaagaggtctaccacaccgaatctttgaaaacagagtcaagatagcagagaaatttctgccccacaacaattggaatgtaggggaaaacgaacatgaacagagtagcactttggcaattactcgtcagacattgttgaatattgcacatctaagattgaaacaacacataatcacaaggtcacatgtataccagagacaacaccctttctcaccagcaacacagattactcaatattagtacccttcataaccataacctgttcgaagctactctggcagccgaatgttgggagaaacgtaattttgaattntgacataacaacatatagcaatgtacaagcatatgg

SEQ ID NO: 58281 - DNA, 406 bp, Zea mays
  unsure (1)..(406): unsure at all n locations
agatccatgccagacatttaataaccaatttaaaatcaataagctaatacctatatttgcatttgtggggaaagaactttataaattcttttgttagagataatactaagaatatccagtgaatcatgaagggtggtgtttaaccatgtataaaataaggaagaatttttttttaatcttaaaaaaatgcagagtgacacataagtaaaagatataatttcagtacataatattgtaatgggtggctttggattcgaanattttanggattacatataanatggattcgaatattntaggaattacatatgaaaagaataggcatctcataatggccagataggtaacatgtagtaaggcagtgatagatcaataactgccagatagttataaaaatattaattat

SEQ ID NO: 58282 - DNA, 393 bp, Zea mays
tcacgcctttcgccttgagacatcggaatgtcgcttcaatgttagaaaggaggtcggaggccttcctcgtcttgactacgatgtcatcgatgtaagcctcgaccgttcggccgatgtgttcgccaaacacatggttcatgcatcgctggtatgttgcccccgcattcctcaaaccaaacggcattgtaacatagcagtacatgccgaagggtgtgatgaatgaagtcgcgagctggtcggactctttcatcctgatctgatgataccctgagtaggcatcgaggaaagacagggtttcgcacccagcagtggaatccacgatctgatcgatgcgaggcagagggtatggaaccttcggacatgctttgtttagaccagtgtagtctacacaca

SEQ ID NO: 58283 - DNA, 363 bp, Zea mays
aagaggaagtgagttcaccggaagtgggcgccaatgttggggacttgttctcaaatgcttcgaattaagaacaaagcaacacaaagatgttaaagataaatgcccttcgtccgctgaagcattatctccccaaagaattaatgagcttccgacgaagggcataaagtaagtatcacgaagatttcaccttcgtgatcatatttgtaagacaacacacaatgaaaaatgaaatataaagtataaaatatattcacatgttttattatatgaatatacaagtattaaaacataatatttaggcacatttataccttcgtcttggcggaaaagcaataattaagcgtgacgtgtcaatgattacat

SEQ ID NO: 58284 - DNA, 449 bp, Zea mays
  unsure (1)..(449): unsure at all n locations
tcggagtcgaactgtgttccattatccacagtgatggcctttggctccccgaaacgacaaacaatattctgccagaaaaactnttggatggtggccgaagttattgtggctaaaggctttgcctcaatccatttggaaaaatattccacagccactacaacatatcttaaattcccttgggccggtggtaatggacccaacaagtcaaggccccacctttgcaatggccagatgggttgtatgagctgtgttaaggacgaaggttgtttntgatctcttgcacatttctgacaaccttcgcacttttgaactaattncgctgcatccgaagctgccttcggccaataaaacccttngacggaaaaccttttcaagtaacggcctaaatccaatgtgagatccacacaagtctgcatgtatttctttattcactctatgccttcggttct

SEQ ID NO: 58285 - DNA, 326 bp, Zea mays
  unsure (1)..(326): unsure at all n locations
caacttcancgacacgggctcccgctctgcattcgctttaccctaaccaagagaccctttctgttcgagaggcccaaagccagaagaggaaggctactattccaacaccctaagaggacgagttggatcaagagatcaagaacatggagatgctctcccaacaattaccaaggaagaaagagaagatggctcgattagccgatcttcagaagcagattgatgaaactactcaagaagtacgccatctcgctcaagatgagcaagaatgaaggccctcgcacagagagctacaccaagagggcttctacaacgagggtgactggtat

SEQ ID NO: 58286 - DNA, 350 bp, Zea mays
  unsure (1)..(350): unsure at all n locations
tattacacgttgataacacaactatggcggcaaagcctatgttattgtnctttaatgctaccctacatggcatgtttacttactcatatggtgtctacgcacccacctattaagaattctattaaagatatgagcagcagcttttaacgcctccatccataagcctattagcaaagtggagcgatttaacatgcttcttaccatatgcttctaaatgcgattgtgccttttaatcactccattatgctaacggtcacccacatcgaatattgatcaactatagtgtcngtgatttgggtccgaccgcacaccctgggttgccccttcaaagagttctacgagtangaccg

SEQ ID NO: 58287 - DNA, 331 bp, Zea mays
  unsure (1)..(331): unsure at all n locations
caccaactgcacacataaccattngaatccctcgatataactctttattgctatgattcatgcggacccaagactattncaaaccaagtcctacgaagtttgtaacggaattggagtcctccgccaataaaaaagcttccactccgtaactcatacttcgtcatcaatctcgacaactctctctatcttgggggagatacgagccacaatgacaaggacttgatccttgggggagaagagaaaagcctcaacgcaaaaggaccggaattccgctntgggctaaacttaactcatttacttatgaccaaacgggaagaaattacttcgaggg

SEQ ID NO: 58288 - DNA, 412 bp, Zea mays
  unsure (1)..(412): unsure at all n locations
agcttgagtntaaagaaattgcactgctttttttatgtataatatgaaactaattaatttcaagggtcattactacaaccatttaccaacataatttgtaactaccatatatagtagtaaaaagggtacctatcaaacaaaatatattggtaaagctgtgtaatatgttaacaagcttcatgttgaatctattggtaccagtttcatatggtccaattcttttatatggatcaattgccaaaataaaaaaaatagtttactggcatggactctaagatggctgatatttggaattagaaggactattttacttccatattagctatatctgttatctatctgtctgcccacccagatagtcttagtttggattgcatgttgctattgacaactctggaagctaaactcatgt

SEQ ID NO: 58289 - DNA, 362 bp, Zea mays
  unsure (1)..(362): unsure at all n locations
tagcataccatcctcaaacagatggccagacggaaagggtttatcttatttggaagacatgttgcaggcatgtgtcctacactacggaaaggatngggacaagtgtctttctttggcagagttttcttataataacagctaccagtccagtctgaagatggcaccttctgaagccttatatgggagaagatgtagaaccccgctaaattggtctcaagccggagagagggaaatanttggaccagactttgtacttgaagcagaggaaaaggtcagggtcattaagaagaacttagaagctgctcatgccaggcaaaagagttatcatgacaagaggcggagcctctacagttcgaagtggg

SEQ ID NO: 58290 - DNA, 476 bp, Zea mays
  unsure (1)..(476): unsure at all n locations
tgcaagctncaactctatgtctcttagcttcgggatctcctttatgtgacatcctaagaatattccaaatgtcacgagcatcttctcttcttcgaaccttccagtattctttcggacaaagacttcctttaattatgctcactgctcgagcattgcgaagaacctcttgcatcatttccggagtcatctcttcttcttgggcgggcttatacatacctacatcaacaatcttccaaagactaggatgcacatcgattaaatgcgacttcatcttgtcggcccactcgtcataagtcaactcactaagagctggtgactcttcaagtggggcggaagagaagttgggaataaaatttctagagtcgtcgaattgaaacttactaaattcgctacctctcgctttggtagatgatccctccgtggtgagacttaccttgctcacaccttcgacaccaaagatcactagaacgtcattg

SEQ ID NO: 58291 - DNA, 402 bp, Zea mays
  unsure (1)..(402): unsure at all n locations
aactcaagcccggagtggggcccctgatggaagccaaagccatctttaatgttatatgtgtttccaccatanagcatacatctagccaatttaaatatttcatattctaaggcatgctcatataatatagcactatgctgagctatgtgagcactttgcggttaattaaaactacgtgagtatggatagcaacaacattaatgggcctacatctattaccaatggaaacatgactaacattatatgtacacggtttgcaggcatttaattcaacaattttaccaaagaacatgacattctcattgctaacatttaaatccttatcctacacattatttatcattctactcttacgaagaaagagaatattcacttggcatcttacatcaactacatttcatt

SEQ ID NO: 58292 - DNA, 357 bp, Zea mays
aacactctttttagtatttgtgctcgaagacttaattggctcctagacgtctagtacacttaccattctttttctttttggagtcactgatggccccttttggattcttgctggttcaatatttactgcaggactcaaaacttctaatgttatttccttagtcggctctttcgcttcttccattatctctgtggatggtgcttcagccatctctgcagtttctggcagcaaagttggctgttcagcttctagggccgaacaagcttctccggtgaactcacgcaccgaagctggttcaatataacgtggccggtgtgtgaagacttttattctctctctccttgattccggctcgct

SEQ ID NO: 58293 - DNA, 325 bp, Zea mays
  unsure (1)..(325): unsure at all n locations
ntnnattacttcctacatgcttttaacgactctctttttcttggnttgatgccaaaggggagaagcttagggaccaaagcaatgaaaactatatcaaacaccacacaccacaaatttaaaattgtatatctacaaatgggatatcaagtggctttagctatttgcgcctaaaatacgaagcaagtgaattatggagctagggggaggcttaagtccataatatcactaagtggggataaaacatgcatcctaccaagtacattgcatattttcattcaaatgttcgttatatttgcttgctttcggtgncgtgtcatcaatcacc

SEQ ID NO: 58294 - DNA, 259 bp, Zea mays
aacacataaggatctccttcatatgagtgtatgaccattgatgaaatacaaacaaattctgcatacaactatattagcttaattcatttatgcctatattatgattaaagacagacccaatgctggccgctctcaagtgaggggagccttctttcgactacaagcgctgtattaaactcaagagttagcatcacgcccatacaacatcgaagaagtcatgcccgacctctgcataactagggtgcacacaacctgatat

SEQ ID NO: 58295 - DNA, 350 bp, Zea mays
tacacccagtacaaattacaacatggtccacacacaagatggatctatatgccacttctaatttaacactttaatcattattcacaccttctaaagaagaaatcggttcatgacatgcagacaactcataagaaagcatttcatttcccttaatttctaaagcaagaaatttttgcgcccctacatattagccatgctctttatacaaaaagtcctcttgcttttctacaagtataatcttatcattcaagggctcaatcaattcattaattttgtctaccctggctctatctacacccttaaataagcatgaataatcaactccatcctcatcactagattcatcatca

SEQ ID NO: 58296 - DNA, 468 bp, Zea mays
actgagccgccactgaaagggaaacccgtgtacttttccttttgtggcgcggctccacaccactttaatcaatacatctggccaccttcctctgggcgggaagaagataaactgcatctaatttggcattataatggcattcgctctttctactaacccattcgattctggatgccctactgaagcacaaaggatattttgacccatccgacccgcaaaatctttgaatgtttcggcatcaaaatgtgtttcattgtgcacaggtattgtcctctgcaagctgaaacggcaaacaatagtttgcccagagaaattttggtacatgggcaaagttatgcgggtaaaaggttgcttccatcacttaagaaaattccactgctcaaccacatatctaaatttttggggcgcggggaagtgaccaacaattcctaccctactttgcagggctagtggatgataactgggacg

SEQ ID NO: 58297 - DNA, 130 bp, Zea mays
aacaaaaaccagctaagggaccgcgaagcgcaacgtcattcaaaatacctggcgctgccgccgtaacagtggagagcgctcacacagaaggagaccctagacctgaactgcactatgacctctcgacccg

SEQ ID NO: 58298 - DNA, 380 bp, Zea mays
tcgcactcagactccttctatagacgcgacacgacgcttgatgcgaagctctgccaaacgatgcgatggtatgatgcaacatgatgatgctttaacacccacacttacgcccacactgatacaccaaagactctgcatccccttgggaatggcttttgacgctaagctctgcatccccttgggaacgtctcttgagcctcttcaccttctaattcagtgatataaggtctacatccccttaagaacgtcttttgaacatatttcccctatatttaggcgtataagtctgcatccctacgaacgtctttgaactcttcgctatattccgaggtattggcttgcttcccttgacactttgaccaaaactacccgccttctta

SEQ ID NO: 58299 - DNA, 446 bp, Zea mays
  unsure (1)..(446): unsure at all n locations
gatctcgtagggtccaatgtagcgaggagctttcttttccttgttcccaaatctctggatacccttagtgggtgataccttatgataaacatgatctcccacctcaaactgtagaggctttcgcctcttgttatgatagctcttttgcctggcctgagcagcttctaggttcttcttgatgatcccgacttttgcctctgcttcacagaccaaatctggcccaaaaatttccctctctcctgcttgagaccaatttataggggtcctacaccttctcccatataatgcctcanaaggtgccattcttagactggactgatagctgttattgtaagaaaactcttgcaccgaagacacttgtcccatcctttcgtagttagtgccatgctcgcacatgttttcaaatccgttcaccttttgtctggcatcgttaggggggatgctac

SEQ ID NO: 58300 - DNA, 385 bp, Zea mays
aatacaaaagtacggagtgagtatttgggcactaaaaactgatacgccaggccaggcagcatagatatttggaaatttatcaacgattgcgtgtccgatccatcctgagattggacttcgcacataccggcatgggcctggtgagggtggtggaccatacatactccgaatccaattcattttataattggactctgcatcgtgaatggaaaatctactcttactcgtacgaacatcgaaaagaatcaggtcttgcagatcttcatcggacgctggtgatggtgagtagacaaaacaagcccctttcacttcaatatcatatcatatatagcgacaaagatgacttccatataactgccatattgacatgattgctttctactct

SEQ ID NO: 58301 - DNA, 394 bp, Zea mays
  unsure (1)..(394): unsure at all n locations
tgtgccctcatgcactgcaccaacgcggtgggtgtgctgttttgtgctgnggcatggcatgtgggtgtgtgttcctttggcacgggcacaggggcaggggagagggcgactgcgcaagaagattcctggaaggcgacgagtgcctagtagactgtgggactgggagtggaagtaatagctgctgcagtgccgcctttgccgtattatttgcccgccaagcttccccattcggccaattcccttccttccatcactgtgtcgcagtggctgctgctacaggcacagttcaggcttccagctcaaacgaggagcttgttcnctcctggatgtttcttttcttcttcaaactccaaagtgtggtttcactggatagaaaacgtctccgtccgctcgt

SEQ ID NO: 58302 - DNA, 434 bp, Zea mays
  unsure (1)..(434): unsure at all n locations
catacaactggcaaccttgtattctctgaagtactttcctcaaatagtcctcatgctctagctcattctgagaatatacaagaatatcatccatggacaccactacaaacttgttgaggtagtccatgaacacattgttcatcaagtacatgaagtaagctggcgcattcgtcaatccgaatgacataaccatgaactcatataatccatacttggtgatgaatgatgtcttcggtatatctgagggtcggattctaagctgatggtaacctgacctcagatctatctttgagaacacactggctcctctcaactgatcaaataaatcttcaattctaggcagggggtacttgttcttgacagtgacttcattcagagctcttgaatcaatgcacaatctcttcgtgccatccttcttctncacaaataatact

SEQ ID NO: 58303 - DNA, 435 bp, Zea mays
  unsure (1)..(435): unsure at all n locations
tgctctgccgagtgtcagtcggntcacactctgcaaagatacctctttgccgagtgccaactcttggcgctcggcaaaagttaacggtcgtcagctatagacggctgctgacggttctttgccgagggccgccttcgccgagtgtatttctgtgccgagagtcttgcttctttgccaagtgcccgacaaaaaacactcgccaaagccacagattccggtagtgattatagaaaaatgttttactttgcacaggcacaacacccacccgtatgaagtcagtgagagagtgggtccatatgtaaattttgaagttgacgcaatcgccatagattgaaagaataatcactctcccacatcatccctgtgctctacacctgtatactacanaccgactaatatgggtgcacatacataatctcacactttgatcgagcc

SEQ ID NO: 58304 - DNA, 381 bp, Zea mays
  unsure (1)..(381): unsure at all n locations
agcttcngcttcggcaggtttagcaaaaacaattttttacaccgttgccggtggcggcgtctgatggattacatctgttacttgaataattctccgctttttcggcttcacaggactttttgttgccgaagctgtcttgtccctctgaaaaaacttcgtcagttccaatgccaacggacttaacctgataggcaaaggttcaatcattaccttcataatctcttctacttcaacagcaaaaagagaagcaggagtatcttcttcttggaccggcgtttccggctctggggatgcactttttctcttttttgccgtagccaccttcggcttaagaattaactcttcaccactaatagtatcagaaactttctttttcttttt

SEQ ID NO: 58305 - DNA, 382 bp, Zea mays
  unsure (1)..(382): unsure at all n locations
tnctataagcccacgtcaagtcgggtggctggtccacaagctgtatctggcgttcgcgacggtgtgcatggagttcttcggggcgtgaattgccgggtagaacttcagggatgcggtagacgcgtagacaaatcggtagtcggcgctcgactcttctatgatctggcgctggccgaggcactcttgttcctcgttgagaaggcagcgtaggaagacaagagtggaaggtcagcaacggtgtgccaacgctggggttgcactcgtgtcgcgccggaagcacgcctcgcacggagcctcgccagggtcgcactcatcggaccgcgctcgcgctgcgccggaagcccttctcgccgaagcctcgcagtggtcatgggcatatgct

SEQ ID NO: 58306 - DNA, 277 bp, Zea mays
atgctacagccaacccatattagtcttagcaattaagcaagtatcgagctcagctctattgaaatcaactaagtatagctgaccctcgagtactcccttataagctattgaatcatcacttcttctaaagacagtaacacctatatccgggaaaagacaactggagcccattttgcatagttgagaaactgaaagcaaagtgtgatctaaagaatctacaagaaaaacattggaaatagaatggtcaggagatatagcaattttaccaagtcctttg

SEQ ID NO: 58307 - DNA, 414 bp, Zea mays
  unsure (1)..(414): unsure at all n locations
tcagctccatctatattgtggatcactcttgagtctggcctattttcttctgtctttctggcagcttcttgacttccatgaatagcaatgggcccttgttctgaacgtatcgtcatgcatagatatgtcgggtgaagtattgcttcaaaagcattgagtgttcctcggccaaatattgcattgtaggggtattccatgtcgacaatgtcaaagacaacctgtncggtccttgtgttatgaacaaagccgaacgtctggcattgtgaatttaccgagtgccacaatatgtcttccttcgaagccacatagaggatgtgtagcatcgtgaatcttgtcctctgtctcttacatctgtctaaaggcccttagaaatatgatattcgctgcactggctgtatcaaccagaacattatg

SEQ ID NO: 58308 - DNA, 357 bp, Zea mays
  unsure (1)..(357): unsure at all n locations
tcacctgcngcatgcaagctttatcaaatggacgtganaagtgcctttctcaatggaccaatcaaagaagaggtctatgttgagcaacctcctggctttgaagatagtgagtaccctaaccatgtgtataaactctctaaagcgctttatgggcttaagcaagccccaagagcatggtatgaatgcctaagagattttcttatcactaatgccttcaaagtcggaaaggccgatcctactttatttactaaaactcttgacaatgatttgtttgtatgccaaatttatgttgatgatattatatttggatctactaacgaatctacatgtgaagaatttagtaggatcatgacacaa

SEQ ID NO: 58309 - DNA, 427 bp, Zea mays
tattttagcctcaggttcagccaccttgtcttctgtcgattggagctcgaagactttcttttcaatgatggcagattgctcttttatgttgctttccaagatttcaattataacttcgtgctttttggtctccaagtcttggtgcatcttcagagctttgctcagtagcatgctctgaacagaaacaacttatgctaaggaatattttcattgttaacagcaataaaaaccacagaaaaaggttgtttaccttgaagttagaataaaacaagctgccgacgatatgttgtcgtcagtagcggctgatgtctgtctctaacttctgaaaaccgatactcttcgatagagtacagattaccttagctccagtctggtcttcaatacacgctacttttcatcatctacacccccaatagatggcttctgc

SEQ ID NO: 58310 - DNA, 387 bp, Zea mays
agcttatggatggatctcatttcttcaacaatgatagtctcaacaaggcctgataatgtttctagatatctgagttcactgaaaaactgctgaaagatcgggccccagcaaattaggaataataaatgaaataactcatatggtttccaaaaaatctaacaaactctcattaatatgggagtttatggaaggtattactataaatagctagacttatgtttcttctacttacatattccaagggtacacagataattgattaacaacttagatggactaataagtatttatgttgagatacaaaggtgattaattcacaagtacactagtgtgagctatttgggccatggtggtgatgcggcttggtgatattgatatgctcatcta

SEQ ID NO: 58311 - DNA, 449 bp, Zea mays
  unsure (1)..(449): unsure at all n locations
ttatcaaatggacgtgaaaagtgccttcctcaatggaccaatcaatgaagatgtctatgttgagcaaccttccggctttgaagatagtgagtatcctaaccatgtttataaactctcaaaggcactttatgggctcaagcaagccccaagagcatggtatgaatgcctaagagatttccttatcactaatggcttcaaagtcggcaaagccgatcctacactctntactaaaactattgcaaaagaattgtttgtatgccaaatttatgttgatgatattatatttgggtctactaacaaatcaacttgtgaagaagttagtacgatcatgattcacaaattcaagatgtcgatgatgggggagttaaagtatttcctaggctttcaagtcaagcaactcanagacggcaccttcatcaaccaaatgaagtacattcaagatatactta

SEQ ID NO: 58312 - DNA, 285 bp, Zea mays
  unsure (1)..(285): unsure at all n locations
tgcttgaagagaccctccggcgaggcgtgaatctgccttggtctactgtttctgcccgangctgggctcgaacgagacaagatcgtgtcccgtggacggagcctagaccggaatccgctcataaggctttgcagctttgtgctgatgggggtacccgctgaatttagaggttgggggtaccctattatggtcccgaacgcacagaacgtcgggccttgtctgggacccttcccggaccaaagtgaccctctgacaagaacactaccaaaacacaagtctacacta

SEQ ID NO: 58313 - DNA, 328 bp, Zea mays
  unsure (1)..(328): unsure at all n locations
ctcagctcgccttatcttttattttatgtgttccangntagtgccctattttcttcttgtaaaaaggaaataaaaagatgtcagaaatcatacagctcatagttgcaacgcacagtatgtcaacactcagtcagggtagcacatgttaattggcacatctgttcaaaatattactactttactaatcaatgtctccttgccttttgcatttgtcagtttcctgaattacttgaactatatgtacatctacttttanggtttgaaatctgtattagtaaaggcgttgttacttgttgtttggctccgtaaaagacatacacgatgttta

SEQ ID NO: 58314 - DNA, 493 bp, Zea mays
  unsure (1)..(493): unsure at all n locations
gacccggaccttaagtcacctgaagctgcagctatgtttgggacanaaaattcactataataagcaagaatgggttcaataaggaccttatcttcagcagaagataaagagaattgcgaaataacaaaagacatcatagaatggaccatgttccaagcagtagaccacatcaataagtatcaggctgaaacaattaaatggcatgatcggaaagtaagactgaagaacatcaaactagggcaccttgtaagtgcaatcaaccctgactgagggttttggtgattaaatgacaaaacaagcagagtttctaacaagtttgctcctagtatgtatacaatcattctacagacaggagaagcacagatcatatatgtacacaaatgtaaaagcacagtggattaaaattctacatcatatagcgtgcttcaagtgctagangaacaacgacaattactctnntacaatcttgagtcatagggaatcgtcgtcaata

SEQ ID NO: 58315 - DNA, 312 bp, Zea mays
  unsure (1)..(312): unsure at all n locations
acacctttcctgagctcggtgccgggaaaccgataaatttccgagcgcggagtagtcccaccatgcagattcaccttctcgggatttggggcccaccgttcagtgggtgcgagcgactggtcgtccggtgtatgagacttgacgatttgccttcttacctgcagcactatataaacaggcgagtagggtgtgaagtaccacagcattcattgctattgcactggtttgctgctaggaatntaatcatagtcgaagcttgacccttgcactcaaaggaagcaccacctcggattctgcttcgtcacaaaaaga

SEQ ID NO: 58316 - DNA, 405 bp, Zea mays
gcttgaaaagtgttctcctccattatttttgatatttagtacacccaatcatacatctcgtggatcagataaaaatattatggccactatatttacatcatatgtttcagttggagcgatacctgcgagtattaaaaggttatgtgcgaaatcgcgctcaccaagagggttcaatcatggagggatacactacagaagaagtgattgagagctgtataaattacatcagtgacggaacaatgataggtgtgcctgtacctaaacatgaaggtaaactatgtgggagagggagaatgggcaagaaaacttttcgcgttgaggattacaagctagtacattgtgctcatggtagtgtactacaacatctcacgatagccgagccttacatagaggaacacctgtatg

SEQ ID NO: 58317 - DNA, 384 bp, Zea mays
  unsure (1)..(384): unsure at all n locations
tcaactcgtcattctntagcttcatcatcctgtacatattttaacggaatgagaaaagcgcagagttcaaggagaaggtaaaagtaacaagtaaaagtttctcactggcttaaggtggctccgagcttcgtcaccagccatttttcgcccgccatttatccaaatctgggtcataaacctgtttcctatgcttcgagctaggctggggatgtcaatcaaatctgctggcgacaaactgaagttnggcctattaataattntcccgtgcgtgcagccagccttcaggaaagcagtagtcgtgcctcgagaagctaacagggcacagaaatcggcatgcctagcgataacttcgtcaagtgcatcaacttcgccctcaatgtattc

SEQ ID NO: 58318 - DNA, 378 bp, Zea mays
agcttcgaatctgagctcggcgatgatgatatagcacggccctggaacacgcacgttgataatattggcgccctcggtgacagcctaaccggtgtggtgtgagactgcgagggacagcgaggggagtatttggtggtagcgcgatggggctactgtcggttttatagagatgggcaaggctgcagactccgcctgagatccaaagctcccagcggcggttgtgttcgaggtggcaaaacggccagcgagaaaaatccggccagcatatatcttctgcatgggagttcggatgaagagaagcaaacgaattccggcttcctggcgatcaaattttaacgaaacggctgaagaggagaatctgggatcatggccccactg

SEQ ID NO: 58319 - DNA, 274 bp, Zea mays
ggtccatgctactggaataaactggtcttgtgtggagtccaacagatgctacgtgaataagctgaagtctcattgtttgatgagctaatccaacccagtgtacaagatcatcaaaatggctggactcaatcacgtgcaacagcgtaacaaaaaaaacgcgaacagcccaattgaaaaaaacgttctgaagtccccatttgccatcaacttcccacctacctattattcaggatggcaactcaataatgttgacacaaacatctgagtaaactac

SEQ ID NO: 58320 - DNA, 395 bp, Zea mays
gcttgccagtacttgtcaaagcaacaacatctgccatttcagcaagtgcagaccataccagtaacttggcccttcgcatgctggggactggatatgattggacctttcaagaaagctcaaggaggatacactcatgtactgatagcaatcgacaaattcactaaatggatagagctcaaacccattgcttctttaacctctgctaaggccgtggaattcatacaagacataatattcagattctgaataccaaacaatatcataactgacttaggatccaacttcacaagctcagaattcttcgatttctgcgaacaaaagagcattcatatcaagtatgcttcggtagcacacccgatggccaacgggcaagttgagcaactaacaggtgatct

SEQ ID NO: 58321 - DNA, 452 bp, Zea mays
  unsure (1)..(452): unsure at all n locations
tataaaactcagcttctnagggagaacacgtgatatgtctaaccaatgtttatttcgaataagatagaccttgtgcagcttgtcaagcagggaaacaggtgggaggctctcatcacaccaaaaatgtgatgacaacatcaagacccctggagctgctacatatggatctcttcggactcgtcacctatctgagcataggaggaagtaagtatggtctagttattggtgatgacttttcccgcttcacttgggtgttctttntgcaggataagtctgaaacccaagggaccctcaagcgctttctaaggagagctcaaaatgagtttgagctcaaggtgaagaagataaggagcgacaatgggtccgaattcaagaaccttcaagtggaggagtttcttgaggaggaagggatcaagcacgagttcttcactccctacacaccacagcaaaat

SEQ ID NO: 58322 - DNA, 376 bp, Zea mays
  unsure (1)..(376): unsure at all n locations
gggattattaattaatntctaaaattccagaagtatgggtttcggctattntaaatactccataattctttatttggaataaaaatcctaaaactatttttatgaaatactatagaaaatcaggagcctagaanaattggtctggtattcttagcatttttctataatcttctaagaattctctaagtccagaagaaaaagaaaaagagaaagtatgaacagtgttgggctgaatctggtccaagttggcccagaaatagggagaacgtgcgcccgcgcgcgctcgcgttgtctattttgcacaggggaccctgacggtttgaaatacctataaagagccctccctactattcctctgtctcgctgacatttgcac

SEQ ID NO: 58323 - DNA, 371 bp, Zea mays
  unsure (1)..(371): unsure at all n locations
atacagcagcagaagagcccctggcgctggtggagttaaggttgttaaatctatcaaatactgcttcagctcttcgaaggctttttgctgagctgatccccattgaaatacttcggccgacttcagcacttcaaagaatggtaaatttctctcttctgatctagatataaatcgattcaaagatgccaatcttcctgtcagccgctgagcccccttttttgtgctcggtggctccatccgaagaatggcttcaattntgtttggattagcttccatcccttntgttgaaactagacaaccaaaggaattgcccttctttacttcgaaaacacantttttgggattcaacttcaagccagaatgcctaaagt

SEQ ID NO: 58324 - DNA, 471 bp, Zea mays
tctgccacgatgatattggccctggccgaacagaagaataccatgtttgagctacattctggactgccatgaccaatgacttcgccataactgtggtattgcctccatacgaagatatagttgcttcgtagctcataacgaactgctttggatctgaatgcccatcatacgtgggaagctgacgtggcttgtaagatgggggccatagagtaacctgcagttctgctgccaaggtatcatgaataaaatcatcataccatccttcttcgttgaataagacttcctgacgaagcttcctgtgctggagccttccgatctagtccgcttgagctagatggcgcacttcttcagtatcttcagcgatctgcctctgaacgtcagccagacgcgccatattgtacttcttcctttgaactcgctgatggacgatctgcatatacctgatctcttggtctaactactactactgga

SEQ ID NO: 58325 - DNA, 397 bp, Zea mays
  unsure (1)..(397): unsure at all n locations
caagaagaatggcatgatccaatttaatttgagtataggcttccctgaaccttactaatctattttgccactccctattagcttcatttaatttggcatatttttccttaacatcttttagggagtttgtgagctcatttacaagtgatgacatagttttattttcttcttttatttcatcactagcctttataactatgtcatacttggcatttaaagattcattntcatttttcaacctatcacatttagcttttgactttctaatgaattgagtatattctttaagtaagtcagctaactcatcatatgaaagtgaagcanattcttcatcactatcactatcactatcatcatcaatattaatatcatttggacctttcgtcaccccaaccat

SEQ ID NO: 58326 - DNA, 414 bp, Zea mays
  unsure (1)..(414): unsure at all n locations
ggtgaaggttcttcatccncacatatgctaagcggcgatgtcacagccagcccatgctagtcttagcaattaagcatacatctagaccggcctcctcttttgcaaaatcaactaagtaaagtttgccgtctaatacacccttaaaagctaatgaaccatcacttcttctaaagacagacacgtctacatttgtgaatagacaattatatcccatattgcataattgactaacagataacaaattatatccaagagattcaactaaaaacacattagatatagagtgctcggatgaaatagcaattttacctaacccttttaccttgccttgattcccatcaccgaatattattgaatcttgggaaatccttgttntgacgtaggaagtgaacatcttcttctnccccatcatat

SEQ ID NO: 58327 - DNA, 390 bp, Zea mays
  unsure (1)..(390): unsure at all n locations
ctctattcccttatatgggtgcttaaatagactaatgggtaacatttactccaattggtcttgcctacaaaattggtgtcctacacagaaaacaaaaaaagaggtatttcggtctttatgtgttgcatgtaatgtatttaaaatatgtttaattgtgacacccgttcaatcctggaccgacattacttactcctgtctactctctaagatcatatcatccccacagaccaaaccggtactcactcctgtcaactctttaagatcatatatcgtccccacggaccaacacgggtcttttgtgcgcactttatcctcactcatgcgcacccgagaaaacttnccgatcggtcacctattccacaatgctcccagccaagcacacttaacttg

SEQ ID NO: 58328 - DNA, 388 bp, Zea mays
  unsure (1)..(388): unsure at all n locations
tcgcacctctgaactaactcggctacatcgntcttcgctgtctgtctatagaatcctgacctgtaaaccttcccgactagtgttctggatgctgcatgtattccacattgccctgcatggacctcctccagaagttgcttcccagtggacgggagaacgcacttcatgaggatgcctgatgcgccccttctgtacaatacctccccaatgagtgtatagtgagccgactgcctggcaatgcgctctgccgagttcttgtcgtctggttcttcttcattctttatatacttaataatcagccttcttcagtcatcagagtctgactcgggttgatctatngatgtgcactcttctggttgatccattgagatactcggctgcagaattc

SEQ ID NO: 58329 - DNA, 469 bp, Zea mays
tcaatctatgtgacatatagcgctagcatacacacactaatttgtgtttataaatcctaaaaactttaaatgagaaagttgtggagatgatctttttcggaaaaaagaaagaaagttgcgggaggcgtgagactgctcggtggctttgaaacgagcggcggttcactatttatggtctatttagaagcaccacaatatttaagacactggtctctattccaatttctagaaactagtttatggaaaaaactaggagtgtatgtttaaaactcagtttattcgaaactagtttctaactttttcgatacaccaaaataaggctacccctactctatttataagtgatctctatttataagtaatagaatcgattatttccttcattttctgtactaccaactcttaatatagatcaaacgtatatttttaatcagaatctaaaataataataaatattcaatcagtccaa

SEQ ID NO: 58330 - DNA, 417 bp, Zea mays
  unsure (1)..(417): unsure at all n locations
taacaatcaccctagatgtctttgtatttggctgctttactaagttcatcggtcatgcttctcaacctttaaactttgaatattaggcgttgaacaaccagttccttcaaaccattggagggcgttcaaaggacaccacatgtttcaatggtaacgatgttgctgttatacactgatgttttgttcttgtttgcttgcaactttttgcatctgtccatgcctatcggttggaaagaacatgcataaagccaatcttggatcttgctttcttcaagtacccaccacccattcaccaaggaatgagtgtatttcgtgctttttctgctggtactttaatatacacaaattgtagtcataattgttgtatgagtatgtngtgcatgcctcaagtactatgtctcttggtntcttcttaat

SEQ ID NO: 58331 - DNA, 469 bp, Zea mays
  unsure (1)..(469): unsure at all n locations
tggcgagaatcaccatggacagtacaaacctgtcttttcactcctatctcttcgtgagagattgtttactgctatgtgtgatgtgtccaacataagatgattggaagcttgccagtgaaatttgtgacgagctgaaaaagttctatgacaaaatgatgtatgtccggaactaaatatgttactgttaatcttttctttccaaaagtctgaggtatttatttggctttacaaaaatggtccaaaagtgataatcctgtggttgacaagatggcagagagcatgcaggcaaaatttaataagtattgggccgatgtgcatggtcttatggcagttgccacaatgttggatcctagatttaaattacatatgttgaaggctcttttcactagtatgtatgcgctacaacggacanaaaacacagtagtggaagtaacaccttgttgtacaaatggtaaagattacaacaatg

SEQ ID NO: 58332 - DNA, 405 bp, Zea mays
  unsure (1)..(405): unsure at all n locations
acataaatgtttttcttcacgaaacatgaatagaaaggaagggtgtttttctccaaaggctcaaaaacggtttgtacataaagtttcatgcatcgcanagaattgaactaccaacaatttatatattacattcaagcaccaaatattacaagcatagttcagcaactgttacaataatattctagaaatgtttttacaatagctactcttcttccttcaaaactttatctgcagcttccgtcagcagtgtggtaacgacttcgtctacaatagcttcggccatgttaataatttctattgatttctttgcctctgggtcatccagtggctcgaatggttctggaggaggagatagttcacctgcggtagaaaacgtatattatgttgaagtcacaaaattaaaca

SEQ ID NO: 58333 - DNA, 478 bp, Zea mays
  unsure (1)..(478): unsure at all n locations
tcgcacctctgaactaactcggntgcattatttttcgccatctgccaatagaatcctgacctgaagaccttcccgactagtgtccgggatgctgcgtgtattccacattgtccagcatggacctcatctagaagtcgcttcccagtagatgagagaatgcatttcatgaggacgcctgatgcaccccttctgtatagtgtctccccaatgagtgtgtagtgagctgactgtctgacgatgcgctcggctgcatttttgtcatctggttcctcttcattctttatatatctgatgatcggccttctctagtcatcagaatctgactctcggtgattcatgatattacactcttctgcctgatccattgagatgcttggctgtggtatttcttggacaaagactccaggtgggacctgagttcgactggatcctaacttggacaatacatcggctggcgtggttcgatctctttctacat

SEQ ID NO: 58334 - DNA, 472 bp, Zea mays
  unsure (1)..(472): unsure at all n locations
agcttgtgaaagttcttcatccctacatgtgctaagcggcgatgccacagccagcccatgctagtcttagctattaagcatgcatctagaccaacctcttcttttgcaaaatcaactaaataaagtttgctgtctaatacacccttaaaagctagtgaaccatcacttcttctaaagacagacacatcttcatttgtaaatagacagttataccccatgctacataattgactaacagatagcaaattataaccaagagactcaactaaaaatacattagagatagagtgctcattagaaattgcaattntacctaacccttttaccttgccttgattcccatcaccgaatataattgaatcttgggaatccttattcttgacgtaagaggtgaacattntcttcttccccgtcatatggttagtgcatccgctgtcgataatccagctagaacccncggatgcataaacct

SEQ ID NO: 58335 - DNA, 430 bp, Zea mays
  unsure (1)..(430): unsure at all n locations
atctgcgatgactaaagatcaacttgtatatagtcttgcctacaacatctgaaggttggtatactttggcttgtcattttgtaatttgtgttacgaagaactatttttgttgtatttcttatcgtcgctatgtgttcactcttcgtttgttagggcttgattctaagcaaggctctgaaggcccaaaaagatacagaggatgagagctgccgaatagcacttgaaaaccttcgttcggaggttataacattgagaaacgaagctcttgagaaagataagatcctacattctttaatggagagaatgaaatctagcgaagccaggctttctgctcaagatgaaactcatgaagacgagatgcaagagataaagaagaatagtgctgaagcaactgagaactntaatggtgaagtggtaaaacacgaaatat

SEQ ID NO: 58336 - DNA, 406 bp, Zea mays
  unsure (1)..(406): unsure at all n locations
gagctctttaaccttacagcaggccagctgggagcatagaagctgtacctcgaaatttgtgctattaagaatttatttttggtacagacgaaataaggtgttgtttggttcaaattttgtaacgtaaatggtaatagtaatgattgacacttgagtaacggcggtaacaagtttgaataagccggtatccatttgtagtgtggtattcaattacgggtggacttaaacaaacatcatttaacattatcgtttgtccattacgttaccaaaatctgaaccaaacggcacctaagtgttggatgctctgtagacgccagataagcctatggctcaccacacttgaattcttttatatttaagccttngttaggtgtacttggatccatcttaattataatccattatg

SEQ ID NO: 58337 - DNA, 492 bp, Zea mays
  unsure (1)..(492): unsure at all n locations
ntaccaaatggacgtgaagagtgccttcctcaatggaccaatcaaggaagaggtctatgttgagcaacctcccggctttgaagatagtgagtaccctaaccatgtctataaactctttaaggcgctttatgggctcaagcaagccccaagagcatggtatgaatgcctaagagattttcttatcactaatggcttcaaagtcggcaaggccgatcctactttattcactaaaaccattgaaaatgaattgtttgcatgccaaatttatgttgatgatatcatatttgggtctactaacaaatctatttgtgaagagtttagtaggatcatgattcanaaattcgagatgtctatgatgggggagttgaagtantttctaggaattcaagtgaagaaactccaagagggcaccttcatcagccaaacanagtatattcaagatattctcaccaagtttggaatgaaggatgcnncagccatcaagacacccat

SEQ ID NO: 58338 - DNA, 373 bp, Zea mays
  unsure (1)..(373): unsure at all n locations
actggataacaaccactacttctcgccattagggcctgatgaccgacttactgacaccggtgagcggtattattttttttgggaaatttaaagtgaattactagcttgtgatattgtgtggtggtcgcaagcgctcgatgtggaagaaatggaatagatgaagaaagcgagggtcatcgtggtgctcaccaggtgctcgataaaatgactgagttacgaaaccctcgccgacttcgttgttcttgtgattatcgagccagattcagttatggtgagtgactngctactcctgcataatatatcgaagcatggaatgggttagtatactagttgcgataatttcttgtcgtggttaagatgcatggtgacaata

SEQ ID NO: 58339 - DNA, 359 bp, Zea mays
atgtagcaagattgttgggaactatattgtgagagaacacgaagatatgtcatccaccttcaagagacagggcaaacccatgatgaatggactcatgaatggcatacggtttgaataccctgattatacaaattctacaccaggcgccaaagcttgggaaaaatgaaaaaggtcaccaatgccatcgggggtaaggcagcgaataatacgaccaacgatgataccaaagatgaggaattggaatatgacaaagagtcaccttcaggcaaggccatatctcttaagggggaaaaggccaaaattggcgaatagaagatattggtcacgctagagaaaggaaaggggagcaccactactac

SEQ ID NO: 58340 - DNA, 415 bp, Zea mays
  unsure (1)..(415): unsure at all n locations
gcttgagagtcaactgtacagattgtgtttacttgtgtgttnngcgggcattcaatgtctaaggcttacttgaagggcagcagttcgattccacaggcggagcactgtactatttaagctggaaagtaaagcataaaatttactttcagccagtttctgtaaaccatcatgcaaacttttggatgctgctcttgattgatttgcaattattagtcgctgctgttacaaagctgcatgtttcacctctttggctttcttaaatatgaaagatagtcgaagtgaacattcacaatgaaatggtcctccttttccagattcaccactcttggcctttatgagtatcagctgctgtgcaaatgatagctgctgccagctggctccttgattcgcactnaaaaaacctgtgcagcttcac

SEQ ID NO: 58341 - DNA, 391 bp, Zea mays
  unsure (1)..(391): unsure at all n locations
tgaagtgacatactaatagcctggcgaccgttgcgtctcttatggggtgcagtggtcgngacactagcatgcgtagcgtagcgcatgcacatgcacgggtcatggttcgtctgaatggatgaaccgctttttctcttgtacggaagcatcatcctgtttcatcccgtgtctattctcgtagggaatcgccattccatttcgctcagtatctatttttttagggaacgggcatcctatttcattgcgtcgagtgtgcaagcctgaaagaaatgcctattctcgttcgacttgtacttgcttcgatctgtatagatggtcttcagccttttgttagntgcgactttaatccacttggcttctactttttctagtaagtggttttatctatatg

SEQ ID NO: 58342 - DNA, 382 bp, Zea mays
  unsure (1)..(382): unsure at all n locations
ttcgcttcagtctatcatccgtagtccaacggagtcgtggagcgtgccaatgggaaaatcttcacaactgtcaagaagatgctcctcgatgaaaaanaaggcagatggaccgatttgttaccggaggcagtctgggcgctaaacacaactgagtgcagggcaaccgggttcactcctttccgccttctatacggatcggaggcaatgaccccgcaagaaataaagcatgggtccccgcgtacagttccgtcagtcgttcctgacgtggacgagccaacctaaaaaaatctcattgacggagaccggttcttcgccctacaggccctaaacaaataccaagcccagaccanagcatggcgcgaccacgcagtcatcccgaggg

SEQ ID NO: 58343 - DNA, 414 bp, Zea mays
ctgccaaaagggcgcatgaatatacccttgatatcttctcgtattgtcagatcatttttcacatataaccattctgtcatccagtctccaggccatctcttccgaaaggttggcacggggcagcttgacccggaccgagaaacgaaactgtagcagccaaaattgttgtgatactgttctttaccccaaggttttgtttcatatgataattcatgtatattgcagaagctttttgcgtcaggtttcagaccttggcttctcacggcccacacgaagatatttagccttataattgcctcgggggtaagttggtggagatagacttcgaatattttcagtacctccacaacaaagctgctcataggaaattgcagtccagctttcaaaaagcttcggtacactacgacctcattc

SEQ ID NO: 58344 - DNA, 204 bp, Zea mays
tggttaccaattttataattcataactcattcttttattcgtataccaaccttttttacatatagaggttaattttaagccacgcattgagagcacaaaagagtgccgaagatgagagctatgaaattgcgttcaacaacctacgatcagaaggtattaaactgagaaatgaagctctagaaaagggataaattctgcttacat

SEQ ID NO: 58345 - DNA, 410 bp, Zea mays
tccaaggcttccagacgaagccagttacagctcatgctctatttcaatgcacccaagatcatgaggagtatcttcaagcatacgtccgaaggttcttgcgtctgagagcacaagcgcctatagtgcccaatgaaattgtcattgaggccatgatcaaggggcttcgtccaggatctactgcccaatattttgctagaaagcctccacagactttggagaagctgcttcaaaagatggattaatatatccacgctgacaatgactttcgtcaaagaagggaggaagcctacaggttctctgagatgaccaggggcttcggagggagaattcacccaaggcatgtcaggtcaatccactccactcagaatgacaatagaggaagtcaacagcagaggccacaatattcctcg

SEQ ID NO: 58346 - DNA, 355 bp, Zea mays
  unsure (1)..(355): unsure at all n locations
gcgatcaagatattggtggctagcacacaantaaaccactactactccaactattgtggcctgctccttcgtaagctggaggtagaggaaaaacaagtactagtggaaaagagggaataaagggggaacccaaatacgactcataaagatgggcgaagatggctatatgcatgatggagttgagactgagatggatgaattcaatttggtaataatacaggaaatccctgaaatttggaagtcagaacagccaacatacgcaaaatatgacgaaaactacaatttggtctacatcagaaatgtggaggattcttcgcctaaaacagagccaacaactaatcactaaaataatatt

SEQ ID NO: 58347 - DNA, 425 bp, Zea mays
tgactctcgcaatcaaacgaagctccagtttaaagcctacttcgtcagaagaaaaagcttcggaagaaaagagttttagttcccaaagaattcagaattaaatggctagagtgcgctctaccgctagggttgagcgtgagggaggcgaagctgaaggatcggagactgttcctatctccgaagcgatgcaacgatctggactggtgacctcggaagcaatccgtactgccgagacagagcagactgctgccgagacagaagaagttgttgccgaagcggaagaaggaaatattgaggaagctgattccgatgatgattaccatattgtcgtgccaagcaaacccagccacttggacttcagaaagtcgactgtctccaaggctgatctcttcaagatggtgaagtcgggtatttcagtgagaatg

SEQ ID NO: 58348 - DNA, 443 bp, Zea mays
  unsure (1)..(443): unsure at all n locations
agcttgtgaaggttcttcattccacacgttctaagttgtgatgccacagccagcccatgctagtcttatctattaagcatgcatctagaccggccttttcttttgcaaaatcaactaaataaagtatgccgtctaatacacccttaaaagctagagaaccatcacttcttctaaagacagacacatctacatttgtaaatagacagttatatcccatattgcataattgactcacagatagcagattatatcccagagactcaactaataacacattatatatggagtgctcattagagattgcaattntacctaaaccttttaccttgccttgattcccatcaccgaatataatagaatcttgggaatccttattcttgacgtaggaggtgaaacatcttcttctcccccgtcatatggtttgggcatccgctgtcgataat

SEQ ID NO: 58349 - DNA, 459 bp, Zea mays
aacccatactgtccactgacaacagctttatcttaacacaggcacatatcctcagcccaagtgtacaagtacagcagcagcagcgacacaacccataggccaacaacaatacaatagcagtatgtgcatccgtaaggcagtaacagcataagcggattgcttcgtgcttgggcctggctgcctgagaggctaagtgggccaatcgggccatgccaaaaaaaattttcggtctactgtaaagcgggataatacgggaaaataccggatcaaaacgggataccggatatacggacgggaaactaccttaactggtttcgcacccgttttcggttggtcccatcccactttcgtacccgtttcgtattttaccggaaatacgaaaatagtcgggacaaaatgggaatacggagtgggtcgggacgggaaaattcccgttcgtttcatcctatgatgtgttag

SEQ ID NO: 58350 - DNA, 368 bp, Zea mays
agcttgggcctgagctgacatgttaagcgactaatcttgttttataaatgcactaatgacttgtttggaggatgaaaaggaagatatggttacgcgatgcaactctttagtatgttcttatattttggttatcgaatctgatcatttatttaaccatctatctattgtgttgtttgccaggatgaacatgattctactatcattgactcataaattcaaatacagctactatatcagaatcaaaaggcaaaaggcttaatgccaaaagcagacatgtatttgatgtcatgtatttcgtttcatgttgagacatgcagacatgtcttcttgtcatgttgagaatatttcttattgaacgacatgtatat

SEQ ID NO: 58351 - DNA, 490 bp, Zea mays
  unsure (1)..(490): unsure at all n locations
ctacaacngcctcaacaagttctgcatgcgatgaatgtatgtactcccctcggtggtctggagcgtaaggactactcctagtcgcgccacgggtttcacgccgcttttcctggtctacggngccgaagctatcttgcccactgacctgtaatacggctccccgaggacgagggcctacaccgatcaaagcaaccaagctagccgggaagaatcgctggaccagctggaggaggctcgggacagggccttactacactcggcgcgataccagtagtccctgcgacgctaccacgcccgaggggtccgaccccgagacttccatgcgggcgacctggtgcttcggctacagcaagacgcccggggaaggcacaaactcacgcccccctgcgaggggccattcgtcattcgccatagtctgaagcccagaacatacaagctggctaacaaccaaggtgagatctactgctacgctcggaacatcaaacaacta

SEQ ID NO: 58352 - DNA, 474 bp, Zea mays
  unsure (1)..(474): unsure at all n locations
agcttaatgcccctaaaagatagtctaattttgttaaggacaaggctcccatggtttaagatagtgaaggctacattttatatcctgcaaactatcccgaacataagattagatagattcatgctaggaaatctcataatgtttctcaccatgcatttatgtacaaaaatgaggcttctagctctaggcatacaactcatattaaattgcctagaaaggaaattcctgctgcatcaaataagcataatgtttcatttaaaactcttgatgcatcatatgtnttaactaacaaatcaggcaaaatagttgccaaatatgttgggggcaaacacaagagctccaaaactttgtgttgggtacccaaggtgcttgtttctaatgtgaaaggacccaagaccatttgggtacgtaagaacaaggcctaaaattgttttgtatggttatgcatacggtggttcaagttggataatcgat

SEQ ID NO: 58353 - DNA, 454 bp, Zea mays
gcaagagctggaggccgctcgcctcaacatcaaggccttatatgatgaccgtgttgtcatgaaggcgatgtgcgacatagccatggacaaggacgttcgcaccgggcggatcctgatgaggaggcctggcgttgtggtgcctgaggacattattgtcgatgttcttgccgcgcctactattgtgagccaaccttgaaagtcgcctagaggagggtgaatagttgaaaccttaaaattataactttaaacacacactaaggttgagggttagcgttagaattaaattcaagtccgaagagaggggataacatatcatacaagaatcaaggcgagtgaacacggtgatttgttttaccgaggttcggttccaaagaacctattccccattgaggaggccacaaagactgggtctatttcaaccctcttcccctctcaatcggcacttagaccgagt

SEQ ID NO: 58354 - DNA, 481 bp, Zea mays
  unsure (1)..(481): unsure at all n locations
agcttctaaagggagaacacgtgataggtctaactaatgtaactntcaaaaaagatagaccttgtgcagcttgtcaagcaggtaaacaggtgggaagctctcatcatgccaaaaatgtgatgacaacatcaagaccccaggagttacttcatatggacctcttcggacccgtcacctatctaagcataggaggaagtaagtatggtcttgttatagttgaatatttttcccgcttcacttgggtattctttttgcaggataaatctaaaacccaagggaccctcaagcgcttnctaaggagagcccataacgagtttgagctcaaagtgaagaagataaggagcgacaatgggtccgagttcaaaaaccttcaagtggaggagtatcttgaggaggaaggaatcaagcacgagttctttcgctcctacacaccacaagcaaatggtgtggtagagaggaagaacacgacactactatacat

SEQ ID NO: 58355 - DNA, 438 bp, Zea mays
  unsure (1)..(438): unsure at all n locations
tcaactccatctatattatggatggccttggaatcagtccagctttcttcggtccttctggcagcttcctgactcccatgaatagcaataggcccttggtccgaaggtatcttcatgcagagataagctgggtgaagaattgcttcaaaagcatttatggtaccacgaccaatgatggcgttgtaggggtattccatgtcaacaatatcaaacacaatttgctcagtccttgtgttattaacaaatccgaaggttaccggcatggtaatcttcccgagtgccacaatctgcccgcctccgaagccacaaagagggtgcgtagcatcatgaatcttgtcttcaggctcttgcatctgtctgaaggctttggcaaatataatgtcagctgcactgnctgtgtcaactaagacattgtgaaccagaaaccctctgatcaca

SEQ ID NO: 58356 - DNA, 448 bp, Zea mays
  unsure (1)..(448): unsure at all n locations
agcttaatcctcgaaaatgtgtctttggggtaccggcatgaaagctactcggatttattgttagccaccagggaattgaagctaatccggataagattgaagctatcatgaaaatggaggcaccacgatcacaaaagaaggttcagagacttaccggatgtatggcagccctgagcagattcatatccaggctgggagaaaaaggcttaccattttacaagctactcaagaaagtggacaagtttcagtggacttcagaagcacaggaagccctagatgcactgaaaaaattcttgacaacaccaccagtgctgaagccgccacggcgagccacgtcaactcaaccagctaaagatntgctgctatatatctcttgcacgactcatgtggtaagcaccgcgttggtagtcgagcgagcagaagaaggacatgcctacccagtgcaaca

SEQ ID NO: 58357 - DNA, 436 bp, Zea mays
  unsure (1)..(436): unsure at all n locations
ntaccaaatggacgtgaagagtgccttcatcaatggaccaatcaatgaagaagtctatgttgagcaacctcccggctctgaagatagtgagtaccctaaccatgtttataaactctctaaggcgctctatgggctcaagcaagccccaagagcatggtatgaatgccttagagatttccttatcactaatggattcaaagttggaaaggccgatcctactttattcactaaaactcttgacaatgatttgtttgtatgccaaatttatgttgatgatattatatttgggtctactaacgaatctacatgtgaagaatttagtaggatcatgacacaaaaattcgatatgtctatgatgggggaagtgaagtacttctttggatttcaagtgaaacaactncaagagggcaccttcctaagccaaacaaagtatact

SEQ ID NO: 58358 - DNA, 458 bp, Zea mays
  unsure (1)..(458): unsure at all n locations
agcttgtgagagcaagttaatcctattactatttattntctgtggatgcatgaccatattaagttttcttaggctactataatattatgcaaggacagtgcnaacaccattttcatttttacatctatatattatttttaaaccatttaaaactacttactgtgcatcaagcaagttaaatcactaactcagtgatacatcgaccataaataatgaaatttttcccagccactaagcatcgcatagagggtctactgtaaacatttcaattcatttggagcactagagctacagatccaaaaataacaagcaaatcaatcttcttttctctatttaacatgttttaattaacacaccaagagaacagtgaacaacatataagttntataattttcttagctagattatgacaacatcttactaacaaaataagtttcatcattnttggattttataat

SEQ ID NO: 58359 - DNA, 441 bp, Zea mays
  unsure (1)..(441): unsure at all n locations
ggatctcttgccttgctgcttttatcgacatggctttaattatctngcgacatcagtttaaggattgcccttcttattctcattgcctttagcttccgaagccccaaaagaagagcttcgtactcggcaatgttatttgtatagctgaagtctaactttattgcataacatgttctgactttagagggtgtgactaggacatcaactgctcttgcaccgaaggtcccccaaggatcatcgcaaaataccatccaagcttcgacatcttttgttgtttcttcatcttgagcccctggcgtccaatcagcaatgaagtctgctaacgcctgagattgaattgaggatctgtgcacgtaatcaatggtgaattcattaagttccgcggccatttttcgatccttnctgtagcttctctgttcctcattatgtcctttttagggt

SEQ ID NO: 58360 - DNA, 466 bp, Zea mays
  unsure (1)..(466): unsure at all n locations
agcttcgtcatctgagagaaagntgccttgtttattggatattatttcggtcctccagtctttactatgtacatgtgagattgtgagcactgctctttccatcagctcgattgagggtgcttttattgtttcaaaaaatacttccgagggcaaagggagcccctgtgccgctgacttagctaataaatttgcatgctcattctctccccttgggatattttttacagaaaaaccctcgaaagaagcttccaatcttcggactgcatccaaatacttttcaagtttccgatatcttgccttgctgctcttatccacatggcccgaaataacttgcgaatcagttttaaggattgcccttcttattccggttgcctttagttttcgaaaccctanaagaagagcttcgtactcngcaatggtatttgtatagctgaagtctagctctattgcataacatngtctgact

SEQ ID NO: 58361 - DNA, 466 bp, Zea mays
  unsure (1)..(466): unsure at all n locations
tactatacctttaacatctaagttgttcttatatttagattcttagggcaggcgggggtggtggttttggattacgtaccgactcctttgggaagaaagtcggngaagcgagaatgtagaaaatcctcagtctcccacgtagcctcttctactgaatggtgactccactgaaccttatacatcctgatcgaccttgcccgcgttgacctttccttttgatccaataccttcacggngtgctcttgataggacaagtctggttctatctccaattctggttcacgtagcacttctatgggtaagcggacacactttcgtagctgagatacgtggaatacatcatgaactgctgacatatggcgtggcaacttcaattgatatgctacaggcccacaagtttctttgatctcatagggtccaatgtagcgaggagctaacttgctcttgattccaaatctctgaacac

SEQ ID NO: 58362 - DNA, 393 bp, Zea mays
  unsure (1)..(393): unsure at all n locations
agcttcgtgaagatattctccgaagctacactttcgaagatcaatagtgtatctgcttgcgacttagcatgattatcccctttcaaaacattcttccgaagatcgatatcatgtccccttcttgtgccatatgcaacatgatgtatgatgcttatgctatgcgaaatgatgcgatgatgttatgttatataagatggtgtttattccgaagatacacacacattcctgcgataaaacacataatctntttgaatcaacattgtctttttactataagcctcccttaggagcttcttcgcctttttacttcagcggaatcagcgtttatttttcgctgtaagcctcccgtaggagcttcttcgccttttactttcatcggtattcgcgttgact

SEQ ID NO: 58363 - DNA, 404 bp, Zea mays
agaaccatttgggataacaacgtttatttttgtagacaaagctcgtatcgcatgtcaggcaaggaagcaagctgctgttcatcatccacataagaacatcatgacgactgacgcaccactcgagctcctacacatggacctattcggctcgattacttacataagcatcggcgggagtagtactgtctagttattgtggatgactattctaacttcacttgggtgttctttttgcaggaaatatctcatacccctgagaccctaaagggattctttgagacaggctccaaatgagttctggttacggatcataaagattagaagcgacaacgagacggagtacacgaactctcaaattgaacgctttcttgaggaggagggcatcaagcatgagttctcttctt

SEQ ID NO: 58364 - DNA, 448 bp, Zea mays
  unsure (1)..(448): unsure at all n locations
cggaccttaagcacctgagctgcactttagcatatacctgagcgggttgattgccctgngccccctctctagaagcctttagtcgagagacagattaggcaaatgcacatttcatgatttaaacccctaaccaaagtttaagagtaccaaaatgtttacaaaagacagccgaggaactttacaaaaagacccctaaaagacccctaaatcagccctcaagtggagaacactatagaatcacccccattccttctaagtccaaaatcaaccctaatctagagagcaagggtgttcacctatctaatggcaccaaaaccccagggtctaaataacaaaaatgagccaaattatctaaggaactccctgcaagagtgtgaacccaagccaagaccgtttgacacgggttggcaccttgtttgtctcgggttgaacagtgcagacagacaag

SEQ ID NO: 58365 - DNA, 224 bp, Zea mays
tcctaatgtttatgtatatattgaaacgaatgaggcgccatgtaaacacacacgtatgtacgtggaacacatacatccagtgttggacacatatttgtgacaaccgctcgtactagataaaaatagaggtgggaggaccgctttaaaaactaatgcggagatgtgggacggtcgttatgaaaactaagtgtttataaaagtcctaccacctatatgtcgctgtc

SEQ ID NO: 58366 - DNA, 75 bp, Zea mays
agcttgctggggacctcgccaaactgcggctcttcttccagagcgacccgcatgggcagtggcaagggggcggat

SEQ ID NO: 58367 - DNA, 452 bp, Zea mays
  unsure (1)..(452): unsure at all n locations
tacggacctatgaaactcagcttctaagggagaacacgtgataggtctaacaaatgttactttctaaaaagatagaccttgtgcagcttgtcaagcaggtaaacaggtgggaagctctcatcataccaaaaatgtgatgactacatcaagacctttggagttacttcacatggacctcttcngacccgtcgcctacctaagcttatgaggaagtaagtatgttcttgttatagttgatgattnttcccgcttcacttgggtattctttttgcaggataagtctganacccaagggaccctcaagcgcttcctaaggagagctcanaatgagttngagctcaaggtgaagaagataagaagcgacaatgggtccgagttcaagaaccttcaagtggaggagtacctcgaggaggaaggaatcaagcacgagttctcttgctcctacacaccac

SEQ ID NO: 58368 - DNA, 447 bp, Zea mays
  unsure (1)..(447): unsure at all n locations
agcttatcagaagaaatttctataatttgattattgagctcatgcctaagtctggtaaaagattgttcatcaagtggcttgagaaagatatcggctaattgatctttagtattaatgtaagaaatctcgatatcccccttttgttggtgatccctaagaaaatgataccgaatggctatgtgcttagcgcggctatgctcgaccggattgtcggccattttgattgcactctcattatcacatagcaaagggactttggttaatttgtaaccgtagtcccgcagggtttgcctcatccagagcaattgcgcgcaacagtgacctgcggcaatatactcagcttcggcggtggaaagagcgaccgaatnttgcttctttgaagcccatgacaccaaggatcttcccaagaactggcaagtccccgatgtgctcttcctattgatctta

SEQ ID NO: 58369 - DNA, 404 bp, Zea mays
gcttaatggctacgacttgcatgtgctggctgtggcatcgccgcttaccacatgtggggatgaagaacctccactaagcttctatacgggagaacactgtgtataggtctaacgaaatgtttaatttcgaattagatagaccttgtgcagcttgtcaagcagcgtaacaagtgggaggagcacatctcatcaagaatgtgatgaccacgtcaagacctctggagctgctgcatatggacctctttggacccgtcgcctatctgagcatatgaggaagtaagtatggtctagttattgtagatgactcttcccgcttcacttgcgtgttctttttgcatgataagtgtgaaacccataggaccctcaagcgctgtctcaggagagcgtcaaatgagtttgagctc

SEQ ID NO: 58370 - DNA, 437 bp, Zea mays
agcttctaaagggagaacacattttatgatttataaatgttcattttgagaaagacagggtttgtagcgcatgccacgcgggaaagcaagttggaacccatcatccacacaagaacatcatgacgaccgacaggccactggagctcctacacatggatctattcggcccgattgcttacataagcatcggcgggagtaagtactgtctagttattgtggatgattattctcgcttcacttgggtattctttttacaggagaaatctcaaacccaagagaccttatagggattcttgagacgagctcaaaatgagttcggcttaaggatcaagaaaataagaagcgacaacgggaccgagttcaagaactctcaaatcgaaggcttccttgaggaggagggcatcaagcatgagatttcctctccctacacgccacaa

SEQ ID NO: 58371 - DNA, 373 bp, Zea mays
tacacacgtggtccgcggaccgatcatcctttatctctagtgttgctccacgtacacctcctccttgattggaccgttgaggaaagcgctcttcacatccatttggaacaacctgaaagaatggtgagcggcatatgctagcaagatacgaatggactctagtctagtcacacgagcgaaagtctcctcatagtcctaacctgcgacttgggcataaccttttgccacaagtcgagccttgttcctcgtcaccaccccgtgcttgtcctgtttgatgcgaaacacccacttggttcccacaacatttagtcttggacgaagcaccatcgtccatactttattgcgcttgaagttgttgagcttcctctgcatg

SEQ ID NO: 58372 - DNA, 430 bp, Zea mays
  unsure (1)..(430): unsure at all n locations
agcttacttgtggaataaatgtaagattatgtaattcgctttcgcatttctttatctccgatgttctgtaatgtctacaagatgggtgagacgttcctggtaaggtaaggaaagataccgaacttgtcaagtagttcaggggcacctacagggttgtctgatgtctgtgagacaaggacaactgtaggtgggcctaattacttgggaggttccgtcacacataccatgctcttggggcttgcttaagtccatagagcgccttagagagtttatatacatggtcgggatacctgtcatcctcaaagccagggggttgttccacgtatatctcctccttgattggcccattgaaaaaagcgcttttcacgtccatttggaacagcctaaaggaatggtgagcagcatangctaataatattcgaattgactc

SEQ ID NO: 58373 - DNA, 484 bp, Zea mays
  unsure (1)..(484): unsure at all n locations
tggacgtgaaaagtgccttcctcaacggaccaatctttgaagaggtctatgttgagcaacctcccggctttgaagatagtgagtatcctaaccacatgtataaactntctaaggcgctntatgggctcaagcaagccccaagagcatggtatgaatgcctaagagatttccttatcactaatggtttcaaagtcgaaaaggccgatcctactntattcactaaaactcttgacaatgatttgtttgtatgccaaatttacgttgatgatattatatttggatctactaacgaatctacatgtgaggaatttagtaggatcatgacacacaaattcgagatgtccatgatggnggagttgaagtacttcttatgatttcaagtgaagcaactccaagagggcaccttcattagccaaacaaagtatattcaagacattctaaacaagtttgggatgaaggatgccaagcccatcaagacacccat

SEQ ID NO: 58374 - DNA, 374 bp, Zea mays
agacacctgcggcatgcaagcttgtcatgcatattatggtccccatcttttgatttgttgttacatcccaaaatctcaacccaaggtttggaaccctaatctcctatacccccccttatatatatatcccccctaaactccacccttaggtcatctcgtcatatgcatacacttggattgttaggaacacctcacatagattattcacaacacttaagattattcagcaaattgtcgattcaaaagaaaaggaaataaaaagaaacaaacatatataatggaaaagtgaaatataaaactgaaaaataaaaaggaaaaaacccttcctcctctctgctgggacgtatctggcccaaaccgcgccgcgcccaccc

SEQ ID NO: 58375 - DNA, 510 bp, Zea mays
  unsure (1)..(510): unsure at all n locations
accgtcttattntattcaaaatatctgtgacatacatagtatttatcttntgatagttaaagtaaatctgtgcgatatgctgatcagaataaaaataaataataatcatagatattttaataaaacgagtctatcaaatttagtcttaaaaagtcaaaacgacacggaggtagtactgttactttgctgacagggatgccacgcatgctgaccagcaaccagtcttactctctatcttntttttatagatatatgtgtataataatacatgttttcatccagcttctttttttttggcgggaccctggccgtggccgatagctggcaacgggatcgagggcccaaagcaaaacgagccctgcacgttacatataaacctgggccgtacccggtgagggcccacttcagtcgtagcgtggtggtctggcgcttgttatttcttgatgtactaactactattaatctctactactaatataatattatggctctactatattaaatcatcac

SEQ ID NO: 58376 - DNA, 476 bp, Zea mays
  unsure (1)..(476): unsure at all n locations
agctnttaaacagcanaatgttatttgcccatcagtaagaggtctacatcatatggttatgatgattacctatgtgttcttccaagtagatatgttggagatgtgatgttggttattcacctttatggtgatttccattttatttttgaaatcttggtcaagcacagggtagtggagtcctaagcattggctgcggtatgttccttgaatatatcagcccagagaccatgctttcaggcagcaaaatgttgtgcccactactaggagatctactcctatgtttaattacatgaagattatctacgttgtgtacaccaattttcaaaaatctgtggtacactttatgtgacacctgcaattctccaacatataaagatataatatatnttgcgtacaagttgcaacaacaaatgaaacatggtaacgcatttgaaggataattatttaatagagtttgatgaactcgcttaatgggc

SEQ ID NO: 58377 - DNA, 370 bp, Zea mays
  unsure (1)..(370): unsure at all n locations
agcttgtgctggccttgtcttcctctntcatgtatatgtgtggaaccggagaagcaatcaaggagggacatgactttgtatcctgctgcgctatcgactattttgtcaatcgtggcagcgggaaattgtccttaggacaggccttgttgaggctggtgaagtcgatacacatgcgccacttaccgcttttcttttgcaccatgaccacgttggcgagccatgtaggataagcaatcggctcgatgaagttggcttccaacaggcggtgcaccttggctttggtggcatcggtcttctcgtccaacattttgcatagtcgttgcttttttggcgcaccgaagggtcgatgcccangtcgtgctctatgatg

SEQ ID NO: 58378 - DNA, 440 bp, Zea mays
  unsure (1)..(440): unsure at all n locations
cgtagatttctactacatagttccctgaagaaggtccncagctctgcaattgcttcatatacatccttcctcaccagtcctctaaggccagcggctatgattctctgcaggagtatgtggcaagaatgtgttttcagttttccaaccacctttgaaccatcttcacttatgtatcttgctaggttatccgcaaatccatcaggaaacttgatacctttgaggaacttgcaaaactcgactttctgatccttccncaacacatatggagcangtggagccctgcaggccgagttgccatcttgttgcaagtgcagttcaggtcttatgcccatatcatacaaatctagccttgcattatgtgtgtncttggacttgcctcggatactaagtagtgtgcagagaatnatttcacatacanttttctctatgtgcatcacatc

SEQ ID NO: 58379 - DNA, 369 bp, Zea mays
  unsure (1)..(369): unsure at all n locations
atgcatgcttaatggctaagactngcatgggctggctgtggcatctctgcttagcacatgtggggatgaagaaccttcacaagcttctaaagggagaacacgtgataggtctaaccaatggtcatttcgaaaaagatagaccttgtgcagcttgtcaagcacggaaacaggtgggaggctctcatcacaccaaaaatgtgatgacaacatcaagacccctggagctgctacatatggacctattccgacccgtttgctatctgagcatatgaggatataagtatggtctaattatccgtgatgactcttctcgctttacttgaggttcttttgcaagacaagtctgaccccaagggaccctcaagcgct

SEQ ID NO: 58380 - DNA, 430 bp, Zea mays
  unsure (1)..(430): unsure at all n locations
tctaaagggagaacacattntaggattaacacacgttcatcttgagaatgacaggatttgtagcgcatgccaagcagggaagcaagtnggtgctcatcatccacacaagaacatcatgacaactgacaggccactagagctcctacacatggacctattcggcccgatagcttacataagcatcggcgggagtaagtactgcctagttattgtggatgatgatactcgcctcactcgggtgtgctgtttgcaagaaaaatctcatacccaagagaccttacagggattcttgagaccggctcaaaatgagttctgcttaaggatcaagacaattataagcgacaacggctcggagttcaataactctcaaattgaggcttccttatggaggagggagtaagcatgagttctcttctccctacaccctcaa

SEQ ID NO: 58381 - DNA, 392 bp, Zea mays
  unsure (1)..(392): unsure at all n locations
agcttgaagctgggttaagtgccatttcatttatgatctcgcanacagccctcgcgtacaacagcctgaaggtacgggaattaaacacttgatagaaaaaccccctattttttttttacgcaactcattcctttgttcttatatgaattcttttttcatatagggcctgatcctaagcaacgcgttaagagcgcaaaagagcgccgaagatgaaagttatgaaattgcgtttaataatttacgctccgaagttatcaaactgagaaacgaagctttgtgaaaaagataaaattctacttacactggtagataaagtgaaaaaagacgaagctgcttcaaaggcccaggccgaagctcanaaacgcgagattaaagatcttcagaaacagctg

SEQ ID NO: 58382 - DNA, 393 bp, Zea mays
  unsure (1)..(393): unsure at all n locations
agctntatcaaatggacgtgaagagtgccttcctcaatggaccaatcaaggaggaggtctatgttgagcaacctcccggctttgaagatagtgagtaccctaaccatgtctataggctctctaaggcgctttatgggctcaagcaagccccaagagcatggtatgaatgccttagagatttccttattgcaaatggcttcaaagtcggcaaagccgatcctactttattcaccaaaacacttgataatgatttgtttgtatgccaaatttatgttgatgatattatatttgggtctactaacaaatctacatgtgaagaatttagtaggatcatgacacagaaattcgagatgtctatgatgggggagttgaagtattntctgggattcaagt

SEQ ID NO: 58383 - DNA, 472 bp, Zea mays
  unsure (1)..(472): unsure at all n locations
ctgggaagattcttcattccaacatgtgctagtcggctatgcctgagccagcccatgttagtcttagcaattaagcaagtgtcgagttcagctctatcaaaatctaccaagtatagctgaccctctaacactcccttaaatgctattgaatcatcacttcttctaaagacagtgacacctacatcagtgaagagacagttgtagcccattttgcatatttgagatacagaanacaaattgtaatctaatgaatctacaagaaaaacattggaaatagaatggtcaggagatatagctatcttaccaagacctttgaccaaaccttgatttccatccccgaatgtgatagctcgctggggatctnnggtnttctcgtaggaggagaacatcttattctcccctgtcatgtggttggtgcacccgctgtcgagtatccaacttgagcccncggatgcatanacctacaaaacaa

SEQ ID NO: 58384 - DNA, 420 bp, Zea mays
  unsure (1)..(420): unsure at all n locations
agctntgaatgggcgtttcctcaagcagtactatcctagtatgtggctagatacttaagaaaactgatgtaatcacatcgagttagttgcttttggttcactcagctccaccaaaaggcaggtggcatatgttgagcaccaaaatgagccgccggacggtctncacgcgcccaaaactatntatggttccaagtttcttgttacaattgttggctatatttagagaattatctcgggaaatatgttttaacgagttcacccccttctctataaactgaggatactaccgataaacatcataaccaatgaaattcatttatctcgcattgtttcttgtcctcttgagctatcaagttagtctaaataactctcatcccgactttcgctatattaaattaatgttattgagagttatgttac

SEQ ID NO: 58385 - DNA, 469 bp, Zea mays
  unsure (1)..(469): unsure at all n locations
ngaactctcttcgtcggagttccattcttcacctatgtgagcttggctcccttcttgaagtatcccttgctcttgcctcccttcttcaacttgtcccttttgtaatccttcttcgcatcttgttcctttntgtttggacaatttgctatgaagtgaccggtctggccacattcatagcatgccctcttctttccttttctctgatacctatcattcttccttacaaacttcttgaaggtcttgatgaacataacagtgtcctcatcacttgagctctcttcatcgcttgatgtttcaaccactttctttgacttgtggtctctgcttttcttgaaagaatcttgctcatttgaaaacaaggcatgtgagtctcttgttttgattgnggcttcttcagactcatgttgttgaatattggcacatagttgatgaggagtcatctcctcataatcatctcgatctcttatca

SEQ ID NO: 58386 - DNA, 475 bp, Zea mays
  unsure (1)..(475): unsure at all n locations
agctntcccctacccatgctcagctntctgttacaggcgcaacaaaccttcccatgatggacgggggttgtttagacgattccaccaccttagcttcgaatccccacctctatataaccagccgcaatcgcgtctctttaccatcaactcggtgcctctaagtcttcaccgtcagcacatgcaataagtgccgagagtcgatcagagagagagagagagagagaaactgagctaccacggcaaaacttcgagaccctgttgtcaaagcttcgatagaagtgcagggagcttcgtcagcacacgttgtagcaagtggtgccctcatcgggcacgtctgatggtcggtgcaattgtaattcctcgtcggagcgtggtcaggtgtactagatccgtgcaacgccgtgggtagggtcttccatgctacaatccccggtgagaccctctaccctcgtttcaattttgcctaagcatcacg

SEQ ID NO: 58387 - DNA, 367 bp, Zea mays
  unsure (1)..(367): unsure at all n locations
tctanagggagatcatgtgttatgactaaccgatgtctgttttgagaaagacagaccttgtgcagcttgtcaggcagggaaacaggtgggaagcactcatcacaacaagaacgtgatgacaacatcaagaccactggagcttcttcacatggacctcttcagacccgttgcatacctcagcatcgggggaagtaagtatggtcttgtaattgttgatgatttttcctgcttcacttgggtattctttttgcaggataagtcagaaacccaagggaccctatagcgcttcttgaggagagctcacaatgaatttgagctaaaggttaacaagataaggagcgacaacgggtctgagctcaagaatcta

SEQ ID NO: 58388 - DNA, 475 bp, Zea mays
  unsure (1)..(475): unsure at all n locations
agcttttccgtctggtgctagcttcggcgttttactcttatcttctttggatctattntcatcttatgtgccttcatcataagaggcttatatcctgaagacaaagcttccttctgaaataacccatgtcacactaaaaacatatggttagtcgtgtttttgaggaccttcggaggaagaaggcccccaacagtagcccctcgcagtattaatttgtttctttgtaacaaatttaaacagcgacgtgaacgaaggcctttagctgaaggtccgaaaaaacaccttccctttgctagaatagcgaatgacactgacatgcaggacacaccaaaccgtgaggcgctaggcatataaataggagcttgcattgaaagaatttcttgtgccatttcaattgcttacactatgctcgtcattttaactttccttctttggccgagttaattgggatttaagcttcgacatttcaacgatc

SEQ ID NO: 58389 - DNA, 392 bp, Zea mays
tgcaacaacgcgatggacaatgcagtccgagttggttgcctcttgatgaaaaggcccggcgtcgtgtggcctgatgacatcgtggatgacggtgttgctgcgtctggtactttgagcaagccttcggcttctagaggtccgatgggctatatttctcctggagatggtcctgcatgatggtttggggaaacaaaaaattgaatactggttgattaagtacgagaggttgttattctctgagcagtttattttttgaatgtttgttgtgactagcagttgacgatgtgcaacatcaccttaagttgtgtccacttgagctatttgtctggtgatgggtttagaagcaccctctgctcatgtgatgagcatgtgatatgacttacgcgctctga

SEQ ID NO: 58390 - DNA, 386 bp, Zea mays
  unsure (1)..(386): unsure at all n locations
agcttaatgccccacctaaaagattgtctaatttttttaagggcaaggctcccatggttcaggataacgagggttacattttataccctgccggttattccgaacacaaaattaggagaattcactctaggaagtctcactctggtcctaatcatgcttttatgtataagagtgaggcatctagttctaggcaatcaacccatgccaaattgcctaagaagaaaacttctaaagcatcaaatgatcataatgtttctttcaaaacttttgatgcttcttatgtggtaactaacaaatccggcaaggtagttgccaagtatgttgggggcaaacacaaaggatcaaagacttgtgtntgggtacccaaagttattgtatctaatgtc

SEQ ID NO: 58391 - DNA, 434 bp, Zea mays
  unsure (1)..(434): unsure at all n locations
ctgtgtcacttatgttcgatctggctgcctcgccatgtgtataaggataaagaagagcatgccagatataacgacatcattaagggggaaaggaaaagatataacgacatcattaagggggaaaggaaaaaataagcatgtggtgtgaagaaattgtgtccactgtgtttgaggagtgtctatcgagctccaaatttagagaccaactgtggttaaatagtgtgttaaataaatttagaagtctatttacacttacacaattattggttgtttacttanatgtaanatttaagaattagagagttgttttgatactattaacgctagtttggaaaaactnttcgaattcccggagatcgagaagaaaactccgaagaagaattatattgcacactacccttaaagtactatatactctttttaagacaattaat

SEQ ID NO: 58392 - DNA, 465 bp, Zea mays
agcttctaagcaacaatctgtatctgaagctgtgtcttcagagcccaccaaggtaaaatccttggaagccgaagaaacaaaaatggcagagccaactctggttgaagaaactgacactgctgcccccgaagcatcctccaaagcccttgattatattgtacgacatgcttcgggaaaaagattatctgaagaagagatttttgaagctaatcattatgctcgagaattgaagtatccaaagggggccttagtattcaatggcacagacgaagatgacttcttatactgcctcccagacaacaaagaattatctgtctgccgggagatggccaggagtatggggttcccgaagcttgaagctggcctctgcgctatgacaaaggacgatcttgtagatagccttgcatataatagtctgaacgattgaaattgatatctggacattataatatttgaatattcttt

SEQ ID NO: 58393 - DNA, 419 bp, Zea mays
  unsure (1)..(419): unsure at all n locations
gaactatnaaactcaacttaacaaatgagaattgtgattcacgatatttatantatattcattttcgcacctttaagctattatacgccacgctgttggctacctggtctttagataataccgagagcccgttttctagtgttgggaatccaaagctcttgctcatctcccgacagacagaaatctccttgttgtccgggagacaatacaaaaagtcttcttctccactgccgctgaatatcaacgccccctttggatatttcagattttgagcgtacaatcgggcctctcgcttttcttgttctgtcaactttttccccgaagcatgacgtataatataatctaacgcttcngaagaagctttggnggcggtagtaccagcttcttcatccgaaagatggtctgttaattctgtttct

SEQ ID NO: 58394 - DNA, 333 bp, Zea mays
  unsure (1)..(333): unsure at all n locations
agctntacagacagtccgacccgaggacctccctattgagagcacctagagggggtgaataggtgatcctgtaaaatcaaacactaaattcccacaaacttgattataaagatattagtgcgagttaatcaagtctatgaggcgagctcttgcgaacacaaacaatctaagagagagcacacaagagacacgcgatttttatcccgtggttcggccaagtaatacttgcctacttccacgttgtggcatcccaatggacgagggttgcactcaacccctttcaagtgatccaatgatcaacttgaataccacgactttctttcttatagtctt

SEQ ID NO: 58395 - DNA, 419 bp, Zea mays
  unsure (1)..(419): unsure at all n locations
tgccttcgcctcagtgtaccacccacaatccaacggagtctggagcgcgctatggtaaattntacagccgtcaagaaaatgctcctcgatgacaaaaaaggcaaatgggtcgacctgttacctgaagcggtctgggcgctgaacacgactgagtgcanggcgactgggttcaccccttttcaccttctatatggatcggaggccatgaccctgcaagaaataaaacatgggtcaccacggacagtcacgacagccatcctcgacgtagacgagcctacttcgaaggacctcatcgacggagaccgcgtcttcgccctacaggctctaaacaaataccaagctcaaacaaaagcatggcgcgaccacacagtcatcccgagggaattcaacgaaggagacctcgtactcgtccggacagc

SEQ ID NO: 58396 - DNA, 403 bp, Zea mays
gtcacctgcggcatgcaagcttctgcaacatacacgaatggttatacgagatatatccctgcggtaaggagcaatatcacaataatttcggctgctgcagatgtgcctctccgtctgggtcaagctgtcctgtgccaacctttcggaagagatggcccggcgactggatgacagaatggtcttatgtgaagaatgacctgataacactggaagatattaaaggtataattatgtgccctatttggcaacgattcggcctacggaggccgaaggttgaaatgaatgaagctgccgaagaatgccagagagccttcggagttatttgctcttttattagaacgagggatctggtccaagagcatattgccttcagagtatggccgctcgcggaaaaatgggaaat

SEQ ID NO: 58397 - DNA, 473 bp, Zea mays
  unsure (1)..(473): unsure at all n locations
tctcctgtccggaataatctacggtattccggacagtcgatttattatatttgtagatgaaaccttggcacctgtagagcatataatctagagcaaaactagttagtccaattatttgtgttgggcaattcaaccaccaaaatcatttatgaaaatgtttgagcctatttccctttcagttgttccctcatgcgagctggtcgtancctgggtgcacggtcgggtcccaagttctcgggctggtatgttgacgctgtcaacggtttggccggagccgggtttgcgagagcagtcctcgagcctccgcacagggcgagaggacggtcaaggacagactcgacttttttacatacgcccctgcgtcgcctttccgcaaggaggaggaggggggggaaagcgccatgttgcccttcgagggcgccgaacatggtgtctccggtgagctgctgacgggtaatacgagtggacgctct

SEQ ID NO: 58398 - DNA, 490 bp, Zea mays
  unsure (1)..(490): unsure at all n locations
aagcacctgagcatgcagctattcaccacatgttggaaatatcttgttgtagtcgttcatggcgtctactcctcaatagtctttgtttcttattcctaagcaattatctttttgaccctacaacttgttgctcaatcaaaaattggcctttcttggggcagtaaaggtcagcacatgatgatattttaactaattgatcacttatgcaagaatgtagttcacatgagtttaaactagtaattactacctcatgagcaatatcgagcatgatatggtcatcaactaatttattatgagaataagatagcatatcatattntttcacttagagcaagtttttctaaatttatcatttctacttgactcttaagcatagaattcccgcgtttacgttgagcaacatcatataatacatcatgattatttcttttctcaaataaaacagattcataccggtggaccaaattatcatgagagcactttaactcct

SEQ ID NO: 58399 - DNA, 482 bp, Zea mays
  unsure (1)..(482): unsure at all n locations
tttcgcatcaggttccaagccttggcttctcacggcccacactaatatattcatccttatgattgctttcggggtaagttggtgaaagtagatttcacatatcttcagcacctctacaacaaagctgcttatgggaaatcgtagtccagctttcaagaagcttcggaatactacgacttcattttcctcaggagttggacaagtcttctctccttcgtcggccctcacaacggacaagtcccagacatatcttcccctcatgttgataagatgattgtctttaatacttgatttgccgaaaaccgcatggcttggtcgccaaggtcgatcttcggagtcttcaccaccactatccacatcatagctgtcgctgtcaccagtatcttcagataaaccttccanaatttctttagtaatcttctctgattagtcttcgacatagattgaagaanacccagatgcattttctcagaaagactcag

SEQ ID NO: 58400 - DNA, 456 bp, Zea mays
  unsure (1)..(456): unsure at all n locations
gctgtggccggagcgaaggtgagtcaccggagttctctcaatggtggaattactacggtagagtcctgtggtagtaactaaccatctcgcacgacactntgcgacgtggtaacatggtcaagaacgtggcggatccggggtaacggcgaccctcacgactacggtcgcgcggtcatgtcgcggggcaagtgggtacggcgaggctgactctatccactctccttcggatctttttacccccctgcgactatccactcgccacagagcacaaatcgtagcaccgacacggagatcactagcggcgagattcactgaatttggcgatcttggtcagatcactcttcatcactgaacaccactccgagctgcctgacagaccaagtntgggagcaatttaatccaatagttgtatagcaccaggcctagctcagtataacaaaattgttcaccaatatt

SEQ ID NO: 58401 - DNA, 456 bp, Zea mays
  unsure (1)..(456): unsure at all n locations
ctaagcttctcacgctngccccagtgatcggctaagcatgtctgaatggctctatggtaagtcgctccagcgtttttgaggccaaacggcatggaggtatagcagaaagctccaaacggngtgatgaatgtagttttttcctcgtcttctgttgctaggctaatctgatgatacccggagtagcaatccaagaaggacaacacagaacacccggcggtcgagtctaccacctggtctattctangaagtccgaagggatccttcggacagtgtttgttgagatccgtatagtcgacgcacatgcgccaattcactttattctttntgagtacaagaacaagaattgctaaccactcaggatgcagtacttctctaatgaatcctgncgtgactangcgagctagctcagcacggatggcttctctcttgtcgggcgtgaaacgacgcaacttttgt

SEQ ID NO: 58402 - DNA, 457 bp, Zea mays
  unsure (1)..(457): unsure at all n locations
atgcaagcttttatntacataacaaaacataaaagactgtttttctttacacaacgattcataaaaaaccacttcttcgaaacctttcttttacataacgaatcataacaaaccatttatccgaaacttttctctgtgccgaagcaaccatttaggaacacaaatgctatgaatgaatgcttatgcatgcaaatgccatgatgtaatgtgcaaatgaatgtccgaagcgtatgtccgaagccacactcatccatcattttcttaagagcaaacacacgtcagctctgcattcccttaggaacgactgtggagcatctatgccttttacttaggcagtatcagcgatgacttttcgctgtaagctctgcatccacctagggacgtggttggagcttcttcgtcttttacttagacggtataagctctgcattcccttatgaacgactntggagcttct

SEQ ID NO: 58403 - DNA, 330 bp, Zea mays
  unsure (1)..(330): unsure at all n locations
gcttagaagcactntcatttcttagaccctccgacatgatcttttcctcacgcggttaagcgttagaacaaggatangctccgataccaattgaaagttgcctagaggggggtgaatatgcaagttaaaactttttcaacaaaaactagaagcaaactgggtaaaactgaattgatctcganattcacccagttaacattggaaatgagatggtctaaatgatccacagagttcaaagtagtagatctgagaaagacacttctcanaatcacacaccanaaaatataacaaatctttatggattgtgagagacgatgacatgacaacaca

SEQ ID NO: 58404 - DNA, 465 bp, Zea mays
  unsure (1)..(465): unsure at all n locations
ctctctcttccccaccacgaaacacaacacgttagatgtggtctccgacgaacttcccggcacatccatacaaatcgcttactcctttcagtaccctctccngttttctgttgatccatagtgcgcatatgtacgctcatctgttgttacgtgctcaatcagatgctctgagtactggccaatccgtgaacaactgtcctgatttgggcacctagacttcaggaggaagaaactaaacatgcaagtccgatggtagcaagccaaaaaaaaaaggagcatgccatttatgacttcgttgcatgctttnttggtagtagatgtttggttggacactgcctcctccagtggttggaacaaacgttgctggtgactggtgaggtacatgtcctcggtactcgctcacctatggcctatgagcctctcctagttctcagaagaacaaacctattgatgcatttttccgat

SEQ ID NO: 58405 - DNA, 456 bp, Zea mays
  unsure (1)..(456): unsure at all n locations
agcttgtgatttatacaccgaggtctgtgaaaacggatagcgtcggngaagcaacagcacaacgaaatccgtgcgaggccgtgtgttgtttcgagtccgacgccgcgcttgatgaagaacaatctgcccacccaggcccacatgctagtggctcaaggcttcaaggcgtgcgcggtgactggcttacccgcggggccaacctgtcagtggtgcgacgcacgggaggaggatggagcangccgcgcgggatggacaacaagaatgggccacgcagtagtgggtggtttcggccgaaaaggttataaactnttcttttctttattcttttccatttcttttcaacttccaaatataaagattgaatctaaattttaaattcctagtttacatttcagatttccaaatattaaataccatcctaatatgaatattaatcccactaaatataatattatt

SEQ ID NO: 58406 - DNA, 458 bp, Zea mays
  unsure (1)..(458): unsure at all n locations
actcagctngcacatcttccttgagttcacgtatggtgccaggccaatgtcgcctatgctacacgatacaacacttctcgctaccatatcctctgccatctttacctgcaaattcaaacgagtttcaaatgggttggttactgttatagagctgcaatgtttgtgatctttcagtggttgtggcagctgtgagaagcgaattggtcaccttgattcttaacgcttctacatcggatttgaggattctgttgtctgtgacttcagtactgaactgttggttggcatctgacagttgttggaacagtgttgcgttttcacctttgagtcgttcaacctgataatgaggcaatatgtcattgcgcatcctacaaacttgcagtatacatcattggttggaagtcattcgtggccaggtgagtgagggtggtatggtacctgtgactcatggtcagataact

SEQ ID NO: 58407 - DNA, 474 bp, Zea mays
  unsure (1)..(474): unsure at all n locations
agcttgaagccatggtgagtagcatangcaatttttaatgcgaatagattctagcctagctacgggtgcataggtttcaccgaaatccaaaccttcgacttgtgagtatcccttggccataagtcgagctttgctccttgtcaccacaccatgctcatcttgcttgttgcggaagacccatttggttcctacaacattttggttaggacgtggaactaaatgccatacctcattccaagtgaagttgttgagctcctcttgcatcgccaccacccaatccgaatcttaaagtgcttcctctaccctgtgtggctcaatagaggaaacaaaagagtaatgttcacaaaaatgagcaacacgagatcgagtagttaccctcttttgaatatcgccgaggatggtgttcacggtgtgatcctcgtggattgcttggaggactcttgggtgtggcggccttggaactcgttcatcttc

SEQ ID NO: 58408 - DNA, 334 bp, Zea mays
aaagacagcgaacaaagagttcccagaataattgatgattggaagaaagctcaagctctccagaagagttatgcacacaaacagtgaatgcccttatatttacttgagggagactatgtctaccccaaggttttgccaataaaaggcgtatcgtgagacacgctaaaggaaagcttgcaccacgatatataggaccttttcttatactcgaaagatatggggcactgcgctaccgacttcaactacccgaaaacttgtctgctgcgcatgatgcggtccacctgtcacaattcgagaagtgtcttagggatcccgcacgaaccattgaagtgac

SEQ ID NO: 58409 - DNA, 399 bp, Zea mays
  unsure (1)..(399): unsure at all n locations
agcttaaacatgtttaagtctctgaggttcttcttttatttatttgggtaaataaaaaacaatacatctacattagttcatattcaatcctaaaaattagaatgtgcagacagtaagtaaaaccattttatttaaatagagaataattctataaaaattttgcaatttgaatcactaaatttggagttcatatgcaaaagttatgaaataaacaagtttgggaattcaaaatatgaaattaggtctaattctatgaatatttaaaagtccatggctaaatctgcaagattacaggggcctgcgcgcgaaaaccagggacgacgggttgatttccaataaactgagggtctctntaataaaaccaccgtgcgaaggggtatcaggtgaatctaatcgtca

SEQ ID NO: 58410 - DNA, 318 bp, Zea mays
actaagcttacatgtctcgatgattccatatcaacgaagctttaagtctcttataatgaagcttcttcatgcgattctcacttatatgacccaaatgacagtgccacatgtatgtaggacttaaatcattacgccgaggcctcttagcactaatattacagataggtgctgtcggggaccataattaagggtaccctcaaaacgcgtaattctcagctggtaacccccatcagcataaaattgcgaaggcctgatgggtgcgattaagtcacggatcagtccatacgagtgactcgatcacgcttcacccgagcctag

SEQ ID NO: 58411 - DNA, 317 bp, Zea mays
agcttgtggaggctcttcatcttcacatgttctaagcggcgatgccacagccagcccatgcaagtcttagccattatgcatgcttctataccggcctcttcttttgcaaaatcaactaggtaaatcttgtcgtctagtacacccttaaaagctagtgaaccatcacatcttctaaagacagacacatctacatttgtaaacaaacagttatatcccatattgcataattgactaacagatagcaaattatatccaagagactctactacaaacacattagagatagagtgctcatttgagattgcaattttacctaa

SEQ ID NO: 58412 - DNA, 451 bp, Zea mays
  unsure (1)..(451): unsure at all n locations
gcttctaagggagaacacgtgataggattaactaatgttctattctataaagatagaccttgtgcagcttgtcaggcaggctaacaagtgggaggagcacatcacagcaagaatgtgatgaccacatcaagacccctggagctgctacatatggacctcttcggacccgtcgcctatctaagcatatggggaagtaagtatggtttagttattgtggatgacttttctcgcttcacttgcgtatttntttgcaggataagtctgatacccaagggaccctcatacgctctctaaggagagctcataacgagtttgagctcaaggtgaagaagataacgagcgacaatggatctgagttcaagaaccttcaagtggaggagtttcttgaggaggaagggatcaagcatgagttctccgctccctacacaccacagcaaaatggtgtggtaga

SEQ ID NO: 58413 - DNA, 431 bp, Zea mays
agcttctgaagatgatagatgttatattctttggtgcaagaaatgaagtatacagactcccgagtgtctgtgttatcagagaagtgacatatccagaatggctagctaatactgtgatggtgaaaaaggtcaatagaaagaggagaatgtgtattgattttacagatctcaacaaagcgtgcccgaaggatgaattatctttgccaagaatagacttccttatagatgcgacagccacttcagatctcatgaacctgttggactgttattcaggctatcatcagatttggatgagaaaagaagatgaacccagtacaagcttcataacccctaatggaacttattgctatcttcagatgcctgaaggctctataactgctggaggaagcctcattagaatgacttccaatggtctctgcactcatatctgc

SEQ ID NO: 58414 - DNA, 319 bp, Zea mays
  unsure (1)..(319): unsure at all n locations
ctatgacttgtctaacatagncaagataaccgccgatcaagcgagcgacatagcttatctctggtcaaacttgacaagtcttagttttaagctcttagcacttaaattcttactttttatgcaattattggatcttgacatatgcatgaggtgctgcacttagggggagtattcaaaactcaaatcactcatgaaaacccctattgcaagccaaaatgcaacttcaccatttggctcatttctctaaaaatcatctagcctatggcaaaatattttgaatagtatatgatggtgccgatacctgtctcaacaaatgtta

SEQ ID NO: 58415 - DNA, 389 bp, Zea mays
  unsure (1)..(389): unsure at all n locations
agcttggtgttctgctccatgcgcctaggggttctttttatagccccaaggcagcaaggagccgttggagatncaattggaaggccattcttgccttctgtcgagtggtgcaccacacagtccagtgcaccaccggacaaccactgttcatgtccggtgcatgatttccttccatatcgggcgcaactgatcgttgctccttcggaccggttggcgcaccggacagtccggtgcacccagccgaccgttggagctgatcacgtgtcatgcgtngatcgcacggacgaccgttggtgaattatagccacgttgtcttttccttttcccgagagcgatgagttcatcacggatgactcatcggacagtccggtgcaccaccggacagtctg

SEQ ID NO: 58416 - DNA, 442 bp, Zea mays
  unsure (1)..(442): unsure at all n locations
tgctacatgccttcttctttttctccaaagcaggaactntactggaacactaccccacttaaaagaatgagggtagaactctngaatcttgnggatntgaactccttgaagtacctcataacaagggtgttacggngccttcttctgctgttgctgcttgagcaggctgcggagagatgactgacatagggttgattctgggagaactttcttctcatcttctcttcactatcttcttttcactgaccctttccttctatttgctcttcccactggaggattctatcaaagagtattaccatcatacagaggaggaaaccgaagatgttgaaccatgtacaacagtcttcaatccaagaatcaccaagcattgtgatctcaggggcgagggagtggaaaatggagttgcttgcgaattggcagaagggaatttatcgggagt

SEQ ID NO: 58417 - DNA, 447 bp, Zea mays
  unsure (1)..(447): unsure at all n locations
cttaagtcacctgcggcatgcaagcttcttgtagctgctgccaaaaatgagaggtgaactgcgttcctcgatctgacactatcttcttcggcacaccatgaaggcagactatccgtgacatgtataactcagccaacgttgctccggtgtatgttgtcttcacgggtatgaaatgggccacctttgttaagcggccaccacncacccaaatggaatattacccggcccgggtccaagggaggccaactataaaatccatcccgatctcatcccacttccactgaggaatccgcaatggctgaacaatccggcggcctctgagctctgtttggtctttgacgctatacagaggcgactatttgcatctcttttatgcctaccacaaacctctttaaatctgatcattttacttcagggatggagagtgctatacttcttagacactcc

SEQ ID NO: 58418 - DNA, 430 bp, Zea mays
  unsure (1)..(430): unsure at all n locations
tcagctgtgccagtccacttgaactaaccttcggagaaacccgccctcactgtttcatgacaccagagggtccaactcanaaagcaatgtatgaattcagaatagttgcagagcatatcagtacaagggacctggttcaggagtttttggctttccaggtttttcctagtgtaaaagagtgggaaatgccgaagctgaaaggggagaagaaagaaggtgaacttgtgcgtttaccttactacttcaagtttaagaaatactttaaaacaccttgccaagagtggctggatacgattgaagtgatgtgcaatgaaatacttggcaattattctaaaaaagaagatcagttgatgaccgcagccttcggcacccgtccgaagcgaagactaaaccgagtgctggacgccctgngtttcgaataccctgatta

SEQ ID NO: 58419 - DNA, 477 bp, Zea mays
  unsure (1)..(477): unsure at all n locations
agcttttgatcttattaaaaactatntgtcttctgctctagtattgaaagcaccaaagattgagaaaccttttaggttatatatcgctgccgaagataaagttattgtagttgttctgactcaggaggttaaaggaaaggagcatgttgtgacatacttgagtcggagattggtggatgttgaaacgaggtacacctttgttgagaaattgtgcttatacttgttttatgcatgcaccaaacttagatatcatctactgtctagttcttgcatcatttcttatcaaaccgatgtgattaaatacatgctgcataatccaatcatgagtggtaaaattggcaaatgggcttatgcacttatagaatatgacttagcatatgaaccattaaaatctatgaaaggctaggttatagttggttttatcgtagaacatcagattggtgatactcatgagctagacatgtcataccttactat

SEQ ID NO: 58420 - DNA, 443 bp, Zea mays
  unsure (1)..(443): unsure at all n locations
gcttctgctctttccttaatgggttaaatataaccataacgagagtattctttngtgaaggttatgaacgagtcgaacccatctactatcctaactggataaggaccatagatatctatatgaataatttctaacactctcgtactatgcttagcatttgtcttaatcttcttcgcatattcacccttaatgcaatctttgcattagtctaagtctatgaagtctaagggatggagaatctgttccttaatgagacactctattctccccctcgaaataggacccanatgatagtgccataatttcgacgaggtctctccatcacttcgttttctttttctgccactgctagctagatcattntctggtgtatctaagacattaacatcatcactgtgcaaaaataaataaagcatatctcgtcggatgacgagaccaacata

SEQ ID NO: 58421 - DNA, 484 bp, Zea mays
  unsure (1)..(484): unsure at all n locations
agtcacctgcggcatgcaagctntatcaaatggatgtgaagagtgcctttctaaatgtaccgatcaaggaagaggtctatgttgagcaacctcccggctttgaagatagtgagtaccctaaccatgtttacaaactctctaaggcgctttatgggctcaaacaagccccaagagcatggtatgaatgcctaagagattttcttatcactaatggcttcaaagtcggaaaggccgatcctactttatttactaaaactcttgacaatgatttgtttgtatgccaaatttatgttgatgatatcatatttgggtctactaacgaatctacatgtgaagagtttagtaggatcatgacacaaaaattcgagatgtctatgatgggggagttgaagtatttcttaggatttcaagtaaagcaactccaagagggcaccttcattagccaaacgaagtgtactcaagacattctaaacaagtttgggat

SEQ ID NO: 58422 - DNA, 461 bp, Zea mays
  unsure (1)..(461): unsure at all n locations
ttcacccccttggcgatcttttcaccctccccgtcgatatttttacgctccagcacgcacacatctcaaccattgcatggatcacggtgcatgatcatcgacggtcaagtgttctgaatccctgatctttttcagtcactgtacccagccacggccatttcacggtgcctgacagagcgactttatggcccttttctccaatttctatgtgatgagccactaatccgactacatcaaaggtattctcctataaacctgcttcaacattgtcataaggatcttgagtagttactcactagatcaagcacaatttggctccaaagttgatcaaataccactaaccgtccaatttcataattctgcttgactgacaagccaactttcannggcgtttactccanattctacaccattcatgggctaagtaacttaatctaattnntacttctatagtatctcta

SEQ ID NO: 58423 - DNA, 444 bp, Zea mays
  unsure (1)..(444): unsure at all n locations
agctngggtgggctcttcnggtcagatggctattggtgcaaatgacggagccccctagaccttggtctgaatntcaagttcagatttgtgatattgtcaaaaaacttgtttcagtggctgtgatttcgcaagtgggcaaacacaatgatactcttttttgggctgacaattggttacatggaaggagtgtaaaaggctaaaagctcttgctccgattgtttttgctttagtctccaagcgtattgctatcaagaggctggttagtgatcatatgtgggtcagtgacattcgaggtgcccttacggccagagttatttgggagttcgtggagctgtttcagatagttgatgatgttattctccaacctgagattcctgacgctcatatntggagtctttcccttctggacagntctccactaaatctgcctatgatgctttatgc

SEQ ID NO: 58424 - DNA, 415 bp, Zea mays
  unsure (1)..(415): unsure at all n locations
gaatactactctgttccaatgttcagatatgcatataaaagattgatagagccactgcctgacaagtcacaatggcccacagtagaaattccatttgatatgggtgcaccaatttgcaaaagaactgttggcagacagaaatttgaggttcaaaagttcccttcaaggcggcaacagttcagagacaaaacatgatgaaggtggcatcagttcaaaggcaaaaccaactgaacaagaaaagcccaaaacgatggtaagaggaaaacgtatgtgcaaaagatgcggtacattgtgtcacacaaaagttagttacaaatgccaactcaatggtacaaagaanacgaagagaaagcctangaatagtaaatcaggtggtaaaagtcagatggcaagaccatatagccaataacaacta

SEQ ID NO: 58425 - DNA, 421 bp, Zea mays
  unsure (1)..(421): unsure at all n locations
acctgagctgcaacttgggaactatcccgatcctttctttcttagccggaactataaacgcttgccagatgcccccgtttcgggcgaccacgaccatcacccaacataagacttccctagttatttatccaagggcgtcccataccaccctcatggtagcactantttcctgggtggttactccatgttccaattaatatgcaataatcttgtttaaccatcagattaacatcataataccaatttcaattccggaacattaatatcataaacaggagtgacataacaattattaagttaagcggtagcatcaattggcaaagcatattattcacccagggtaatcaaggattacagttggaaatctaggaatcataattaggtaaacccataaatatgggtattccaaaagtaacatttt

SEQ ID NO: 58426 - DNA, 404 bp, Zea mays
  unsure (1)..(404): unsure at all n locations
ctaccaaatggacgtgaaaagtgtcttcctcaatggacctatctatgaagaggtctattgtcacacccgggtttttgggcaccatgacccgggcgtgaacataatcaccaggcgtgctaggaccaagtcttacacatatgatgaatagtggtacaaaaacgaatgtcacatctttactatataatatgagttctgtacaaaataaataattaattacatcatacggagacaatgatccagcaacctaagttgactgggagacgatagcctagacctctcatgaactcgtcacaacatcctccatgcgcctcatcctacggtacctattcttgacctatggngggtgtgagaaagcaagggtgagctcacatacgttcatcgctcaacaagttgcggggaataat

SEQ ID NO: 58427 - DNA, 383 bp, Zea mays
  unsure (1)..(383): unsure at all n locations
agcttaacatgatatgtatctntgttgttggttattcattcatgttaattcaacgcctaaatattcatttgtagttatcagattttaatgtttaattgtttaaaaaaaatcagatgacattagactctaacgttgcctatactaaagttgtatctcttaacacagtatacaactttcaagactgaaaaaaatattcgagatcatctaaattctttgctatttgtaaaactcgttctttggtgcctacttgcaggtttattacctcgaccgtcagtgaaaataaatcttcactcattgggtttcttagcctaaccatcagtgaaatggatttgcactccggttctcagtaaccgcgctgtacaaataattatttctactgacct

SEQ ID NO: 58428 - DNA, 448 bp, Zea mays
  unsure (1)..(448): unsure at all n locations
tgagaaagatntggatacagttcagaggctngaaacttccttctaaggattctctgtcaagaatatcccacgaggaagaaatgagcacgctgatctgctagccaagtcagcggcataggggctgccttaattaccttcggatgtattctttgaaacaataaaagcaccttcggtggaacttcttgaaagagcagtgctcaatatatctcttgtttatagcgaagattggagaaccgagatcatgtctcttctccggggcaatttcctttcagatgacgaagcttataataagagaatagaggcaagggcccgaccatatgtgataatagaaggggagatatataaatgtggaggttgctctgcattgctcaaatgtttatccagagctgaacgtatataattgatgaaggaaatacacgcaggcctatgtggttctcacatcggatct

SEQ ID NO: 58429 - DNA, 474 bp, Zea mays
agcttgtgaagattcttcattccaacatgggttattctgcgatgccagagccagcccatattagtcttagcaattaagcaagtgtctagttcagcattgctatcattaaaatcaactaaatatagctgaccatctaacactcctttaaatgctattgaatcatcacttcttctaaagacagtaacaccaacatcagtaaagagatagttctagcccattttgcataattgagaaactgaaagcaagttgtagtctaaagaatctacaagaaaaacattataaatggaatggtcaggggatatagcaattctacccaaacctttgaccaaaccttgattatcatcctcgaaagtgatagctctttgcggatcttcatttttctcatatgaggagaacatccttttctccatgtcatgtggtctgtgcacccgctatcgattatccaacttaatccatcggatgcataaacctaca

SEQ ID NO: 58430 - DNA, 480 bp, Zea mays
accataaaactcagcctgcagccggcaagaaggaaacaatcaatatgagatatgtttatcaccactctctaactgagatggaaaagaggaagctcttaagggaaggctcatagtaagcatcaaggtgaaaatatagatattacaacggttaaaggcgataatatgcacgagtgcaagagaagagataaaggttcaggagaaccaacggcatgagtactatatagaatagagctaagacaagacttgcacgtggcaaagatgaggttatgaccataggcgagagaagtaaaacaccactctcgaactgagacgagagattggagattttagataacaaacataatgtaatcaccaaggtaaaatcgagggatgagaaatataaatgaaatatcacacacaagcacaattaagaatggagttaataacttgcaagtgacgaataaaggggtacgaccaacggataatgggtaaaatacaact

SEQ ID NO: 58431 - DNA, 466 bp, Zea mays
  unsure (1)..(466): unsure at all n locations
agcttcggatcgtctgctaagcttctgctcattgctcttcggcttcgtcttcctgtacatatcanagcattataaggtaaattcaagttttaaggaaaaggtaagcacaaggtatgagtttattaccggtttaaggtgacttcgagcttcgtcaccagccaagttacgcccgccctttgcctagatttgagtaacgaatctatttccaatgcttcgggccaggccggggatgtcatccaaatctgctggtgacaggctgaagtttggtctatttacaacatttccatgtgtacagccagccttcatgaaagcgacagttgtgcctcaagaacctatcatggcacaaaagtcaccatgtccagctataacttcgtcgagagcatcaacttcaccttcaatatgatcaaatgtgcccagcaggtcttcaaccgaaggtgtaaacttttcggagctggctccaactaaa

SEQ ID NO: 58432 - DNA, 371 bp, Zea mays
  unsure (1)..(371): unsure at all n locations
cacaacaaatcaccaagtctataaacatacctttctccttgatttgcacttttcactttatttggcacattagaacttaattaaatgtgttgggcacttaatcaccaaaacattataaaaattgcccaagggcacatttccctttcaccttttactaagtagctataaaaatgacgcatgcatgctcgtcctaagcgacctcacctcaagcatatatggatagagaaaatctccatccatatcatagcagcctgtagggcatattcaattagccacctagctacccatctaatatcctaaggcctcacgtgctaggtctattcttatcgtcntaccgatctatccagacactggttctaacaaagtttaac

SEQ ID NO: 58433 - DNA, 467 bp, Zea mays
  unsure (1)..(467): unsure at all n locations
agcttcttcccatctcccagcagacagaaatttctctgctgtctgggagacaatacaagaagtcttcttctccactgtcgatgaatatcaacgccccttttggatattttaatttctgggcataatgatgagcttctcgcttttcctcttcagataaccttttgcccgaagcatgttgcataatgtaatcagattccctggaagatgcttcgggagctgaagagagagtttttcaggcaaaatttgctttatagcctcttttctcgtttcttctccggtttccaaggatttctccttggcgggctctgaaggcccagccttggcttcggtctggttctttgcagcttcgtcttcagatggttttgcctcaattcgcgttataatttgcgtctttggagcttcngcaggtttcttcggagtggtacttgaagactntattgtctccagtacatctagaacattaacca

SEQ ID NO: 58434 - DNA, 468 bp, Zea mays
  unsure (1)..(468): unsure at all n locations
taggcccctngtccttgtccatttgattctatggtcctgtcattgttatcacanaacagagacaaaaatgcaacaaacaatgtgaaccctacaactatctcttatggtggtggtggaggtggtggaatacaaattatgaagcgtcttaccccgctcttacaatgttcttaccagcactacaggtggcaaacggtgaccggtgtgactgtccaacgagcgtgggtgtgattgcaaaggagtacctgttctgctcgagagaaagctggagttctgggaaggctgactaaatatatatatgtggcacacaagtcagtaacagatagcaatgctgaataagtgttccaagtactcgtcctagttggtggcctagaaaatgtaatagaacagttggacaaagcacaagataggaggtacaagtatctagtagaaatggcagttctgtaaatagagcagaattttcagcactat

SEQ ID NO: 58435 - DNA, 204 bp, Zea mays
  unsure (1)..(204): unsure at all n locations
agcctggagtaagcatggtccctgtggggctatcatatcggagaccttatgacagccganttgatcactacccatacccacagggaaccaggatacccgaattcgcaaaattttcgggtgatcaaggaaagaacatgcgcgaacacataggccagtttttagcacaattgggagaatcggccgacacagaggcatttcgcgtac

SEQ ID NO: 58436 - DNA, 463 bp, Zea mays
  unsure (1)..(463): unsure at all n locations
ctcaagctcgcatctgaagggaattaccctgaaaatagacatgatctcagttctccaatcttcgctataaacatgagatatattgagcactgctctttcaagaaggtcaaccgaaggtgcttttattgtttcaaagaatacttccaaaggtaatggcagcctctgtgccgctgtcttggctagtagatcagcgtgttcattttctcctcgtggaatattcttgacagaaaacccttcgaaggaagcttcaagtcttcgaactatatccaaatatttctcaagctttggatctcttgctttgcaacttttgtcaacatggccagaaataacttgggaatcagttntgagaaccgcccttcttatccccattgccttcaactntcaaagacccaaaagcaaagcttcgtattcagcaatattatttgtgcaactgaaatcaagtttcactgcgtagcatgttcta

SEQ ID NO: 58437 - DNA, 470 bp, Zea mays
  unsure (1)..(470): unsure at all n locations
agcttaaagccatggtaagtagcatatgctatctaaatgcgaactgattccagcctagctacgggtgcataggtttcaccgaaatccaaaccttcgacttgcgaataccccttggccactagtcgagctttgttccttgtcaccacgccatgctcgtcttgcttgttgcggaagacccacttggttcctacaacattntgattagggcgtggaactaaacgccatacctcattcctagtgaaattgttgagctcctcttgcatcgccaccacccaatccgaatcttgaagtgcttcctctaccctgtgtggctcaatagaggaaacaaaagagtaatgttcacaaaaatgagcaacacgagatcgagtagttacccccttttgaatgtcgccgaggatggtgttcacggggtgatctcgttggatcgcttggtggattcttgtgtgtggcggttttggaacttgttcatc

SEQ ID NO: 58438 - DNA, 397 bp, Zea mays
ataaaaactcagcttttggaaaacatgccaagcgcggaccgttctgtgccttgtgtctgaccgtccgcgacacaaggatgaccctcggatcgaatcaatgcaaaaatccgagtctgcactatggacccgtcggaggatgagccccgaccgtctgggacctctgtcggaccgtcccgcctcaggcgcggacagttcggtaggcaaggatccgaacaacccgaaggtgacgggttcagagaaatgaattatagcggcctcgcggaccgctcgggccacgcgggcggaccgtccgcgactggctctatctgacatctgacgacgcattatatgcaatatagcccgctgatatagccgctactgctgaccgctgcattttcagcccgtgatctacaggggc

SEQ ID NO: 58439 - DNA, 426 bp, Zea mays
  unsure (1)..(426): unsure at all n locations
actaagctctaagggaacacggatangctactaactacttttaatataaagaccttgtgcagctcatcaagcagggaaacaggtgggaagctctcatcatgccaaaaatgtgatgacaacatcaagacccctggagttacttcatatggacctcttcggacccgtcgcctatctaagcataggaggaagtaagtatggtcttgttatagttgatgatttttcccgcttcacttgcgtattctttttgcaggataaatctgaaacccaagggaccctggcgcttcctaaggagagctcacaacgagtttgagctcaaggtgaagaagataaagagcgacaatgggtctgaattcaagaaccttcaagtggaggagtatcttgaggaggaaggaatcaagcacgaagttctcgctcctaccaccacag

SEQ ID NO: 58440 - DNA, 458 bp, Zea mays
  unsure (1)..(458): unsure at all n locations
ctagctgacaacacgagtttgatacaagttcacatccatgtgattatttcacaggagactagaacagaaatatgtatcattggtatcaatgacgacaatgaactatagacacccacagcaagtagatggttgtaagctcatcagttttcaatatattatggtacagtacaaacaagatgctgttcttatcctatattcaagaacatccccgcacattcacaattagggaaaaatcatataatcaaacttcaagagttattcagtttatgtgcactgtctaagattcatgttgtcaattgacaagcattaaacatcacatccaggataagaacatatcactgatacaataggaagtttgtgaaatgaagaggcagaggctgttaaatttcaaccgataataatgcatgctccagaggaggacaatgtcatctgatataacanactgcaagtcatgatgg

SEQ ID NO: 58441 - DNA, 401 bp, Zea mays
cagagatggtgatagtatcgtgtaccctccgtggcaagaggctggaccgtggtgtatctgtgctctccgttggcgtgaaccagatctggtcttatgaaccccggtggcgagttgacatatgcgagggttaactgctacatatgctacgcgaatggagatcctcagctgagtataatcgattccgatcgccgtaactacgcggatatgaagacttggtcactgacctatacgtataaatccagtaaagatgactggtcgctaagatattggctagtgcacgtcaagagattgaactaaggtagagagaactctatattagaggtaatcctacttaacctgacgattaacatcggagttcagcgatccccttactaagcattttcgcaacagaccattgatat

SEQ ID NO: 58442 - DNA, 399 bp, Zea mays
  unsure (1)..(399): unsure at all n locations
cttcttttacnacaagctggacatcgtacattcttaatctattcccaagttggaaccctaatctcctaaccccncttatttctagttttccctaacctccaccctttaggtcatctcatcatatgcatacaccttgattgttatgagcacctcacatagatntttttttcaacacttaagattatttagcaaattgttgattcaaaagaaaaggaaataaaaagtaacaaaaatagaaaatggaaatgtgaaatagaaaacagacaaagaataaggaaaaacccttcctcctcggctgggccgtattcggcccaaaccgcgcccacgcccgctttcctcctcttctaccacgggccaagcgagccatctgcgcgcgcccgtgccgcgcctgacagaccg

SEQ ID NO: 58443 - DNA, 433 bp, Zea mays
agcttctaaagggagaacacgcgatagcgttaactaatctttatttcgaaaaagatagaccttgtgcagcttgtcaagcacgtaaacaagagggaggagagcatcacaacaagaatgtgatgaccacatcaagacccctggagctgctacatatggacctcttcggacccgtcgcctatctaagcataggaggaagaaagtatggtctagatattgctgatgacttttcccgcttcactagggcgatctttttgcaggataagtctgatacccaagggaccctcaagcgctccctaaagagagctcaaaatgagtttgagctcaaggtgaagaagaaagacgcgacaacgggtcccagtccacgaaccttcaagtggaggagcacctagaggaagaagggatacatcacgagtgttccgcatcctacacacca

SEQ ID NO: 58444 - DNA, 465 bp, Zea mays
  unsure (1)..(465): unsure at all n locations
tagcacgatgactgtcaaggcccttagcactcagcatggcntgaattgtctaacatatgtggatgacatcatagtgaaaagtaccaatcaagaacatcacatcgctgatttacaagacacattagccaattttataaaggtcggtctcaagctcaatccagagaaatgtgtcttcggggtgaagaaggggaaatttcttgggtgtcttgtgtcaacaaaaggaattgaagctaacaaaaacaagatagaagctatacttcggatggagccaccatagtcaaaacagttgcccacagatcgactggaagggtggcatcattgaatacatttatttcacgatcagtagagaggaacttgccattcttcgaagtgctgaagtcagccaaagtctttcaatggggaacaactcagcataaggctttcgaagagctgaagcaataatctattatacctgacacacattga

SEQ ID NO: 58445 - DNA, 447 bp, Zea mays
  unsure (1)..(447): unsure at all n locations
tataacaccactatgccatcgaagctcagccatttgtatatttttatgtcgactgtgtctgaagctgatatggccataatgacgaagctaggctacttcagagaagccgagaaggggttgattcgctttggcggtgaagagactatcccgaaaccagaaaatgatgaagtggtagttnttaagagcttcttcaaagcagggttgagatttcctctgcacgggatgattgcagaagttttggaaaattttgagttttatcttcatcagctgacccctaacgccattgttaggctcagcgtgtatatctgggctctccgaagtcaaggggtggagctgctcgccgaagccttctgccgagtacatgaacttcactatcagacgaaggctagagaagacggactacatgagaactttggctcgatataatttgcttatctcaaagatatg

SEQ ID NO: 58446 - DNA, 281 bp, Zea mays
  unsure (1)..(281): unsure at all n locations
tcctaaccatggttataaactctcttaggcgctttatgggcttaagcaagccccacgagcatggtatgaatgcccaagaaattttcttatcactaatggtttcaatgtctgaaaggccgaacctacatttatcactaaaactcttgagaattacttgttcgtatgccaaattatggtggaggattttattntggggttactaccgagtctcgtggaaaattttataggatcctgacacaaaattctaatgttatatgggtgagtgaattttctaggattaa

SEQ ID NO: 58447 - DNA, 424 bp, Zea mays
  unsure (1)..(424): unsure at all n locations
cttagccatctcccggcatacaaatatctcnttggtgtccagtagacagtacaagaaatcatcttcgtctgtgccattaaacaccaaggccccctccgaatatttcagtttccgggcgtaatgtttggcttctaagatttcttcttcggataatcttttccctgaagcatgtcgaataatgtaattagtatcttcggacggagctttgggagcaggagctttagtttttctatcacgacttgcctcgctgtcatactggtattcggagtttgttgctcagccttatcctcaggcgcagcaggcttcgtctcaatgggcactgaatgcccagcttcggcttcggcctgngctttgacagctttggcaactttcttcgtangaaaggggtcaaggcttttgtggtctccatgacagcgtctagcac

SEQ ID NO: 58448 - DNA, 469 bp, Zea mays
  unsure (1)..(469): unsure at all n locations
agcttgccacatatgatttgaagaactaaatgtatagctcaccacaacaccaggtttggtaatgccagatattcacaaaggattagatctatactgtgatgcatcgcatctatgtcttacatgtgtgttaatgaaggaaggcaaggtaatatcttatgcctcaaggaagttgcgaatgcatgaaaagaatcaccccacacatgatttggaattaactactctagtacatgctttgaagattaggaggcactatatgataggaaataagtgcaaaatcttcaccgatcacaaaagttngaaatacatattcacacacaaagaactcatcctaatacaacgaagatggcttgagttaataaaagattatgaattggatatgcaatatcacccgagaaaagcaaatgtcgtggcagacgcttctagtcgtcaaggtcaagtatacattattactacctatttgatgccacaa

SEQ ID NO: 58449 - DNA, 336 bp, Zea mays
acacctatccttctgtttatatattgatgcctgtcagaatgtgaatcgccaggatttttacaccaagtgaacagctgctagcaccccgctgcacgtgggaccgctacccgctcggaaactaaatcgtttctcgacaacgagcttatggaaggtgtttttcggacactcggtttcccgaagtctacaagactcttttcacggatcaagctcgttacgaataacgatctagcaccgcgaaggggctactgttgtgaccatgcttcgtcgcacaaggctctgcctgaggatacagcattcgctcaagttgcttatacatgatgaccgaagctaccactc

SEQ ID NO: 58450 - DNA, 439 bp, Zea mays
agctttgtgccggggaggacggtcttatattgtcttgaatggtcgagccggccggcatgcgtgccaagagggggtggcgggcaggaagatccctttaaccgatgatctttattgagcggtcacgaataaatccctgagtcactacgccgaggatctggtgatcgacggcacctgttcaccgtggcgtataatgcctcaggacgttgactatgatccagaggctggtaggcaccaccacgttaatgaattctcaatctaatccgcaccgctcgaacgtgatccaacggcttggatccgaagataccccttcggtcgctagatctacagaagagcccttcagtattagaaaactacccgcggccacagagagcgtactgagctaaatatctgtacacagccctgttgtataatatggggccagccaagattgtaaatgaat

SEQ ID NO: 58451 - DNA, 328 bp, Zea mays
  unsure (1)..(328): unsure at all n locations
ttatgacaccagaaggtgcaacccacacggcgttggccgaattcacaattattgcagagcacactggcactatggatttggtgcaggaattnttggctttcaaagtatttcgcactatgaacgaatggtctatgccgaagcttataggagagataaaagagggggagcttgttcgactaccctatcattataaattcaagatatattttaatgcaccctgccaagaatggctctaaacaatctaaataatgagtactgaaattcttggaaattactcctaaaaagaggaccaattgatgacagcaaccttcggcacccggtcgaaacg

SEQ ID NO: 58452 - DNA, 476 bp, Zea mays
  unsure (1)..(476): unsure at all n locations
agcttatctcctccaagggtgtccttattctttattttcaataatagaaagccatgcaagcacagcccagatgccatctttctcacgaatgtggtcagaccctagccaaagtagtacatataaacatctcaataatgtatataccaaataccaacaagtccttgattttactatggggtggattcatgaccaccaactcaataaaagggcgagagagctcactgtcagaacacaagaagtgatttgccccattcatataccacatgataacacaatttacccatctaacatgacaatacaagaggtggtgacatgtttactatgtgattggcatgtatagaaatgatagccagaagccaaatattaccagtgccaaagctttcttcaccacagaatgagcacattccagcatccatcaaattcccaaataaattccacccagtaggcacctgaaacatgtttntatgtagatttat

SEQ ID NO: 58453 - DNA, 444 bp, Zea mays
taataaacaatctggaccctcttcatcacgctacagtcagtttagtcatagctcccatcaggcacctttcgttgctagcaaccagccgccagcaaacgcctgttggcactgcggtgaccccagtcatttcaaaaacaactgcccccagttgaaggcaccaggaccaacctactccaactcggtgaatggccccaagattccatcagcaccaacctctaaggcgctcccttccaacagccagcagagcatgactcataccacggcagggctcgggtcaaccacgtcgacgcgcatgaagcccagcaagccccgggagtagtgctcggtgatgtcctcgttgaatttaccccacgcttctgtgcttcttgattcacgagcatcccattcattatagccgctattttgtggagagcatggataccctttaacctttactattctttg

SEQ ID NO: 58454 - DNA, 438 bp, Zea mays
tgcttctaaagggagaacatgtgatatgtctaaccaatgttcatttcgaaaaagatagaccttgtgcagcttgtcaagcagggaaacaggtgggaggagcgcatcacagcaagaatgtgatgaccacttcaagacccctggagctgctgcatatggacctcttcggacccgtcgcctatctaagcatagggggaaagaagtatggtctagctattggtgatgacttttcccgcttcacttgggtgttctttttgcaggataagtctgaaacccaagggaccctcaagcgcttcctcaggagggctcaaaatgagtttgagctcaaagtgaataagataaggagcgacaacgggtccgagttcaagaaccttcaagtggaggagttccttgaagaagaagggatcaagcacgagttctccgctccctacacaccacagc

SEQ ID NO: 58455 - DNA, 493 bp, Zea mays
  unsure (1)..(493): unsure at all n locations
ctaattggtgtgcgatgtgttcatggtgcatggtgttcantttctagcatgtttctagctagctacatatgcatgctggtgaattgttcatctattctagacagnttgcagacagtggatacttgttactcaatgattatacgggcacgtattgttgtgtgttttgtgggtgtatgcatagtagtagcacaatgcattggtctactgcatataatctatctatcatggtgcattcagttgcacttgcacctatatatcatttggaaataaatgaataaagaatgtagtcatgtccatcgcgcagcgcaccattgtatataggattcacacccatgcatggcatataacatatgtattctctcttgtacncacaaatatattaacactcattccaagcactgaacataagaaaccatatatacctatcgatttatattangagaagggacaacaggcanggtacgaggcanacaatggaacacatgcatgcatg

SEQ ID NO: 58456 - DNA, 467 bp, Zea mays
  unsure (1)..(467): unsure at all n locations
agcttcatctatctgcctctgaaggtcagctagacgagccatcttctccttctttcgttgcacctgttgatggaacatctccaggttttggatttcctggtccaagtcgtcctccggaggcgttggactggtggccttcctcttctggcttcgagcctccctaagagaaaggacgtcttgattggggtccagcggctgcagagtggcagcccctgtcgctgaagctnttatcggcggcatgacgaaggtgatgcttgccgaaggtgttcaaagctcaagaaatggaagtgagttcaccggaggtgggcgccaatgttggagactcgttctcagatgctatgaattaagaacaaggcaacataaaatgttaaatatcaaagcccttcgtccttcggaacattatttcccttctgatataatgaatntcngacgaaggttgtgaaggacataccttcacaatcataata

SEQ ID NO: 58457 - DNA, 382 bp, Zea mays
  unsure (1)..(382): unsure at all n locations
atgtcttgacgtctcccactatagagcatgcttctagcaaatttaaacttttcactttctaagtcatgctcattgattatagcagttaatgtagctatatgagtattttgttgtttgattaaagcaaggtgatcatgaatagcatctacattaacatctctacatctagtgcaaatagaaacatactccaaggtagatatagagggtttgcaatcttttatttcaacaatcttagcatgtaanatgaacatttcatctctaagattggaatagcatcattgcaaacatttaaattcttagccttagcaactaggttttcattttcattttaaggctagaaagggatacattcaatntatcaattttaacaattgaactatca

SEQ ID NO: 58458 - DNA, 435 bp, Zea mays
  unsure (1)..(435): unsure at all n locations
agcttcggcatggcccactctttcatagntggtaacatctttaaagacaaanattcctgcactaagtccctagtgccgatgtgctctgcgataatcctgaattcagccagtgcaatttgggtaggaccctctggtgtcatattacacggaggtctggtctctccgaagatcagctctagcggactctggaccagcttctccttatcatcgtcaactttgacgtanaaccattccgatttccaatcagccggccacttgcttcggtaactgatcacgggaaattntgtaatccttcggtatgcaaaaattgaaacagccgaagttttcatgcaacccatctcttttgcatttggttggtaatgcaactcgtgcacttgcagaaacctcngcanatggttcaccccttgcttcgagagcccaatgtaacgctaacct

SEQ ID NO: 58459 - DNA, 176 bp, Zea mays
cccatcctgcccagaggcgggtatgggctctatttcttttgaatcaccttttctccaaggtcccttattgatggaacctacaatcttgactacctcatccctattctctgtttgggacttatatggagaatggcatccgcggaatgcctgaatcgggtcgtcagcaccgctgcgtc

SEQ ID NO: 58460 - DNA, 160 bp, Zea mays
ccttgtcatgctatgctccggaggatgtccacaccgatgcctagcacattattggtttcttgcacgcttggttgaccctcttctataccaactgatgaatcacactcttctgaccttctagcacctgattgacagaactatcatgacagacaggaatcgt

SEQ ID NO: 58461 - DNA, 281 bp, Zea mays
actaaatctggctttctggggcgacacaccgaagagcactacatattttcaggcaggaataaacaacagatactcgcgcgcgcagtattgacaatgtaagctattgacaaagtaacgaacacatatggaagctgcgatgtacggtcaacacgagcggacaacataaatagaactcgcgcctcataaagctgggtggcaaactcacaatctacaatatcggtaagatgacacaaggccccgaatacactgcataactacatgatgcgtccttcaccaacaaa

SEQ ID NO: 58462 - DNA, 383 bp, Zea mays
tgcagctgcaagctctctatcatactgagcagatgtgccacttctctcctctttgcgagaatgtgatacagaccaacatagcgaggctctatctagcctttgactaccaaccttctgactcctctgaacggtgacacttctagatagacaaaatctacatctttgataactatccttttatttcttgtgtctgcatagctacgctgccttgattgcgctatctacagattctcccggaccatcttgatgttctgttcggattcaagcatattgtctggcccgaacattagctattcttcaggctaatcccactgcaacgaagttctacaactcctaccatatagcgcctgatatggtgacatcttctagttggtctggtaact

SEQ ID NO: 58463 - DNA, 387 bp, Zea mays
gaagtccaaaatacctcagagcttttgtttctctgacacgccttcagaataaatgcctggagttcagcaatcgatgcgttcaacagctgaagtatgtgctctattttgttggagccagcagcgagaagttcactccttcggctgaagacctgcctggtgccttcgagcatattgaaggtgaaattaatgatcttgacgaagtcatagcttggcatggcgacttctgtgccctggttgcttctcggggtacagctggtgcttttttgaagtccggctgtgaacacggaaaagttgtcaatagacccaacttcagcttgtcaccagcagacttagacaacattcccaacctggcccgaagtattgcgaatagatatataaaattagtat

SEQ ID NO: 58464 - DNA, 350 bp, Zea mays
  unsure (1)..(350): unsure at all n locations
gagagcacatggtaggatttacgatgattattatgagaaagacaggatttgttacgcttgccacgcatggaatcaaatgcgtactcaccatccacacaagatcattatgacaactgacatgcctcactgagctactacacgtggacctattcngtccgattgcttacataagcatccgcgggagcaaatactgtctagatattgaggatgattattctctcttcacttgggtgttctttttgcaggaaaactctcacaccccacaaaccttataaggattcttgagacgggctcaaaatgagttcggcttgacgatcaatgacaatagaagcgaccacgggacgaagttc

SEQ ID NO: 58465 - DNA, 501 bp, Zea mays
  unsure (1)..(501): unsure at all n locations
agcttctcaattctacacataataaaacatatatgtctcgagtccttctattacattggatcacatatatggattgtgtaagtgttggccactacctttataagcgaggaggttgtttacgaagtcttctggtttgaagtatagaaaaaggaataatacattagcaactccaatgttaagtacaccacatttcaaatgactcaaatcgcaaatttcaatttgggcaatccttggatgatgccaagtgagctcagtcgatacacagattccagctcaggtgacctaacctcctatgctacttccaaatcaaagaggaagattctaccacatgacatcgattagggctagatgaatgtgtaaaatatctcgaaatactaaccaaatggggagacgcgacagacgcttnttatagcgtacttcatagtcatcctcaagaagttgcgaattagaaagcacatttaattgcagttggaaccaaagcacatcttgatgataactatc

SEQ ID NO: 58466 - DNA, 345 bp, Zea mays
  unsure (1)..(345): unsure at all n locations
nagcttgaagccatggtatgtagcatatgcatttaatatacgaattgactcaagcctagctatgggtgcataagactcatnaaatccaaccttcgactgtgagaacccttggcacaagtatgctttgttcttataccaaacatgcgaacttccttgtggggaaacccattgggacccacaaaatttgattaagaggggaaacccaagcctacctcattcctgtgaagttgtgagctcttctgcattgcagccccaacccaatccttagtgcatctcaccctgaaggctaaagagaaaccaagataatgtcacaaaatggcgactcagacgagactaccccttatg

SEQ ID NO: 58467 - DNA, 441 bp, Zea mays
  unsure (1)..(441): unsure at all n locations
cggagctgaggcgcacgcaggtgtcgctcatcactgtaattatttcnctatacagtggttggagtgacgacatggctctgctacatgtggtgtgaatcatcgccttgcatatctgcgatatggagttatatctctatggccttctgctcctcatctagaatcatttgcctgaccttggcttgcatggtgatgcgttggcacttggctgcaagtattcctttttgttcctgtaaatgattgttcttgatgcgcagggcttcggctgaaatgcctaaaattntgtcgtcttcgatgatgtcttctgcctctacgggtaaagcctggtgggggtgcctatggcacctccttatagctgcangtgcgcgcggtgccctccggcgtatgcagattgtcatggcgttgcctctttgctgtgacggcctcatcatcgaaagactcctg

SEQ ID NO: 58468 - DNA, 394 bp, Zea mays
agcttggaggcgtcgataggttgactacttggtgtagattcctccttcctttcctccgtcgccttgaatgcgacgggttgagcttcggatgtggagggatcatcaagctcgttgatcttcctcgagccttcgatcatgcactcaaaacttacaaaattcccgataacttcctcgggggtcattttagtatatctaggattaccacgaactaattgaacttgagtggggttaaggaaaatgagagatcttagaataaccttaaccacttcgtggtcgtcccactttttgctcccgaggttgcgcacttggttcaccaaggtcttgagtcggttgtacatgtgttgtggctggtctcctttgcgaagccggaaccgaccgagctccccctcgatcg

SEQ ID NO: 58469 - DNA, 465 bp, Zea mays
  unsure (1)..(465): unsure at all n locations
actcagcttgtttcacacggctatgtttagcttaatctgcgtgctgttataggagtgccagtgtggcatgcttgtttatgcatgtcttattttgtgctangtatttaccccccgcaagttaaagtctacgagttgaaggaattgtcgatgaagttcgagcggcacatgatctcaganattgtagatttccaggtatacttctatggaagctcatttactggcacatgtgttttaaggaattgttgatgaagttcaaggtgcactctntttttctgcacctgatcactactccggacttctatacataatagagtgtggntntagctntcctcatatacagtagaagtaactgtgggatggtggagaacacacattggtcgtttatctagtgccaggggagctaatgttttattattgctaaaatcaatgctgtgtacatttccttgagcaatatgggtcttggta

SEQ ID NO: 58470 - DNA, 418 bp, Zea mays
agctttcgaagaactcaagctatatctgtatttattaacaacattaacttcaccaatgccaggggctcctctgttgttgtatgtggcaacttcgcactcaccagtaagtgcggcacttgtgcatgagaagtctgatggacaaatcaataagcacgttccagtatattttgtatctgaggtccttagtgtctcatagaaaaattatacagaactggagaaggtgttgtatgccgttctaatggcattcaggaagcttcggcattattttcaggcatataatattattgttccttcttcgcagccgttgaaagatatcatgagaaataaagaagctactggccgaattggaaaatgggctgcggagcttaatgaattttacattgattatgtgcacagatcctcgatccagtctcaagca

SEQ ID NO: 58471 - DNA, 378 bp, Zea mays
  unsure (1)..(378): unsure at all n locations
agaagaggccggtcttatgcttgcttaatngctaagactagcatgggctggctgtggcatcgccgcttatcacatgtggtgatgaagaaccttcacaagcttctaaagggagaacacgtgatatgtttgactaacgtacaattcgaaaaagatagaccttgtgcagcttgtcaagcaggtaaacaggtgggaggagtgcatcacagcaaaatgtgatgaccacttcaagacctctggagctgctgcatatggacctcttcggacccgtcgcctatctaagcataggaggaagtaagtatggtctagttatcgttgatgacttttcccgcttcacttgggtgttctttttgcaggataagtctgaaacccaagggaccc

SEQ ID NO: 58472 - DNA, 460 bp, Zea mays
gggatactctaaacgtcaacagcacgcatgtcaaacttgaagccatggtaagtgacatatgccaataatatacgaaatgactcaagccgtactaccggtgcataggtttcaccgaaatccaaaccttcgacttgggagtatcctttggcacaagtcgggctttgttccttgtcaccacaccatgctcatcttgcttgttgcggaagacccacttggctcctacaacattgtgattaggacgtggaactaaatgccatacctcattcctatggaaggtgttgagcttatcttgcatcgccaccacccaatccgaatcttgaagtgctccctctaccctgtgtggctcaatagaggaaacaaaagagtaatgttcaaaaaaatgcgcaacacgagatctagtggttacccacttatgaatgtcgcccaggatggtgttgaccgagtgatactcttggatagc

SEQ ID NO: 58473 - DNA, 420 bp, Zea mays
actcctttagatgatctgttcatgctcgaattgaactcaccttgggcttctcgtcaatactaatcccctgatctttaaacacaccacgttgtgcaagactagcacttcgatgaagcgacgaacttttataggacttacagcgcgcctaaccgtcgtaatcgatgctgagggggaactaaaggagggcatgcaagttcatcatcatctgtagctctggtggacgagtgtgctcataattgagaccaatggcaaacaaagaagcacgataagtgcagcaccaaaaccaaccaaggtttgtatggataggtacgttatgagcaagtaagaaccttcaaatcaagtactggttcataatggtgcaagctcaattgcttactcaagaagagcaattaatcgcgcctagagcaataccataatgca

SEQ ID NO: 58474 - DNA, 429 bp, Zea mays
  unsure (1)..(429): unsure at all n locations
agctgngatggtggcagcangggactgactgatgccaaagggcttctatatcgtggaaagggccaaaggagttggttattttggagacagggctgacacggccgctgtccttaaacccactgtgaagctagacagcagaacaataaagcgagctgcaggaacagtctcactcgagccagcacgctgtcgctggggcagtaaaccacaagttacagcatctccacatttgtacctattttttgatccatgttaattggcagttgtggaccatgcgtgtactattataatattgtatctcacataatcattaatcgatacttaatatggcttgcgtaatggctatttctctctttgtttggctccgccttttggacacgggtaagtgctctgccatcggtgaagaaaagaatagagacaacaataactcta

SEQ ID NO: 58475 - DNA, 407 bp, Zea mays
  unsure (1)..(407): unsure at all n locations
tatgaagattcttcattccaacatgggctagtcggcggtgccagagccaacccaagttagtcttagcaattaagcaagtgtcgagttcagctctatcaaaatctaccaagtatagctaaccctctaacactcccttaaatgctattgaatcatcacttcttctaaagacagtgacacctacatcagtgaatagacagttgtagcctatttgacataattgtgaaacggaaagcaaattgtaatctaaagaatctacaagaaaaaacgtggaaatagaatgggcaggagatatagcacatttacccaatcctttgaccaaaccttgatttccatccccgaatgtgatagctcgttggggatcttgngtnttctcatatgaggagaacatcttcttctcccctgtcatg

SEQ ID NO: 58476 - DNA, 397 bp, Zea mays
  unsure (1)..(397): unsure at all n locations
agcatcctctcacatgtcagattaagatgtgtgccttacccctccccactcttgttcgttcccttttcctctgtcgtgtcgcaagatgtgtcttaacctcaatcatttggtgtgctttcgcctattacctactttacctttgtaatcactagaatctttgcatgatgcctatcttattcctaccttttaactataatctctccaatttcgatataaaaatggggttaacctaccctgcccttggttgcatnttctcctcttgcaataacaattttcgcttaaacccccccttattatccttggtccctatcttgacgtcttgttcttctcctcgccttgacaaccctatagagtaggcattccctttcaagaaagacctcttcttactaacattaat

SEQ ID NO: 58477 - DNA, 419 bp, Zea mays
  unsure (1)..(419): unsure at all n locations
atagcatgttctgagcttggaaggtgcaactaaaacagcagccgcacctgccccgaaggtttcctatgaaccgtcgcagaacactatccaagcttcggcatccttatttgcttcttcttcctgagcccctggcgtgcagtcagcgatgaagtctgctaatgcctgngactgaatcgatgatctatgcacataatcaatgttgaattcgttgagttccgcagcccactttccaatccttccagtaacttctctgttcctcatgatatccttcagaggctgtgatgaaggaacaattatatggaatgcttganagtaatgccgaagcttcctggaggccattaatacagcatacaacaccttcaccaattctgtatagttgttctttgataaacatagaactttcgagacccaagatactg

SEQ ID NO: 58478 - DNA, 457 bp, Zea mays
  unsure (1)..(457): unsure at all n locations
gcttcattagagacacaggttcaacgaattttgtaatatgttattntaacttaatattattattgaatttgttatttttaacttttgcaggttgtgcccganactacgaagttgcttgctattgaggaaactcccttggtgtcacacccggttttagaaggcaaaccgaatgcgaatcatgtatgtgctaggatcagaactcacgtacacatagattacataaatgactcatcatagcataatgcttcgaataataataaagactaagaataatattacaaactatagacatttacataatatatatcaaagtgcacataatagaaacatagccaatgtaaataaactcaccatangcagctaactggnggaggtcgctagcctaattctcgaactcatcggagtgctagaactcctggagatccacctcgatgccttcttcttctttacctgagca

SEQ ID NO: 58479 - DNA, 385 bp, Zea mays
gcgaccacttgagcccttgaccctttacgaacaatatgcaagacctgtctgaaatccccaccgaagacaatgggtttaccaccgaatggcagtccgggccgacccattatatcgcgcatgctattgtctagtgcctccacagcttgtctcttagtcatagaagcctcgttccagataatgagagatgattttcgtaacaactctgcggttccactctgctttgtgaagctacatacagcgccatcgtcaatattgagaggtatcttgaagcgtgaatgtgcggttcttactccaggcattatggaagccgcaacgccagatgtagctgttgccactgcaatcttgctctggttgagtagcgtcgcgagcaacactctgtatagat

SEQ ID NO: 58480 - DNA, 478 bp, Zea mays
  unsure (1)..(478): unsure at all n locations
agcttgcattgcatatttaaatntcttgcattgtatctagggcttgtctaacctagttgagataaccgccaacaaagcgagtgaaaaagattaactcggatcaaacttgacaagtcttagttttaagcttttagcacttaaattcttactttttatgcaattgttggttcttgaaatatgcatgaggttctgcactgagggggagtattcaaaactcaaatcactcatganaacccctagtgcaaggccaaaatgcaaatttcaccatttgcctattttctctaaaaaattatctagcctatgtcaaaatattttgaaaattatgagaaaatataagaggatgccaatacatgntcccaacaagtgttatttgtgtgattgtaagttgggatttggtttggttgaaaactagatagaanaattcataaaatctatgttnttcctctgtctgggctcaccggacagtccggtatgcacc

SEQ ID NO: 58481 - DNA, 494 bp, Zea mays
  unsure (1)..(494): unsure at all n locations
gatcgcagagagcgatntataagaagccatnttggagacccacttgtgagaggctctaacgagagctaagagaaagcgagtagctntttggtacctcgataaaaatattagagtcatcaatgagagtttgtatctctaattctattaagattctagatttatattatataccatagttgtgtgttttatttttctaccttagttgatgagctagttgatagtgttggactatttgttacataactntntttgtgggagagatagcaactcatgtaacaaaatctttgttaagcatctagctatattactttcttgtattgggttttgactagttaaatattaaatatcatacttaaaatgaagtagattntagattatctaatttaccttcctttagatatcgcgggccatttaattggtaagtggttctagacgtctaatccatgtatccgacccactacctaaagccaatagcatactctcgttacaccaca

SEQ ID NO: 58482 - DNA, 469 bp, Zea mays
  unsure (1)..(469): unsure at all n locations
atcttataactgtatgatataagcacgagctctaccatatgtcataatagaaggggaattatacaagctgtgggtatgttccccgccactcaagtgtctatacataaccgtaagcatataattgatgaatgaaatacacgcatgcctgttatgatctcacattggaactatgcctttgctccggatatgcaattccttaaagaatttaatatgccataacatacttcggatgctacggtattatcatcaaaaacgctaaggttgtcacaattgtgcaagagatcaaaaacaacctcggtctttaactctattaatcaaacacactagctcgtagacaaagcgggtccttgatttgctatgcccataccaccatcacaggggaacttaagatatgttgcaatggcagtgcaataactttctaagtggtatgaggcacagcctataaccacaatcacttcggntaccattc

SEQ ID NO: 58483 - DNA, 375 bp, Zea mays
catgtcaagcagggaagcatgtaagttcccatcatccacataagaacatcatgacgaccgacatgccacttgagctactccacatggatttattcggcccaatcgcttacataagcatcggcgggagtaagtactgacttgtaattggggaagaatattctcgcttcactggggtattctctttgcaggaaaaatctcaaacccaagagaccttaaagggattcttgagacgggctcataatgagttccaattaatgatcaagaagataagaagcgagaatgggatggagttcaagaactcacaaatagaaggctgtcttgatgatgatggcatcaagcacgagttctcttcttcctacacacctcaacaaaatg

SEQ ID NO: 58484 - DNA, 460 bp, Zea mays
  unsure (1)..(460): unsure at all n locations
agcttgtggctgtggatctctagctcattgctaagttgttggacctaagcaaacaatttagctattgactatttctactangctactcccaacttggtggtctgagcagcaatgcacttcttgtgggtcagcaagagaagtaaagacttttctattaactcttcaataatggcctaaagaaagggaaaagtcagcaaggaactttacaagagaaacataggcaaggatgtctcactttgtggtgcttgtataattcctctgcttggactcagccgttttctaggttgcgacaattctcctgatgtggatccttgcaattagaaacatgttgtaggaggtagcgataacttggtagtctttcttgtggattggagttcgccaatcttagatcacctnctctacaatagagtctaggccactcacataagtcaaaaaatagagatgtntctcaaataaacta

SEQ ID NO: 58485 - DNA, 465 bp, Zea mays
  unsure (1)..(465): unsure at all n locations
ctcatccttcttcttacanacagtgctggacatccncaaggctaagtgctngggcgaatgaatcccttatccagcaactcttgcaactgcttcttcaactctgccaactcagcgggtggcattcggtagggcctcttggaaattggggccgttcccggttgcaactcgatggcgaattcaatatcccggtccggtggcattcccggcaattcatcaggaaagacatctgcatactcacagaccactgggatcttcttcaggggtaactccgtcctagagaaagcacatgactgagaagaaccttgactatgcagaatcaaagtgaaattcccgcagaaaggagaattaacttccacggtacgactggctacatcaaacacaacttggtgcaaggtcatccaacttgctcctagaataatgtccacattttccaatcccaacacaagaagagtgtgtttgataatg

SEQ ID NO: 58486 - DNA, 380 bp, Zea mays
agcttgtgagcagtacaagtacagaagagagatgctgcttctgctgatcagccgaagcccatgcttctatgtgaagacatagcacaacagaaggtattgctggggtctcaattatctgaagagcaagaaaaaactctgataaggtttttattcaacaacaaagatgtttttgcatgatcggtcaatgatctctgtggagtctacagggatgtcattgaacattcacttaatgtcgatccattcttcatgcccagaaaacaaaggcttctgaaaatgtctgatgataaagccgaaggtgctcggaatgaagtaaaaagacttcttagtgttggtgtcatcagagaagtataatttccagagtggctagccaatactgttat

SEQ ID NO: 58487 - DNA, 471 bp, Zea mays
gaacacatattgcgactaaccaatattcatgtttatatttacatgatttgtagcgcatgccaagctgtgaagcaagttggcatccatcatccacacaataatgtcatgactaccgacaggccgctggagctactacacatggacttattcggcccgatcgcttacataagcatcggcggtagtaagtatcgccttgtaattgtggatgattattctcgcttcacttgggtattctttttacaggaaaaatctcaaacccaagagaccttaaagggattcttgagacgagctcacaatgagttcggcttaaggatcaagataataagaagcgacaacgggaccgagttcaagaactctcaaattgaacggcttcttgaggaggagggcatcaagcatgagttctcctctcctacacgcacaacaaatggtgtgtggaaggaaaatcaacttattgacatggcagaccatctg

SEQ ID NO: 58488 - DNA, 336 bp, Zea mays
tttttattaaagacaggaaaagcagtacatgtccagcaggacatattctatccgtccatcttgcacgtgcgaacagtatgtagaaccattttatgcttgagctatgccacatggacctattcgggccgatcgcttatattagcatcggcgggagtaaggactgtctacctatagcggatgaggagactcgcttcacttgggtgtgctttttgcaggaaagatctcaaaccccatagatcttgatgagatatttaagacgggccgcaaacgagtctggatacgcaaggatgaatatcaaaagcgacagtgggacggagttcaaaaattcacaaactg

SEQ ID NO: 58489 - DNA, 355 bp, Zea mays
ttcatcctcacatgtgctgagcgacgatgcttcagtttgtccatgctagtcttagcaattaagcatgcatctagaccggcctcctcttttgcgaaatcaactaaataaagtttgtcgtctagtacacccttaatagctaatgaaccatcacttcttctaaagacagacacatttatgtttgtgaataaacaatgatatctcatattacataattgactaacagataacaaattatatcccagcgactcaactataaacacattaaaaatagagtgctccgatgaaatagcacatttccctaaccctttcaccttgccttggattccatcaccgaatattatcgagtcttgggaat

SEQ ID NO: 58490 - DNA, 457 bp, Zea mays
  unsure (1)..(457): unsure at all n locations
agcttccttagatgatgctaaccgcttgagcattgcgatgtatcttttgcatcatttctgggtcatctcttctccttggacgagcttgttcatacctatgttaacaatctnccacagactcggatgcacactgatgcgacttcattttgttggcccactcatcatagatcaactcactaagagtcgggagctttccgagtggcgccgaaaagaagatgcgaataaaattacgagagtaataaaattgaactctattgaattcgatacctttacttttggtggatgccccttcgatggagagacttaccttgctcatcacctttgacaccacaagctctaccaagtctatcgtgtattcaatttttccctatcatttgtcttactagacctttcttctcgagtcttattcttcaggctattctgtgcatcttcctctttcatcttgaagaacattttc

SEQ ID NO: 58491 - DNA, 472 bp, Zea mays
  unsure (1)..(472): unsure at all n locations
agcttaaatataaactttgaaaagttatggaatgtcacattttaaaaaaatagtctacttcattacttagattccaattcctcaaaatgagaaaaaacaaacgtgcctttattgatttcttagaagcagagtaaacctgcttttaaaaaaaacagtggagcgtctagaatatcttgtggtctgagacaaattcaaacatttcgctccttatatttttagacggagcgagcatgttttagaagtatatcataaaatatacttcatagtgaatatcgtggtatttactcgcttgtttctaaattataagccgttttgtcttctctagatgcacaatatctatgtatatactagaaaaactttataacataaggtatataatagagaaagtcataatggcttacaacttgaagcaaggggatattatcgtanacatcactagtgcttcgntgggatgatgatattgaaagacatt

SEQ ID NO: 58492 - DNA, 392 bp, Zea mays
  unsure (1)..(392): unsure at all n locations
cttatctgatgcgatctctgcggtgtgcattcaatgcatgcatgcttgcacgtgggtgctgcgcgttctcngcggtggcggccatcgaagggatcaacgcgatcgcgacgggtaacctggtgtcgctgtcggagcacgagatcatcgactgctacccccactacagcggctgctactgcgggcagatggagaacgcgttccggttcgtcatcggtctctgctggatctacaccgaagccgactacccctttctcggaaccgacggcacttgtgacgccagcaaggtcggtatgggtgctggcgtgctgctgcatttgcttcgtcgatcgatggatggatgatgcggtaatactgctgctaatataaccgagagatcgatatgactgtgtgtg

SEQ ID NO: 58493 - DNA, 320 bp, Zea mays
cacattgagatttgatccacagatcaaaatgtcatcaacataaaggcacagcataacagactcacccccaccataccgatagtatacacacgtgtcacattcatttacaacaaagccagctgatgtaagaagattatcaaacctctcatgccattgcttaagtgcttgtgttaagccatacaatgattttatcaacctgcacaccttgttcttttgaccatccgcaatgaacccttctggctgatccatatagatctcctcatccaactctccatttaggagagctcgcttaacatccacctgatgaatgataagaccat

SEQ ID NO: 58494 - DNA, 375 bp, Zea mays
  unsure (1)..(375): unsure at all n locations
agcttggaaatagaaactatgtgttcactacatgctatatacgncnaaatcattacacctcatacaaaattcaacatgttctacacaagaataggatttatttgctacttctaatttagcacttaaatcattggtgacaccttactaagtagagatggtttcatgacatgtagatagttcacaagatagcatttcatttctttaacttctaaagcatggaattttgagcctcaacaaattatcatgcttcttatacaacaaatcctcttgctttttaaaagaatgtcttttattcaagcacaataaatcataatttcgctatcttaaacaatctacccctggacaacatgatatctcttcatcccatactaaatc

SEQ ID NO: 58495 - DNA, 344 bp, Zea mays
  unsure (1)..(344): unsure at all n locations
ctttagacattgaatctactgaacgacatatatatgtatattaattcaacgaacgcactcattgttttctagaacaggtacacttagctatgggtaattagctaatcatcatcaggtctcaatccagatataatgtgaattagtcccttaacaattttcaatctctttatttttctcgaacacacaacatagttgtgtatcatttagctaatataggaaggttgttagcatataggccctaacttgcttatctgtactacattaaaggcggtctgtataccgccctcgtccccgattacctttcacncgcccccgataacctcgccaccttctgttcttctttc

SEQ ID NO: 58496 - DNA, 366 bp, Zea mays
  unsure (1)..(366): unsure at all n locations
ctcaacctaatgctaaattccacttgacttaaacactcaattttatctcanaacaagaacataatatgatgtcaagggacaacacagaatgaagcaaggaaatgcaacacactaacattactctccttacagcttaaataaatgcaacacaagcatttaacggatacattcggtaggctagatattatatctcatagactgctatatgggttaaagtattattgtactatagatattgtctcgtagactgacatatgtatacatgtgttgccttatcttctatatcatgtactctatataaaccgcctataaaggatctatgcattacaccaatccntaacgtcaatccctacagattggaccatg

SEQ ID NO: 58497 - DNA, 382 bp, Zea mays
ctgagctgcagcttacgccctaaaaattgtctattttgttttgtgcacgcttccatgattcaagatagtgaaggctatatttatatcctgccaaatatcctgagcacaagattatgtaatatcatgctaggaaacctcacactgtttctcatcatgcattcatgtataaaaatgaggcttctagatctaggcattccactcatgttaaaatgcctaaaagaaaatcctaatgcatcaaatgagcatagcatttcatttaaaacttttgatgcttcctatgtgctaacaaacaaattatgcataatagttgccaaatatgttgggggcaaacacaagagatcactaacttgtgtctggatactcatggtgcttggttctaatg

SEQ ID NO: 58498 - DNA, 399 bp, Zea mays
  unsure (1)..(399): unsure at all n locations
tatgttgagcaacctcccggctttgaagacagtgagtatcctaaccatgtctataagctctctaaggcgctctatgggctcaagcaagccccaagagcatggtatgaatgccttagagatttccttattgcaaatggcttcaaagtcggaaaggccgatcctacactctntactaaaactcttgaaaatgacttgtttgtatgccacaattatgttgatgacattatatttgggtctactaacgaatctacatgtgaagagtttagtaggatcatgacacaaaagttcgagatgtctatgatgggggagttgaagtattttttaggatttcaagtgaaagcactccaagagggcaccttcattagccaaacgaagtacactcaagacattctaaacaag

SEQ ID NO: 58499 - DNA, 338 bp, Zea mays
agctttggctacatctaaattgtggattgcttttgagccaagccacaatactttagcctttctgcgaacttcctgacttccatgaatagcaataagcccttgatccaaaggtatcttcatgcatatatatgctgggtgaagaattgcttctaatgcgttgagtgttccacgaccaatgattgcattgtaagggtattccatgtcaacaatatcaaacaccaccctgacaagtctttgattgtggacaaaaccgagagtcacttgatcatgatcttgccagtgctacaatttggctccttcgaaccacaagaggggtgaacaacatggacttatcccct

SEQ ID NO: 58500 - DNA, 383 bp, Zea mays
  unsure (1)..(383): unsure at all n locations
tatcaaagaaaaattataccgaggtggagttcgtgttatatgttgtattaacggcctccacgaaagcttaacattatntccaagcatatcatataattgttcctttgtcacaacctctgaaggacataatgaggaatagagaagctactgggaggattagaaaatgggctgctgagctcaatgaattctctattgattatgtacacatatcctcaatacaatcccaggcgttagcggatttcatcgctgattggacgctatgggctcatgaagaagtaacaaaagacgctgaagcttggacagttttctgtgacgactcttggggaacctttggcgtagtagcagctgctgtcctaatagcgcccttctaaattaaaacatgt

SEQ ID NO: 58501 - DNA, 350 bp, Zea mays
agcttgcagcataagaaaagagtatagaattctccaacagcactgaacagatgagcatcttcactgatctccaacacagaccacacagcttctcagataaagaggaaaggagaataatgggtttcccaactatataactaactttattgacatagtatgtaaaccaaaatgcaggggatacccacactctggtgacaatcattacaaagatccaaatcaaacatagttcatcatgacaaacataaatgcacaggatatagcaaactaccctgtctaactaaaactaactaagaccgagactaacgctaagactgaagctttcatgtatatatttatttcgtattaattac

SEQ ID NO: 58502 - DNA, 425 bp, Zea mays
  unsure (1)..(425): unsure at all n locations
gctcacggtctcaccaggaagctntctgtggcttttatctaacggagggggactggagaggggttggccacggcggtggctcttggtcggcgctggcgggtcgcggggaggtcgccggaggcaatggctggctcgggcgagtccggcgaagtacggaggaggtaacggtgaaggcaaccgagtgctggggcaggttttataggcgcggacgcggacggtgcgccggctccatcgtttggcgcgacgcgggcacgcggggcgcgcgcgcgggcgtgctctggcgagctcagagcgcgtcgaacacgtggtgcgttgcttctgcccgtgttcttcgctctgctgagcggccaggcgtacgaatcttgccctaccgcctgtgggagaattcttccctgcacctatggctacctagttcatgtaagttc

SEQ ID NO: 58503 - DNA, 346 bp, Zea mays
gagagcacattttatgattaacatatgttcattatcgagagagacaggacttgtggcgcatgccacgcatggaagcaagctggtatccatcatccacacaagaacatctggacgaccgacaggccggtagagctactccacatggatctattcggcccgagtgcttacataagcatcagcgggagtaatgattgacttgaaatagtggatgattattctcgctccacttgggtattctctttacaggaaaaatcttctaacccataaaactcttatgggattctagacaggggcacaataagagccctcttcaggttcaaaaatataatatgcaccctggctcggt

SEQ ID NO: 58504 - DNA, 464 bp, Zea mays
  unsure (1)..(464): unsure at all n locations
ctctcagccatcccgaaataacacagtgtactctccatatttatgttatactctgctacagtagaattcctgaattcaaagtggctacgctttgttaggctcacaatactgctatcttcttcactttcattgtcactctcgcctgcagctacaatctgttcagcttcggcattggaggcaccttcagtagtaacttcctctgacacaaccagacccgatcgcgtcatcactactgatattggtgctgattcggcaattttggtctccacttcttcacgagacaccctagcagtggatcttaccctggccatttgtgtgttcacgttctttaaacctcagttgatctcangtgacgaagcgcttacttaaaaattcaactcaagaagcttctgctatggttaaaaatttaacaccacaacgatgcgatagcaatgaatgttgtggcactcctcaccaccccgcta

SEQ ID NO: 58505 - DNA, 467 bp, Zea mays
  unsure (1)..(467): unsure at all n locations
agctttctggcaacagcctccacctccaccttctttgcaacatggccagcagccagaagggagccaatatgctccgcatcaaagggacttcagagaacagtccgaagctcgcacggtcaacagcactgtgccagaatcaaagcacatctattgacaaatatcctaccttaatagcaatgtttttcattcagttttattttctgtaataaaggacattgtttaggtgtcatgtaactagtttcgttgattcctacaagaaaaatatgttttcttcacaggcttgtgataataaaaggaccttcggactatcgaaaattcttcgaagcaacaaaaagtctttctaatgaacgcagagtaagtttgacgaagtcacaaaaagacgttcctaagggagcgcagtgtaagttntctgctccaaagtcgttctcaaaggaatgcagagcatacagtcgaaagtcaacgctgat

SEQ ID NO: 58506 - DNA, 444 bp, Zea mays
  unsure (1)..(444): unsure at all n locations
atacacatcttcttatcattaagaatgctatagatttcggattctattcttacactaacacacttaacgcactacaaagcacactaaaatctcagatcttactatgcacacttgtttcttcatccaaaatcaaactttacttgaagaacttgcctcaccttccaaacacttatctatactttgattaagggtttattatttctctatttggaccttacaaggctctctgagtaaatggcttccaaacagcctcaaacctttaccacaccctccactaaccaaaacaaggttactcaaaaatgtccataatttttggcattgtacttttatntctaaaatctctacagtcctcacataagcacctntaattcacttaatattttctaatggctctaataatcctaaaaccagctttactagagagctcttagttttatacattca

SEQ ID NO: 58507 - DNA, 467 bp, Zea mays
  unsure (1)..(467): unsure at all n locations
agcttgtggaagaccagatcatcanagcatataagtttctggatgagaagtgatcacccacgttntgttgattaagcaccagaagaccaatcaaggaaggaatccatgtgggagttcgcaagagaaaggtttgcgtgttagcatcgatgcttcctcaataagctagctgccaagcgaaagctgaagcctgaagatgatctttgagtagccaaaatncagcgttgcaatcggcaaccagatgctcctgcaaggccagattttgttgaagttccatctcctcgaagagttgcaaagcgaagatatgtagctgaagtaaagctatacccataacccttctaagtcgaatctcgaggacgagattctatttaagtggcgtagatttgtagcatcccacacattcaaatcctgagattttctcaaacttgctctaaatgtcaaatgaattcaaaattcatttcaaatgtttg

SEQ ID NO: 58508 - DNA, 382 bp, Zea mays
  unsure (1)..(382): unsure at all n locations
gtcttagtttcttaattattatatatgttagtggtcgatgatcgataatcttacttcggtgttacccaaagtatggtttggtgggctttgacggaaactcaaacttgatggtgaattcaagataacaatttagatagannnnagccactgaatagttaataccatctgtcatgtatgttagattgtcttgcattggattacttattataagaatgtacaaggtgagtaccccatcctatctttatagtatagaggacagacacataattctagtcctaggtagctatgatataagtgtctgcatgtttgtagaaacacttgcttttttatagccgactaagtcagattgcttgtcatgaaatctatgccaccatgtgtcatg

SEQ ID NO: 58509 - DNA, 432 bp, Zea mays
  unsure (1)..(432): unsure at all n locations
atactctgagtcacctggctggggcaagctatatcatttatatatgctctatataattgttnctgatattaatttctgattgtcaaagttctctggattgggcctcaaatattatgaagcgcatgggctacagtgttaaatatcctagacacagcgcgttgtacatggtggacggcgggttgttttcaagtaaaccgaggggcttatgtgcaaaaaggcctgggcaaaggggtacagggagatatcanccgcaggatccaaaatcgagagctaggattatatctggcgcccaacgaaccggtatgcgctattggccgatggatcaaaatccgatggcccagattctatgaactctgatataaccacaaccgcatgatctgagatccatggctcctgcttgatctattctgtgccgcccgatttccatctaac

SEQ ID NO: 58510 - DNA, 240 bp, Zea mays
attagctcagtccgcaagtgccttacgctctagtatattttgaccgctcggccgagacacgtgtggccgccggcgaatgttttactgatctctgggacgacaggggtcgcggaatggttcatgaaactatcgcacagagcgaagaacgcgttcctcgagctacgaaagtggcacacactgatgtctacagtggggagcccctaggaccattaggtaccaactagtccttcttgacgcgct

SEQ ID NO: 58511 - DNA, 433 bp, Zea mays
  unsure (1)..(433): unsure at all n locations
gaatgctgtggtaacttcacacctactcgtctgtttatatagtgctgcaggtaagaaggcgaagcgtcagaatttttacaccaggcgcacacccgcttgcgctcgctgcgcggtggaccgcagggacaaacagtaaactctgcaaggtgggaccgctgcgtgctgggaaattaaatcgtttctcggcaacgagctcagggaagggtgtttttggaccttctggctcccgaagcttaagagacttttttcacggatcaagctcgttacgataaacgatctatcaccgcgaaaggggctactatngggtctatgcttcgtcgcgaaggtctcaagggagaagcggttaaatgtggagcagtatcttcgacttcatcagaaggaaaagtacaaagtgaccagcgcgagctgtgagatgaagctcgcatgtccaaaa

SEQ ID NO: 58512 - DNA, 464 bp, Zea mays
  unsure (1)..(464): unsure at all n locations
agctngccttcgcctagtatatcacccgcagtccaacggagttgtggaacgcgccaatggaaaatatttcacagcggtcaagaagatgctcctcgacgaataaagggcaggtgggccgacttgttacctgaagcggtctgggcgctaaacacgactgagtgcacggcgactgggttcacccctttctgccttctatatggatcggaggccatgaccccacaagaaataaagcatgggtccccgcgaacagttgcgtcagctgtccccgacgtggacgaacccacttcgaaggatcttatcgacggagaccgcgtcttcgctctacaagctctatataaataccaagcccagacaaaagcatggcgcgacctcgcagtcatcccgcgggaattcagcaaaggtgacctcgtactcgtccgaacagctcggacagagttcaggggcaagctggagcccacgtggga

SEQ ID NO: 58513 - DNA, 478 bp, Zea mays
  unsure (1)..(478): unsure at all n locations
gctgaatatatctttcacgcagaaagaactcaacctatgacagataagatggcttgagttaatcaaagaatgatctggaaatacaatatcacctacgaaaagcacatgtagtggcagatgctttgagtcgtataggtcaagtgaacaacatcactactcatttgatgtcacaggaattatgctgggaaatggaacaactcaaccttggtatgctcaataatatggaagcaacagttatggaagtagaatctactttggaacaagagattcgtataggataggaatctgttgagaaaattaaggaaattaaaactctaattagtttgggtaaagctccagatttcacggaagatgaataaggcatagtatggtttaaatagagaatctgtgtactaganatcgagcacctacgccaacttatcttaagagaagcccatgattcggcttactctattcaccctggaagtactaagatgta

SEQ ID NO: 58514 - DNA, 423 bp, Zea mays
  unsure (1)..(423): unsure at all n locations
agcttacaacataattgttccttcatctcatcctctgaaggatattatgaggaaccgagaagctactggaaggatcggaaaatgggctgcagagctcaatgaattttgcgttgaatatgttcatagatcttcgattcagtcacaggcactggcagactttattgctgattggacgccaggggctcaagaggaggaaacgaataaagacaacgaagcttggacagtgttttgcgatggatcttgggggaccttcggagcaagagcggatgctgtgttggtttcgccttccaaagtcaaaacttgntatgcggcaaagcttgattttaattgcacaaacaacattgctgagtacgaagcattgattctaagtctttcggaagttaaaagcaactgggaatcagaagagccatacttaaaactgat

SEQ ID NO: 58515 - DNA, 398 bp, Zea mays
  unsure (1)..(398): unsure at all n locations
cataaaaactaagctcttcagctcttggacctagcagaacttcaccggattggaatattgacctcaccggacttcggccgcccgcctgcgcgcgtagactgtgcactctggtgagccattcttcaattcctcgcgcacacaccttccttgatccctggtgaagctctctgacccgtctgattggtcaattatgccctgtataggccggactcctcgccgccgacgagctcccccgccaacgcacgtggaccggccaactccgaccatccctgacggcgacccgcacatcgtcgtgacccttataacctcccctacaccctcggncaccttaccggagcagtctcgccgtcggtaagcccctccgccctttcttccggcgcgggtactggttaatttgg

SEQ ID NO: 58516 - DNA, 462 bp, Zea mays
  unsure (1)..(462): unsure at all n locations
caagcttcgcaatgcttacaacggatcttcttgttattcttctcaaagaatatcatgccactggtgggacacacgccgatcttctcatatgtgatcccaagaccatctaacatcttcttagcgaagtacatattctttggcaacttatgattctccgggagaacctcgcccatcagttggacgatgtcagtgtaagcactgtttgaaatgttgtgcttcgactatatcgccattagtcttgtgagagtcccaagaactgacatctgagtgtgctcgtgtgaaagggaattaggcttacacctagttcccaaattatattggcgggtgaattgcccaacacatattgatgaactaactagtttgctctagattatacgttctacaggcgccataggtacatctacaactatactanatcgactgttccgaataccgaagattattcagacaggagaagctttt

SEQ ID NO: 58517 - DNA, 388 bp, Zea mays
  unsure (1)..(388): unsure at all n locations
ttaagcaagtgtcgagttcagctctatcaaaatctaccaagtatagctgacgctctaacactcccttaaatgctattgaatcatcacttcttctaaagacagtgacatctacattagtaaaaagacagttgtagcccatttgacataattgagaaacggaaagcaaattgtaatctaaagaatctacaagaaaaacattataaatggaatgatcacgtgatatatcacatttacccaatcctttgaccaaaccttggtttccatcccccaatgtgatcgctctttggggatcttgtgttttctcataagaggagaacattatcttctcccctgtcatgtggnttgtgcacccgctgtcgatgataccaacttgagccccggatgcata

SEQ ID NO: 58518 - DNA, 385 bp, Zea mays
  unsure (1)..(385): unsure at all n locations
agcttgctcaggcagacgctatttatttatttattgatcaccattttcatatatacagccgtagtgagacgagggccaactttcttcttggcatatatggcaaaaataagtatgnctacaatatataatggttgtctccctctacccactctctggcctatgcccttgacttgtatgttaatatattaaaagaaatcagattgtttcatcttatacaaagtgtatactaatgtatctcatggagccttgctgaactcacgatttacccattgttcttggcatctctatcgtaagaacaaatgcaaccacacttatttccatcgtacttatttccatgagaggttagcgaggtatgttggtcactttggatttatcactgaatcat

SEQ ID NO: 58519 - DNA, 380 bp, Zea mays
tcatgcaactgctgccagacatgagaggtgaactgtgttcctctgtctgacactatcttctttggcacaccatgaagacaaacgatccgagacatatacaattctgccaatacggcactgctatagttggtcttgacaggtatgaagtgggctgacttggtcagacggtccactactgcccaaatggaatcgtagccggctcgagtgcgaggcaatccgactatgaaatccataccaatttcatgccattttcactgagggatctgcaacggttgcaacaatccagctggactctggtgttctgccctaattcttccgcagctaatccacatagccacatgctcttgcgattccctctttattccgtacaccagaaattc

SEQ ID NO: 58520 - DNA, 391 bp, Zea mays
agcttgtaaagaaaaagagttatcttatgggatgaaacttatataaaaaagggaggacatcaagaacaacaacacctactcggataataagatcttcaaaacatcaatggtgcggttgtaaacactctaaaactctttcattaagaatactaggcataaattgcttattgcaaatattataagccttgataaagatgaatgatgcttcttcctatttgtttctaaagttgaatgcatatattcttttcaatccaatactattgatgcatatctctagggggagcctttatctatatcttgatcatatcgaaactatcgctttatcctcataatcttatatagtctcttgcacgagaataagtttctcatgatgtatgctactacatatcaa

SEQ ID NO: 58521 - DNA, 344 bp, Zea mays
  unsure (1)..(344): unsure at all n locations
gggtctggtacccgcaatggctgaacagacccggttatttactgcgatcagantttgattgttggcaaatagagcaagaagccacataatcctttattgaattattcattgatgaccaataaaagagctgtttgattcggcgatatgtcacaggacatctggaatggtctcctattggactgtcgtgcatggctgaaataatctaaagctagagacttgtatcattaccaatccatactcttcccttgtaccgaataagtcatgtcttcaatgtataatgtcctgaagagtctggacttactgcaaaagcaagtaatagcttctgagcttggcatccctgctat

SEQ ID NO: 58522 - DNA, 334 bp, Zea mays
  unsure (1)..(334): unsure at all n locations
gagaacacgtgataggtagaactaatgataccttcaaaaattattaaccttgngcagctagtcgagcaggcaaacaagtgggaagctctcatcacaccataaacgtgatgaccacatcaagacctttggagatgcttcacatggacctattcagacccgtcgcctatctaagtataggaggaagtaagtatggtcttggtatagttgaagactctttccgcttcacttgggtattcttgttgcatgataaaactgaaacccaatggaccctcaagcgctttctaaggagagctcaaaacgagtttgactcaaggcgataagataagagcgacaa

SEQ ID NO: 58523 - DNA, 373 bp, Zea mays
accttcatctcagctttataggatacacgtgatacggttgactaacgtgctattctgaaatgattgaccctgtgcagcttgtcaggcacgtaaacaagtgggaggagcacatcacatctagaatgtgatgaccacttctagacccctggagctgctgcatatggatctcttcggacccgtcgcctatctgagcataggagggagttagcatggtctagttattgctgatgacttttcccgcttcacttgggtgacttcttgcagataagtctaaacccatggaccctcatcgcttctcagagaccctaatgatttgactcatgtgaaaagataggacgacaccggccgattcagaattttaagggaggaattc

SEQ ID NO: 58524 - DNA, 331 bp, Zea mays
gcttctaaagggagaacacgtgatatgcttgactaacgtgcaattcgtatattattgatcttgtgcagcttgtcagcatgtatacaagtgggatgagcgcatcacattaagaatgtgatgaccacttcaagacccctggagctactacatatggacctctttagacccgtcgcctatcttagtataggaggaagtaagtatggtctagttattgtagtgacttttcccgcttaatttgggatactttttgcaggataaatctgaaacccaagggaccctttagcgctttcttaggagagctcaaaatgagtttgagctccaggtgaataag

SEQ ID NO: 58525 - DNA, 288 bp, Zea mays
caatattgttggactctggaacaaatggtctcaagcaagggccggcattctacacaataaatatttcatttctttttcacactcatatgtgacaacacaaatgattgagtatatacgcgcggacggtctaatgattaggtaaacattaagacccaagaaagaacatttaactaatgctgctccgaaggtataatggcatctgtctctccatagttgatactcaatacataaaatggttcaatgagcattgtaatgcttaatattcatgtcatagaatatcttgggttc

SEQ ID NO: 58526 - DNA, 280 bp, Zea mays
  unsure (1)..(280): unsure at all n locations
gtgtcgctggaggaggatcaagctagtcttcggctggtcttccttcttcatctagatttggtggtaaactgagtaacaatctagtaaactcatgagctctgacgaagctgctgcatctactagagaatatattcttggcaatgggaactcgtcctttgaacaagccttgttaagatctgttaaatcaatgcacattctccatttaccattggccgtcttcaccatgacagtattagctaaccactctgnggtattgacctctctgataactccagcgcta

SEQ ID NO: 58527 - DNA, 362 bp, Zea mays
  unsure (1)..(362): unsure at all n locations
tcactgcctcatcaggaagctatctgagggcttggatcgtacggaggaagacgggtaatggactggccacggtgagtgctctcgggctgcactggcaggtcacggagaggtcgccggagctaatggctggctcgggtaagtcaggcgatgctccgatgaggcaacagtgaatgcaaccgagcactanggcgggctttataaccgtggtgcgggcgtggtcactggcggtcgcgggcgctcggtggttctcgcacgtgctgtgctcataaacgcgctcctcggatgttcacctcgcgtagaacacatggaagcttgcttctgccatggttcaacgaccgaatagagcaccatatctggcgtat

SEQ ID NO: 58528 - DNA, 371 bp, Zea mays
  unsure (1)..(371): unsure at all n locations
cacataaaactcagcttatctgatgattcacaccatattaagtgacgcctgatacttgtntactggccaagtcctacaatggatggctatggcatctcctgctagctcatgactgtatgatgaattcggcccaacttcaaaaggataatctcatcattggactaacaaatgttgcattctataaagatcaggtatgtggcgcatgccaatcaagatagcaacatggagttccacattaatcaaagaatgtggtcacaacaaagaggccattgtgagcttcttcacatggacctcttctgacctagtggcttacatttacattggtggtacgaagtatggtgaaaccaatgtcgatgatatttctccattac

SEQ ID NO: 58529 - DNA, 372 bp, Zea mays
  unsure (1)..(372): unsure at all n locations
tgcaactctggttcggcttcttggcaaatgaaccttcgtcagcacctgtgcccgccgcatgctgttcgccggttcatcagcgccctgaaccatggcccgccgctgtgctacagctattcgatgaaatgcccaaaagcaaattttgcagagaagcatacatcaagttcagtgatacttgttctgcgaatctcgtcagttcactggtataaccaccacctcgacagcaatggattgatactctactttccgcaatctatatttgtaattacaaagtatgtcatttaggctttctccaacaatatccactaaacttcggactctaaanatatattctttggcatttacagaacactctaaaaattttatcatcta

SEQ ID NO: 58530 - DNA, 388 bp, Zea mays
tacgtgacactttgaaactcaacttcattattagccgaatcaattaagattacctgtccggcaatcccggacagtccggagtcttcactcggacggtccgcgacctatggaattggccctgtaccggttatcacattttcagtgtcgtgaaatctccctcgctctatctaataacccgatgcatcttgtgccaaatagttaaccctgtgattctccactctagagatgtgcccaatactgaattcatcaaaagaatgagttatgcccccaacactcttcaaggttactatttagagtaccaatcaaacatcaatattcttctaatacatgttggacaaccagctgaaattaccaaatggttcacatttgtactccatacaattaaaag

SEQ ID NO: 58531 - DNA, 268 bp, Zea mays
atagtcgcgcatgcaagaccccctttaccctgcttacagcgatggggacacttaaactggtcaatagcacattattctctgtagctgatattccttttcagagtatgctcatttgattatttttagtaaggcttaaatcatgagcaacgcttctaaggcccaaattaaaccatagatgaaagccgtcaactagcgcttggatatcttctatcaggatttattacactaatgatagaaacttttgaaaaacacagaatactactcttcc

SEQ ID NO: 58532 - DNA, 272 bp, Zea mays
ctaacatacacgtccgattttatgacagcaacaccaatttcgagcaaataagtttagacaaccatagcacctccctcatctaatgctatatgaccatttgttggcatatgaagtcttgataggatttgcattttctcaaccaaacttcttgagcatattccttagatattttgattaacttaaaaagattccatctctcaattgttagatttgaatatcgagaaagaagctcaattctcctatcatagacattctaaatgtctgttgacatc

SEQ ID NO: 58533 - DNA, 356 bp, Zea mays
  unsure (1)..(356): unsure at all n locations
actacacanactcaagctntgagaacgcacaagatcttgaagatagagacatgaagttataattgtcggtctanaacgtaaaataaaagatcaagcagctgctcttgagaagaaggatttgagctttatacaacagaaagtttattggcagaagctgaagctaaaattgcacagttaaatatggagcttctctcagagtcagaaagctgctaacaggaaaagcagaagtttaatgctatatttaagactgaggtcgagaagagtttaaatctacaaaaatcattgacagaagcttaaaacaaatgtctggaccgctaacagacgatgtgccccctcagcatttaatgttgtctatc

SEQ ID NO: 58534 - DNA, 352 bp, Zea mays
agcttgggttctggtgcttaagctagctaaagatgtgatggaattttccattctcatgttacaacgcaatcacattttcaaaccccgctatccaatcatactattacacaagtcatcatatatatcttcatgctagagaacatgtccatagcatcaagctacacatcatctactaacattgtcataatctaatatctcttcatgcaagctaaaattccacattacgatatgaacatcacacactatcatatacatgtaccttttaatataatctccctccatacactcacatacgaatgactaatgacctatattatttatattagccaattatatttatgccagtccaatt

SEQ ID NO: 58535 - DNA, 386 bp, Zea mays
  unsure (1)..(386): unsure at all n locations
ttttgattggcattgcgtgcgtgcaagctcttgtcaagaatcactctntgatgctgntgttaagagtcgggacggacgtcatcaggtgtgatctctcacnccaggtaagctcagtgttcctctttctattagctatgaatgtgatatgcatgtgtttagctaaatgtttggaatatgatcgctactggtttcttgtgtgtttaatcaagtggtcatttacgtttgagggtgtaggtactttatgatctatttgtttgtcaatcagagcaaagaaaatcataattcaaatttgatttcttcgggacgcgcccagcgtttcactcacgctcgaactcggcgacgaagtcagtcgcctaggcagctgacngtgcagctctacatgccgt

SEQ ID NO: 58536 - DNA, 357 bp, Zea mays
  unsure (1)..(357): unsure at all n locations
ctctggctctncacagcccttattaagactcccattcttaatatagcttcaggggtaagttgatgaagataaacctgatatgttttcagaacttctaccacaaacctgcttaaaggagatcgtagcccagctctaaaaaagattcggaagatcacgacttcattatcttcgggagtcggcacaggcttctctccgtcatctgccctcacgatggatatatctcgaaaatatcttcccctcatgtcttcaagatgactttgtccaatggttgattttctgaagactaaatggctcggtcgccatggaggatcttccgaatccttacctccactgtctgcgcataactgtcactttacc

SEQ ID NO: 58537 - DNA, 349 bp, Zea mays
  unsure (1)..(349): unsure at all n locations
nttaacccccctcgcgagaccttntcccgtttctttctatccataatgaatgcgatatcgaatgtcatacttgatgcatggtcactttatttgttcccttgtatgatgtactgtttgtttcccaatttgaatggatgaatgtatgtatgtttgcgctcgcatatagaacgatccggtcgaagagcccgaggaactcacatgagaagcctctgagcatcagtcggttggtggaggcaagtgtcctttgacctatctctgtcctattcattacttaattcacctcccgcattacacctttatacctaaagattgactatgctcttgtatccatgtccttgtttacctattt

SEQ ID NO: 58538 - DNA, 249 bp, Zea mays
tctatgctagccctcacaatataacattctcgaaaataccctcctctcatatactcaagatgactctgtgtgatagttgatttcccaaagactgcatgactaggcagcaaagccgatcttcagactcttcgcctctaccctccacaacatagctgtcgtaatatcgggatcttcagacaagccttctaggattactttggagatcttctatgtatttggtttcgctattgactcaacaaatccaccagt

SEQ ID NO: 58539 - DNA, 337 bp, Zea mays
tcccgaggaggcaatgctcagaggacccgttcacatggatggatgaacccaatataaacgcgactaggcactctgaaaatttttgtaaagaacaagcctaggccggaaggatcaattgctgaggcatatatggcacgtgataccttaacacttatggccaaggacacgaaggatgttgacacaagatttaaccagtatgatgatagcggtacaaagatgccatagcctaaagacatgtccattgttaagcatggcgcctcctcttggtgagccactaacaatgaggacactgatgatgctatcatgaataactaagtctggaatgtgctacacaatg

SEQ ID NO: 58540 - DNA, 159 bp, Zea mays
cccaaacacacagagatcgaaggcccacagcacaaagcacacccatggcacaaagagcgcagatcgaactacatggcgtgacaaaacgctaagacaactgcgaccgaagcgcacaaagttacaatggggacggctaccgatcaggaaggccacaaaagg

SEQ ID NO: 58541 - DNA, 270 bp, Zea mays
  unsure (1)..(270): unsure at all n locations
accagcctatacatctcttctcctgaaagcangcaagcatattttggtcccatcgctcgaagggcctcaatgttatcaacacatatctacgaacccagaagtcctatgcgttacgcttggaatactcattacctttctagcacaagttgcaaccttggtgtgcctagttacacggtgaaacatccgacatgctataagtggaggtgtaaccaatgggacaatccttgcattgatagttccatctttcggcatatgtagctaaagcgatct

SEQ ID NO: 58542 - DNA, 381 bp, Zea mays
  unsure (1)..(381): unsure at all n locations
ggctggtgtggtgaaggtgatgggcaagaccggctccatgggtcatgttattcangtcagagttaagttcttggatgaccagaaccggctcatcatgaggaatgtcaaagggcccgtccgcgagggtgacatcctcaccctgctcgagtccgagagggatgccaagaggctgcgctgaagccctaacgttcttggtgggctcttgtatggctttggtgtcttcgaatatgtgctatgtatgaacttctgtgaccctgtcttgagagtaataagcctggtgataagatttgcagtttgtctatcctggttgaaaatggaattggtggtgagacatggttattcttgctatattatctattaaacgacgccatgcttgaatac

SEQ ID NO: 58543 - DNA, 238 bp, Zea mays
ttggggtggtttcacgcaatttcgttctcgcacgtcacccataccctaaacaagtgttagggtgcatataaagcacaagtgtttgccacacgaaccaattctgtatatttcgcaacgaacttgcccaatccactaccttaggtccaaaactcatggttggggtggattccgcaaattcgttgccgcacgtcaccaatgacgaaaacgggtgtccgggtgcatacacactccaattttt

SEQ ID NO: 58544 - DNA, 377 bp, Zea mays
  unsure (1)..(377): unsure at all n locations
ctcagcctctatctaagggagcatgttgtggtgcttactcttttcgttcagtcaggcatccttggctctttagccgtatccggatcttcttagtgggggcgagcttctttaacttcttatcgtagtccatctttagagttnggtaggcttcatgagtgtaggcctcttcaccttctgctatttcgagactctcttggagggacgccttgatttgttgctctaggctttccacccacgaatttatgagggtgcagtgggagaaaaggtcatcatagtgagtgacaagagtgtggagatatccggccatgtagactatggtggggacatcctcattaagatctctacctgacagggcctaacagtctttccttcaagta

SEQ ID NO: 58545 - DNA, 352 bp, Zea mays
tctccttgtcgtcattaaccttgacatagaaccactccgatttccagcctgctgcccatttgcttcggtagctgattacaagaaactttgtggttttccggtgagcaaaattatagcaaccaaaattgtcatgcaatccatcttttctagccttcgtctgatagtgcagttcgtgaactcgacaaaagctgtccgcatatggttccaccgcttggcttcggagggcccagatataaacgctaagcctaacgatagcgttaggagtcagctgatgaaagtagataccaaacctcttcagtacctctgcaataatccatgtagggggaatcttaatccagcctttaaaaagctc

SEQ ID NO: 58546 - DNA, 311 bp, Zea mays
tactaacttatcaaggacggaaaggccttctctcttccttcttgtagaagctatgttgagcaacctcccggctttgaagacagagagtattctaaccatgtttataggctctctaaagcgctttatgggctcaagcaagccccaagagcatggtatgaatgcctaagagatttccttatttctaatggcttcaaagttggcaaggccgatcctacactctttactaaaactcttgaaaatgacttgtttgtatgccaaaattatgttgatgatattatatttgggtctactaacgaatctacatgtgagga

SEQ ID NO: 58547 - DNA, 195 bp, Zea mays
agctctcattacaccatatatgtgatgacaacatcaatacccctggaactgatacatatggaccttttctgactcgtggcctatctgatgataagaggaactatgcatggtctatttattcgtgaagaactttcccgcgtcaatagggtgttctttttgcaggataaggctgaaactcaaaggacccataagcgc

SEQ ID NO: 58548 - DNA, 439 bp, Zea mays
  unsure (1)..(439): unsure at all n locations
ntgagagaagttatcaaacctcgtttgagaggtagtatgagtatctatatagaccaattggtttcatgcctaataggtcaaccatgaaagctattttcttaataagacaagtgattgagtagtatacggagtacaagaacgatctacatgtggttttcattgacttggataaagcttatgacaaaatacttcgagatgttatggggtgggcttggacaaatataaagttccaacaaagtatgttggactcattaaggatatgtacaacaatgttgtgactagtgttcgaacaagtaatggagacatagatgacttctcgattagaatgattacatcaaggggttagttttgagcccttacgtttntgcctaggtgacggatgaggtcacaagagacatacaanggaatatccgtgatgtantgctatttgatgaaagtc

SEQ ID NO: 58549 - DNA, 397 bp, Zea mays
tgggaagattcttcattccaacatgggcaagtcggctgtttgaccatgcttactcgccaaaagtgctgcatgataaaacaccttccgcaaatgctgcttattcggaatgccgatgctaccactcatgaagcttcgatgttatagcgaattctaagatgaaagaacgaaccgacttacagatggaatgaccttttagtccataagggtctgagtcattggttgaaacttttataaggggtatgattgtaattccttacaagctccgtcctgtgcctataaatagtgaacagtactcctttactgtcacacaatcccgtaattgcaatcgcattgctctggaattattgtttccggcaaggcgaatgtataaatataccttaatattatgtgttaggat

SEQ ID NO: 58550 - DNA, 401 bp, Zea mays
  unsure (1)..(401): unsure at all n locations
ggatgattagaatgacatcagcctctcccaaatctatcatcttatattgctcgatagaagactttcaacttcctcaatcacatcgagatctgatccaaagatcaaaatatcatcgtcataaaggcacatcataacagactcacccccaccataccgatagtatacacacgtgtcatattcatttacaacaaagccagctgttgtaagagtattatcaaacttttcatgccattgcttacgtgcttgttttaagccatacaatgatgttatcaacctgcacaccttgttctctcgaccatccgcaataaacccttctggctgatccatatagatctcctcatccaactctccatttaagatagctgncttaacatccatctgatgaatgatcagaccataag

SEQ ID NO: 58551 - DNA, 257 bp, Zea mays
tgacgccttgttccctcatgtacatcagcagaaatgttgcggcacatatagaataacgccgcatacccatgtgccaagcgagcacccatccctcggctacgacctcgaccacgaccatgaccacgtggcatgggagatccgcggccaggagaaggacgcgaggctactgtcgggcgataggaagatggatgatggggaggctggggaggtggctcatctgaagaggctgggcctccagaccctgagggagcctgctt

SEQ ID NO: 58552 - DNA, 365 bp, Zea mays
  unsure (1)..(365): unsure at all n locations
tggctgacgacgtgaccgctgctcctgcctgcctgccacttccattactgccggcccatttntggccgtattgaccgtcgcgctatgctggcgctgctgggtcgtgcgctgggtcgcctcgagtcgcggtactggttccgcagtcaaagaggtgcggtaatggtgcgagtggcggtgcatttgcttgcacgtatcgactggcgcgccagttgcatgacgcgtgggcgtgttggaagtcggagaagtgcgcccacttggcgcggatgcatgccgcctgcatggctgcctgccctttcacccgctggtctgggcgaaagtggagggacgcttgttaccgctgaacaggtgcatgcaccgtgcgccgc

SEQ ID NO: 58553 - DNA, 388 bp, Zea mays
  unsure (1)..(388): unsure at all n locations
aactcagcttanactatatnttaaggcaaccgaggcatattcttggctttatctctacatgaacccttaataactctgggtgtatagtccatatagagattgttgagcaatatcacaaggcttggttgaattttaaaatttgcatatgtttaaacgagaagtttcaagccaggataagattcatctgtttatgtgagcatttggttcaaactctgatatatctttacaagacacttgatacataaagatgaattatgatatagcagaaacaattcgggtctgcataaagattaattacaggttgactcacagagattctgatagagaatgccgattctgattaaagatctggacgcttaccgactatcgataaagcggattcngatac

SEQ ID NO: 58554 - DNA, 344 bp, Zea mays
gatgttgagactcgatccgaactttctgaacacctacagttgcagctccttgatgaagatgtctgccaactgagacattgtcgggatgtcaacgacatggacatcaccaagtgtaatatgctctccgacaaaatggaaaatgatttccacatgtttattgcgatggagctgaacgatgtttgatgacatgtatataacgctgatgatgtcgcagtacaccaaagttgtcttgcgttcaggagtgtgcatctcaaacacaagttggcatatctatgtgaatctacaacgacattggtgactacctcatacttaacctgaacactttaacaggaatatgtattcta

SEQ ID NO: 58555 - DNA, 405 bp, Zea mays
  unsure (1)..(405): unsure at all n locations
tctacttncttggtctaatggctgggtctacattgagtgtgtgttcaatgacatctctgttgacaccacaaagatcattggctgaccaagcaaaaacatccttgttgttgaacagagaatttaacagagctttctcttgttcatcaaacagttgagacccaaacaacaccttctgctcggctatgtcttcacacagaagcatagactttggttgatccgctgaagcagctttgtctcttatatgtttattctattgatgagcttcgacttcatctatattatggatggcctttgaatctgtccaattctctttggcccttctagcaacctcttgacttccatgcacaggaataggaacctggtcagatggtatcttcatgcatagatatgctggatggagtatcg

SEQ ID NO: 58556 - DNA, 291 bp, Zea mays
tcagctccatctatgttatggatagcgtttgagtcagtctctttgtcttcggcccttcttgcagcttcctgactttcatggatagcaatgggtccttgatccgaaagtatcttcatacaaagataggcaggatgaaagattgcttccaatgcattgagggtaccacgaccaataattgcattgtaagggtattccatgtcaacaatgtcaaacacaacttgctcagttctagtgttgttgatgaacccgaaggtcactgacatggtgatcttgcccagtgctacaatctgt

SEQ ID NO: 58557 - DNA, 347 bp, Zea mays
tacatagacgaacagcgagaacatatgcaaaatatcatatgggttatgcaaaacgatcgtaagagactagtacgtgcatctgataaatctagtatagcaaattttccttcacacgaggttgaattatgagataatacacgtaatacatcggttaaaggttgtcacgaccagtcacaacccccttatgggatgccgatggacacgtaccctgagcaaacgcaaatcggcagtaaccaatcgatctacacatgcccggaccgtccgctcgcgagcgcggatcgttcgggtcagccacagccggacccaattttaatgagttacctagacacgcactcgagccaccacat

SEQ ID NO: 58558 - DNA, 369 bp, Zea mays
  unsure (1)..(369): unsure at all n locations
tngtatgaagaggagatgatatgaagccttgtggtgcttgatggagttatatcaattcttattagctcaagccatcaatcttcagatgatctatatattcaagattgacccacaggtatttcaattcattatattcaaaactcatatcatctcgggaagatattaaaggtgtaggaaattaagaatcatcatgttcggagaatcaatgccaacaacatggaggaatgtcaaaagatggggacacttatgctcttaagtgcaaggatcctaaattatcatttcttatgtgtcttatagagtcacatataaaaaagaagcacttaaatgctctttactattgcaccactctttgaagaaatcctctcatat

SEQ ID NO: 58559 - DNA, 377 bp, Zea mays
tgtgaagaatcttcatcccaacatgtggctagtctgcgatgccagagccaacccatattagtcttatcaattaagcaagtatcgagttcagctctattgaaatcaactaagtatagctgacccttcagtactcccttagatgctactgaatcatcacttcttcaaagacagtaacacggatatctgtaaaaagacagatgtagcccattttgcataattgtgaaactgaaagcaagttgttatctaatgagtctacaaggaaaacattggaaatagaatggtcacgtgatatagcaattttaccaagtcctttgaccaaaccttgagtattatccccgaatgtgatagctcctttgcgatcatgggttttctcatat

SEQ ID NO: 58560 - DNA, 413 bp, Zea mays
  unsure (1)..(413): unsure at all n locations
gtatcacacatgggaatactaagcgcaacaataatattatcagcatgtattacatatttctctactcgagtcactatgagatgtagtctaacttaattccattgttcaaatctgcatagtgaacgaatatatagtcgattttacttcaagggtgccatagatatctatacacttttatatcgatgtaagcatgtatgttatgtattttattattccaattttagggctttacaaatcctaccccctctaacagaaatctcgtccttcagatttgctagaaaagacatacaaatggagtggtttgtaattccacctttatntcataattgggtctaaattctagagacttaatctttataattactattgagggattatgagagcataagcgtccacttcctattatggggata

SEQ ID NO: 58561 - DNA, 391 bp, Zea mays
aactgagtttcttcgtctgtcactatcttcttaggcacaccatgaatgcagacgatacgagacatgcgtgactcacattatgctgcccccgtgtatgatgtctacactggtatgaaatgagccaccttcgttaagctgaccactaccacctcagatggaatcatatcccgcccgcgtactaggtaggccaactattaaatacatcccgatcacattccacttccactgaagaatctgttatggctgcaacagtccagcggacctttgatgctctgctttgtgtctttgcagtcatcacagatggggacactatctcggagtaatttttcctgccataccacccaacctcctgtttaatccaaacaattttctcttcctgggtatgggaggc

SEQ ID NO: 58562 - DNA, 430 bp, Zea mays
gattgctctagttgcaagtaactcaatgcatttcttgtcaggtgtcacactccaaaagaggtcgaatgctcacttatcatgttattagaggctacaaactgttggtgtctgacgctaattaccaatattattgtgacttatataccattgaccatacactatggaaaatcgctgaatatgtaatacaagattaccaccaacctcttgtggattctgctgatggagggatcgtctaggttcgacatgccgagaccaatgtgctccggcaagatgaagttgcagctaatgttccatgtcctcgaaaactcaacgacaaccttaaatgctcgtttgttgacccaagaatgacaacgtttgggtcatacagtggtctttgcgcagcctggcctaccataacgtgtacaccctctgcttgcttccatgagggaaa

SEQ ID NO: 58563 - DNA, 399 bp, Zea mays
tcgttagttccggtcccagaagacttagtatctagatatgtatagattcagtcattaccttctaaatttctgccacttcgacagcatgaggtgtctaaagagtctactcttctacctcggtcaccttcagctctggagttgcagcttttcttttcttcaaagctgtcaccttccgctcaagagtggatttctcttcttaaaatcttctcatcctccttcaccattctgacagcttgtctgttcagaacgctaacaatcctttttctttttgccccttcagcacccttgctaagctgctcataatcacggtattcaaagtttagagcatgcattacccgggtcaaccttcgtattggccttgtgccgaaagctgctgtcatcaatctgacttcctttttg

SEQ ID NO: 58564 - DNA, 340 bp, Zea mays
  unsure (1)..(340): unsure at all n locations
taacatctgcatggttcccatcctgcctgcccagctaactgcatatgtttcgagcgggagctggatggatgacatgggcacaaatctatctatggcgccgcacgaactgagccacgggaagggggtcacggtttatatggtcgcaagcgcccgaataccgcgcatgatcagggatcgaccgtcgatattcaacgtgataatctgctgtagccagcagagacgatcactaccaggataaacggagcccgattctcgcgttgggttcaacggactgcaatgtgctggtagaagatcaagctgngagaggattctgccggcggggcccacatgccatggaaaa

SEQ ID NO: 58565 - DNA, 292 bp, Zea mays
  unsure (1)..(292): unsure at all n locations
atggacgtgagttcaccggtagttggcgccaatgtcgaggacttgtgtctataatgctagaggtattaacaatgcaacatttagagcgttatataatatattccttcctccttcataacattatgtcacctttgatattatgaattccggacaaaagtttagaatgaaaaacccttcgttagcctatatatgataataaagatatcatacatgaaattcgagatantatatcaattttatcatcaacttcattgtgattgcattatcgaattggtataacaaattataaatg

SEQ ID NO: 58566 - DNA, 378 bp, Zea mays
actaagcttgacttgtctccctgatggaagccaatgccattcttaatgctcaggcgtcttccactatagagcatactacgagcaaatgtaaattatccattttctaacttatgctcgacaattttagcatctaattgtgctatatgaacattttgtcgtgtaatcatagcaatgtgatcatgaatagcatcaatgttaacatctctacatctagtgcatatagtaacatgctccacggtggatgtagagggtttgcaagaatttagttcaacaatcttagcatgttaaatgtcattctcatctctaagaatggatatagaaacattgcatacatctaattccttagccttatcaattaatttatcattctcacattta

SEQ ID NO: 58567 - DNA, 304 bp, Zea mays
gagaacatgtgataagtctaactatatgtcatttcttataagacagaccttgtgcagcttgtcatgcacgtaaacacgtgggaggagcgcatcacaacaagattgtgatgaccacgtcatgacccctggagctactgcatatggacctcttcagacccgtcccctatctaagcataaggggaagctaagtatggttactcattgttgatgattatttccgctacacttgggtgttctttatgcaggataagtctgaaacccaagggaccctcatacgcttcctcaagagagctcacaatgagtt

SEQ ID NO: 58568 - DNA, 477 bp, Zea mays
  unsure (1)..(477): unsure at all n locations
tgtgatatccatcatatctgaagctgacaagctgaagtntggtctgttcacaatgtttccatgggtgcagccagccttcaatatagccgtatctgtgccccgagaagctaccagggcgcagaagtcagcatgcccaccaataacttcgtcaagggcgtcaacttcgccttcaatatattctaatgttcttggcagattctcagctgaaggtgtaaatttcgaagagctagctccgacagagtgaaacacatccttcagccgctgcacacatcggctgccgaagcttaagcatttctcctgaagatctttaaaggatttctgcaaatttgagtatttatccacttcagctttcaggctngcttcaaaatatgtcttttcttgctcgaatttttctgattgtcgagcaattcattctctaagttgcattttcaagttggacttagccaaagagccctcatggtctggatacaaaatctt

SEQ ID NO: 58569 - DNA, 373 bp, Zea mays
  unsure (1)..(373): unsure at all n locations
tcgcacctatgaactaactaggctgcatcactcttcgctgttggncaatacaatcccgacctgaagaccttcccgactagtgtcttggatgctgcgtgtattccacattgtctaacatggacctcatctatgagtcgcttccgagtagatgagagaatgcatntcatgaggatgcctgatgcaccccttctggatagtgtctccccaatgagtgtgtagtgagctgactgtctagcgatgcgctcggctgcatatttgtcatctggttcctcttcattctttatatatctgatgatcggccttctccagtcatcagagtctgactctggttgattcacgatattacactcttctgcctgatccattgagatgc

SEQ ID NO: 58570 - DNA, 368 bp, Zea mays
  unsure (1)..(368): unsure at all n locations
tgaaactcatctcgctctactatgctaatatgctgaaacatatgttttctatattgagaccctcgaagacgaagcctccacaattgattctgtcgacatgatatgtctgcacaaaagctcagatattgactgtcacaataaagaagccaactaaggcagattataaaatgtgcctaaaatatgtgtctatgtaaacctgctactcacctgtggaagaaactcaaaaatgtcatggctcgtattaaaaagttgcatgactggtacatgcgggcatcttcaattgcagttacactatccgtgtatatatccaaacatgctttattggntatacgaacagccctcgcacatttgaggcatgtggtaatgat

SEQ ID NO: 58571 - DNA, 284 bp, Zea mays
taacatctccatggttcccatcctgtctgcctatcttactgcatatgtttcgagcgggagctggatggatgacacgggcacaaatctatctatggcgccgcacgaactgagccacgggaagggggtcaccgcttatatggccgcaagcgcccgaatttcgcgcacgagcatggaacgaccgtcgagatcaacgtggataatctgctgcagccagcagagacgatcacgaccaggaaaaactgagcccgattcgcgcgttgtgttcaacggactgcaatgtgctg

SEQ ID NO: 58572 - DNA, 331 bp, Zea mays
ttaccatatggacgctgaaagtgccttcctcaatggacctatctaagaagaggtctatgttgagcaacctcccggctttgaagatagtgagtaccctaaccatgtttacaaactctctaaggcgctttatgggctcaagcaagccccaagagcatggtatgaatgcctaagagatattcttatcactaatggcttccaagtcggaaaagctgatcctactttatttactaaaactcttgacaatgatttaattgtatgccaaatttatgttgatgatattatatttgggtctactaacgaatctacttgtgaggaatttatacgatcatga

SEQ ID NO: 58573 - DNA, 395 bp, Zea mays
tggctgacgacatgaccgctgctcctgactgcctgccatcgtcattactgccggcccattattggccgtattgaccgtcgcgctacgctggcgctgctgggtcgtgcgctgggtcgccttgagtcgcggaactggttccgcactcgaggatgtgcggtaatggagctagtggcggagcagttgcttgcacgtaacgactggcgcgccagttgcatgactcgtgggcgtgctggaagtcggagaaatgcgcccactcggcgcggttgcatgccgcctgcatggatgcctgcccttttacccgctggtctgggcgaaagtggagggacgcttgtaaccgctgaacagatgcatgcaccgtgcgcggcggtttgcttcttctgccttggccacttgat

SEQ ID NO: 58574 - DNA, 370 bp, Zea mays
  unsure (1)..(370): unsure at all n locations
ttgagttcgtctnctctcgtttgcatcgcttcgggtgcttagttcattctcgtcgcttccttatgcgtagncactagtttatgtgtgaacctcttcttcagattaattctttgaatcctcttcttaattttcataaacccattctagattagggaattaagattgtgttgattttttatgtgaacaggagaaccaggaaggggagctctcccctttntcctcccgactctgtgatccttacttaagaacgctggntttaagaatgagtggttgcccttcttcgacccttactggccaaccggagagcggacgactaatgtgttccacgtattgaacaggatctatggtcgggtcgtgaaccctggacgcc

SEQ ID NO: 58575 - DNA, 314 bp, Zea mays
ataaagtttgccgtctaatacacccttaatagctagtgaaccatcacttcttctgaagacagacacattctacattttgttaatagaaccggtaataccccatatgacataaattgactaacagattacatattatatccaagactctctactagaaatacattttagatagaatgctcattagaaatcggcattctacctaaccctttaccttgcttgatcccacactgaaatattgatcttggaatcctattctgacgagagtgacatcttctttcccgcatatggttggctcgcttcaatatcacttgacc

SEQ ID NO: 58576 - DNA, 337 bp, Zea mays
  unsure (1)..(337): unsure at all n locations
tgcagtcgaagttgaaaaaagttcgaactctgcaaaattcttgaatgatcttcaagacaagtgccatttactctttcaaccagtccatgtgactccaggtgtctaactgacgcataataaatcctcgtgccaatctgatcgtaaatatccttgaaagtctcaggcttaaactgtgttccattggccacagatatagctttcggcatgccgaaacgataacgatattttgtcagaagaacttctggactgtgacctgaattattgtagccaaaggcttcgcttcaatccacttggatgagtattctacagccaccacaacatatgtcaaantaccttt

SEQ ID NO: 58577 - DNA, 403 bp, Zea mays
  unsure (1)..(403): unsure at all n locations
tctacagggagagcacattntgngactaaccaatgttcattttgatgaagacatggtctgtagcgcatgtcaagcaggaatacaagttggaacccatcatccacacaagaacatcatgatgaccgacaggccgcttgagctactccacatggatntattcggaccaatcgcctacataagcatcgacgggagttagtattgtcttgtaattgtggatgactattctcgcttcacttggagtattcttttgcacgacaaatcacaaacgcaagagaccttaaaggggatcttgagaccggctcaaaatgagtttggatgagaatcaagaaaatagatgcgacaatggacggagttaagaactctcaaattgaaggtttcttgaggatgaaggcatcaagcatga

SEQ ID NO: 58578 - DNA, 260 bp, Zea mays
ttcccatggtggagtaatacatacctttaggctatagataaaacattatcttgctacctgtgactcttactgaaaatgtacaagctcgatatagatagagatgctaggtcgcataaataaccaacttatgaatcagagaatcagcaacaaattatattgaaagctcctgtcatgattgctactaaatctgatctttttgaacctcatgctactgatgcttgttgctatgcctttggtttgcaaagatgctttcttttcta

SEQ ID NO: 58579 - DNA, 415 bp, Zea mays
  unsure (1)..(415): unsure at all n locations
tcatcacatgaaagacaattgccttggaggaaagatattatttcatttctccaatcttcactgtgtactggagaaataataagcactgctctttccatgagctcaaccgaaggtgcttttattgtttcaaaaaatactttcgagggtagggggagcccctgagccgcttgattggctagcaaatctacatgctcattttcacctcttggaatattcttgacagaaaaacctttgaaggaagcttccaaccttcgaattgtatccagatatctttcaagctttggatctcgtgccttgctacttttgtccacgttgccagcaataacttgagaatcagtctntaagatggcccttcttattcccattgcccttagtttccgagccncaatagaagtgcttcgtactcagcaatatt

SEQ ID NO: 58580 - DNA, 366 bp, Zea mays
  unsure (1)..(366): unsure at all n locations
tctanagggagaacacattntgtgactaaccaatgttcattttgagaaagacagggnttgtagcgcatgttaagcagggaagcaagttggcgttcatcatccacacaagaacatcatgacgaccgacaggccggttgagctactccacatggacctattcggcctgattgcttacataagcatcggcgggagtaattattgtcttggaattgtggatgactattctcgcttcacttgggtggttcttttgcaggataaatcccaaacccaagagaccttatagggattcttgagacgagctcaaaatggagttgacttaaggataaaaaagattagaagccgacatggaacggagttcaagaactc

SEQ ID NO: 58581 - DNA, 457 bp, Zea mays
  unsure (1)..(457): unsure at all n locations
tgacaacatcagattcttctatacagacattgagatgacgtctcatattatcagcagcatcgatttcaccgtaccaatcagtagactctgtaactcccccggcacatggggaccctcnaatgagatgaacacgatcgtttgttatcctaagctctttgccagcccctgggcgtatggccatgccatttggatctaatttggccatcaaccacctgataagtgatctgctcttcaatgcatcagttcgcaaaccaaatatgctagaaaagcccaaactagcgaccgcatcacggctgcgatcgctcattatccatgatgatacaataacatccgatggattgcatcggatattcaacttctcgaagcataaatgaatagtcattactacagacagcatatatatacgtagaactaatgatactatacttactacacggcttggacatactagtataaa

SEQ ID NO: 58582 - DNA, 411 bp, Zea mays
  unsure (1)..(411): unsure at all n locations
gggtctcagagtcagcagatggcanantgctagcggcatatctctgcgctgcgctgcacagcagcagccagccagccagccccgagcgagcacagcgcgcgttgagcagttttgttacagcgcagcaacaccggcaccggcaccggcatgcaactggaagcggctggggccggtggagctagagaacgaggaggaaacaaacaactgggagtggcctttngctgctcttctagttctgaagatctgacgcttccatcatccgcatgcagcgcgcccccacgcacaggcacaggcacagtcgtcgcggcaccccatcgccactttccccggtttgcctggggcctgtgccgccgtggcccggtcgctagtctcgccacagtgacagcgctgtcccttgtctgaaccattcat

SEQ ID NO: 58583 - DNA, 461 bp, Zea mays
  unsure (1)..(461): unsure at all n locations
cttgngaactatgcccgtattcaatctgcctgagccgttactattatagcttgccagatgccctcgttccggtcgaccacgaccaacacccaacataagacttctctagttatttagccaagaccagagtcatgatagtcctcatggtagcactggtttcccgggtgggcactccatgttccaattaatatgcaataatcttgtntaaccatcgggttaacaaccataatgtaaacttaagaaggtttgaacattaatatcataaacgggagtgactgcataaagctaaagtgtagcaatagcatagctactaatgtaaagtataattcccaagtttgatcacggaataacggtggaaagggtatctaaatatgtaacccgtcaaattatgcatatatatnctaaaagatanactttattaaatgtattgtttgggatcaaacagagtatgcagagggaga

SEQ ID NO: 58584 - DNA, 341 bp, Zea mays
  unsure (1)..(341): unsure at all n locations
acgtgaactatagatactcaactcggagtcaatgctttgataagtataacaattntgtctcagcgtgattatggatgcactctagaatctcttcatcaacgctaccaaaaaccatagacccgggctggtagacacctgcaatagcatattctcttaactcagaaatgtcttcttcagagagctactggccacccatgtgctgtaaatcaaaagccttgttctccgagaaagttcttcattgttcttcaacttcgaagccacagcctcggcaacaatgtcttcacccatttccctcttgggaaccacattagctataattctgtcgatctctgatagtgtgg

SEQ ID NO: 58585 - DNA, 468 bp, Zea mays
  unsure (1)..(468): unsure at all n locations
tctaaagggagaacacattttaggactaacaaatgctcattttgttatatacacgnattcgagcgcatgccangcagggaagcaagttggcactcatcatccgcataagaacataatgacgaccgacaggccactagagctcctacacatggatntattccgcccgatcgcttacataagcatccgcgggagtaagtactgtctagctattgtggatgattattctcgcttcacttgngtattctttgtacaggacaaatctcaaacccaagagaccttaaagggattcttgagacgggctcaaaatgagttcggcttagcgatcaagataataataagcgacaacgggacggagttcaagaactctcaaatcgaaggctctcttgatgaggagggcatcatgcatgagttctcttctccctacacgccacaacataatggcgtagtggagacgaagaatcgaactct

SEQ ID NO: 58586 - DNA, 402 bp, Zea mays
  unsure (1)..(402): unsure at all n locations
tatctatgctatacttgttgcgttcaggaagttgtgccactattttatgcacacagangtgaggtggtgatctccttcctgttaagggccattctccacaactctaacgccacaggcaacatcaccaaatgggctgcggagcttgctgagttccaactgtactttcagcctcgccaggctgtgaagagccaggttctggctgacttcatcgtggaatggaccccttccccaagcgctcctgggggtccgaatcccgattcggactccacacctgcagagcccaggactccggtcttcaccgagccccactggatgctcttcttcgacggatccgctcgccaacanggtggcggtgctggagtggtcctcatcgacccaagcggagatcatgtgaagtacatg

SEQ ID NO: 58587 - DNA, 364 bp, Zea mays
ggcaccttcagttcgaatcatatttgctgatggagcagaggttgtatctattatggtgtaactctacctaagagtctcctatatctttccttattgagaagtctcgcctcaaacatggcattgaagattatgtctaataatcacatacttgcagtttccattaatctttatgtatatgttaacttatccttcattagactttgcggtaggcaaagaaaaccaaggtaactgtatagaacgaaagttgtgaatcgactttaaatctgaaagatgtcgacctttgtgagtcttatatgtgcccggaagatatatagacattgttgcatgcgaataatttaattctgcagtgacctaatcttatgct

SEQ ID NO: 58588 - DNA, 353 bp, Zea mays
  unsure (1)..(353): unsure at all n locations
gaccttagatactaagcttagtagttattgaatacaagaacctaatagaacagtgtataatgacttggcaagaagggtacttgtcagtaatgttatcttgatctaagtctgcgagtatcttgtttagctggcgatggcaantatccgcgacacgaacctgcctcatctgctcttcatccaggtctgtgcccttgagtgttccctagaatagagcatacctgagagaggtttgtcgattgcatgtcgcatgtacgagaaagccttcagccttctcaatgctgtctgctcagaagcttgctgcacatgtagcgcatgctggaggtcatcactatgaacatgaatgaacagaacac

SEQ ID NO: 58589 - DNA, 160 bp, Zea mays
acttgaaactcagcttagggaatagttaaaatgttcccataatgaactgattaccttttcccctatgaccaaacctatggacctgaaaccaaacaacaagggctaggcaaatgagccatttgactaagtggaaaccaatttataatatttaagcacttga

SEQ ID NO: 58590 - DNA, 504 bp, Zea mays
  unsure (1)..(504): unsure at all n locations
tcggcatcaaactacgttccattgtccacggtaatggtcttctgcactccaaagcgacacacaatattttgccagataaactnttgaacagtgaccgaagttattgtggctaaaggttttgcctcaatccatttagaaaattattctactaccactacaacatatcttaaattcccttgtgctagtggaagtgggcctagcaaatcaaggccccatctttgcaatggccaagtgggctgtatcaattgagttaaagacgaaggctntttttgatctcttgcacatttttgacaaccttcgcatttttggactaattntgctgcatctgaagctgccttcggccaatagaatccttgacgaaaaactntacccaacaaaggcctagatccgatgtgagatccacacaggcctgcatgtatntctttcatcaactctataccttcagctctggataaacatttgagtaatggagaacagaccncatgcttgacaactcccctctat

SEQ ID NO: 58591 - DNA, 264 bp, Zea mays
  unsure (1)..(264): unsure at all n locations
acttacgaggaggacccttcngctatcttatgctaacagctttattcgatgaccacctctttctatgagaccttcggcgacgaagcacagacccaacaacgttgattatacttacttnttcttctttctaaagaccaatgcggatttcacactgtgaaatcctgggcctaaagtgatccttatggaaaagagacctattcttagggacaaaaatacacaactatntgttatctatatgcctgaatgtcgctcctaggatatatg

SEQ ID NO: 58592 - DNA, 431 bp, Zea mays
  unsure (1)..(431): unsure at all n locations
tctaaagggagaacacgtgatatggttgactaacgtacaattcgtataagatagaccttgtgcagctggtcaagcaggtaaacaagtgggaggagcacatcacagcaagaatgtgatgaccacttcaagacctctggagctgctgcatatggacctcttcggacccgtcgcctatctgagcataggggggagtaagtatggtctagttattggtgatgacttttcccgcttcacttgggtgttctttttgcaggataagtctgaaacccaagggaccctcaagcgcttcctcaggagagctcaaaatgaagttgagctcaaggtgaagaagataaggagcaacaacgggtccgagttcaagaaccttcaagtagaggagttccttgagaaggaangaatcaagcacgagttctccgcttcctatacaccac

SEQ ID NO: 58593 - DNA, 442 bp, Zea mays
  unsure (1)..(442): unsure at all n locations
ctataganacacaagcaaaggagaccacagcgcacaggagcgtaagaaagaatgttctatattggctgcgccacaacgcgcgcagtatgaggttgacgtatggccgaaatcacacacttgatggcgtgaaaggtgaaagaccccacttgagattgaatgctgctatgctaccaaagggacggcgttatttcggaccttcagcgtaaagcacttcggcatatcgcaatctgaactcatgatttcaaacaaattaatattgcgaggggctactgttgaggaccttctgtgtccgacggtccgccataacatgagttaccagtatttctggggacaatgtgtaacaggactctcgacacatgcgaattgctcagaccgagaaatacgaagctgatcagacccgagggttgacaagaaactcctgcgaacagcaagagggatccga

SEQ ID NO: 58594 - DNA, 451 bp, Zea mays
  unsure (1)..(451): unsure at all n locations
tcaaccgtactcccncgcgtgctctcgacctcaccggttctctatatcaccggcgtttgccctgcaaacggcgtgcccgcggtcacccgatcccccgccaccatagaccggctagcagagccttttccagccacgcccaaccatcagagtagactgtgcatgcctcggtgatagctccccgcaggaatcggactntgcctcgccagagaagccagtccacggtcgccggacttcacccgatcgccggtgaacgtagactgggtaagtctctccaccatttttcgattccttgcgcacatagcctctacgtcatctcgtggagctcatcgtgccgtttaattgaactagatcatcgtggttaggccggagcacccaccgccgacgaagtcacccgcctgcgcacgtgggccgaccgaatccgtgcaccaccgccgtcgagccgtacctcgct

SEQ ID NO: 58595 - DNA, 89 bp, Zea mays
ttctcgcttataagtaacttgggcaatgaaaactaagacatactgccagtgcataaataagaatactagcgcacaatgaagtgccgtat

SEQ ID NO: 58596 - DNA, 427 bp, Zea mays
tctatagggagaacacattttaagattaacaattgttcattttgagaaagacaggatctgtagcgcatgttaagccgggaagcaagttggaacccaacatccacacaagaacatcatgacgaccgacaggccgcttgagctactccacatggatctattcggcccgattgcttacataagcatcggcgggagtaagtactggctaattattgcggatgattattctcgctccacttgggtattccttttacaggagaaatctccaacccaagagaccttaaaaggattcttgagacgggctctaaatgaggtcggcttatcgatccagaaaataagaagcgactacgggacggagtcaagaactccaaaatgaaagccttcttacgaggagggcatcaacatgagtcctctctccctacacccccac

SEQ ID NO: 58597 - DNA, 361 bp, Zea mays
  unsure (1)..(361): unsure at all n locations
caagacattcaatcatcagatggctatggtacgctcaacagcttagtgtactcgcgacggagaggaatccgaatgtgccgaaaccgctccaatctctgagtgatgaacggtcaggctgtagtattgatgatgcactgcccttgactgacangtgatgctaggaactgatctgagatatacagtgtctccattaacccaccattgagttggaaatccacgtactgagtgatatgttaactgataactggctttcatgagcaaaatacttgtcgttgcggaagaattctcaacccgaaagataagggttgtcaaacttttaacagatagattcttatggatatgtatgtttaaattggatttt

SEQ ID NO: 58598 - DNA, 427 bp, Zea mays
tacgcgtaccgcgtacggagcccataccactggaacccatctgctcgcaatacaagactctgcatgctgcatttcctacataagataacctcatcaaacagactagtcacaatggctgacagcaactgatcagctatccaaacagaacaatgtgtgctgggacttagttttttgtggcttggagaatgacacgatgtgtcagagtctcacgtggtaagctgggatttttctttcggcacgcgatagtaattatacttatttccagacagaacaaatgtgtgctccttgtgcgcccaaccgcttttaatacgcgcgaatatacgtgtacgagcttgccggccgattaatttcccacaccgttggactgatgaggaactaaaataatactatattaatatgcagatgccaaattcaccatacactaccc

SEQ ID NO: 58599 - DNA, 384 bp, Zea mays
  unsure (1)..(384): unsure at all n locations
taactgagaggtccacaagatantntntgtctgtgaatctattatcttctcttatgccatcaatataattgtcaagttgcaagtcaagctttaacaagtcagtgtttgacatgtcattaggatagaaatcggctagctttcgtaccttgtgtgcatcaaaagaagcaaaggagttggaaggatctaatgctgacatacaagaaagcaggtccatattagcctcactaaaccgactatcaagctctaggctaatttgatcaatgaccccaatatatacttctcttctgaagtggccatcattggtttgcttatgaacaaatcgtgatgatcttccataagggctattatntccattcatagcaggaacttcgatatcatgtttgt

SEQ ID NO: 58600 - DNA, 311 bp, Zea mays
gtagacatcatgattttgatgtatatcagactcggtatatgatgtttatatattagaccgtactaaattcgttatatgttatattacttttctaataatgatattatggctcacactgtcataactaaaatgatgtgttatacataatttcctttctaatgaattagatccttctgtcatgcaatagaatgttatgataattaatagagtaattattctttatcatgattaattaacccatatgccatttgttcttatctagatttatcgcatgattgatgagttcatataaataatccacatatatacga

SEQ ID NO: 58601 - DNA, 350 bp, Zea mays
tctagcttccttgccagtgagaagcttcatagagtggtttttcctatgtcaagttaaaagttgctggaacattgtacgactattgtacctttgcagcattagtgcatgggtgatatgccgtattaaattataaatgagaagaattctctctatgaaactgagaccatttgggaaaccgtaagcaccttactgacctctgaatacactcctagaaacttagaacctgcgtatgcatttttcttatatacttgctattgtctgtctttgtctacgaaaaactaaggaaagtgtattgaattatttaaacatttccaaaaaatttaattgccaaacgatgtgggcattaaaaa

SEQ ID NO: 58602 - DNA, 313 bp, Zea mays
  unsure (1)..(313): unsure at all n locations
gtccctatccagggttctattngcataacactaaaacaatacaacttgcttgagattatacctagtgaatgctctctaggtgtgccaatcatatgcactgtcaatgtttatgatgtcatgctcaagctttagttacagtaacaccagcggtgttacattcttccgcccataaaagaatctcgtcccgagattaacagtcctacggtaagtaatggtaaacgaaacacatcacatcttctatctcttattctaggacaaggcaggggtggtctgtgattcactcctttattataacaagggtgttcactttaca

SEQ ID NO: 58603 - DNA, 300 bp, Zea mays
  unsure (1)..(300): unsure at all n locations
agtcaagaactcgcgcgcgcgcgtggaccgagtaaaccctctcaccacttaccgattcattgcgcgcatagcctctgcgtcaccccgtgaagctcctcgcgcaccctaatagaactatgccgccgtggttcggtcggagcaagcgtcaccgtcgatctccgccgcccgtgtttgtgggcaagggagctccgaccacctntgacgccgacccgcacctcgacaggaccgtcgcgaccttccgaacatcacccgccaccatgacggacctgcctcgccgccaggaagccgcgccacctatcc

SEQ ID NO: 58604 - DNA, 131 bp, Zea mays
agcttaccaaggacggaaaggactcctaaagacattttgatagctagtgacaccacccgtgaaaatggaccaactgtttacctaaggcctggccacgcccaactgctgagcaaagatctacctaggtccag

SEQ ID NO: 58605 - DNA, 290 bp, Zea mays
  unsure (1)..(290): unsure at all n locations
catccttcttcttacaaacagtgctggacatccncaatgtgaagtacttgggcgaataaatcccttatccagcaactcttgcaattgcttcttcaattctgccaactcagcgggtggcattcggtaaggcctcttggaaattgtggccgttccccgttgcaactcgatggcgaattcaatatcccggtctggtggcattactggcnattcatcanggaagacatctgcatacttacagaccactgggatcttcttcagaggtaactccgtcatagagaaagcacatgact

SEQ ID NO: 58606 - DNA, 215 bp, Zea mays
tctctacttgatggtctagtatcaccttaaggctcccattgtctcgtagacccgtttgattgaactagactgcctggaaacaccaagaacacctcggtttgtctccggtattcaccggcgtcgtgagcagacgagctcatggccgaattcgtgcaattgatggagggattagtgtccccaagggtatgatttggtgttagccaagtttgggcact

SEQ ID NO: 58607 - DNA, 399 bp, Zea mays
atttattgtcagacacttggctggggaatgtgacgttggatacgagaaaatccaccaaaatctgctgatatgcataatctgatagtatagtggataattgaatagcacgtcatgtaattttcttgttatacaacagtgtctcataagagatgcctaaatgtttctctctgcttcattccatgcataccagcctcaaaaaaggcactcacctccactttagtgcatagatatgtcatcgctgggtcgctaattcatatggtactttcccagagatttgagtgctcgcctgcttgatgcttggaggaatccatcacagcttggagaaaccgctcgccattcgcgtactatactcggtactttggggcataacgccggctgttattatgtgtcgttgtacaa

SEQ ID NO: 58608 - DNA, 359 bp, Zea mays
  unsure (1)..(359): unsure at all n locations
acacataaatactcagctngcacacaactgcaatctcgtacctctgaagtcgttctctatatgttcctcatgctcttgctcattctgcgaatatacaagattatcatcactgaagaccacctacgaacttgtcgaggtactccatgaacatattgttcattagatacatgaagtatgctggcgcattcgtcaatccgaatgacataaccatgaactcatatacgtcatacttggtgatgaatgcgagcttctgtatatccgaagagcatattctgaactgatggtacccttacctcagatctattcttgagaacacactggctcctctcaactgatcagataaatcctcaattctgggc

SEQ ID NO: 58609 - DNA, 405 bp, Zea mays
gcaaagctccacccttacacacaggatgtaaagggaacttgtatgatttatcactaccaagatcaaatgacatgtgatctcacatgatagtggtgtgccctcttgatccaacggacatgacagatgttgcttgatcacttcacaaacaacatagtaattggttcaaggaggaggtctatagaagataacatatcgatataatctcataatggagcatgactactaactatgatactagcgtgtgccgagtagcgcaaccatgtgcgcacacacagaaagccctctgctttgacacggcaccactgcgttagtcattacacccttatcagacatacccaattagacatcccatgctacacaaatgaacttggcataggtgacaatatacaaagagatacttcacct

SEQ ID NO: 58610 - DNA, 301 bp, Zea mays
agccaactaagtattccaattttttgtgttgggccactcagcacacaaatatattttagaaaagggttgaccctatttccctttcaatctcccctttttggtgattgatgcccacacatacccaagccaatatataagtgcagaattggactaagttaagttgcataaggaagtgcaaagttacttggatttaaataatatacatttcataaaatgctggatctttctcatattaaaatttgacacgcttgacactggtttgtttgcaatgtttgaaatctttcaaagctttgcaatagta

SEQ ID NO: 58611 - DNA, 295 bp, Zea mays
  unsure (1)..(295): unsure at all n locations
taccgcattngaagcatgagcgcattcncttggctnttgtctcgcttggctgccccttgcgacctttaagcgctgtcttgaagcgcttaatgatgagggccatctcctcatcattgaacccagccgcctcaacttgcgccaccttgcttggtagtgcctccttgctccttgttgccttgagagcaatgggttgaggctcatgaataagaccgttcaacgcgtcctccacgtattttgctccttgatcatcattcggccgcttacgaacttcccaagaacttcttcgggcgacatt

SEQ ID NO: 58612 - DNA, 355 bp, Zea mays
gaccttagatactaagcttaaatactctacctaggtacgttccccgagagcgaggaaccttacctgcgcctcgcatgaggtccacgtcgggggtcctctctataactccgtctcaaccgagcctccacgtagggtctttcaaatctccgtctcgcccgaactcggtctcgagtaagtcgcatgcgcaaatgtattcgtttagtacttttttgagtgtggtggatgttattatgctcgtcactatgtcagtgttggttcgtggatgaaaggatgaacgatcatttctgtatagacttggtccaccgaaacattccttgctgttttaggcactcaagccttcatggaataaaaattt

SEQ ID NO: 58613 - DNA, 195 bp, Zea mays
  unsure (1)..(195): unsure at all n locations
actcctaacacatataagcactaagctacctacagcggcaccggacagaacggaactactacacctgatgaatcgaaagcacgcgctttactcggcgacggcttgaacaacgacatgatcgaatgatggtgcctngacaccagcgccactcatcacatgaccggccgacgggagttcttcaccaaactccactct

SEQ ID NO: 58614 - DNA, 354 bp, Zea mays
  unsure (1)..(354): unsure at all n locations
ctgttagntggacgagattataaagagtggctgtgagtggaccttgttatgaattgacttgaaaccgcctacatatattgatattcatgttactatcttaagcatcatttctttacagatgcatttactgactacctagtcaagggaggaagaagaagacatttttttagttcaatgaaagtaaataaattattgagccaacaatctgacttattttaaacgtccaagagagttgctgcttctgattaaagaaagaaacctgnatcattccaataactaacatttgcctcaaatttctattgtttaaaaagtgaaaaattaacacaaaagaagtactcaagatactatgctata

SEQ ID NO: 58615 - DNA, 378 bp, Zea mays
ccaccgaagaacaaagaagagcccataattgtctacatgtcggagtacaacgaccctacatcaaattcacatggtatcatgtgtcaatcactttctctcaggaggaccttcatctcatagaatacctacacaatgatgccatggttatttcttgcgtcatataaggatttctggtctaaatattctaaagatacaagagtgcaacaatatatatttcaaagctttaggccatacagaacaaaagataaatgatgatgcaacacatacttatgagaggaacataacagcactgaaaatacatgctataccttggtactacacacccaaattgacagtttattatttgatactgaaacccctatagcatatggagagaca

SEQ ID NO: 58616 - DNA, 266 bp, Zea mays
actcaacttcaattgagattctgactccgcccgctgttctcttatttcttgaccttaacgcaactcatttgagctcgctcacattcctatcaagtctcttgggtagaaattcttctgataaatacaacctaatgaagcgagaatatcactccaatactagacagactacttccgcgatgctatgtaactatcgggccaataaaccatgggcagatctccagtggcctgtcatcgcatgaagttcattgtgtggagaggactccaac

SEQ ID NO: 58617 - DNA, 280 bp, Zea mays
  unsure (1)..(280): unsure at all n locations
ntgtaattatttaagacctacaaagctgaagttgtttatctctccgagaggaaaattatacggttcaggtctgatcgcgtgtgtgataatatactatcagcctaattcttctgatctttgcgtggaacatgagattattcatgagagtacaccggcatactcaccacaattcaatggtgttgctgagagaaagaatcgtactctaactgatttgtgtaacgccatgttagagactcttcangactatctaangaatggtggggtgatgcgatctttacag

SEQ ID NO: 58618 - DNA, 388 bp, Zea mays
  unsure (1)..(388): unsure at all n locations
tgcaagcttagtaatggcagactttgtgctaggcttatatgtactctcccctaattgatgtaacccttgagaacttttgagatcggtgggatgttttgaaccatgttatcttcattcgaacttaatgctatgattatggcaatcttctttccatatgagataatagcatgttgttcgaaattgtgaattgggattaaaatggcgacgatctctgtttttagatggcagctatgcagcgtcgcgggcataacgagcaagtttcttcgccaccttctccaactcccacagtgtangagctgatggcccatcagaacgagattctgcgacagctcttgcatcgccagccccacccttatcagcatggtggaagccagccgcagcgacctcc

SEQ ID NO: 58619 - DNA, 349 bp, Zea mays
cgacattgtctccatgttggaagccaatgccatccttaatgcctttgtgtcctccattgtacagcattctacgagcacaattaacatgttcattttctagttcatgctctgcaatattagcatctagtttagctatatgatcattttgctgtttaatcatagcaatgtgatcatggatagcatcaacattaatgtctctacatctcatgcaaatggaaacataatcaacagtggatgtagagggtttgcaagcatttaattcatcaatcttaacatgtaacatggagatagtcgcctagagggggggtgaatatggcgaaactgattattacaaatatatacacaacta

SEQ ID NO: 58620 - DNA, 354 bp, Zea mays
  unsure (1)..(354): unsure at all n locations
cgactttcgtgctgcaaaacgactgctgcagcctacttacaacagttaaggtgcgacaatggattctatttttgtgattcaaattttcgttgttaaaactattgcacaaacatattcctgtctgcagggcctgatactcagcaatgccctcagagcacagaaagatgctgaggacgaaggatgtactatagccctgagcaaccttcgttccgaaagaattgaactgaggaacgaaggtctcgaanaagacaaaatattatactcattgatagataaaataaaggaggacgaagctgctttcaaaagtcaagctgaagctcagaaacgcgaaattgaaaaccttcggaaacaact

SEQ ID NO: 58621 - DNA, 361 bp, Zea mays
  unsure (1)..(361): unsure at all n locations
ntacttagttgatgttgcagaagaagaggccggtctagatacatgcttaattgctaagactagcatgggctggctgtggcatcgccgcttatcacatgtggggatgaagaaccttcacaagcttctaaagggagaacatgtgataggtttgactaacgtacaattcgaaaaagatagaccttgtgcagcttgtcaggcatgtaaacaggtgggaggagcgcatcacnagcagaatgtgatgaccacatcaagacccctggagctgctacatatggacctcttcggacctgtcgcctatctaagcatangaggaagtaagtatgggttagttattgttgatgactctttccgcttcacttgg

SEQ ID NO: 58622 - DNA, 385 bp, Zea mays
gtagcataagtaatatgcaaattgactcaagcctagctacgggtgcataggtttcaccgaaatccaaaccttcgacttgtgaatatcccttggccacaagtcgggctttgttccttgtcaccacaccatgctcatcttgtttgttgcggaagacccacttggttcctaccaacatttggttaggacgtggaactaaatgtcatacctcatttctcgtgaagttgttgagttcctcttgcatcgccagcacccaatctgaatattgaagtgcttcctctaccctgtgtggctcaatagaggaaacaaaagaataatgttcacaaaaatgagcaacacgagatcgagtggttacccccttatgaatgtcgctgaggatggtgttcac

SEQ ID NO: 58623 - DNA, 438 bp, Zea mays
  unsure (1)..(438): unsure at all n locations
ctcagcttctaagggagaacacgtgataggtctaaccaatgtaactttcgaaaaagatagaccttgtgcagcttgtcaagcaggtaaacaagtgggaggagcgcatcacagcaagaatgtgatgaccacatcaagacctctggagctgctacatatggacctcttcngacccatcgcctatctaagcataggaggaagtaagtatgatctagttattggtgatgactttttccgcttcacttgngtattctttntgcaggagaaatctgaaacccaagggaccctcaagcgctttctaaggagagctcaaaatgagtttgagctcacagtgaagaagataangagcgacaatgggttccgagtcagaaccttcaagtggaggagtaccttgaggaggaagggatcagcacgagttcttcgcttcctacacaccacaac

SEQ ID NO: 58624 - DNA, 396 bp, Zea mays
  unsure (1)..(396): unsure at all n locations
gcgacctgaggcatgccaagcttccatgtatatattatttcgnacaatttttattattcactctaaccatctatgggtcctaggttatcttggtcttggcagcgggaatggcataaaactggtggccacgcctgagtgaacggtacgggtgcttaatcccaacgggaagcggggaaccaccgtncaggtgacgaccgtccgcgcgctcattccgcaacanggcgatctcagcacgagccctactcagctcgtctaatgcatggtccaacttcgngtttagcacggcggctatgttgactgtgctgctcaacctatgattggcctcaccgacaggtgagactatcacgcctcctgtgctgccaaatgaacggcgggggtaatacttcaagtcagggc

SEQ ID NO: 58625 - DNA, 322 bp, Zea mays
  unsure (1)..(322): unsure at all n locations
ctcaagcttcacgggctactggcggagctagccgaagcactggcttgcccagatgtttgtgttatgggctggccacngnggcccgaagctcttgctgtaatggccggcggaattgaactcgccggagctaagggaaagtggtggccggtgatggtgaatgtggggcgaattggggcgcgcctgggaaggctntatatgcacggcgcggtcacgggcggtcgtggaccgcagtgtgcctgcgtcactggaggccgggccaacggcggacccggtgagcacgcaacctgtccgtgcttgcctgtaacccgatggacaattttca

SEQ ID NO: 58626 - DNA, 264 bp, Zea mays
  unsure (1)..(264): unsure at all n locations
gctgcagcttctacttcttggcaaacatttcccctaatgactcttctcataagcactctcaaaatgtggtgcttctggcaaataagggcagtcgttctgggctgaaaatcttgatcatggcctcaatgacaatctcattgggcaccggangcacttgtgcccttaatcgcaagaacacttgtacatatgcctaaagaatttcttcttggtcctgtgtgcattgaaacatggcctgagctgtgactggctttgtttgaaagcctt

SEQ ID NO: 58627 - DNA, 288 bp, Zea mays
  unsure (1)..(288): unsure at all n locations
tatacacgaccaactagtatagatggccagatgatcttgccccgcacgatcctgtgtagacacngctcatttataccatggctaggcatggcccaacaaataatgagccatatcatgtcgtacctcgtgtcaaattgtcggtctaagcacgacacgagggcctaattttttgtcggaccaacacagtggccctataagcagaggcttatgcatatactcttcacatacaactctcttccctttctcacgctagaatcctncattattggtgcgtccgtttcacttact

SEQ ID NO: 58628 - DNA, 441 bp, Zea mays
  unsure (1)..(441): unsure at all n locations
agcttgtgaagccaatcacaagtttattgattaatgatattaaattcaattggtcttccaagtgtaatgaagctnttgagcaattgaagacattattaaccactgctccggtattggctcaaccggatatcactaagccctttgatgtatattgtgatgcatcaagcagtggtctcggctgtgtattaatgcaagaaggccgagtaattgcgtatgtttcaagtcagttgcgccgacatgaggaacattatccaactcatgatctggagctagctggtgtggttcatgccctgaaaatttggcgtcattatctgctgggtaatatctgtcacatttatacagatcataaaagtttgaagtatatcttcacccagtcagaattgaatatgagacagaggtgatggctggagcttattaaggattatgaactggaaattcata

SEQ ID NO: 58629 - DNA, 314 bp, Zea mays
gatgccactaccagcccatgcgagtcgtagccatttagcatgcatctagaccagcctcttcttttgcataatcaaccaaataaaggttgccgtctagtacacccttgatagctagtgaaccatcacaccttgtaaagacagacacatctacctttgtgaatagaccattatgtcccatattgcataattgactgacagaggacagattatatccaagcgactcaactaataacacattatagatagagtgctctgatgaaatagcgattatacctaaccctgttaccttgccttggtaccatcaccgaatatta

SEQ ID NO: 58630 - DNA, 400 bp, Zea mays
  unsure (1)..(400): unsure at all n locations
agcttctcctatacaagcgccgcacttactgtagagtgcgaagctgccacatacaatagcagaggagcccctggcgtgggtggaattagcgttgttagatctatcaggtatagcttcagctcttcgaaggctntctgctgagctgaaccccattgaaagactntggccgacttcagcacttcaaagaatggtaaatttctctctgttgatctagatatgaatcgattcanagatgccagtcttcctatcagccgttgagcccccttctttgtgcttggcggtccattcgaagaatagcttcgattntgttcggattagcttcgatccctttcgttgaaactaaacaaccaaggaattttctcttctttactccanaaacacatttctctggatttattta

SEQ ID NO: 58631 - DNA, 326 bp, Zea mays
ttataggtgatagctacggcattgcttatgagtggatccgctgtaagagcttctttctctaggatgtgtcgctacgaagcataccctcaacaggctccttccgctgggtggctgacgtttattgaacagaggtgtaatgaaatgtgtggaaattaccttaatagagagcacgaagatatgcagtctgtctttgggaaccgagggaaacttccgcttaacagagatatggatgctctcatggttgaatacctagattatgaatatctatctgtcaatgcctgagcttgagagaaaatgaagagagctacttatagtgaagtgacaaa

SEQ ID NO: 58632 - DNA, 375 bp, Zea mays
  unsure (1)..(375): unsure at all n locations
agcttctaagggagacacattttttgactacaaatgttcattntgagaaagacaagttctgtagcgcatgtcaagcagggaagcaagtttgtgttcatcatccacacaagaacatcatgacgatcaacaggctgcttgagctactccacatggacctattcggcccgatcgcttacataagcattggcgagagtaagtattgtcttgtaattgtggatgattattctcgcttcactcgggtgttctttttgcaggaaaaatcacatacccaagagactttgaaaggattcttgagacgagctcaaaatgagttcggcttgatgatcaagaaaataagaagcgacaacgggacggagttcaagaactcacaaatcg

SEQ ID NO: 58633 - DNA, 376 bp, Zea mays
  unsure (1)..(376): unsure at all n locations
tacaatataattgttccttcttcacaaccgttgaatgatattatgagatatcgagaagctactggaaggattggaaaatgggctgcggagctcaatgaatattgtattgattatgtgcatagatcttcgattcagtcccaagcgttggcagacttcattgctgactggacgccacgggctcatgaggaagaaacgaataaagatgctgaagtgtggatagtgttttgcgatggatcttggggaaccttcggagcangagcagctgctgtgttggtcgcaccttccacagtaaaacttgttatgcaacaagacttgatttcagttgtacatacaacattgctgaatacgaagctctgctcttgggtcttcggaagtt

SEQ ID NO: 58634 - DNA, 405 bp, Zea mays
agcttaacaaccctccctccggtgtatttgttggttgttacaactgccgcatccgccggctacgcaaccacgcaggctcaggaccatataaatacaggcgtcacgagcaacgagcatcgtgcagcgcgagcaaacacatgagaggtgagagagagagagagagagagagagagaaaatgtgtgccgctatgggtgattcttgtatgacggcatcgagtcctcggtattcggtcgcgtggggatcgccaggtcgtgtgggagcttcgggggtcattgatacggcgtgggaggccttgaccctatggtgatttcacgccggagtcgcacaacctcgtggatccgcaacctggcgtcgagagcttccctgccaagataatccatggtgagtatgaacctaaacaattc

SEQ ID NO: 58635 - DNA, 312 bp, Zea mays
  unsure (1)..(312): unsure at all n locations
tctgccacgacgtgatagtccctggccgaagagaagaataccatgtntgggctatattctggactgccatgacgaaggacttcgtcatgactacagtattgcccccgtacaaagatatagttgcttcgtagctcatcaaaaactgctttggatctgagtgcccatcatacatggngagctgaggtggcttgtatgatgggggccatggggtagcctgcagttctgcttgccacggagaagcatcatctaaagtaaagggcttatgaataaaatcatcataccatccattctcgttgaataagccttcttgat

SEQ ID NO: 58636 - DNA, 373 bp, Zea mays
agcttggaccagggagtcgctttataggtcagcgtccccgctgaccaagttttgggctctattgatggtactgagttggtgcctgctggttcgttgcaagctgcttcgggtggcggccttacacccggtcgtcagttgatctctcctgatttgggggtcccttcgttcttttccaacctccaggtactgtgatatactttagcttgacttttacaccgcatgaactgctgtcattacactcatctgctctccttatcaggctttggtggacgggatggctagccagctgaggttacagggtgctcctgttccagaagtagcttcgtctcttgctcgttggaatccagtgttacttcaacatcgtgtctctgac

SEQ ID NO: 58637 - DNA, 370 bp, Zea mays
tcacttcccactgcgcgagctggtgtttgcggtgggtgaattatggggcccgctgtggccaccaggcgccatggccgggcgttgaggcacagctggagaagcggagggaagaacatagtggcaggggcacgacgcgggtcgtgcgcggatgcccagcggcgggcggaattcacggcggcggcaccccgaccgcaggacccaccccgacgcaccccaggtcgtcttcctttccgaggctctgagtacgacggcaccagcgccgcccccgagacgagcacgccggcgaccaccgcggcagaactgggtgcacagcgagggatcctgagtacctccgcccttggtagcggcgttccagcactcagctcgatct

SEQ ID NO: 58638 - DNA, 447 bp, Zea mays
  unsure (1)..(447): unsure at all n locations
agcttcttctcgtcatcgatgagcgacgccaacgtgagcgcctcctgctagtggtgtttgttcggggtttccaagcaagaaacatggattcatccttatatttatgaaaatgactcacaagtgagatccatggaaaaaatattatggagaataaatgctatgcatgcaaaaaaggaatttgagttgaaaacattattcaaacaaaagaaattgcatgcaaggctcttctttaaatactactccttccacccaaaaatataatttaagaatctcggtgatacttatctactactacgcattgtgcaaaggtagtanggtaggattggggagagatgtactagaatgttttcctgtcatagatgtaggcataaacacacatgtggtgtagcggtagctactgctaacatttgctgagaggtcgaatgagaaaggtcaacatggggaatg

SEQ ID NO: 58639 - DNA, 267 bp, Zea mays
cagacagatactttcttagtgtctgtgagacagtatagaagatcatctctggtggtgccattgtacaccaaggcccccttcatgtatttcatttcccgggcgtagtgtttggcttacatgatttcttctttagataacctttttcccgaagcatgtcgaataataaagtcaagatcttctgaggatgcttcgggagtaggagatttaactttctcgggtgcgtctttcttcttcggagccaagctagcatctgaagattgttgttca

SEQ ID NO: 58640 - DNA, 410 bp, Zea mays
  unsure (1)..(410): unsure at all n locations
agcttatgaagattcttcattccaacatgggctagtcgacggtgccagagccaacccaagttagtcttagcaaccaagcaagtgtcgagttcagctctatcaaaatctaccaagtatagctgaccctctaacactcccttaaatgctatngaatcatcacttcttctaaagacagtaacacctacatcagtaaatagacagttgtagcccatttgacataattgggatacggaaagcaaattgtaatctaaagaatctacaagaaaaacattggaaatagtatggtcaggtgatatagcaattttacccaatcctttgaccaaaccttggtttccatccccaaatgtgatagctcgttggggatcttggttttctcatatgaggagaacatcttcttctcccctgtcatg

SEQ ID NO: 58641 - DNA, 347 bp, Zea mays
actcagctttttactcgctctggtgtcgggtatctcaactaggttagaccagccctagatgcaatacaagaaacttaaacatgcaatgcaagcttgacaacaccatttgacattttacataaaatttctgagatcaagaatatttagttcattcctcaacatgcaaaagtgggtcttatcaagtggcttagtgaaaatatccgctaattgatcttccgacctcactccttctaaaatgatatctcctttcgcaacatgatctctaagtaagtgatgatggatatcaatgtgcttggtgcgagagtgttgacaggggtatatcaatttaacagcactctcttatcaca

SEQ ID NO: 58642 - DNA, 459 bp, Zea mays
  unsure (1)..(459): unsure at all n locations
agcttcatcaccatntattctttcttcatcctgagcccctggcgtccaatcagcaatgaagtctgctaacgcctgaaactggatcgaagatctatgaacataatcaatggtaaattcgttgagttctgcagcccattttctgacccttcctgtagcttctctattcctcattatatccttcaggggttgtgatgaaggaaccattatgtggtatgcttggaagtaatggcgaagcttcctagaggccatcaatacagcatacagtaccttctccaactctgtgtaattcttctttgatggactgactacttcggagacgaagtatacaggtgcttgcttttttacttggccatcttgtttctcttgtacaagcgccgcactaaccgcagcatgggaagcagccacatatagaagtaatggngttcctgacgaangtggatttagagtattagatctatc

SEQ ID NO: 58643 - DNA, 445 bp, Zea mays
  unsure (1)..(445): unsure at all n locations
cgagcaagtctcacggcctcaccaggaagctatctgagggcttggatcgaacggaggatgactggagaggggctggccacggtggttgctctcgggcggcactggcgggtcgcggtgaggtcgccggagttaatggctggctcgggcaagtccggcgaggtacggagggggtaactgngaaggcagccaagcactgnggcgggctttatagccgtggcgcgggcgtggtcaccggcggccgcgggcgcgcggaggttcgcgcacgggcgtgctctgagcgcgccctcggatgccagctcgcgtcgaacacgtggaagcttgcttctgccatggttcaacggccgattagagcgccatagcgtgcgtatcttggcaaagtcactgtgtacggtcgcttctctgctccaaatcctatcttttcgctgtgagttccaagtcgagatat

SEQ ID NO: 58644 - DNA, 448 bp, Zea mays
  unsure (1)..(448): unsure at all n locations
cttcatccccacatgtgctaagcggcgatgccacagccagcccatgctagtcttagctattaagcatgcatctagaccggcctcttcttttgcaaaatcaactaaataaagtttgccgtctaatacacctttaaaagctaatgaaccatcgcttcttctaaagacagacacatctacatttgtaaatagacagttataccccatatgacataattgactaacagatagcaaattatatccaagactctctactaaaaatacattagatatagaatgctcattagaaattggcaatttacctaacccttttaccttgccttgattcccatcaccgaatataattgaatcctgggaatccttattcttgacgtaggaagtgaacatcttcttctcccncgtcatatggtttgtgcatccgctgtcgataatccacttgatcccccggatg

SEQ ID NO: 58645 - DNA, 437 bp, Zea mays
  unsure (1)..(437): unsure at all n locations
tttgagtagattctcagtgatagaggtgacttctngtgccttgtcgacgcccgcggagccgtatcagtccccttgagaaggttggctgcgaacatgacaaggctgtggttcagccaaggttttcgatttcagacaacgacgtcaaggacccttcggccgaagccgctgcattaagtggaaagtgttacaacaaaatctggttgaagggtggccgagagatagctgacgaagctatcaggaaaaacgaaaaagagtctcatgatgccttggaagtggccagaagaaccgaagaagctgcagaacttgcaagacttataggtatatctatcgtaacatagcttcacaaaatattttagcttcggaactaatagacactcatattgtggtgcagctgagctctctcgctctctggagccatatgaccctgaantgatcta

SEQ ID NO: 58646 - DNA, 410 bp, Zea mays
  unsure (1)..(410): unsure at all n locations
agcttcngtattacagcatatccgaagatgattggtctaactgacttaaagatagaatgaccttttagtccataagggtctgagtcattgttgtaaactnttatgaagggcatgattgtaattcctcacaggctgtgtcctgtgcctataaatagtgaacagtattcctttactgttcacgcattcctgtaattgctaacgcatcactcgggaattattgtttgtcaaggcaaaggtataaatgtacctaaacgtagtattcaaatatcttaaattcatataataagatatgtgaatgatgtcatttattttcaatgtatttatctttaatgtttcatgttttgctttactttgtattatctttataagtttaattacgaaggtgaaaccttcgtaatattatgctcgtg

SEQ ID NO: 58647 - DNA, 354 bp, Zea mays
  unsure (1)..(354): unsure at all n locations
tctgacagntgggccaccggacagtctggtggtgcaccggatagtcactgttcactgtccggtgcgccttttggctctgctctgacttctgcgcgcactgtagcgcattaactgctcgttgcagacaaccgttggcgctgtgtaagccgtactccgctggcacaccggatagtccggtgctacaccggacagtccggtgaattatagcggagcggctcccagaattcccgaaggtggcagttcggagttgggttccctggtgcaccggacagtccggtggcacaccggatagtccggtgcgccagaccagggcacacttcggtggtttttgctctctttatttgaaccctttct

SEQ ID NO: 58648 - DNA, 429 bp, Zea mays
  unsure (1)..(429): unsure at all n locations
agcttgtggacccgtagcctatcaatagaagttgccactcagcatgtcagctgttcaggatgtattccatgtatctcagctgcggaaatgtgttcgcctatccactaaagtgctacctgaaccggacattgagatagaaccagacttgtcctatcaagagtaccccctcaaggtattggatcagaaggagagatcaacacgggcaaggtcaatctgaatgtataaggttcagtggagtcaccattcagcagaagaagctacatgggagactgaggattntctacgctcttgcttccccgactttttgcccaaaggagtcgatatgtaacccaaaaccccacccccacctgccctttgaatacaattacaagaaaaacttagatagcaagggtagtctaagttgtgggattaacttaagaaggactttct

SEQ ID NO: 58649 - DNA, 292 bp, Zea mays
  unsure (1)..(292): unsure at all n locations
tgtgaagattcttcatcccaacatgggctagtcggcggtgccagagccaacccatgttagtcttagcaattaagcaagtgtcgagttcagctctatcaaaatctaccaagtatagctgaccctctaacactcccttaaatgctattgaatcatcgcttcttctaaagacaatgacacctatatcagtgaatagacagttgtagcccatttgacataattgagatacagaaagcaagttgtaatccaaagaatcaacaagaanaacattggaaatagaatggtcaggagatat

SEQ ID NO: 58650 - DNA, 434 bp, Zea mays
  unsure (1)..(434): unsure at all n locations
gcttataccacagantagtattgaagtgtttatattaagacgagttatacagagagtcaggatacaatacagaacagagcacacagacgcaaggatttatcccgaggttcggccacacctgaaatgcttgcctagtcctcgttggagttagccacacctgggcttggagtctatttcaaccccttcctccgtttgctcagatctgtcagtatgacagatagagcctttcactattgagatgggttacaacaacaccgtggctgcttacaaacttctcggcagcacctcggtagagtaacgatacgctcaagaccttgctctagctctttgcagctcttctccactctctanaggcttatagttgtgccttctacacaaactatagagttacacacaagagggagagcgagaattgattcgagtgaagtctatac

SEQ ID NO: 58651 - DNA, 362 bp, Zea mays
  unsure (1)..(362): unsure at all n locations
tggacgtganaagtgccttcctcaatggaccaatcaatgaggaggtttatgttgagcaacctnccggctttgaagatagtgagtaccctaaccatgtctataaactctctaaggcgctttatgggctcaagcaagccccaagagcatggtatgaatgcctaagagatttccttatcactaatggcttcaaagtcggcaaagccgatcctacactctntactaaaactattgcanatgatttgtttgcattgccaaattatgttaatgatatcacattggggtctactaacanatatacatgtgaagagtttagtaggataatgattcanaaattcgagatgtctatgatgggggagttgagt

SEQ ID NO: 58652 - DNA, 395 bp, Zea mays
ctgcagctgcctgtcgaaacattctgttttgtgctgcgctgcaagtgaacgtgcgacatgcagctgtgtgtcttgacattcgacaatgatcagctcctggttacatgcgtgatctgcagatcagtctgttggagatcatcggagcaataaaagcgtcatccaggcaatttttctttcttttgctctttgtgtccttcaatgttgtacggtagaatgttgtagcagcaaatgttagttacatgttgaatcgacattgcgggcctggatttggggatacatcatgctgtaaattgatcagtttaattaccatactgtgctgctttgagcgaagccatggagaccatgctccacttttgtgcctgacgaatattagcgttgctggtttggagtgcgga

SEQ ID NO: 58653 - DNA, 264 bp, Zea mays
cacgaaagtatgctacaagtgtggtaagcgctgtcacttcattgcagaatgtcctatgtctagtgacagtgacaagggcgacgacaagacaggaagaagaaaggggaagaagaaatactacaagaagaaaggcggcgatgcccatgtttgtcgggagtgggactccgacaaaagctcaagcgactccttcgacgacgaggacgccgccaacatcgccgtcaccaaaggccttctcttcctcaacgtcttgcacaagtgtctcat

SEQ ID NO: 58654 - DNA, 432 bp, Zea mays
  unsure (1)..(432): unsure at all n locations
agcttcgaatntaactctaatattttagcctcagtttcagccagcaagccttcggtcgattggagctcgaagtctttcttttcaatgatggcagattgctcttttattttgctttccaagttttcaattatagcttcgtgctttttgtcctccaagtcttgttgcatcttcagagctttgctcagtagcatgctctgaacagaaacaacttatgttaagtaatattttcattgttaacagcaataaaaaccagagaaaaaggttgtttaccttgaagttagaataaaacaagctgccgacgatatgttgtcgtcggtagcggctgatgtctgtctctaacttcggaaaaccgatactcttcgatagagtacagattaccttagctccagtctggtctcgaatacagcctagtttttcatcatctacaccccc

SEQ ID NO: 58655 - DNA, 299 bp, Zea mays
tctgaagaagtccggcatcttacccacgatgagcagaaccgaatgcctcaacataaagaccttcatcaagagggcttcttcaatgaagatgactggtatgataattttcatcatggaaatcttgttttcgacgatgcttctcctctgtccgctgagctgcatgctacaccttggccttcgtcctataagccaccccagcttcccatgttcgatggtcattcggacccgaagcagttcttgatgagttacgaagcaacagtgtcttcgtatggtggcaatgctgcactaatgaccaagtc

SEQ ID NO: 58656 - DNA, 438 bp, Zea mays
  unsure (1)..(438): unsure at all n locations
agcttctaaagggagagcacattttatgattaacaaatgttcantttgagaaagataggatctatagcgcatgccaagcagggaagcgagttggtgctcatcatccacacaagaacatcatgacgattgacaggccactggaactcctacacatggacctattcggcccgatagcttacataagcatcggtgggagtaagtactgtctagttattgtggatgactattctcgcttcacttgggtattctttttgcaggaaaaatctcatacccaagaaaccttaaagggattcttgagacgggctcaaaatgagttcggcttaaggatcaagaaaattagaagcgacaacaggacggagttcaagaactctcaaattgaaggcttccttgaagagganggcatcaagcatgagttctcttctccctacacgccacaac

SEQ ID NO: 58657 - DNA, 399 bp, Zea mays
  unsure (1)..(399): unsure at all n locations
tcttggcacaacctncgcctncacctncgttacagcaaggacagcagccagaagggagccagtatgctccacaccaaagggacttccgagagcagtccgaagctcgtacagtcaacagcaccgtgccagagtcaaagcacatttattgacaaatatcctaccctaatagcaatattttctatccagttttgttttcttgaataaaggatattgttanggttcatataaatactttcgttgattcccacaaggaaaatatatntttctcaggcttaaatggttaaagtttaaagacttgtgataatcaagaggacgcttcggactacctgaaatattcgaaacagcaaaaagtcgttctaatgaacgcagagtanngtgcgaagtcacaaaaaaaagtcg

SEQ ID NO: 58658 - DNA, 435 bp, Zea mays
  unsure (1)..(435): unsure at all n locations
agcttctaaagggagaacacgtgataggtttaactaacgtgcatttcgaaaaagatagaccttgtgcagcttgtcaagcaggtaaacaagtgggaggagcacatcacagcaagaatgtgatgaccacttcaagacccctggagctgctgcatatggacctcttcggacccgtcgcctatctgagcataggagggagtaagtatggtttagttattgttgatgacttttcccgcttcactcgggtgttctttntgcaggataagtctgaaacccaagggaccctcaagcgcttcctcaggagagctcanaatgagtttgagctcaaggtgaagaagataagaagcgacaacgggtccgagttcaagaaccttcaagtggaggagttccttgaggaggaagggatcaagcatgagttctccgctccctacacaccac

SEQ ID NO: 58659 - DNA, 327 bp, Zea mays
  unsure (1)..(327): unsure at all n locations
tctgcgcgtcgatccgtcctccgtccgagcaggtgctgcgcccttccacgggatcatccctgggaagcgcgtccagccnctcgggcgactcgaccttccagtctgcttctggacacccttcaacttccgaagggagaccctgacgttcgaagtggtcgggttccgaggaacctaccacgccgtgttagggaggccatgctacgcgaagttcatggccgtccccaactacacctacctgaagctcaagatngccggccccaacggggtcatcaccgtcgggcccacgtacanacacgcgttcgaatgcgacgtggagtgcgtggagta

SEQ ID NO: 58660 - DNA, 439 bp, Zea mays
  unsure (1)..(439): unsure at all n locations
agcttctacaaccattcaggtggtacaagctcactaacttacccgatctantttttgttgggcagtttctattgtctaccaaagcaacactaccactatgtaatctgacatttgtttgagctaattttttacaagcctattcatctctctctaggcgacgttaaagtcctttctgttaggatcatacatgggaaaaaggagacacatagtttaacgtggaaataggtcccctaatgtggaggagaaaaaaaccacaagaaaacagatctattatgcgttgtgattaacagagtacaaggggccctatttatataggcaaagaagatagagataaggtcatatcatctgctccaacaaatctccccttaacgctaaatctataaaactatttcaccaaacaccactagggtgctgagctccacgaacacctaccaagtca

SEQ ID NO: 58661 - DNA, 392 bp, Zea mays
  unsure (1)..(392): unsure at all n locations
tatccatcaaccaccttatgagagacctgctctctaatgcatctgtacgcaaattaaatatactttaaaatcccaacctagcaacagtgtcacgttgtcgatcactcattatccaagttgacacaatgacatcatacgggatgcaacagatatttaatttctgctggaataaatgaataagtattaatacacagtgtatatatattattacaaataaggataatatagttgtacctataatatttattggatgggtgtaataactatagtgaacaacactaacaaaataaaagcataccanaataataatataaaatgtaacattttngtaatacaacattgattgtgcacaanaaataacacctaaaccaaaaataaatatatgcatagta

SEQ ID NO: 58662 - DNA, 432 bp, Zea mays
agcttatggatttcttgttctccaaagacttcataaatgggaaagtaaagatttatttatttgtcaaatttatgttgatgatattattttaggttaaactaatgagtcattttgtgaggagtttggcaaaatgatgtcaaaggaattcgaaatgtctatgattggagaattgagtttctttcttggtcttcaaattaagcaattgcaagatagaatctttgtaagtcaatctaagtatttgaaggacatgctcaaaaagtttggcttagaaaatgcaaagcctatcaagactcctatggaacaaatgtcatcttgacttagatgagggaggtacaattgttgatcaaaaactttttcgttcaataattggtagtttactttatattaccgcatctagaccggatgttatgtttagtgtttgcatgtgtgctc

SEQ ID NO: 58663 - DNA, 418 bp, Zea mays
  unsure (1)..(418): unsure at all n locations
ctgtaggagaacgagatggtatgaagctttgngatgctcgagagagtcaattcaatctgtattaactcaagatatcaatcttcaataatctatatatatcccagattgacccacagttgtttttgaattattaatactaaaactcgtatcatctcggggaaggtattgatgttgtaggaaataaagaattatcccgtgcgaaaaaatcaagacctacaacatggaggaaagccaaaggatggtcacatttatgcttttaagtgcaagtatcttaaattatcatttcttatgtgtcttgtgtagtcacatagaaaagcacttcanatggtttaaattatgtcaccattctnttgaagaaatcccctcatatggtagaatgcatattcatcatttctattctatgggcatctacatgctt

SEQ ID NO: 58664 - DNA, 450 bp, Zea mays
agcttatagcgacttaaatagagagctagactatgttcttcacacgagctaaaaggagagggtttataaatcaagaatattagtacttggtgtcttcaactagtactaaatcattgacattagtgccggttggaatcaccaacagttactaaaggagtgtttggttcagcccatataaagtttagtctatgttacatcaaatatctaaataatttatacgtgtatatattaaatattgtctagttataaaactaataacatacactaccggaatcgcgttctttgccgagtgtctaagacactcggcaaaggctattttacactcggcaaaggctttgccgagtgtaacactcggcaaagaacactcgacaaagatttcatcggcaaagggttctttgccgagttgttttttcggacactctgcaaagactttgcgagtgtcaaaagcac

SEQ ID NO: 58665 - DNA, 153 bp, Zea mays
atatacccaaagagggaagattttttgtcctactcaccagggctgattgatacaattcgcacatataactgggcagcctcttatggcctatattcatcatatggatggtaaacagctttcttatggaagttggataggagattataggatcac

SEQ ID NO: 58666 - DNA, 440 bp, Zea mays
gcttctgttcaaacgtccagggttcaatatctaaagcaggaagtccaaagataagacaaagaacatgtcatctttcgttacacttatcacacaacattttcctaaccatattcttccttgagctttctcttatgctcctcagttaagtaaaaggactgatcatgaattgcgcggaatacctgctcatttaatatgactagtgatcatcataaaatatatatatatcagaatgattccttttttcctaaagaaatgactgcacgtctgcaacaagaaaaggacctttatgactggattgcagtaaatatgccggaattcagagcaatgcttcctaagataatcttgcaatttatcagaatcctgtctgcggaagatatcccatagagcaccaccggtgctctgctcctctgagctctccacaataggcatttccggattat

SEQ ID NO: 58667 - DNA, 367 bp, Zea mays
  unsure (1)..(367): unsure at all n locations
ntacttagttgatgttgcagaagaagaggccggtctagatgcatgcttaatggctaagacttgcatgggctggctgtggcatcaccgcttatcacatgtggcgatgaagaaccttcacaagcttctagagggagaacacgtgatatgtctaaccaatgttcatttctgacaagatagaccttgtgcagcttgtcaagcacggaaacaggtgggaggctctcatcacaccacaaatgtgatgacgacatcaagacccctggagctgctacatatggacctcttcggacccgtcgactatctgagcataggaggaagtgagtatggtctacatatcgttgatgactnttcccgcttcacttgggtgttc

SEQ ID NO: 58668 - DNA, 443 bp, Zea mays
  unsure (1)..(443): unsure at all n locations
agcttcaacttcatctatggtatggaatgcttttgagtctatccagtttccttcggcccttctggccgctttctgactttcatgaatggcaataggtccttggtccgaaagtatcttcatgcaaagatatgctggatgaaaaatngcttcgaaggcattgagagtaccacgaccaatgattgcattgtaagggtattgcatgtcaacaatatctaacacaactttgttagtccttgtgttggtgataaatccgaaggttactggcatcgtgatctttccaagtgctacaatctgcctttctccgaagccacaaaggggatgtgtggcatcatggatcctgtcttcnggctcttgcatctgtctgaaggccttaacaaatatgatattagctgtactgcctgtatcaaccaaaacattatggaccagatatgctttgatcacac

SEQ ID NO: 58669 - DNA, 362 bp, Zea mays
  unsure (1)..(362): unsure at all n locations
gaactcaagnaaggttaaccactgctctaatattgtttatgccagacatccacaagggacttgatgtgtattgcgaagcatcacaccgtggacttggatgtgtgctaatgcaacgaagaaaagtgatagcttatgcctcaaggcagttgaggaaacatgagaagaattatgctacgcacaatttggaactagatgccgttgcgcgtgctttgagcatatgctggctctatgtgattggaaacaagtgcacaatcttcaccatcacaaaagcttgantacatattcactcagaaagaactcacctcagacagagaagatggcttgaattgattaacgactatgagttggaaatacaatatcac

SEQ ID NO: 58670 - DNA, 431 bp, Zea mays
  unsure (1)..(431): unsure at all n locations
agcttcaggtcgtcatatttcagaattgtctcacttcatcttcatcatacttcaacttcgtcatcctacgtatattgaagaacagaataaggtgcaaattttaaggagaagggtaaagtaataaatataagtttcttaccggcttaagatgacttcgagcttcgtcacccgccattttccgcccgccatttacccaaatctaggtcataaacctatttccgatacttcgggctaggcttggaatatctatcagatctgatgatgataagctgaagtttggtctattcacnaattttccatgcgtgcagccagccttgagaaaagcggtagctgtgccccgagaagctaccagggcgcagaagtcagcatggccaccaataactttgtcaagagcgtcaacctcgccttcaatatattctaatgtgctgggc

SEQ ID NO: 58671 - DNA, 290 bp, Zea mays
  unsure (1)..(290): unsure at all n locations
gccaccttctggctttgaagatagtgagtaccctaatcatggttattaactctcaaagacgctttttatgctcaagcaagccccaagagcatggtatgaatgcctaagagattttcttatcactaatggcttcaaagtcggcaaagccgatcctactctctntactaaaactattgcaaatgatttgttctatgccaaattatgtgatgatatcatatttgggctactaacaaattacttgtgagagttagtaggatatgattcaaaattcgagaggctatgatggggag

SEQ ID NO: 58672 - DNA, 118 bp, Zea mays
  unsure (1)..(118): unsure at all n locations
gggatcctctaatcaccgcngctgcagcttataacttatgagctattaggattaaatttatattgcctagccatgatctgttttatggcttcatcctttctctttctacttaaaacct

SEQ ID NO: 58673 - DNA, 378 bp, Zea mays
  unsure (1)..(378): unsure at all n locations
ctaagcttatcatccgaaagacaattaccttggaggaaagatataatctcagtccttcaatcttcactatgtactggggaaattgcaagcactgctctcaccatgagttcaactaaaggtgcctttattggttcaaaaaatacttccgaaggtagagggagcccctgtgctgctgacttggctagcagatctacatgctcattttctcctcttggaatattcttgacagaaaaccttcgaaagaaccctncaaccttcgaactgtatccagatatttttcaagcttcggatctcttgccctgctactcttgtctatatggccagaaatgaacttgagaatcagttttaggatgggccttcttattcccattgccttaa

SEQ ID NO: 58674 - DNA, 449 bp, Zea mays
agcttagctggtgacgaagctagaagccacctcaagctcggtataaattcatacttgatgcttaccttctccttgaaacttgaggttaccttataatgctttgttatgtacaagatgatgaagccgaagagtaatgatccgaagcttggcggatggtgatgaagctgaagatactgttatgaaaaaactctagagaaattcttgaattattgttgaaaaaatattataatttaagaatcagatactactctgtcaatttgtgcataccttgtaatatatttttactttttcgtccatgtgtgaattgctttgatgtgaacaaaacttgtattttttgacccgaaggagaaaaacaccttcccttctttttgtacacaacgaagcataaatttgcttcttctcttttttttccgaagccttgcattaaagccgaaacaactgtctatact

SEQ ID NO: 58675 - DNA, 342 bp, Zea mays
  unsure (1)..(342): unsure at all n locations
catttgagacaggatcttncattctgctgcgacctactcgaagagtcttctcattccactgcgtactaagtcttcgagtagagtaagaatttaagttttaaagtaataagttgtattcgcctattcacccncncccccctctaggcgacatccagatcctgttcccgggtcaaagggaactttcaattggtatcagagctaggcctcttcagtgtgggcttagccgtccggagataacgatgtcgtcacaagagggaactgtagaacttcttttaggcgatggctctaattacaaatcttggtctgctctattataatgcctcatgagtgtgatcctgattg

SEQ ID NO: 58676 - DNA, 445 bp, Zea mays
  unsure (1)..(445): unsure at all n locations
agcttagccaaaataattcaagataaccccctaatcaagcttcttttgttgggactcattgngaattctgaattttagaattctgaaattcagaccttgagccaaagatcagggatgttcaccttgatccctaactcgaatcctaatggccccattgacaaatttgtgtctaactaacccctctgtcatgtgccagaagatggcattgggacgcgatccctagacacgacaaaacttgggatttgcctcgggtttgggcagggagacagaccagatttcctggctccatatctctgcaaccagtaggcaaaatcctatgacctccacacaagaatggtagcttgtagggaggagaagaggttttgtgcactgacccaggcgagagcaggctcggatgagcgaccacacgcgccagagcttgggcagaacgcacgggcaccgtgtt

SEQ ID NO: 58677 - DNA, 295 bp, Zea mays
tgagccgctggcgtgcatgtcacgatgaaatctgctagcgcttgtgactgaatcgaagatctatgcacataatccatgcagaactcattgagttccgcagcccactttccaatccttccagtagcttctctggttctcataatatccttcaaaggctgtgaagaaagaacgattatatggtatgcttgaaaataatgccgaagcttcctggaggccattaaaacagcatacaacaccttatccaattctgtatagtttttctttgataaactgagaacttcggaaacaaagtata

SEQ ID NO: 58678 - DNA, 413 bp, Zea mays
tgcaagctggtgccgatggagaaacaaaaatccttgaaatcttggctgtcgaactgcttgccgttgtcaactgttagctcggacggtactccgaagcggcaaacgatgttctgccagaagaatttttgggcagtctttgatgtgattgtggaaatagccctcgcttcaatccatttggtgaagtattcgacggctacgaaggcgaacttaaggttcccctgagcggtgggcaggggcccgacgatgtccaggccccagcgctggagaggccatgtatgggcaatcagctttgtatattgcgaggggttgcctgaccgaggagagaacttctggcaggcttcgcaggaccttgtgacccgatttgcggcgcagatcattgcgggccagtaaaacccttgtcggatcaccttggc

SEQ ID NO: 58679 - DNA, 303 bp, Zea mays
  unsure (1)..(303): unsure at all n locations
aatgtgctctgatgcgtgtangtggagtggatcttgtgtcttcaatgtgctggttggnggtatttataaccccaacaccaaaagatccaatggagaaaagttgtattttttgctctgtcgggtggtgcaccataccccctacattgtcngtcttgtgcaccaccggacccttgtcagtatgtgcccacaacttacccttgaaggtgccagatcctctattccgacgttttacccttgtatagattggttcgagttgtctcttacttaaaatctgatttgttgaacttatggacttgtgaatcc

SEQ ID NO: 58680 - DNA, 405 bp, Zea mays
  unsure (1)..(405): unsure at all n locations
agctnggaggcgtntattataagttcactttgtgtagactcttccttcttttcttctgttgctttgaatgcaatgggttgcacctcgggtgtggaggtggcaccttgctccaagttgacaatgtgtttagagtctttgatcataagttcaaagctcacaaacttgccaattacttcctcgagggacatctgtttgtatctaggatctccacggattagttgaacttgagtaggattacgaaaaacgagagatcttagaataaccttgaccattgcatggtcatcccatttggtgctcccgaggttgcacacttgattgaccattgttttgagccggttgtacatcgctcgtgagtcctcttctttgttgaggacgaatcgaccgagttcttcctcgatcgtttcg

SEQ ID NO: 58681 - DNA, 393 bp, Zea mays
  unsure (1)..(393): unsure at all n locations
ngacattgctccccctgtggaaaccaatgccatccttaatgccagtgcgtctcccaatataaagcatgctacgagccaaatttaaattttcattttcgagctcatgcctcggcaatttagcagttaatttagctatgtgatcattttgttggttaatcatggcaaggtgatcatccatagcttctacattaacatctctacatctagtacaaatagaaacatgctcaacagtagatgtagatggttngcaagcatttaattcttctatcttagcatttaatctaacattctcatctctaagacaggaaatagaatcattgcaaacattcaattctttaaccttagcaactaaactagcattttcatttctaagactagaaattgaatcatgac

SEQ ID NO: 58682 - DNA, 430 bp, Zea mays
agcttatgctagtcagtgctatggcaaaattacttgtgggaggattattaacctaccaggccatccaacctaagagcaagagcaacctggaagaacattaagaaaatgcataagattctcgattgcatgatgtacaagttcgtagaacaaggctaagttcaacatgtcaccgcagcaatatcctcaagatcctgcttagacaagtctggtgcaatcttcacgagcaatggtggaggtccatcttcagcccactgcatctcatcccgtgcagcttgcacctgcgcatccagtgtgagccatacagatttcccatgctaacatagtgaagacacttcagttaaatcagccactgaccttcttcacaagatctttcagttgttttctaccttgtaatttgcgaagacaggagttttggggaagaaatattatg

SEQ ID NO: 58683 - DNA, 257 bp, Zea mays
  unsure (1)..(257): unsure at all n locations
tggaggcgtctatnggttgtcgactnggtgtagactccttcttcttttcttccgtcgccttgaaagcaacgggttgagcttcggatgtgtcgccaagctcgttgaatttcctcgagccttctatcatgcactcaaaacttacaaaatgcccgataacttcctcgggggtcattntagtatatctaggattaccacgaatcaattgaacttgagtgggatttagaaaaatgagagatcttaaaataacatttaccact

SEQ ID NO: 58684 - DNA, 421 bp, Zea mays
  unsure (1)..(421): unsure at all n locations
cacttcagggcattatattgatgcacccaagaaccatttaaagaccttcatggtcataccatctatggtatggaccacacccggtcttttgaaacaattcaaagaacttaacccattcagaacagattttaaagatagagggactcaaaatctcattcccgatgatattcatcangtatccatcttatggggaaaaacatgaccaatagaagttgccataacttttcatttcatcccaacaatggaatgaccaattccttcttacccatcatggtaagtatcatcacatgaaaagttataaaaaatgcaacacattgtatgggaggatgtatgtggaatacaatccataagaaatgtttccagaaacacatgcaatatccatcactatcaccttgtgtttgccatgatangaaatatatgg

SEQ ID NO: 58685 - DNA, 273 bp, Zea mays
  unsure (1)..(273): unsure at all n locations
tgagaaggggacaaccgtagcatgcacaaaaccccatcaaaagtatactaagctntccaagaagggcatgagcaaaacccatggtgagaaaattaatgctcatatgatttgctctaacaatgtacctatgtgcttcaacaaagaaagatcaaagagaagcaataggaggtgctatggatgcaaggagaagggccatgaaattgattcatgcccccacatgaagaatcaagaccttgcacgatcaagaaagatgaccatcaaaaaggatgaaag

SEQ ID NO: 58686 - DNA, 434 bp, Zea mays
agcttcggatctttagccttgcaactcttgtcaatatgacccgaaacaacctgggaatcagttttaagtatggcccttctgattcccattgcttttaacttccgaagacctagaagcaatgcttcatactcggcaatgttatttgtgcaactaaaatcaagctttgccgcataacaagttttgactttggaaggtgaaaccaacacagcagccgctcccgctccgaaggttccccaagatccatcacaaaacactgtccatgcttcgttgtctttattcgtttcttcctcctgagtccctggcgtccagtcagcaatgaagtctgccaacgcctgggactgaatcgaagatctatgaacatattcaatacaaaattcattgagctctgcagcccattttccaatccttccagtagcttctcgggtcctcatata

SEQ ID NO: 58687 - DNA, 279 bp, Zea mays
  unsure (1)..(279): unsure at all n locations
ctaatgcccctaacagattgtctaactttgttaagggctaggctcccatggctcangatagtgagggttacattttataccctgcanactatcccgaacataagaataggaagattcatgctacgagacctcacaatgtttctcatcatgcattcatgtacaaaaatgaagcttctagctttatacataacactcatgttaaattgcctagaaaaaaaattcctgctgcatcaaatgaacataaagattcttttaagacttttgatgcttcatatgtgc

SEQ ID NO: 58688 - DNA, 448 bp, Zea mays
  unsure (1)..(448): unsure at all n locations
agctggcattgcatgtttaaattttttgtattgcatctagggcttgtctaacctagttgagataaccgccaacaaagcgagtgaaaaagcttaactcggatcaaacttgacaagtcttagttttaagcttttagcacttgaattcttactttttatgcaattgttggttcttgaaatatgcatgaggtactgcacttagggggagtattcaaaactcaaatcactcatganaacccctagtgcaaggccaaaatgcaaatttcaccatttgcctattttctctaaaaattatctagcctatgacaaaatattttaaaaattatgagaaaatatatgagggtgccaatacctgtcccaacaagtgttattttgcgtgattatatgttgggatttggtatggttgaaaattagatagataaattaaaaaaaatcaaacttctctctgtct

SEQ ID NO: 58689 - DNA, 346 bp, Zea mays
  unsure (1)..(346): unsure at all n locations
ntcttgctcacaccttcggcgctgtaccaacctttgtattattctggtccgctgtgataccgacttgagtccgaagatacctgttcacacattatactccagaaatactgtcaaatcctggttttgaggaccttcgtaagccgaaggcccccaacagtagcccctcgcaatattaattcgtttaaaataataaatttagattgcgacatggatgaaggctttacgccgaaggtccgaaaaaacaccttccctttgtagaatgcaacattctctgacagtggggctttcaattttaacgcacttagcgtataatacagtcataccgcanactcatttggcacgctct

SEQ ID NO: 58690 - DNA, 65 bp, Zea mays
  unsure (1)..(65): unsure at all n locations
tcgnattgaatataacttngattatgtatgcttacgaagtattaccaagagctcgacttcattgt

SEQ ID NO: 58691 - DNA, 448 bp, Zea mays
cactgcagtgcccttctccaagtacacaaaactcttgtctttttcattggaattagctatcggcacaattgcccgaataccgaacccacaaccacacctcttcgactggtatggctctcgctttacccgcgccttcttaccctctaaattaccggctgaggatgcagcactcccactacttgaagtgggctctccagcacggtggcatgcataatctttcacctcagccatgaagggcctatacctaatatacttctgccttatacaaagaacaaccttgtgcttagcagccaattgctgtaacctacgagctacatctctagccggcacatccaatgtctcagtatattcaaacctgcgccgccgcttcccatgtccaggtgatgagatagtgaaatacggctggccagcaggcgcagctttacaaacagggcatgcacaacacatg

SEQ ID NO: 58692 - DNA, 443 bp, Zea mays
  unsure (1)..(443): unsure at all n locations
tgtccatttannaactaatttggcaacgatattatactatgtgccgcgttacccacaacaattacacaagaacaaaacaatcaatgtaattattattgatatttcgaatttattgctttaaaaattaataaatacaattttttctgatcatttatatagtgtcaaatgagaagaaaacaaagaaaaatgaaaaagaaatggaaaatgtgaatctgttaacactgtagctttaggggatggaatctataggacgctgctggagacggagaatatatataggacagaatcttttagagtgttctgtacaggacaaagaatattcctttatgggacgaaatttatgggacgctgctggagacagtctaaagctggtttcagttatcgacggtatacttgttattgatcagatnntttttcttcactanattcgtgcgtagtacgtc

SEQ ID NO: 58693 - DNA, 369 bp, Zea mays
  unsure (1)..(369): unsure at all n locations
gcttctggcggaaaatngaagatgccagagagatagtttctgcaagcacttatgctcatgctgaagcggggccttcataagctgtgccagaaaaacttgtgggagaaagccttccaaagaaacccacaacatctactcccgaagcacctccccagagtgatttgaatttaattgttcgacatgctttgggaaaacagctattagcagaacaagttgccaaaactgaacattatgctaaggagctgaagtatccctaggggtccttagtatacagaggagataatgatgatgatttcctctactgtctatcaaacagtaaggagatcaatggttgccgtgaaatgatggataacatggggtattcgaagc

SEQ ID NO: 58694 - DNA, 285 bp, Zea mays
  unsure (1)..(285): unsure at all n locations
gctttgaaaacagtgagtatcctaaccatgtctataaactctctaaggcgctttatgggctcaagcaagccccaagagcatggtatgaatgccttagagattttcttatcactaatggcttcanagtcggaaaggccgatcctacactcttcactaaaactcttgaaaatgactttgttatatgccannattatgttgatgatattatantttgctactaacgagtctacatgtgaagaanttagtaggatcatgacacananattcgagatgtctatgatgggg

SEQ ID NO: 58695 - DNA, 317 bp, Zea mays
  unsure (1)..(317): unsure at all n locations
gacactcttaaactaagcttcgacanatgaatgtanatggannattgcagaatggaattgtgattcatatgggtcangttaatgcgatagaaatcaaggaggccgcggaaaaaaggagaaatgggaagaccgagaccgcagagaagaaaaggaatgtaaattacggattcatgggtatcctttgtcgggacagtgaccccatgacaaatccgccaagaacacagctccctcgggggaaggaccccgatggacacgaagtggagaaggtcgggctcggagacaacaaacatgtggttacctgcgaaaggcaactgact

SEQ ID NO: 58696 - DNA, 402 bp, Zea mays
  unsure (1)..(402): unsure at all n locations
agcttgtgantaactgcttgtttctctttctcatggaganatggagatgcaatcaccaaatttccttatatgtgagattgcctccatccatctaaaggaacacaacctgcttgaaaatttgcagtacacataccataccaagtcatatatacaatacaagacgactagagaaccatcccaggcattaccatggacacaatcttccacatgtcattcacccaaaatacaccgtgccatatatagtctcatttgtccaagctgcgtattatgccttgtattcattatgccctgtataggttcaaatggcctatataccgtttcatcattgtgtaaatttccatgtgtatgcactgcactngtgcccttcgcttatggccatgtgtatttcgtcgtgcttgaaca

SEQ ID NO: 58697 - DNA, 436 bp, Zea mays
  unsure (1)..(436): unsure at all n locations
agctntatgtcatagcatgatgcatatgcaagtangatacagatggctttaagttgagcaaccggtgcaaaggtgtctccaaaatctaagccttcaacttgagagaacccctttgcaacaagtcttaccttgttctgcacaatcacgccttgatcatcttgtttgtttcggaacacccattttgttccaatgacgattgcatcttgtggaggcttctctggggtccaaacttgattgcaggtgaagttatttagtttttcatacatggcattcacccagtccggatcctgtagcgcctcatctatacatgtaggctcaacacaagagacaaaagagtgatgttcaataaatgaagcatgtttatgagaacgagtgataaccccttgtgaaggactcccaatgattagatcttgtggatgtgcttagagtagtgatg

SEQ ID NO: 58698 - DNA, 423 bp, Zea mays
  unsure (1)..(423): unsure at all n locations
ttaacccctgcgagacctttccccgtntctttctaaccttaacgaatgcgatatcgaatgtcatactttatgcatatttactttatttgttctcttgtatggagtactgtttggttcctaatttgaatggatgaatgtatgtgtgcttgcaatcgcatagagaacgatccggttgaagagcccgaggaactcgcatgagaagcccctgagcagcagtcggttggtggaggcaagtgtcctttgacctatctctgtcctattcattatttaattcacctcccgctttacacatttatgcctaaggatngactagcttttgtatccatgntcttgctacctatctgggttggatattattgttagcttatgctatgctcanactctatcatgacatgatagatattatgatacgttgttcctctc

SEQ ID NO: 58699 - DNA, 457 bp, Zea mays
  unsure (1)..(457): unsure at all n locations
agcttcttcaccatgttatcacggttatcgttagaaggtttagcatgacactttcccttcaaaagagttaagctccttcttagccttccaacttcttccttgacctctttattttcttgtgtgacagaaatatcactaattcctgaaatttctagctcattggaagattggctttcttgataacaacatttgttagcacatgataatatagtttctatttgagtacatgtgcatatgtgaggttggtatgatttcaaattagttaacacaacctcatgagccatttctaacatgatatgtgaatccataaatttattatgagagcacgcaagcatatcatgtttttcttggcaaagctagttttcaatatttaacttttctattgtgttcttgagcantaacattttattttctaattgagcaatatatgatgaatgattaaagctctaatttgctc

SEQ ID NO: 58700 - DNA, 387 bp, Zea mays
  unsure (1)..(387): unsure at all n locations
ntcatccttcttctntacanatagcgctggacatcctcaaggcgatatgcttgggcgaataaatcccttatccagcaactcttgcaactgcttcttcaactctgccaactcagcgggtggcattcggtagggcctcttggaaattggggccgttcccggttgcaactcgatggcaaattcaatatcccggtccggtggcattcctggcaattcatcaggaaagacatctgcatactcacagaccactgggatcttcttcaggggtaactccgtcatagagaaagcacatgactgagaagaaccctgactaggcagaatcaaagtgaaattcccgcagaaaggagaattaacttccacggtacgactggctacatcaagcacaacttg

SEQ ID NO: 58701 - DNA, 454 bp, Zea mays
agcttggcgactgtcagttcgacctctaaattcagtcttacgtggtcgcatgcgccgttgtgtacgacaagctcccgcgaagccgccgcttggacacggtccagagcagttgcaccgcgctgtccatcgttaagcaaggggggctcatggttgtcgccaacgtcgacgactttcgggttgttctggacaccgcatccgacgacgacgccatcacgccgtccagctcatcgtccacctgaagcccaacctgccacgtaagtcgctactgatcggacatgaattcttgtgcgctgggacgatggacgttgctaacgttgtgtgagtgtcctcgaacatgatgtatgtagtggaatagcgcattctgtggtgcaacggccaggggtactacctcgctgatgagcccggggtgcacttcttttggcagcccaaccaagagtcatcggactcgtcatgt

SEQ ID NO: 58702 - DNA, 367 bp, Zea mays
  unsure (1)..(367): unsure at all n locations
agaaactcagctactgactcggctcggccacaaagaaagacggagaagattatacaggcgctcaagagatagtctactacgacagcgacaatcttctcttccaaaagacgacaaacgctacgagaaaagaaacggtaattcaacttttctttgttattctcgattccacaagcctaatgctattgctttcattccctcgtaaccccccactttgatgagagactacngattggagtcacaaatgcgtacccttgtcttctcatcagatatggaatagggaaaggaagccttgatagacagaagtccatggaaaggatagtacccatttctaatgattggggtgaatgccacacaatattgactacta

SEQ ID NO: 58703 - DNA, 412 bp, Zea mays
agcttagacctctaatttcaatcttagtctgagggcatgaatgagtggctctaagttcacctcccgatgattgaattaatagtttcttcttcaagggatagtttggtatattatgtttttccacaaatgactttgttacgaaggagtgagatgctctagaatcaaataaaactgatgcagatatggagttaataagaaacataccatacaccacgtcggcatcctcaggaactgattctgctgtcacgtgataaactattcccctactctggttctgcagagtcttgttctatgcagatccacgagcaggtgtgttctgaccagtcctctggttgttgttcttctggggtgtctgttgattatgccttgggcaagtattagcatagtggacaagttcgccacacttgaaaca

SEQ ID NO: 58704 - DNA, 338 bp, Zea mays
tgccttcgcttcagtctatcatccgcagtccaacggtgtcgtggagcgtgccaatgggaaaatcttcacagctgtcaagaagatgctcctcgatgaaaaaaaggcagatggaccgatttgttaccggaggcagtctgggcgctaaacacaactgagtgcagggcgaccgggttcactcctttccgccttctatacggatcggaggcaatgaccccgcaagaaataaagcatgggtccccgcgtacagttccgtcagcccgtcctgacgtggacgagccaacctcaaaagatctcattgacggagaccgggtcttcgccctacaggccctaaacaaata

SEQ ID NO: 58705 - DNA, 449 bp, Zea mays
  unsure (1)..(449): unsure at all n locations
agctntaggaactatgcccgtatccaatctgcctgagccggaactataagcgcttgccagatgcccncgttccggtcgaccacgaccagcacccaacataagacttccctagttatttagccaagaccagagccatgatagttctcatggtagcactgttttcccgggtggtcactccatgttccaattaatatacaataatcttgtttaaccatcgggttaacaacaataatgaaaacttaccattttggaacattaatatcataagcgggagtgactgcataaagttaaagttgtagcaatagcatagctacttgattagatcataatcccaggttaaacaaggagtaaggttggaaaggttatctaaataggtaacccgtcaaattatgcatatatatccaaaagagtaaactttattgaatgtattgttgggatcaaacagagta

SEQ ID NO: 58706 - DNA, 365 bp, Zea mays
  unsure (1)..(365): unsure at all n locations
tctatacatacaatntaacaagatntaaatattntatttgggcttagtgtatcaaaaatatctttatgattgtttctaagaagtcagaaactaagccccatatataccatntagtacttctaaccggggcaatgagatagtttaaatgaatttttgaaagtaaactagggctagtttcttccagtttatagtagaaacacaacaatgagatgcatgncgaagttacttataatngcatgcgcagttntatagacagatgcatgcgccgaggcctcgatggggagtgatgcatgcgcaagtgtggattagtgcgacaccaaactccaatgagacanagttacaangggatccttgctctgtatgta

SEQ ID NO: 58707 - DNA, 436 bp, Zea mays
  unsure (1)..(436): unsure at all n locations
agctntaagcttccatgtattatgctttaacataaagtaatacaaaattagatgaaattacatttcgggactagcaggtgggctccgtggtatgtccagaagatgccgaagaaaagttntcagcatgtcctggaaggatggtcttcttgaagctcggaattgcaagcattcaccaatcatcttccacagctccccaggaagtcctacacctactactcttgaatattgaggcggtggcttcttttcttttacaacagacttacatatttcctctgcactcagtccagcccatctgcatttcaatgagcatataacaacaccattcacaanacattaaggacaacaaattgaatatcatgctacttacggaacagcaccagtacacatttccacaagcgtgcaaccaaaactccatgcatctgactctggtgatata

SEQ ID NO: 58708 - DNA, 364 bp, Zea mays
  unsure (1)..(364): unsure at all n locations
tctcctgtccggaataatctacngtattccggacagtcgatntattatagttgtagatgaacctttggcacctgtagaatatataatctagagcaaactagttagtccaattatttgtgttgggcaattcaaccaccaaaatcaattatgaactaggtgtaagcctaattccctttcaatctccccctttttggtgattgatgccaacacaaaccacagcaaatgtataagtgcataattgaactagtttgcataatgtaagtgcaaaggtttcttggaatttgagccaatataaatatttataagatatgcatggatggtntctttcattcttaacaatttggaccacgctttgcaccacatg

SEQ ID NO: 58709 - DNA, 449 bp, Zea mays
  unsure (1)..(449): unsure at all n locations
agctttgcctcgggcagactaatactagaattagatatcacgcaatgggagtggagagatggcgagagtagcgtgtaccctccgtggcaagaggctggacggtggtgtatctgtgctctcggttggcgtgaacctgatctggtcttaagaaccccggtggcgcgttgacatatgcaagggttaagtgctacatatgtcgtgtgattggagatcctgagctgagtattaatcgattcggatcgccgttacttctcggacatgaagacttggtcactgacttacacgcagcattccagtgaataaaaagggttgataagaaattggctagtataggtcaagtgcttgaactatggtagaaagaactctagatgcaggtaactttacttaacctgacaattaanactggattttaaggatccactattagtaagcatttcttgcaacaagtc

SEQ ID NO: 58710 - DNA, 281 bp, Zea mays
  unsure (1)..(281): unsure at all n locations
agctncggaaaccncatactcctagccatctcccgacagacggataattctttgttatctgggaggcagtatangaagtcatcttcgtntgtcccattgaacactagtgcccccttcggatatttcaattctatggcatagtgattagcttcaaaaactccttcttcggataatttctctcccgaagcatgtcgcacaatgtaatcgcgtatggaggaagatgcttctggggcagcagtagntgtagtttcttgaaccacaattggctctgacattttttc

SEQ ID NO: 58711 - DNA, 343 bp, Zea mays
  unsure (1)..(343): unsure at all n locations
gggtgaagtgttaaaacctttcatattttccttcatcaattgacccccgaagccatattgaggatgggagtcttcgtctgggcaataaaaaaccaagggatagggtcaagcgcaaaatgcttttgcagcatgcacggacttctgtatgagacgaaggccacggggaaagaacaatatcacaacaacttcggttgttatggatttatcgctcgtcccaacgcaagccacccagtgccaatatttcggaagagatggccgggaaattggatggaagaatggttttatgtgaagaatgacttgatagcgagggaggacatcaaggaggttattatgcgcnccatat

SEQ ID NO: 58712 - DNA, 381 bp, Zea mays
  unsure (1)..(381): unsure at all n locations
tgtgaaggttcttcatccncacatgtgctaaacggcgatgccacattcagcctatgctagtcttagcaattaagcatgcatctagaccggcctcctcttttgcaaaatcaactaaataaagtttgtcgtctagtacacccttaaaagctaatgaaccatcacttcttctaaagacagacacatctacatttgtgaataaaaagttatatcccatattacaaagttgactcacagacaacaagttatatccaagcgactcaactaagaacacattagaaatagagtgctcgaatgaaatagcaatntttcctaaccctttcaccttgccttggttcccatcaccgaatatgattgaatattgaggatccttgttcttgacat

SEQ ID NO: 58713 - DNA, 422 bp, Zea mays
atgccatggcgtctcccactatagagcatgcttctagcaaatttaaatatttcattctcaatttcatgctcattgattttagtagttaattgagctatatgatcattttgttggttaattaaatcaaggtgatcatgaatagcatcaatattaacatctctacatctagtacaaatgacagcatgctcaacagtagatgtagatggtgtgcaagcatttaattcatctatcttagaatttggcatggcattttcatctttaagacaggaaatagaatcattgcaaacatttaaaatctttagccttggaaaataagctagcattatcaattttaaggctagaaattgattcgttcaaattgtcaatcttatcaattaaactagcattttcatttcctagattgtgggagaatcatggcaaca

SEQ ID NO: 58714 - DNA, 360 bp, Zea mays
  unsure (1)..(360): unsure at all n locations
acgcacttacgccattgatgggtaagtggttgaatttaatatgccttttaactatgttagtatgtcggcgaccctcataaatatatcttgtgctgcaaatggttttctattttcagggtagctggcagccataccatgagccaattttgacacatattcagttgagctccacatgtgtggntgatgaagtcatttaccttatgtggtgtccgctcatttgcttctgtcattgagtaccacttgccccatagagtagcacgctatgttgggctacgtcaggaattccctatggagcccttctcgatgtctacataactccataagtaagtgtctttggccttccttgtctgtaactcttat

SEQ ID NO: 58715 - DNA, 406 bp, Zea mays
  unsure (1)..(406): unsure at all n locations
gcaattctttatctccgatgttctgtaatgtctgcaagacgggtgaaacgttcctggtaaggtaaggaaagataccgagcttgtcaagtagttcaggggcacctacagggttgtctgaggtccgttggacaaagacaactgtaggtgggcctaattacttgngagggtccgccacagctggtatcggagcgtagcccttctttgcagatattatgaggcatcttcaaaaggattntcgaaagtcttacctaaaaattcttttctcttcttacctaagtattctgaagagtctatcttaaagaccagataggatgagtgcaatgtatagaagggtgaatcgactaaggtttgatctgtacttattcatgcatcatgctaagaattatactaataacattttccccct

SEQ ID NO: 58716 - DNA, 418 bp, Zea mays
  unsure (1)..(418): unsure at all n locations
gcttangaatgaactcaatattctcgattctcggaactctgattgaaatcttgcacacatagctcatntatatacctntgatcaagtctctttcatttggtacaaatgcatatttcctattcttcttgtgccaaggctatgaataatgtgcttctaagtgtatttctatgcttagtcttagattgaaagggaaatggagtattcagcataggcaaggcttccactacgactctgtcggtatcatttatcctntgccctactcatgtactttcactcatatcactttacaatgggggagagaataattgaagcgttccgaacctttgggactcaaatgtgatacaattactaatcccaggaggctatgaaacacatttcttacttcatatatacagagtttagatacagttttacaata

SEQ ID NO: 58717 - DNA, 464 bp, Zea mays
  unsure (1)..(464): unsure at all n locations
agcttgtgtgcacttatcaccatggacaggttggtagttaaccctanacctctcttgaacccctatctcctaaacaccttggttgaaggggagagattaacaaaggtgcaaaacatgaccaaacctttggcatgaagttaagtaacttattaatctacaaacatagagaggaaacattgctaaaagaccccttaagaaaccccaaatccattccctaagtagagaaagagctagagctctctaattctctctaagtcaaaatctacacctaatctaagaatccaccatgttcaccttgaagatggcaccaaaaccacctaagttctataccanaatgtgggcaaatagttgagaccgagcccttgacatttgacatgtcttggcatcacctttgtcgcgcagcgggcagggggacaagccaaatttggcgtccgcatatcttctgacctatggctatcttccct

SEQ ID NO: 58718 - DNA, 295 bp, Zea mays
  unsure (1)..(295): unsure at all n locations
ctcagcttctntataactggatcctcctcaagaatgtatgactctggtggtggcaaaaggccggttgtaataaaaacataataatgaattttcgaagctataaacaaaaaaacgagacaaattntaaaaaggatacctttaattaatgcgcgttcagcaacttcttcagtttccttcgtctccacttgggcattgtgcgattctttctcacttttctttatagcttcatcggccatttcacgaccgcccttcatccaaatatcggaatataatttctcgcccatcaaagtagctt

SEQ ID NO: 58719 - DNA, 454 bp, Zea mays
  unsure (1)..(454): unsure at all n locations
atgcaagcttcgcacctctgaactaactcttttgtttattctgtgctggnggccaatagaatcctgacctgaagaccttcccgactagtgttctggaggctgcatgtattccacattgcccagcatgaacctcctccagaaggtgctccccgatagacgggagaatgcacttcatgaggacgcctgatgcaccccttctgtacaatgtctccccaatgagtgtgtagtgagctgactgtctggcaatgcgctcggccgagttcctgtcatctggttcttcttcattctttatatacttgatgattggccttctccagtcatcaaagtctgactcgggctgatctataatgttgcattcttctgtntgaaccattgagatactcggctgcagtatttcttgcacaaagacttcgggtgggacctgagctcgactggatcctaactggatagtaca

SEQ ID NO: 58720 - DNA, 434 bp, Zea mays
  unsure (1)..(434): unsure at all n locations
agcttgaacttggcctatctgttatgtcgattgatgatcttgcagatagccttgcttagaataacctgaatgtgcatattttttcttgtaaaataaattgtgttcgtagcttttcttgctatcgttatgctctcatccttcgttcgttttttagggcttgattctaagcaaggctttaaaggcctaaaaggaagcagaagaagagaggtgtcaaatagctcttgggaatcttcgatcagaagtcattacactaaggaacaaagctctcgaaaaagataatatattgctttccttagtggacaggttgaaatctagcgaagccaaacttactgcacaaaccaaagctcacagagtcgaagttgaagatntaaagaagaagattgcagaaacgaatgaaaaatttgaagttgcaatggcgaagcacgagataagcg

SEQ ID NO: 58721 - DNA, 372 bp, Zea mays
  unsure (1)..(372): unsure at all n locations
ctcagcttcggaaaccaatactcttcgatagagtactgataaccttcgctccagttcggactcggaggcatcctaagctttcgtcgtcaatgccgccgaagagcaatgctcctggttgatagccgcatgatattgcataatctctcagctcttctttctcagccttagatagtttttgaccaattatgttttgaaaattgaaatcatcttcctccgaagcatcttcggtgatctccttctctntcctagcaccgtggccatggtctcttcggcggctgcagcagcttcttccatggccatattcaaaagcattntatcaatatcagaaaaagtgccctgcaggttagtatcttcggtcgtttcagcttcggc

SEQ ID NO: 58722 - DNA, 412 bp, Zea mays
  unsure (1)..(412): unsure at all n locations
tagaaanatctggtataaatcggcgggaatatccatccagtccatagaaactttggacttgatgaacagtggtcggagggttccactccaaaatgtccttgactntgctgggatctaccgcaatccccctggcagatagaacatgtcctagaaactgaatatcctccagccaaaacgcgccattgctgaacttggcatacaactgatgttttctcaggcgcgttaacacgatccataaatgttgagcatgctcctcttcattcttggaatatattagaatatcatcaatgaagaccaccacanacttgtccaactcgggcatgaataccgagttcatcaaatacgtgaagtgggtaggagcatttgtcaatccgaaagacattaccaggtattcanataactcatatcgcat

SEQ ID NO: 58723 - DNA, 408 bp, Zea mays
  unsure (1)..(408): unsure at all n locations
caagctttatttacttcctacattcttttaatgtcttccttttctgtggncgatgccaaagggggagaagtttatggaccaaagcaatgaaaactatatcaaacaccaaacaccaccaatttaaaattttatatctccaaatggctcttcaagtggttttggttatttggtccaaaaataggaagtaagtgaattatggagttagggggaggcttaagtccataatatcacattgtggggacaatcatgcatcttagcaagtaaagtgcatattttcattcaaatacttgtattatttgcttgttttggttgtgttgtcatcaatcaccaaaaagggggagattgtaaggaaaatggaccccgggccttttggctaattgaagtttggtgtttgatgaacaacacaat

SEQ ID NO: 58724 - DNA, 375 bp, Zea mays
  unsure (1)..(375): unsure at all n locations
ctcaagcttatcanatggacgtgaaaagtgccttcctcaatggaccaatcaatgaagatgtctacgttgagcaacctcccggctttgaagacagtgagtatcctaaccatgtctataagctctctaaggcgctntatgggctcaagcaagccccaagagcatggtatgaatgccttagagattttcttattgcaaatggattcaaagtcggaaaggccgatcctacactctctattaaaactctttgaaatgacttggttgtattccaaaattattgtgatgatattatatatgggtctactaacgagtctacatgtgaagagtttagtatgatcatgacacagcaagtcgagatgtcaatgatggcggagttga

SEQ ID NO: 58725 - DNA, 273 bp, Zea mays
agcttggagcactgtggaatattgtctgttttctcacccaccagaccgacggaacatgtgacttgatgtacagtggctgggggatggcacctgacatgatccttgagcttgtttggaacaccacgaattcctttggcagaaattacgcgtccacaaataggagtcccttatacttaacgccatttactgtattgagacattcttgacgctgccttaagccgatgacactattcgccacgcatagcacgctcctctcctatatcgcttatatca

SEQ ID NO: 58726 - DNA, 165 bp, Zea mays
  unsure (1)..(165): unsure at all n locations
tgtatgtttatgagatgccgcccanaataaccctgatgacacttgcctcccctaagatggagacggagtgctacgtggcccaatatacacacccttcgatacatgtgtgtaaagcataggcgtggactaaataacctcatagagctcgaacgcgactataatgac

SEQ ID NO: 58727 - DNA, 363 bp, Zea mays
  unsure (1)..(363): unsure at all n locations
tcgcacgacctcgtgactcgattcacggcgcagattatagcgggtcagtaaaatccttgacggatcaccttggcagtgagggccctgngccctgagtgagagccacaagttccgttgtggacttcgcgcaggatctggatgccttcggtttcagtgacgcattctataatgggctgactgatccccttcttttatagctggccaccgactattacgaagtcctggcttctgtggttgagggcgctggcctcattgatgtcacttgngtggtagtatccttgaagaaacaatgttattggggcctgccaatcttcaatcatgatgaacttgacaatgcgatgggcttcggcgtcattggttact

SEQ ID NO: 58728 - DNA, 438 bp, Zea mays
agcttaaagccatggtaagtatcataggctttttatatacgaattgactcaagcctagctacgggtgcataggtttcaccaaaatccaaaccttcgacttgtgaatatcccttggccacaagtcgggctttattccttgtcaccataccatgctcgtcttgcttgttgcggaacacccacttggttcctacaacattttgattaggacgtggaaccaaatgccatacctcattcctagtgaagttgttgagctcctcttgcatcgccaccacccaatccgaatcttgtagtgcttcctctaccctgtgtggctcaatagaggaaacaaaagagtaatgttcacaaaaatgagcaacacgagatctagtggttacccccttatggatgtcgctgaggatggtgtcgacagggtgatctcgttggattgcttggtggatc

SEQ ID NO: 58729 - DNA, 373 bp, Zea mays
  unsure (1)..(373): unsure at all n locations
ntctcgactaagtcggggacagggcctcatggacgggtgaaagtactcgtaagcggcaaggccgaccgagccgagggattcccacgcctccgggatacggatacctcactcgtcccttccgcgaaaagcaactctcgctcacacaaacatccctgttaccgacagaatccagatgctcgaaacaagaggaanaaagacgcagcttcgcaagtgcagcgagggtgtgttcttctggcctcggcggccgcagaaagcacacgctacaagatgatctgatcctgcaggctcgggtcttcacgctgaagggagccgtggaccctcggcatcgacgacatcttcagcaaagtccgacccagcctcgggcgacgtcgcg

SEQ ID NO: 58730 - DNA, 457 bp, Zea mays
  unsure (1)..(457): unsure at all n locations
gctggtggaagcgtgatgatgtataggtatccaagtttaaccaatgggaagacaagagaggaaggagactccaaaaatcaaaaccttgtttaaaaagaagtctgtggggtttggtgaagccaaagccaacacccctttgtttatctttcaacatggcaccgagacagtctacttattactctatgttgattatatcatcctcaccgccttcagaaagattttcctactaaggatctcgggcctcttcaacattntcttgggattatagtagaacgtacaccagatggcatttttctccagcaacgtacttatgctcttggtatcattaaccgtgcaggtatggcaggttgcaaaccctgctcaaagccagttgatcttcagttcaagttgttggctgattctggtcctgcagttcaggatgacactcacttnncgagtctagccacacacttcaata

SEQ ID NO: 58731 - DNA, 364 bp, Zea mays
  unsure (1)..(364): unsure at all n locations
tcggcatggcccactctntcatagttggaaacactctgaaagccaaaaattcctgcactaagtccctagtgtcgatgtgctctgcgataaccctaaattcagccaacgcaatttgggttggaccctctagtgtcatattgcacgagggtctggtctctctgaagatcaactctaacggactctgaaccagcttctccttatcatcgttaactttgacgtagaaccattcagatttccagccagctggccacttgcttcggtaactgatcactggaaactttgtagtcttgtggtaggcaaaattgtagcagccgaagttntcatgtaacccatctcctctagccttggtctaataatgtagctc

SEQ ID NO: 58732 - DNA, 461 bp, Zea mays
  unsure (1)..(461): unsure at all n locations
gctttcacttagtgtcgcgtttcacactcatactgattgtcagtcggagcgaacgatccaaaccttggaatatatgttgcgtgcttgtgttctgtcatggaagggtagctgggaggatcatcttgcattggcggagtttgcttataacaacagctaccaggctagcatcaagatggcaccatttgaggctttatatggcaggcggtgtatctcccctctgtgctgagagaccttgggagagagatccctggttggtcctgattgggttcagcagacttctgagaaggttcgggaaattcatcataatattttggtcgctcagagccgtcagaagagttatgctgatgtgaggaggcgggacttggaatttgcagtgggtgaccaagtcctcctcagggtatcacctactaaagggagtgttcggntcgtgtctccggaaaactaacccgagatacattgga

SEQ ID NO: 58733 - DNA, 414 bp, Zea mays
  unsure (1)..(414): unsure at all n locations
ctcagcttatacaggagaatagaagcaagagctcgaccataagttataatagaaggggagttatacaatcgtggggtctgttccccattactcaagtgcttatccagatccgaaggtatagagttaatgaaggacatacatgcaggtctgtgtggatctcacattggatctaggcccttgcttgggaaagtttttcgccaaaaattttattggccaaaggcagcttcggatgcagcggatntagttcaaaagtgcgaaggttgtcagaaatgtgcaagagatcaaaaacaaccttcgtctttaactcaattaatacaacccacttggccattgcaaagatggngtctggatttgctangtccattaccaccagcacaggggaacttaagatatgtcgtggtggcagtggaatat

SEQ ID NO: 58734 - DNA, 437 bp, Zea mays
  unsure (1)..(437): unsure at all n locations
agcttgtgaagaatcttcattccaacatggttctttcttcgatgccataaccaacccatattagtcttagcaattaagcaagtatcgagttcagctctgttgaaatcaactaagtatagctgaccctcgagtactcgcttaaatgctactgaatcatcacttcttctaaagacagtaacacctatattcgtaaaaagacagctgcaacccattttgcataatcgagaaacggaaagcaaattgtaatataaggattctacaagaaaaacattggaaatggaatggtcaagtgatatagcaatnttaccaagtccttttaccaaaccttgttttccatccccgaatgttatagctctntggggatcttcgtttctctcgtaagaggagaacatctttntctcccctgtcatggtagttgtgcacccgctatcaatgat

SEQ ID NO: 58735 - DNA, 319 bp, Zea mays
  unsure (1)..(319): unsure at all n locations
tctaaagggagaacatgtggtanggttgtctaacgtgcaattcgatatagatagaccttgtgcagcttgtcaaacaggtaaacaagtgggaggagcgcatcacagcaagaatgtgatgaccacttcaagacctctggagctgctgcatatggacctcttcggacccgtcgcctatctaagcataggaggaagtaagtatggtttaattattcgtgatgacttttcccgcttcacttgggtgttctttttgcaggataagtctgaaacccaaggaaccctcaagcgcttcctcangagagctcacaatgagtttaagctc

SEQ ID NO: 58736 - DNA, 445 bp, Zea mays
  unsure (1)..(445): unsure at all n locations
aagcacctgggctgcagctaatggtggaaaaattactgatatttgggattatggcggccgagggatggcacatganataatgaataagagtgaaaaagatattcatgacgctcgagaagcgacaaaagcagctgaaaaggctgcggaacttgaaaaacgaataggtattacttaatggtttttaattttattgcttacttttgtgatttcgaactaatttaagtcttctatcgtagctgaactacctcctcccctagagcccttcgacccattagcggacccagaaacaaagaagtcaatagaaattattaatatggtcgaagctattgtggacgaagttgttacaaaattattaaccgaagctgcagaagtcctaaaggaggaagaataactattcgtaaaaacattactagaatattaatgtaatatttgctgggacatgatt

SEQ ID NO: 58737 - DNA, 438 bp, Zea mays
  unsure (1)..(438): unsure at all n locations
actcagcttctaagggagaacacgtgataggttngactaacgtgcaattcgataaggatagaccttgtgcagcttgtcaagcaggtaaacaagtgggaggagcacatcacagcaagaatgtgatgaccacttcaagacccctggagctgctgcatatggatctcttcggacccgtcgcctatctgagcataggaggaagtacgtatggtttagttattgttgatgattnttcccgcttcactcgggtgttctttttgcaggataagtctgaaacccaagggaccctcaagcgcttcctcaggagagctcanaatgagnttgagctcaaggtgaagaagataaggagcgacaacgggtctgaagtcaagaaccttcaagtggaggagttccttgaggangaanggatcaagcacgaggttttcgctccctacacaccac

SEQ ID NO: 58738 - DNA, 470 bp, Zea mays
  unsure (1)..(470): unsure at all n locations
agcttccattgtgctgtaaagcaaaaaaaaatttgctcttagcccaatcacaaataactcttttcaaaacttgctgcttagtatcaaaaaagacctttggtaattgtctaagtaaacatgagacagttgccaactaacagatcattttgtttacaacaaagtgcagcgtagtagaagagaaacttatcactttgctacgaatcgaaagatgcaaaataaaacgtattggtgatagcatgctattagctaacgataatgcttaagcaattcacaaacaatttgcacgttgcaactccatgtgcccacgaacattgcaaaaaataataacaaatactgaactgacttaatatttgattgaatcatctggctttttccttaaaataaagacagagtaaagagataccaacatattgcaaaaacaacagagaagagagacgtcgatgagaanaaagagaagagcacccacatct

SEQ ID NO: 58739 - DNA, 445 bp, Zea mays
  unsure (1)..(445): unsure at all n locations
tttgacagttngatacattcataaattcagttaacatattgtaaactatgcaaaaagatagggaacaaacatcacctcaggagacgatttatgcttgttagaccaaaacttccaccacgaacctttttcgtctggcttaacagcttttgggggctctgaagcttcatccaggatctggagatccttaacgtttttatcatgccatccacgaggaacccatcctctattcacaaggataggtgactgcaagctgacaaaccatttcttagaaagatgaagataacctgtnaaacattgattaattntgaatttctagggattatctacaggccacttgggcattttaggcccatcatacactcannatttgtgccggacatcaagcagatataacagtccaatttctctacacataacctagcttctttcttcctggacaccgtca

SEQ ID NO: 58740 - DNA, 435 bp, Zea mays
  unsure (1)..(435): unsure at all n locations
agcttcgcacctctgaacnaactctgctgctacattctttgctgnnggccaatagaatcctgacctgaagaccttcccgactagtgttctggaggctgcatgtattccacattgcccagcatgaacctcctccagaaggtgctccccgatagacgggagaatgcacttcatgaggacgcctgatgcaccccttctgtacaatgtctccccaatgagtgtgtaatgagctgactgtctggcaatgcgctcggccgagttcctgtcatctggttcttcttcattctttatatacttgatgattggccttctccagtcatcagagtctgactcgggctgatctataatgatgcattcttctgtctgatccattgagatactcggctgcagtatttcttgcacaaagactcacggtgggacctgagcttgactggatcc

SEQ ID NO: 58741 - DNA, 386 bp, Zea mays
  unsure (1)..(386): unsure at all n locations
ntacaagcacttaccaacagaatgaggaaggaatataggtcgattctatcgaccagagcagcatatgaacactagtgatcctgtcaatagcccttaagcactatatttgatattgggagctnggagtgacatgattgctttgattgtgtcttggagtgttggattgtgctcttacaatgaatgacaactttagaatgcgtggatggcgttgaatgatgtggttggtgtatttataacctcaaccacttgctagacgtttgcaaatgctactggcgatgggcgcaccggacagtcctgtggcgcaccaaatagtcactgttcactgtatggtgcgcaccacgtcagcgtgtctggtanggtctggagatgtagaccactggagccgt

SEQ ID NO: 58742 - DNA, 442 bp, Zea mays
  unsure (1)..(442): unsure at all n locations
agctnttatgccttctatgacgaatatacattgacactacatactttcgtcataaattagttctgtttatgacgttttctgagaggtgatccaatatagtgacgcaaaaaaaatctctgtcattaaaatcgtcataatctagaacatcgacatctttgtgacggtatttaatgacaatacgcaattatcataagagtaaatcgtcatactacccttttgtaccatgatcgtgaccatatgctgtcatttcatattttgtcataattttttaattcatgaaacaaaaatataaaatatattttttgcacaagtgcaattatatatgtggctgcgtggcatatttggatgctggtatgacatgaaacaaaaatggtaaataatattgccagcaattaaaatttatattagcgttctattggatttatgtgaaaaaataaaaata

SEQ ID NO: 58743 - DNA, 285 bp, Zea mays
  unsure (1)..(285): unsure at all n locations
ntggtcctcgtcgagatcaaagcatcctctatgacgctgattgttcatatgaccgatgtctggctcctctcgcccttttttctatggcccacggtcgagtacgctccgtgtgtttctgcatgtccacgaacgccgacgagatgggacatatgttgtgcctcccccctcatactcgaacacttatcccgatgaagcgtggtttttcgatggtgtggacatggtatgctagccaaacccangctcctagcgcgatgacatggaactcttgtgctgctattgcacgac

SEQ ID NO: 58744 - DNA, 397 bp, Zea mays
  unsure (1)..(397): unsure at all n locations
ctgcagcttatgccctaagnattgttaactttgntaagggcaaagctcccatggntctagataatgagggctatatattatatccagctggttatcccgaacataagattaagagaattcattctaggaagtctcactctggatctcatcatgcttttatgtataagagtgaggcatctagttctaggcaatccactcatattaaattgcctaaaaagaaatctcctattgcatcaaatgaacccaatgtctcatttaagacttttgatgcatcatatgttttaactaaaaaatcaggcaaagtacttgccaaatatgttaggggcaaacagaagggctcaaagacttgtgtttggttacccaaggtgcttgtttctaatgtcaaaggacccaagac

SEQ ID NO: 58745 - DNA, 373 bp, Zea mays
  unsure (1)..(373): unsure at all n locations
tctccataatagtatntataagtgtcggggaccataattaggggtaccctcaaggcttctaattctcagctggtaacccccatcagcataaagctgctaaggcctgatgggtgcgattaagtcanggatcagtccgttcgagcgactcgatcacgcctcgcccgagcctagcctcggacaagggcagccgaccccggaggattatcgtctcgcccgaggcccccaccgacggcgaacatattttcggcttgcccgaggccctgccttcgctaagaagcaaccctgaccaaatcgccgcaccgaccgaccaaatcgcaggagcatttaatgcanaggtggcctgacacccttatcctggcatgctgccccccgc

SEQ ID NO: 58746 - DNA, 426 bp, Zea mays
  unsure (1)..(426): unsure at all n locations
agcttcacagacccatggagacctcggaatatgcatcacctaagcctgcgactccctgcaacgccctgaccacggtgaggtgagaatctggtggctatggtcacaacaccgggactggcacacatcagggcttgttcggttattcccaatacacatgtattggatgggattggaaaaaattaagaagaagtttgacttgcttgtgattcaaacccatccaatcccactcaatccacatggattgagagctaaccgaacaagccctcaactggagcagaccaatctagggactgaggaggggttaacaccagcatgaacaccangtctccaacatctttgtataggactttggctagatctcggagatagcagagaccactggaccaacacctaactacattagtggggactatgggcaggtataat

SEQ ID NO: 58747 - DNA, 445 bp, Zea mays
  unsure (1)..(445): unsure at all n locations
tctccatcatctctttctttatttctttggcacaaagatgtctataaaagtatcttagctccgctaatgctttccagacatcatnttttacaaaaccacgaaacataacaggaaggagtctttccattattatgtggtagtcatgactcttcaacccagaaaacttgcccgtcttcaaattcacagaccttctaaagcccgcggcgtaaccatctgggaactttaagtttttcaaccatttcatcaattgtttcttccttttaggtttaatactgaaaggagcacgtggcttcttctgattctctcctatctncatagttggtcttctacagattaaggccaagtctttccttgccttannggtgtcttttggtntgtgatattcatgcaagtgctgataatgctttcacccatattacgttcctggtgcatgacaatcaatgta

SEQ ID NO: 58748 - DNA, 186 bp, Zea mays
gagccacccccttattacatactgtgagccttgtaaacatattactgaccttaattttagccgatatattttaaagaccactgaaaacagggccttgtatgaacaagcatgattaagtcaaaaatggaaaaggcggaaaatttacagctgacactgatctccaaggaattgggctgtttatagaga

SEQ ID NO: 58749 - DNA, 309 bp, Zea mays
  unsure (1)..(309): unsure at all n locations
tcgtgagaacattctccgaagctatactccgaagatgaagattgtgttttcttgtgatttaacacgattntcactctttcaaagcatacttccgaagatcaatattgtgtccccttcttgtgctatatgcaacatgatgtatgatgcttatgctatgcaaaatgatgtgatgatgttatgttacgtagatgacatttgttccgaaagatacacacatatccccacacnaatattttgtaccagcgctgattcttcgctgtaagctctgcattcccttatgaacgtctttggagcttctttcgcttttac

SEQ ID NO: 58750 - DNA, 433 bp, Zea mays
  unsure (1)..(433): unsure at all n locations
agctngtcgnctaatacacctttaaaagcttatgaaccatcactccttctaaagacagacacatctatgtttgtgaataaacagttatatcccatattgcacaattgactaacagaaagtaaattatatcccagagactcaactaagaacacattagaaatagagtgttcatttgagattgcaattttacctaacccttttaccttgccttgattcccatcaccgaatattattgaatcttgggaatccttgtttttgacgtaggaggtgaacatcttcttctcccccgtcatatggtttgtgcatccgctgtcgataatccagcttgaacccccggatgcataaacctgcagggcaatttaggcttgggacttaggtacccaactctttgtgggtcctacaatgttagtcacaattgtcttaaggacccaat

SEQ ID NO: 58751 - DNA, 422 bp, Zea mays
  unsure (1)..(422): unsure at all n locations
tcnggcttcgtcaccagccagctctcgcccacccttatcccaaatttgagtaatanatctggttccaatgcttcgggcttcgctggggatatcaaccaagtctgtcggagacaagctgaagggtggtttatttaccatttttccgtgcgtgcaaccagccttcataaatgctacagctgtaccgcgagaagctagcaaggcacagaagtcaccgtgcccggctatcacttcatcaagcgcctcaacttcgttttcaatgtgtttgaaggtatntggtatgttttcagccgaaggggtaaactcttcggagctggctccaaccgagttgaagacatctttaaatggttgtacacagcgacttccnagttaaacacacgttccgagctctttcaagaatgtgcagctttgatatttgtcagctt

SEQ ID NO: 58752 - DNA, 441 bp, Zea mays
  unsure (1)..(441): unsure at all n locations
tcaagctgtcgtctaatacacccttaaaagctattgaaccatcacttcttctaaagacagacacatctatgtttgtgaataaacagttatatcccatattgcataattgactaacagatagtaaattatatcccagagactcaactaaaaacacattagaaatagagtgctcatttgagattgcaattttacctaacccttntaccttgccttggttcccatcaccgaatattattgaatcttgggaatccttattcttgacgtaggaggtgaacatcttcttctcccccgtcatatggtttgtgcatccactatcgataatccagcttgagcccccggatgcataaacctgcaaggcaaatttaggcttgtgtctatgtacccaactcttgttgggtcctacaaggttagtcacaatttccttaaggacccaaatgaagc

SEQ ID NO: 58753 - DNA, 354 bp, Zea mays
tatgaagattcttcatcccaatgtgggctagtcggcgatgccagagccaacccatgttagtcttagcaattaagcaagtgtcgagttcagctctattaaaatcaactaagtatagctgaccctctaacactcccttaaatgctactgaatcatcacttcttctaaagacagtaacacctatatccgtaaaaagacaattgtagcccaatttgcataattgagaaaccgaaagcaagttgtaatctaaagaatctacaagaaaaacattggaaatggaatggtcaggtgaatatagcaatttaccaagtcctttgaccaaaccttgattcccatccccgaatgtgatagctcttt

SEQ ID NO: 58754 - DNA, 428 bp, Zea mays
  unsure (1)..(428): unsure at all n locations
gcttctaaagggagaacacattttaggattaacaaatgttcatnttgagaaagacagggattgtagcgcatgccangcagggaagcaagntggcacccatcatccacacaagaacatcatgacgaccgacaggccgcttgagctgctccacatggatctattcggcccgattgcttacataagcatcggcgggagtaagtattgtcttgtaatagtggatgattattctcgcttcacttgggtattctttttacaggaaaaatctcaaacccaagagaccttaaagggattcttgagacgggctcaaaatgagttcggcttaaggatcaagaaaataagaagcgacaacgggacggagttcaagaactctcaaattgaaggctttcttgaggaggagggcatcaagcatgagttctcttctccctaca

SEQ ID NO: 58755 - DNA, 439 bp, Zea mays
  unsure (1)..(439): unsure at all n locations
tgttcanatccatctttttgtctgcacatttcanacactagcgaactcgttttctttgtcgagaatcccagacactnggtaaaggtcattntgtacttggcaaagcctttatcgaatgttacactcgccaaacattntatcggcaaagtattctttaccgagtacttttttcgacactcgacaaagacattatttatattctcagttcactttagtcaaagctccaatatccactaataatgctctntttttcctacagattggataacgatgagaaggcatcaacaaatctagagatataaacatgcatgtagcaatctgctgtgactntctagcaatatgtgaatntattaaaaatacctatcacaagatatgaaggaagaaaggccttanaactcgaaaaggaaagaacctggggagggggccgggacacatatat

SEQ ID NO: 58756 - DNA, 410 bp, Zea mays
  unsure (1)..(410): unsure at all n locations
tataacaccctctctaattctgtgtacgttttctttgatatactaagaacttcagatacaaaatacactgggacctgtntcctgacttggccatcaagcttctcctggacaagtgctgcacttaccgctgagtgcgaagctgccacatataataacaaaagagcccctggcgtaggtggagttaatgctgttagatctattaaatactgtttcagctcttcaaaggccttctgctggattggtccccattggaagacttcggctgacttcagcacttcgaagaatggtaagtntctctctgctgatctggatatgaatctattgagagatgccaaccttcctgtcaatctttgagccccctttattgtagttggtggcttcatccgaagtatagcttcattttacttgga

SEQ ID NO: 58757 - DNA, 353 bp, Zea mays
  unsure (1)..(353): unsure at all n locations
tcgtgaagatattntccgaagctacacttccgaagatcaatagtgtatctccttgtgacttagcatgatattcccctttttcaaaacattcttctgaagatcaatattgtgttcccttcttgtgtcatatgcagcatgatgtatgatgcttatgccatgcgaaatgatgtgatgatgttatgctatgtgagatggtatttatttcgaagatacacgcacatccctgtaaaaacacataatccttttaaatcagcgttgacttttcgctgtaagcctcccttaggagcttcttcgccttttacttcagcggaatcagcgtttatttttcgctgtaagcctcccttatgagcttc

SEQ ID NO: 58758 - DNA, 420 bp, Zea mays
  unsure (1)..(420): unsure at all n locations
tccttaactaagtcctctactctacacatatcatcaccttatttgtaaaatttgatctaacgaatgcattctaggtgtaacaagcaagttaattgaaatgcttatgataacatgttagatttttagttcacttaacaccaaaggtgttacataaaacctcatcgtagaatttcatgtttaacacatgcaatacttatgaatactcaatgacagggaataagatacgagtccagcgatagcaaacaccactacattttacttgccttcgccgggaatntagaatggcattaggtacgatccgaagcccaccacctattatgggcattaaacttagtacaaacattcacatagcatttgctaataatcaacaccgctcctacgcacaaccccaacactgacgtgaacaaccactacttccta

SEQ ID NO: 58759 - DNA, 327 bp, Zea mays
  unsure (1)..(327): unsure at all n locations
agaactatttgagatcaacaatgactcaagatagattaaatggtttggcaattctgtgcattgagaagaagatgttggatgatattgatcttaatggtataatcgacgactntgtatcacaaaatgttagaagaaaattttagcatgatatcatacgacatgtgacaagtaagtgttatggctctaatttatatttatcatcttataaactntaaggcgtgtcatagaagttttttcattgaatgtttaatactctgtggttataattatatatatatatatagacatatactggntatacatgatggatgaggcctccatattgga

SEQ ID NO: 58760 - DNA, 386 bp, Zea mays
  unsure (1)..(386): unsure at all n locations
gcttcttcaaagctggacttcggntcccgttgagcatatttgtggttgaagtattaaagatataccagattttccttcaccagatcactcccgaagaagttattagaatggggatctttgtctgggctgtgagaagtcaaggtctacagacaagtgcaagatgtttttgcagtatgcatgaactttcgtatgagacgaagccctgaggtaaagaacaatatcataataattttgggtgctatagcttcgttgctcactctggtgcaagctacccagtgccaacgtttctgaagagatggcctgaggcctggatggaagaatggttttacgtgaaaaatgatttgaggcgagagaagacattaagaaatcatcatgcgcnccatctg

SEQ ID NO: 58761 - DNA, 307 bp, Zea mays
  unsure (1)..(307): unsure at all n locations
ctaatacacctttaaaagctaatgaaccatcacttcttctaaagacagactcatctatgtttgtgaataaacagttatatcccatattgcacaattgactaacagatagtaaattatatcccagagactcaactaagaacacattagaaatagagtgttcatttgagattgcaattttacctaacccttttaccttgccttggttcccatcaccaaatattattgaatcttgggaatccttgttcttgacgtangaggtgaacatcttcttctcccccgtcatatggtttgtgcatncgctatcgat

SEQ ID NO: 58762 - DNA, 418 bp, Zea mays
  unsure (1)..(418): unsure at all n locations
agcttgtgaaggttcttcatccccacatgttttaagctgcgatgccacagccagcccatgctagtcttagctattaagcatgcatctagaccggcctcttcttttgcaaaatcaactaaataaagtttgccgtctaatacacccttaaaagctagtgaaccatcacttcttctaaagacagacacatctacattngtaaatagacagttataccccatgttgcataattgactaacagatagcaaattataaccaagagactctactgaaaacacattagagatagagtgctcattagaaattgcaattttgcctaacccttttaccttgccttgattcccatcaccgaatataattgaatcttgggaatccttattcttgacgtaggaggtgaacatcnttcttctccccgtcatat

SEQ ID NO: 58763 - DNA, 318 bp, Zea mays
  unsure (1)..(318): unsure at all n locations
ngtagatnggatgcagagaaagaggctaaagtttctacaaaagagcatgcctcactgaatcagcttcaggagctaagggatgctgctgtctcttctctatcagaggttcgacaaaaatataaggtggagcttgctgagatacttgaagcaagtggaagcaaagacaaaaaggtaagtacctcaatcaatgacaacaatgcatctcgtgcttcagaggagaatacccctgctagtgggtcgggcgaggcatctgaagctttacctgttgagactaagccgcgccctgtattgaagcaactatgtgaacagatggacacc

SEQ ID NO: 58764 - DNA, 442 bp, Zea mays
agcttgtaacggtgattatccaagtctgctatggtaaagcgatggctcctctccaagatagtcaaagaattgttggcatcgcgatacaacctatcaaggttatcgcgagaagctgcaagggcatatttttcttcctgtagacaagattcagctcccatatccattaatagggaattctccaccgggtttaggacactccatcttcatccccatacccatatccattatgggtataagattcatcgcatacccattctcactgtcttttttcgattttggcctttttcgggttttattttcacaaatatgttccagtttcaattaaaaaaatggacccttaggtcggcgccgtcactattggcgcggatctatcatgtatcgacaccaattactttgatgcctatatttctgcatcgactccaacgtggatctgacgtggccg

SEQ ID NO: 58765 - DNA, 318 bp, Zea mays
  unsure (1)..(318): unsure at all n locations
cactttgcaagataatatgtagcaaccaacatgaatcaatgcccttctgatgcaaggaataaacatgaatgtcttccatattaacctttgcttgatcaaaatccaagcacttaagcaacaagcctttggtggttctttgatatagcatgtatgcaaatcaaatataaatacattctaccaaagatattaatcaccttcggcacttggatggtaataatttatatangagtcctcaatacctatattacccccaactcattgatacatttgacatgatatgatcattttttctttcatagctctttatatgaattatgt

SEQ ID NO: 58766 - DNA, 378 bp, Zea mays
  unsure (1)..(378): unsure at all n locations
agcttcgcatctctgaactaactcggntgtgtctctctttgctgtcggccaatagaaccctgacctgaagaccttcccgactagcgttctggaggctgcatgtattccacattgccctgcatggacttcctccagaagttgtttcccagtggatgggagaatacacttcatgagaacccctgatgcaccccttctgtataatatctccccaatgagtgtgtagtgagctgactgtctggcaatgcgctctgctgagttcttgtcgtctggctcttcttcgttctttatgtacttaatgatcggcctcctccagtcatcagagtctgactcgggttgatctacgatgttgcactcttctgtttggtctattgagatact

SEQ ID NO: 58767 - DNA, 406 bp, Zea mays
  unsure (1)..(406): unsure at all n locations
agctttgacagctttcttcggagtagagcttgaagtttttattggttctagtacatctaatacgttgaccattctcttcctcttgggagtncgtgaaagatccttntgtgccttcggcattgtcacctctgccgaaggactcactacttctaatatcctcgttttctcaaccttcatctcttcaatgttaatggccttcggctcatttgatttggctgatgatgccttcggcgatacagacgattcttcaattttctgcgtaatcgcaggtttcttgccttcggtcatcgaagaggtctcatcgccaaattcgggcaatgtggccggttcaatatagcgtggtcgatgagtaaggaccttcacccttttcctcttcggcataggctcgctcggagcggctgaaaca

SEQ ID NO: 58768 - DNA, 392 bp, Zea mays
  unsure (1)..(392): unsure at all n locations
acatgtgctaagcggcgatgccacagccagcccatgctagtcttagctattaagcatgcatctagaccagcctcttcttttgcaaaatcaactaaataaagtttgccgtctaatacacccttaaaagctagtgaaccatcacttcttctaaagacagacacatctatatttgtaaatagacagttataccccatgttgcataattgactaacagatagcanantataaccaagagactcaactaanaacacattagagatagagtgctcattagaaattggcaatttacctaacccttntaccttgccttgattcccatcaccgaaaattatggaatcttgggaatccttattcttgacgtaggaggtgaacatcttcttctcccccgcata

SEQ ID NO: 58769 - DNA, 445 bp, Zea mays
  unsure (1)..(445): unsure at all n locations
cttcattcccacatgtgctaagcggcgatgccacagccagcccatgctagtcttagctattaagcatgcatctagaccggcctcttcttttgcaaaatcgaccaagtaaagtttgtcgtctaatacacccttaaaagctagtgaaccatcacttcttctaaagacagacacatctatatttgtaaatagacagttgtaccccatgttgcataactgactaacagatagcaaattataacctagagactctactaaaaacacattagagatagagtgctcattagaaattgcaattttacctaacccttttaccttgccttgattcccatcaccgaatatgaatgaatcttgggaatccttattcttgacgtaggaggtgaacatcttcttctcccncgtcatatgggttgtgcatncgctatcaataatccacttgacccccgga

SEQ ID NO: 58770 - DNA, 372 bp, Zea mays
  unsure (1)..(372): unsure at all n locations
tccatgccatgtttaagacanaagtaacccanacagaactacggatcatgatcttttaaatcaattacaccatgccagcatctctgcaccacaaactcccatgcccctttttttttggtttccttcgccagcctgaatcaaaaagaataatcaggcttgaaatctctcatggacctgggtctctcccttcctttgtatcatctttggtgtttgcactctcttctgcagcagcagctccgtctccctggtcctcctcctggaanggccggtgggtgaagatgttcgccaggagctgcgtgcccctganggcgttggtgagcggcangtgtcccttcggcgtgtcgtccgtcaactcccacaagaactcgtcgg

SEQ ID NO: 58771 - DNA, 436 bp, Zea mays
  unsure (1)..(436): unsure at all n locations
agcttcatgcaactctacgctcgcctaagcttagaagataaggcagtcatactcaaacttctagaaagagcaagagagcaacgcgaagctcgtcaaagcctagaaaatgttctctccatgaaaatgctacactttgacgagttgactaaagaacatgaagagctaaagtgctctcatgttgatttggtccaaaggtatgaaactatttcaattgagcaagataacgatttacattgtatcgctcaattagtaaataggaatgccttgcttaaggaccaagtagaaaagctaaaagatgaaaatctagcttttcaagaaaaatatgatatgctcctatgttctcatganaatcttatggatgatcatatcatattaaatatggctcatgaggttgtgatagaaaacttnaaatcctaacaacctcactcatgcacat

SEQ ID NO: 58772 - DNA, 370 bp, Zea mays
  unsure (1)..(370): unsure at all n locations
cttggtcanggaatcgctntagaggctagcgttcctgacgaccatagtttgggctctgctgatgacactgaattggttcctgctggttcattgcaagttgctccggatagtgaccctacgccaagccatcaattgatttctcacgatttgggagtcccctcattcttctccaacctccaagtactatgatctattctagtctgacttttacaccggatgaactactgtcattacactcatctgctctcaatatcangcattggtggacgggatggctagtcagttgaagtttcaaggtgcttctgttccagaaagagcttcgtctctagcacattggaatccggtgctgcttcaacaacgtgtctctgac

SEQ ID NO: 58773 - DNA, 436 bp, Zea mays
  unsure (1)..(436): unsure at all n locations
agcttggcatgcatatttaaattttcttgtattgcatctaagacttgtctaacctagttgagataaccgccaacaaagcgagtgaaaaagcttaactcgggtcaaacctgacaagtcttagttttaaagattttagcacttaaattcttactttatatgcgattattggttcttgaaatatgcatgaggtactgcacttagggggagtattcaaaactcacatcactcatgagaaccccttagtgcagaccaaaatgcaaatttcaccatttgcctattttctctaaaaattatctagcctatggcgaaatattttgaagaatatatgagggtgccaatacctgtcccaacaagtgttatttngtgtgattataaagtgggatttggtttgattgggacgtagataagaaaaattaaaattttcccaactcttctc

SEQ ID NO: 58774 - DNA, 273 bp, Zea mays
tgacaatgaggagatggagctcatcatcaagagcttccgccaaattctcaagcgaaggaaggggaaagattcaagccccgttccaagaaggtttgctacaaatgtggtaagcccagccattctatcgctaaatgtccattgtctagtgatagtgacagggaaaacgacaagaaaggaaagaggaaggactagaagtattacaagaagaatggcggcgatgcccatgttttgcgggagtgggactacgatgagagctccaccgactcctccgac

SEQ ID NO: 58775 - DNA, 424 bp, Zea mays
  unsure (1)..(424): unsure at all n locations
agcttcccttntaccccgaaacgtgatacacccttcattggtgaaactttcaagtagacataatctncaactagaaagtacaagggttgtcatcgtttgtctgcataactcttctgacgagcttgagcttctttcaaattatgaattattcgttaaacattctcttctgtttcctttaccatatcaggcctgaagaaatctatttcaccgggttcagaccagtttaacggagtacgacaccgtcgtccatacagggctccaaagggtgacattttgatgctcttttgatagctattattgtatgagaactctgctaatggtaaacaatcatcccatttctgtgggaattccaaaacacatgctcacaacatatcttcaagtatctgatttaccctctcagtctgtctactagtttggngatgat

SEQ ID NO: 58776 - DNA, 332 bp, Zea mays
  unsure (1)..(332): unsure at all n locations
tccacacgctngccccagtggtcggctaagcatgtctggatggctgtctggtatgtcgctccaaccattttgaggccaaacggcatggaggtatagcagaaagcctcgaacggggtgatgaatggctatttttcctcgtcttcttttgccaagctgatctgatgatacccggaatagcaatctaagaaagacaacaccgaacacccagcggtcgagtctaccacctggtctattctgggaagtccgaagggatccttcgaacattgtttattgagatccgtatagtcgacgcacatgcgccagtccactntattctttntgagtacaagaac

SEQ ID NO: 58777 - DNA, 449 bp, Zea mays
  unsure (1)..(449): unsure at all n locations
gctaagccacaaaacttgtaagtgttttcacaattatggccaagtggctagagnggagtcaaaacacaataaccacaagaaatcaatcacagagatgacacggtggttatcccgtggttcggccaagtacaaaacttgcctactccacgttgtggcgtcccaacggacgagagttgcactcaactcctctcaagtgatccaatgatcaacttgaataccacggtgttcttgcttttcttttctcaatcccgtttgcgaggaatctccacaacttggagcctctcgcccttacaaaagatgttcacagagaaacacggagcaagggagggattagcaacacacacaaattcacagcaaattgcgcacacacacggccaagaatncgagctcaaagaactatctcgaagtctcactagaacagagctcgaatcacttagaatgacaacaaa

SEQ ID NO: 58778 - DNA, 354 bp, Zea mays
  unsure (1)..(354): unsure at all n locations
tccaccactntgttctagtgaccttggtatgcttattccgntgtatacgaatcttataacggaagtcagcaacgacaagcttatgttgggttaccacacactctccaggtataaccttgcaatctaagcaggcatgcctgtcctcttttctcaagaggacgaaatcaatttggctagtgtgttggccactactgaaggtcaccaggtgggatgtcctcttcctaaagaaagtgtttgctataaacatgtcatatgctanggcaaagttcaggatttcctctccttcttgattcctactcccaaagccgaagcctccatgcacaccctcgaaactggtgctagatgtacccacat

SEQ ID NO: 58779 - DNA, 438 bp, Zea mays
  unsure (1)..(438): unsure at all n locations
gttcacgagtgatcaaagcaggatgagactgtatgaaatcgntttccccaaattacatgtaagctggacctgggatctttgggctgattacctcaaaatcaacccaaagatcgggggcttgtgggggacagatatcccccgggtccactggaagagtaaaagacctcacgaaaggcccaagggcccaataaatcgtaaggtcattcgttcgtgggcctagggagggacaatcagcaaagcaggttgacatgaggccggattggtgcaagcccgaacggcccacaacgttgagcgagcgaccacaacagagatccgactttcccgcgctggagcccccatgcaacggagccatgcgaggataggtcggcagaactatagagagataaactcaaatagttcactatcttttangtgcacatagntatcatatccacgtgt

SEQ ID NO: 58780 - DNA, 373 bp, Zea mays
  unsure (1)..(373): unsure at all n locations
gtaagatctgtaaaataatgcacattctccatttaccattggtcttcttcatcataacagtattagctagccactcttggtatttgacctctctgacaactccagcgctaagaagcccctttacttcgttccgagcaacttcagctntgtcatcagacattttctgaagcctttgttttcttggcctgaaagatggatccacattgagtgaatgctcaatgacatctctgttgacaccgcaaagatcattggctgaccaagcaaagacatctttgttgttgaatagaaattttagcaaattctttttctgttcttcagataactgagaccccagcagtactttttgctctgctatatcttcacataaaagcat

SEQ ID NO: 58781 - DNA, 397 bp, Zea mays
agcttaatacttcggagacaaaatatactgttactcgtcttttagtttgtccttcaagcttctcctgtacaagctccacacttactgcagagtgcgaagatgccacatataatagcaaaggagccccttgaagaattatggggaggctacgctagcgcataacaaaattttcaaccccataaaaccaagaactactgccgttataggtcatggaattaccactagacgcgcagagcagcggaagacgtctcgatgtatacgaacgcgtcgagcagtgccgtgcagtcatcgtccttcacgtcctcgcacgggtcgtcctagtgctccagatgcagcacctccgaggtatccacacgtacagggaggaagcgccgcgtaccgaactgctatgttcgcg

SEQ ID NO: 58782 - DNA, 262 bp, Zea mays
  unsure (1)..(262): unsure at all n locations
atgtgatctgcactcacccnctcggctgcttttatactgaaaaacacgcgaagaggcacgagtcatcaaaaatattcccgcgcaacgtcctcttcttccctttcgatgattcaacttctaggtcacccatttccattaaaaatgaacccatattctttatgacgagcttcacgaaggtgttntcggatcttcgacataaggcctctacaatacaatatttgcaatctaagctccttacgaagaagcgaactcatcctgcaag

SEQ ID NO: 58783 - DNA, 425 bp, Zea mays
  unsure (1)..(425): unsure at all n locations
agcttatcaagtctactttcatacggatccggaattatattcatatctggtctgaggccgccgtaatcattgttttattaccgagacatttcctgccttttctgcccatggtgctgcgtcaccctattttggcccaatgggtcgtgtatcaagttaggtccattagggacgcatcctagggttgcagcacgaccccaatacccttgtggtcgtcctcccatgtttataaaccccctagccgccaccaagaacagcgggttttgtttagatcaagtttagctctcgctacttgcttgcaagcgcgcgtgctagttcagccgcccgtcttcttgtcttcggaaccccaccatattggagtttgattntgaaacctacatttagatctggtaattcagtacttggtctacttgttcttgctagntctt

SEQ ID NO: 58784 - DNA, 224 bp, Zea mays
  unsure (1)..(224): unsure at all n locations
tactcctgatagagtactgataaccttcgctctcggttgatctcngacgcagcctaacttttcatcgtcaacaccaccaaagagtagtgcccctgtgtgatatccgcaggatatggcatattcttttaattcttccctttcatccttcgntaactcttgtccaactaaagtttggaagttgaaaatnttctcttccgaagcatcttcagctattttctttccct

SEQ ID NO: 58785 - DNA, 332 bp, Zea mays
  unsure (1)..(332): unsure at all n locations
gcattctgcccttgtctgcctaactcttttgaccagcttgggctctcttcatattataaaataatatctgaaccttttcttccgtctcttntatcatatcaagcgctgaagaagtatctatcatcatgttcagaccaatttaacggagtacgacatcgtcgtccatttaaagcttctaagggtgccatcgtgatactttcttgatagctattattatatgagaattgcgctaagggcaaacattcatcccatttctgtgagatgcccagaacacatgcccgcaccatatcttcaagtatctggttcactctctcagtctgtccactggtttg

SEQ ID NO: 58786 - DNA, 408 bp, Zea mays
  unsure (1)..(408): unsure at all n locations
tattgagaatactcaagagagatgtttatagtacaagggagtatatgatgaaggatgatttcttttagataagaaatataaacaattcatcatccacaagtcacacagacaggaagaaaaatccttaacattaatgcacatcattagaaaagaggaatatgcaccttntaaacattttgatcaatcataggaaattttcttcttcatattgaatntattatcataacttanaagcatatcaatatgagaacagatatagcaaatgcatgaattagattctaatggacaagtgcatttatganaacgagaatgaatgcacatctagctgagttaagtccaataaagaatctattcttcacataggtagaatatgataagttagagtagataaccattgatgggaactat

SEQ ID NO: 58787 - DNA, 451 bp, Zea mays
  unsure (1)..(451): unsure at all n locations
gctgagtctagnntcacaagttcgtcattttcttgaatcgccgcatntgatcttctctgtgacatgcaaggctcaacctcaatgtcacgcacaacaatttctgtgctatcttgttttatggcttctggaacttcctggtcactgtggatcaatcattccttttctaactcagctaacttctcctttaacctgtgattttcttcgttatataggcataatgcctcatccttttcagatattgcagattcaagtgaagacaattntgcactaagatttagagcagcaccatccatattgtccttatagtcatcaagcaaatgttttgtaaccagttggtacattccttctctaatatcacattcaattctgaggtcctcacagtcttctctaactttatcaatatgtctcaggagctcttcttccgacagcatctgcatgacagttctatact

SEQ ID NO: 58788 - DNA, 434 bp, Zea mays
  unsure (1)..(434): unsure at all n locations
cgcctatgaagagatactttgacataagatgatgcccaattatgactntgggaaggaaaaaatataagaagtntcgatgaagggaagacatgtgtgtgacatacatgtgtgatgaaatgatataaatgtactccatcgaatacaaagaattactatataataagaaggggtgaatgtaaatttgtaggaacatttactggagcttgacactacaaatatgtgaatagtgcggtcgctagaagggtcgacattttgctaattatgcgctcgtcattacatntgtgtcanaagatgacactatagctaataattatgaaaaaataaatcttttatgtttcatatgtgttcgaagatcaatattgccttcatcaagtatactacatcttaagtnntatttgtatatgcatgatatatttgcttgacatgagtaaaca

SEQ ID NO: 58789 - DNA, 454 bp, Zea mays
  unsure (1)..(454): unsure at all n locations
agcttctgtgccaaaaatcacagaaagataatggatggttatttagttgtgattntccaaagtttaatgccaaaaaggcactttctactgccttgctatttgaaaaatgtcaaacagcagatttcatatttttcctaagttcttaataataaaacattaactatcccaaggtttggggtgtttttactttggggttatttttctagggtttntctaagttttccttgttttcttaaaataaaaggtatcctatttattttatactaaaccagggtataataaatttttctagtaaactatactgaataagtaccctaacaaaaataggggtgccccctggttccttaattaaatcacctttcttattttctttaactttaaacacaatgtgaaataaatggcaaactctaccttaatggngtggacagaggggtttatatttttaaataaatct

SEQ ID NO: 58790 - DNA, 358 bp, Zea mays
  unsure (1)..(358): unsure at all n locations
tgcaccattaaatgccactgaaccattactacttctaaaaatgtaacatccttatcggtaaataaacaattgttacaaatttcgcatgattgagataccgacaataaattgcaattcaaaggattatgtaggaaaacatttgatgtggaatggtcggtggtgatggttatcttatcgaaaccttttacctttccttgccttacatcaccaaacgtgattgcattattagggtcatcattcttctcataagatgtaaacattttctattctctggtcatatnggttgtgcatcgactatctattacccaacttgatcatttggatgcatgtacctacgaaacaangttatgtgttgttt

SEQ ID NO: 58791 - DNA, 452 bp, Zea mays
  unsure (1)..(452): unsure at all n locations
agcttgttcgagaactcgatgtatgtccgttggtctcatgtgaagggctattggacctggtcccaacgataggccgcttgtggccatagtcgtangccagcgacgtcgaaccaaggttgaggagcaaactctatcgagcgaccaaccggttgttgcgaccacatgcacaactggaataggtacacacaaccgcctaagcatcatataaggtaatatcttctatgaacttgggagatctccaccccttgtgctctatactagggattgccttggatgggttatggccaagcgccctctttccatggttgtttcttaagggcttatacttggcttcaacctttgtcaacccatcatcattagagcacaccttcttcatggttntntgactggaccttttagtgtacctttctttntcatggttagctaaacaacaacttgcatgatactttaaa

SEQ ID NO: 58792 - DNA, 418 bp, Zea mays
  unsure (1)..(418): unsure at all n locations
cgctgtgtagaacgagtctgaaactctcatactcgtgaatggttattactttctgatgtacgtatcgttctctctgtttgttgtgcttgcttgaaaaaaagaagactttgtcttgccactgtatcaacttctgaaaagatgtcgaagattattccctggattagatataagaataataatactaaacatattatagttattatgaaaaagtagtgatgtcgtatttgaatattangtaagtaatgtgtcagcgttcaaggtcaggtggagacggtcggccgtaatccctggccggtgagcttacttcanatcttcgacatcgcacatgcgcatgcacgcatgtattatttatattactaatactacgaatattatttatctaaaaaattctgacgttattttcgttctttgttctttt

SEQ ID NO: 58793 - DNA, 386 bp, Zea mays
  unsure (1)..(386): unsure at all n locations
taatctggnggcactcggagaagcaatcgaggagggacatgacctcgtagcctgctgcgctatcgactatnttgtcgattcgtggcaaggggaagttatccttgggacaagccttgttgaggctcgtgaagtctatgcacatgcgccacttgccactcttcttttgtaccatgaccacgttggcgagccatgtgggataagcgattggtttgatgaatatggcttccaataagcggtgcaccacggccttggctgcttcagttttctcatctgacatattccgtagtcgcttgcttttcgggcgcacagaanagtcgatgccctggctatgctcgatgatagagcagctgaccccgaccagatcgagggcagaccaagcgaagacg

SEQ ID NO: 58794 - DNA, 437 bp, Zea mays
tctttactagattagaccgggtgcaaactaatatcctttcaagtgtgtaacaatcagtgcaaggcaatgcaactgtttcatcatcgaattcatcacttcttcgaacaccaaaaggtctacttgtaaaagcatcttgccttgcactagtttcacgctcatcttcttcctgtaatcccaacttgtcatacatcaacaactctgaagcaacctctttactcgatttctaatgacccccgatcaaattcggggacctataaatcaacacatttgtgttatgtaaaccattgccctgtgcttgttacacataaatgaaaatgtgatacacattatacaacataattgaatcgaactcacctcttgtctagttctagccgctggatctataagctccactgtcagacccaaaaacaaagaatccaacacattcacaacacaca

SEQ ID NO: 58795 - DNA, 423 bp, Zea mays
agcttctcctcaattggcgccactcctaccctctctcgtatatcatcattccggactcggtctctccttgtgtggccacatatccagcgcaacatacgcatctctgccacgcatagttgttggacatgtcgtcttttagtgggccaacattctgctccatacaacatagccggccggattgctgtcttgtagaatttgccttttagtttgtgtggcacccgggggtcgcataagacacccgccgcttgccgccacttcaaccatccagctttaattctatgactgacatcctcatcgatgtctccatccttctgaagcattgatcctaagtaacggaaagtgtcttttttgggtaccacttgcccatcaagactaacatcgccatcttcataccccgtggcactgaaatcacacttcatatat

SEQ ID NO: 58796 - DNA, 406 bp, Zea mays
  unsure (1)..(406): unsure at all n locations
tagtccatccttagctggatatgttggtactttattcttgcatcaacgttgtgcttgccatatntatcaattgattgtgaaatgcggcttgaaacgactgcaaccttaccttgattcatttagaactgcaattgtcttcttgaatgcttctaatcagcgtattgatgcatttaagggttattggtgttgtatgaatgtacgacctcataaatntggcattgacatgcccgtgagatggaattctacatatcttatgcttaagcatttaattccttacaaggggaaccttggtgtgttcatggacactaactatcctagaaaaccaggtgaacctaatctngtgacanattcgcattgtatgtggctgaaaaagtgcttcagttcttgaactgtntatgatgctact

SEQ ID NO: 58797 - DNA, 410 bp, Zea mays
  unsure (1)..(410): unsure at all n locations
agcttcctcaatctttattgttgcttaatgaatatacttcaatgtttataattggcccaagccatgattttaaatttctcatacccttttccccattttcttgaattntgcacaaagggctcacttatggtttttattagggttgcaacattattacctttttgaaagactcgtttgttttgatcatgatacttttaagtataggcttggtggattcttcattcttaagtcaatttgatgctcatgctcaatttggttcacataaaatgatggttcctggtttagcactttgagagaaaccctacgtgacactggggtgtcacaataatccaagcacgggcatggttntataggcacacggcgaggctggcgacccggatagcccgcaccaaccggaacccgcagatcac

SEQ ID NO: 58798 - DNA, 386 bp, Zea mays
  unsure (1)..(386): unsure at all n locations
tagccttttcactttaagcctncaattcttaanacaagctataatatcaaatgacaacctactgntaattttacagaatttntggaaattattataacactgtcgtagttcaaacctacactagaaacccaaaatggaaattaaagtaagggaaatgaataaggtaaaataatgtcatcttaaaacctttgtaatctgtccactaaaatgtatcaaggcaataccaatccactatgttatcttcacttaaaaacccaagcctaaagagtaataagcctaacccactggaagccccacataaccaagaaaccctaagttacttcttgacttagtctctctttagccataatgtattaaatcctgcataatcatgaacatacatgtca

SEQ ID NO: 58799 - DNA, 421 bp, Zea mays
  unsure (1)..(421): unsure at all n locations
agcttcccctctttcttttcttctttaagcttcggcatagnccactccttcatagttggaaatactctgaaggccagaaattcctgcactaaatctctagtgccaatgtgttatgcaataattttgaattcagccagtgcggtccaagttggaccttctgctgccatattgcatcggggtctggtttctccgaagatcagttcaagagggctctgtaccatcttctctttgtcatcgtcaactttgacataaaaccattctgacttccagcctgccggccatttgcttcggtagctaatcacaggaaattttgtggttttccgatagacaaaattataacaaccaaaattttcatgcaatccatccttcctggccttagtctggtaatgcagctcatgtactcgacagaagctgtcggcaa

SEQ ID NO: 58800 - DNA, 349 bp, Zea mays
  unsure (1)..(349): unsure at all n locations
tcgaacaaaatcttatgccaatgcttaggattatcatatatcnttcttttttggcaagntgatcaatgtcctattactagactcggcctgtccattggcctgagcatagtatggagatgaattaagcaacttaattatatataattcagcaaattcacgtacctcctttgacatanaagaagtcccttgatctgtagtcaaggtctggggaatgccgaatctatgaataatatgctcagttatgaactcaattacctccttgtgtgtcatgttcttcagagcaatggcttcagtccatttggtaaagtagtcagtggcaactaacacgaactgatgcccttttgatgat

SEQ ID NO: 58801 - DNA, 447 bp, Zea mays
  unsure (1)..(447): unsure at all n locations
agcttggaggcgtcgattggttgtctacttgttgtagactcctccttcttttcttctgacgccttgaatgcgacgggttgagcttcggatgtagatggatcatcaaactcgttgatcttcctcgagccttcgatcatgcactcaaaacttacaaaatgcccgattacttcctcgggggtcattttagtatatctaggattaccacgaattaattgaacttgagtagggttaaggaaaataagagatcttagaataaccttaaccacttcatggtcatcccactttacgctcccgaggttgcgtacttgatttaccaaggtcttgagccggttgtacatgtgttgtggctcttcccctttgcgaagccggaaccgacagagctccccctcgatcgtttcccgcttggtgatcttggtgagctcatctccctcgtgcgcggntttgagc

SEQ ID NO: 58802 - DNA, 403 bp, Zea mays
agctttaccaaatggacgtgaagagtgcctttctcattggaccaatcaaggaagaggtctatgttgagcaacctcccggctttgaagatagggagtatcctaatcatgtttataaactctttaaggtgctttatgggctcaagcaagccccaagagcatggtatgaatgccttagagatttccttatcactaatggattcaaagtcggaaaggccgatcctactctattcactaaaactcttgacaatgagttgtttgtatgccaaatttatgttgatgatattatatttgggtctactaacgaatctacatgtgaagaatttagtagaatcatgacacaaaaattcgagatgtctatgatgggggagttgaagtacttcttaggatttcaagtgaaacaact

SEQ ID NO: 58803 - DNA, 429 bp, Zea mays
tagatcgtgtaatgtcatgaatgacttgcatatgagattaatgtttactctaactatgactaggtgattatttgtggctctacatgaagggaaaatattgtttgttatcaaccctgcccgatatttcgctcggctcttttgacaagccaagcacacagctagctaacttgtgttacattgttttcataatcaaacactagaatatccatgcatatatatgtaggaatcatagctatgcaaattatttttttcttctggagaatatgactaccttatactaatagcatcttatcttgattgcggccgtttatgggagatgtgaaaaacaaggtctggcatcggtctgacgtcaccagatgagttggtgcttaatattgcttaatctaaacgtatgaaacattacaccatgacactgcttgagatcatgtc

SEQ ID NO: 58804 - DNA, 324 bp, Zea mays
gcagcaacaaagctctttccggtcgtcagctccaagaggcaaatgcgctagaggcgccagcggcttcgaaggaagatatggggaccaccctaagaaaatctactgcctattttgtggtgaaaacaaaggccacaatacaagaacgtgtcaaatcaccatccaaaagccaaaagagattgcagaagccgaagcccggcaaaatcaaccgaagcaggtcctgcacactacttcgtgtcattcaccctacataccaaaatatgtgggtaatcatcccgcaacttctgttgcttcggctaatcagccgcaagtttcttggccacagct

SEQ ID NO: 58805 - DNA, 379 bp, Zea mays
gagccaacccaagttagtcttagcaatgaagcatgtgtgcagatcagctctatcataatgtaccaagtataactgaccctctaacacacccttaaatgctattgaatcaccatttcttctaaagacagtgacacctacatcagttaaaagacagttgtacgccatttgacataattgtgaaacggacagcgaattgttatctaatgaatcaacagaaaaacatttgaaatggaatggtcaggagatatatgcaatttacccacacctttgaccacaccttgatattcatccccgaatgtgataactcgatggggatcatgggtcttctcatatgaagagaacatcttattctctccagtcatgtgggttgtgcacccgc

SEQ ID NO: 58806 - DNA, 399 bp, Zea mays
agcttcgagctcttttccagccctacgctagctcgtatgccgagcagtagcgctagcgcgttgtgcccagtggctagtgcccacgtcccagtagcctgtaccccacgccatgccccacgggcctgccaaagtcgcccacgcccaaacaatgtggctgtttggttcagcttctgggcggcttctggccgccagaagctgaaggtgaaaccaaacgcccaacttctcgcgcggcttctgggcgaagcgattgggtaaaaagccgcccgcccacttacctcgcgaagcgccgctgagttggcttccgtccgaagccgcgcgcagttagcctagggttccctcgaacgctcctccgccgccgccgcgaaccgaacggagcgccgccggtccgcaccacacgca

SEQ ID NO: 58807 - DNA, 493 bp, Zea mays
  unsure (1)..(493): unsure at all n locations
ntctaaagctctctatgggcttaagcaagctccacgcgcttggtatgaaaggcttanggatttcttgctttccaaagacttcaaaattgggaaggttgacactactctattcactaaaagagttggcaaagacttatttgtttgtcaaatctatgttgatgatattatttttggatctactaatgaattattttgtgaggagttcgaaaaaatgatgtcaaaagaanttgaaatgtctatgataggagaattgagcttctttcttggccttcaaatcaaacaattgaaagatggaatttttataagtcaatcaaaatatttgaaggacatgctcaagaaagttggtttagaaaatgcttagcctatcaagactccaatggcaacaaatggtcatctagacttagatgaaggaggtactatgggtgatcaacaactctatcgttcaataattggtagtttgtctatattaccgcatctacgcccgatgttatgt

SEQ ID NO: 58808 - DNA, 440 bp, Zea mays
  unsure (1)..(440): unsure at all n locations
agcttttacanacaacttcctttaagtgctagcttgggaaccccatttcttcaagagaaattagtttattttcctgttggaaaatagaaatctcgtgggaaaatagagtttccaaactagtctaaaaataaatattacacgtttcaatctatcataaaggaaaatgtcaagaagggttagctagtgttaatatgaataaatagaaccaacctcttaaactaatctgtttctcttgtatgaactccatggttgaggctccatgataaaaacaaccccttgcaaaatcacaattatatatatgtggtgaaaataggtaatttcatcttaccctctatgtgcaatttagaaaagaccaacaaacagagaggcatagataccattcttagaataattctcaagatcttcacgataatgtaactaggccatcgtcaccccagttc

SEQ ID NO: 58809 - DNA, 322 bp, Zea mays
cgataagaacgccaccatcgcgtggatggtcgtctgcaggcacagtaaaaagctgatgcaacgaggcgtttaaacacggaggtggtacgctctggattatcagaaggcaccatgccatcaccgggggtctgtctaagctatgctcgacgcacctcccttgcgcgtacactgatcggataaaagctcaccggcgatcgattactgccgtgcgccacgtgcttaagcactaattctactctgggtgacttatggactgcatgtaccgtgatcaccggaataactgacacggggaaagtcatttattccacgcatggagctagtc

SEQ ID NO: 58810 - DNA, 239 bp, Zea mays
  unsure (1)..(239): unsure at all n locations
gattgattgagacatcgtttacactggaacagcacagaacccagcacctcgtctctcatctgcaacgccactggctctcggtcgcaccctgatctatcatgacactactgcaggcgcggacgcggtgttttgtctctctgaggncaccgagcacccgtgtgatttcctgtgccatgcaccgtggtaaagctgctgttgcagccgagcccacaagtggccctactcgacttcctcttctg

SEQ ID NO: 58811 - DNA, 310 bp, Zea mays
actgaacattgtctatcattgcgcatcaagagactgatggtgtatgggcgatctctcgcggtcgtaataccgatgatcctaatcatgggtataaactctttaacgtgctttaatactgcactgtcgtccaataactataatacaaatgcgaaagtgaggaacttcatcctgtggagagagactgcggcacggccgctgatgcactatctaatataacatctcgatcggactcaggtcccgcccggagttttcatccaagaagtactgtacccgagcttttcactatattcggtgtgggaaagtcatttta

SEQ ID NO: 58812 - DNA, 362 bp, Zea mays
agcttgtgaaggttcttcatccccacatgtgctaagcggcgatgtttcagccagcccatgctagtcttagctattaagcatgcatctagaccggcctcttctgttgcaaaatcaactaaataaagtatgccgtctaatacacccttaaaagctagtgaaccatcacttcttctaaagacagacacatctacatttgtaaatagacagttgtaccccatatgacataattgactaacagatagcaaattatattcaagactctctactaaaaatacattatagatagaatgctcattagaaatcgcaagtttacctagaccttttaccttgccttgattcccatcaccgaatataattgaatc

SEQ ID NO: 58813 - DNA, 447 bp, Zea mays
  unsure (1)..(447): unsure at all n locations
agcttggtcattntattgctaactgtcccgataatgatagcgaccaggaaaagggaaacaagagggaaaagaagaagcattacaagaaggcaaagggcgaggcgcatctatgcaaggagtgggactcggattgctcctcgtccgactccgacaatgaaggactcgccgccaccgccttcaacaaatcaaccctcttccccaacgagcgtcacacatgccttatggcaaaggagaagaaggtatgtactcgcaattctacctatgcttcttcaagtgaggacgaatctagtgatgaggatgaagtagattattcatgtttgttcaagggcttagatagatctaagatagacaaaattaatgaattaattgatgccttgaatgaaaagaatatacttttagaaaagcaagaggaattgttgtatgaagagcatgataaatntgttgagg

SEQ ID NO: 58814 - DNA, 460 bp, Zea mays
  unsure (1)..(460): unsure at all n locations
ttagaaactaagctctactcctctcctgtgaccgacacacgcatgttgtcnttatctcgtcatcctcaacccgagcaccgcacctactcccattactcgacaacagacataatgagcatttaaactgtgtgtagctttccctgttccctcccccgaagtcgtgcaaattaacggtgtgagctcactagcattcaaccagagtctagtcgcactgctcacgccgtaccgacctacctccaatctatggtgcacgcctatcaatgaaaaccttatgcacactctgttcacttctatttaggagcatggagatcgctttaccacctcacttgatcaccacgacctcccaccagtgtcactagcttctcacgagctatagaaacctacataggacttctctaaactcactagggccacacctacccatgtaggctgatcccgcgttgccgatacatcacactag

SEQ ID NO: 58815 - DNA, 445 bp, Zea mays
agcttattattactattacgtaccaacaatattaattctttatgacagaacccaccccaaattaagagttgtagtgcaaagtggcccatttacaccactcttgttatttttgtctagagcatagcctttttcaattgaacctcaaagtcctaggataagctatattgaccaaaggcaagccactgaaatttttacaaaagttttggaaaaagttaaaccaatgttgtagttcaaacctacactagaattcataaatagaaaataaagaaaggaaaatgaataatgggaaatggtgtcatcctaaaacccttgtaaattgttcactaaattataataaggaaataccaatcctatatgcttatcattaacaaaaacctaaacctagagtgacaagcctaaaccactaaaagccccgtatgaccaagaaaaccccaagttactcagt

SEQ ID NO: 58816 - DNA, 468 bp, Zea mays
  unsure (1)..(468): unsure at all n locations
tagtccccaattatgcccacaaagtcctccataaatgactaataaatntatcatcacgatcagaaacgattgtgttgggcacaccatgcaagcgaacaatttcacaaaagaacaaatcagcaatatgagtagcatcgtcagttttatgacatggtatgaaatgtgccatcttagaaaatctatcaacaaccacaaacacactatcacgtgccttcctagtcctaggcaatcccagcacacaatccatagaaatatcttcccaaggagcactatgaacgggtagaggcaaatacaaaccgtgtggatttaaccgtgacttcgccttttggcatgtcgtgcaacgagcaaccaatctcaccacatctcttctcatctagggccaaaagaaatgaccagcaagtatgtcctcccgtttctttgctccaaaatgtcccattaagccacctccatgtgcgttctgtaacaaca

SEQ ID NO: 58817 - DNA, 422 bp, Zea mays
tagctcgcaccacgatatattggtgcttttcttattctggaaagatatggaccagtggcataccgactccaactacccgaaacattgtctgctgtgcataatgtgttccacgtgtcacaattgaagaagtgtcttccgattcccgatcgaacagttgaagtaacagatgttgtccttgagccggacttgacatattctgagcatcctattcaaatcttggatcaaaaggacagggttaccccgagaaaaactctccagttttataagatacagtggaaccagcattccgaatatgaggctgcgtgggaaactcaagactttctagaatagaatttcccaggctttttaacctcatgtaaattgtgaagcctgtctaactatgtaataaagaagaaaccaccacatcacccctgccttgtacc

SEQ ID NO: 58818 - DNA, 392 bp, Zea mays
acttagaatactaagcttatgaagagtcttcagtcccacatgggctactctgcggcgtcagagccaacccatgttagccgtatcacatgagcatgtgtcgagcccagctctatcagaatctactaagcataggctgaccctctaacacacccttatatgctattgaatcatcacttccttctaagacagtgacacctacgtcattcataagacagatgtagcccattatgcataattgacaagcggagagcacatagtcttcggatgaaatcacaagaaaaacatcggaaatggaatggtcagttgatatatcaattttacccaatcctttgaccacaccttgatgttcatccccgaatgtgatagcttgttggggatcttggttttttcat

SEQ ID NO: 58819 - DNA, 439 bp, Zea mays
  unsure (1)..(439): unsure at all n locations
agcnttgattcatggactgaacattgtcatatcactgggcatcaagagactgatggtatatggggattctctggtggtcataagtcagataaacaaagaatgggattgctcgaatgattccatggggaaatactgcactgtcgtccaatagctagaagacaagtttgaaggtttggaatttcatcatgtggagagagactgcaacacggcagctgatgcattgtcaaagctagggatcagtcngactcatgtcccgcccggagntttcatccaagaagtactgcacccgagcatttcactatatcgggtagaggaatgcaatattctgagccaaccagagtcagactctgatgactggagggagccaatcatcaggtacataaagaatgaggaggagccggatgacaaaaatgcagcagagcgcattgcaaggcagtca

SEQ ID NO: 58820 - DNA, 464 bp, Zea mays
  unsure (1)..(464): unsure at all n locations
tatgaagattctccatcccaacatgtgctagtctgcggtgtcagagccaacccatgttagtcttagcaattaagcaggtgtcgagttcatctctatcaaaatctaccaagtatagctgaccctctaacactcccttaaatgctattgaatcatcacttcttctaaagacagtgacacctacatcagtaaaaagacaattgtgacccatttgacataattgagatacggaaagcaaattgtaatctaaagagtctacaagaaaaacattataaatggaatggtcaggtgatatagcaattttacccaatcctttgaccaaaccttggtttccatccccgaatgtgatcgctctttggggatcttggtttttctcataagaggagaacatcttcttctcccctgtcatgtaggttgtgcacccgctgtcgatgatccaacttgagcccccggatgcatanacctac

SEQ ID NO: 58821 - DNA, 440 bp, Zea mays
agcttactatacctttaacatttaatgtttttttatatttagattcaaagggcaggtgggggtggggtttcgggttacgtaccgactcctttgggcagaaagtcggggaagcgagaacgtagaaaatcctcagtctcccacgtagcctcttctactgaatggtgactccactggactttatacattttgatcgaccttgcctgtgtggatctctccttttgatccaataccttgacggggtgctcttgataggataagtttggttctatctccaattctggtttaggtagtacttccgtgggtaagcggacacactttcgtagctgagatacgtggaacacatcatgaactgctgacatatggggtggcaacttcaattgatatgccacaggtccacaaatctctatgatctcattgggcccaatgtagcgaggagctaa

SEQ ID NO: 58822 - DNA, 479 bp, Zea mays
  unsure (1)..(479): unsure at all n locations
acacttgaatactcagctctaagtccgagcgtacagcggttatgttagcacagctatatttagtcactntaggaacaacatacatatcaactcttaaaccggacccgcttcatgtccttgtgaaacacatcgagattaagtcacatatgctgtcggtattgcattggtccaagtcttctcagctctcgctgtttggttcatctagatgagcatacacacgcatgtaggctcagctcagctgtttgagaaaagaccggagaagggacgagccatcagatagcctgagaccctagctagaggcagttctgatttgttctatcaataccttagcctgtctccaacgacaggccatgtattcgcaagagggaaaaacgcctacagaagagatattgttatgccaatatgtccaccatctatctcccattgataaattngcataggcatgatctgttggataatttgcatatgcatcatctctt

SEQ ID NO: 58823 - DNA, 447 bp, Zea mays
  unsure (1)..(447): unsure at all n locations
agctngccagaagttntctccccgctcgggcaacccttcacagttcaccaagctgatcgcccacacatggccacttcaacgctgggggctggatattttcgggccactacctacggctcaagggaacctcaagttcaccttcgtcgccgtcgaatacttcaccaagtagatcaaggccagggcagtatccaaaataacgttgaagaccgcccaaaagttcttctggcaaaacatcgtttgccaatacggagtcccgtccgagctcacagtcgacaacgacaaacagtttgacagccaggacttcagggacttctgcttctccatcggcaccaagcccgccttcgcctcggtgtaccacccgcaatccaacggcgtcgtcgagcgcgccaatggcaagattttcactgccatcaagaaaaggcttctcaacgacaagaaaggtaaatg

SEQ ID NO: 58824 - DNA, 475 bp, Zea mays
  unsure (1)..(475): unsure at all n locations
taccctgtcccatntctagggcatgtggctagttaagatagtccttgatcaacaggcctacatgcgcatccaatccttaactaacctaggtagaacatcaccttttcctagcccaagtcccgatttaagtacttccatccttaggattgtttgtgttccttaggatgaaaagagcattatagggaactttgcagtaagatcccaccatgctcccgatgaaaatattcttgcagatagaagccatccttcctcaggataacccctgagctaggcattattgcaaaagacaacctctatccacaagatctaagcaaggctaagcatttttgtaaatcatattntgatacttcaccagaagtatctataaaggtatggatttcaaggaaggcaatgcatccaagggtttccaagcaactcctatanacctaatgcacattcactagacttaaagtgtngtaaaataatataaaaacac

SEQ ID NO: 58825 - DNA, 450 bp, Zea mays
agcttagagcgagaaaaggaaggctgtcagttcttctttcgcggaggaggagttggaccaagaaatcagagacctagaagccatataccaacaagtgtagaggaagagagagaaaagatgcttcggctagccgaccttcagaggaagatcgacgaaactgctaaagaaatgcatcacatcacccaagatgaccaaggacgaaggcctcaatagagagagcttcgttaagaaagtccagccaatgatgatgaatggtatgatgactttcatcatggtaactttgtttttgatgatgcttctcctctagcagcagagttgcaggctaccccatggccaccatcttacaagccaccgtagcttcccatgtacgatgggcattcggatccgaagcatgttctcatgagttacgaagcaaccatatcctcatatggtggcaacacgactgtcatg

SEQ ID NO: 58826 - DNA, 496 bp, Zea mays
  unsure (1)..(496): unsure at all n locations
tcgatatcttgctaaagaaacacgcctattcctgtctctgctcacgtttcacagagacttctgctgattctaatacactntnttcttgcaaacgctcctgtctctggaaggaagaggcggcangcccggacgttatgatgcgctgcaatggcatcaagtgatggcattggttcagccagtaaacctaaccggcttatttctacagacagtgccggccgaacttcgacgtcatcagcgatctggtcgtcgccagaagcctcggcagtgaccatagtgaccatgacgccaagcctgcggtcgcgggagccaagacaacgccggtgaagtgccagccatcttaatcgtgatcggataccatattaaactgcatgcactaccaattcaaatcaaaagcttaagttgatataaagaggtatacaatctaattacttatattatatgaactcgcacgagttcggctatttatctagtttgacgagctactgatgacccatgg

SEQ ID NO: 58827 - DNA, 401 bp, Zea mays
  unsure (1)..(401): unsure at all n locations
agctntccagtgaatcttttgtcgctgaggatgcttctttaaccttgagatcgatttgcttcctccagtcatggttcgtgcaccatatgacaagggcttgctgctcttagcatcttgttgcagctggcgttcgtctttggtggcttgatgtaccaaatcaataagacattggtacggctgaaactcaacaatacgctgaatgttgtggtgtaacccagccatgaaacgtgcaatggtttgctcttcatcttcatacacattggctctaatcatggccttctccatctccttataatactcctcaacagagaaacttccttgcctcaaattctgcaatttatcaaaaagatcacgccgataatgcttcggcacaaaacgaaatctcatttctcgcttcatct

SEQ ID NO: 58828 - DNA, 432 bp, Zea mays
cttttagtacttataactacatttactatgcagctgttggttcttgagatatgcatgttacactgcacttagggggagtatccaaaactcaagtcattcatgatacccctagtgcacagccgcaatgcaaatttcaccatttgactattttctctaaaaactatctagcctatggctaaatattttgaaaaacatgagataatatatgagggtaccaatacttgtttcaacaggtgtacttttgtgtgcttatgagttgcgatttggtttggttcaaaactagatagacaatttcaaaatttcctctgtctgggctcaccggacagtctggtgtgcaccgaacactgcactgtgcactgtccgatgcatctgctaagcacacgcagatttccttctactctacgctgtccggtggttcaccggacagctact

SEQ ID NO: 58829 - DNA, 448 bp, Zea mays
  unsure (1)..(448): unsure at all n locations
agcttcttgtagctgctgccaaaaatgagattgatctgcgttcctcgatctgacactatcttcttcggcacaccatgaaggcagactatccgtgacatgtataactcagctaacgttgctccggtgtatgtcgtcttcacaggtatgaaatgggccacctttgttaagcggtccacaaccacccaaatggaatcgtagctggcccgggtacgaggtaggccaactatgaaatccatcccgatctcatcccacttccactgaggaatccgcaatggctgcaacaatccggcaggcctttgatgctctgctttggttctctgacagctatcacagatggcgacatattctgcgatctctcttttcatgccataccaccaaaacctcctttntaaatcctggtacatcttctcacttccagggtgtatggagtaggctgtctcatgagctt

SEQ ID NO: 58830 - DNA, 476 bp, Zea mays
  unsure (1)..(476): unsure at all n locations
tctaagggagagncacatttaagactaaccaatgttcattttgagaaagacaggatttgtagcgcatgccaggcaggaaagcaggttggtgcccatcatccacacaagaacatcatgacgaccgacaggccacttgagctactccacatggacctattcggcccgattgcttacataagcatcggcgggagtaagtattgtcttgtaatagtggatgattattctcgcttcacttgggtgttctttntacaggaaaaatctcaaacccaagagaccttanagggattcttgagaagggctcaaaatgagttcggcttaaggatcaagaaaataagaagcgacaacgggacggagttcaagaactcacaaattgaaggcttccttgatgaggagggcatcaagcatgagttctcttctccctacacgccacaacaaaatggtgtagtggagaggaagaatcgaactctattggacat

SEQ ID NO: 58831 - DNA, 474 bp, Zea mays
  unsure (1)..(474): unsure at all n locations
cggatccttaagtcacctgcggcatgcaagctntagtgactatagagagagagatttgttgtgttcttttgagctcttgcgcttggattgctttcttctttctcattcttttcttgtgatcaaaactcaattgtaaccgaggcaagagacaccaattatgtggtggtccttgcggggaagttttgttcccggttgatttgagaagagaaagctcactcggtccgagggaccgtttgagagagggaagaggttgaaaaagacccgacctttgtggcctcctcaacggggagtaggtttgcaagaaccgaacctcgataaaacaaaatccttgtgtctcactcccttattcgcttgcgatttgtttttacgccctctctcggactcgattatatttctaacgctcacccgcgttgtagttgtgattaactntgtaaatttcagttttgccctattcacccnccctctatgcgactt

SEQ ID NO: 58832 - DNA, 451 bp, Zea mays
  unsure (1)..(451): unsure at all n locations
ntctatattgttaaagagtgcattcatatgaagtttaaaactccagttatgtttgttttactgggacttttcctgtttgcctgacaaaaatgagcgggtcggttcactgttaggtttcatctataaaatcgccgaattggctgttccaactatggacaattttgtagagggataaaagttcttactgccagcagactttcattaattttggttgagtagtttgagagatatcgaattttgaagttaactatgctgctgtctgaaacagattcagtcagttatcttgtcagatgttttagaacttatagatggcaaaatttaattatccattgaataccgacagtgtagagtattttttggtgaaactcctagattantttgttgatatcaccactggttataatttaaagatacaaaattaacaaacagcgcttgctgctgttgacatgtg

SEQ ID NO: 58833 - DNA, 446 bp, Zea mays
agctcgtcagaattgttgtgaggaacttattttatgttaaccactgcaccaatactggtaatgccagacatccacaatggatttgatgtgtattgcgatgcatcacaccttggacttggatgtgtgctaatgcaagaaggaaaagtgattgcttatgcttcaagacagttgaggaaacatgagaagaattatcctacgcatgatttggaactagctgccgtagtacacgctttgaagatttggaggcactatatgattggaaacaagtgcaaaatcttcacggatcacaaaagcttgaaatatatattcactcagaaggaactcaacctcagacagagaagatggcttgagttgattaaagattatgatttggaaatacaatatcaccccggaaaagcaaatgtagtagctgatgctttgagccgtaagggtcaagtgaacaacat

SEQ ID NO: 58834 - DNA, 313 bp, Zea mays
tcattgctggaagttaatataactgtttggggcaaatctttatatcagagaggggatcagcctgtgatgatagcactccttcagactaaatagttataccaacaccttgacgaaatttgataccattgcgtatataagcataaaagtagcatagaatggattgttacctcttttttctagaccagatttctacaagtgaacacaccgtataaaaatgggaatacccaagttctgtaattagctgaaagcagctgaaagcatcatgagcatgtgcaagctgaagcttactagacattgtcatcaaagaatggca

SEQ ID NO: 58835 - DNA, 444 bp, Zea mays
agcttcctcactaaagtcgggacttggttcatggacgggtgaaagtacgcgtaagcggcaaggccgaccgagccgagggattcccacgcctctgggatacggatacctcactcgtcccttccgcgagaagcaactctcgctcacacaaacatccctgttaccgacagagtccagatgctcgaaacaggaggaataaagacgcagcttcgcaagcgcagcgagggtgtgttcttctggcctcggcggccgcagaaagcacacgctacaagatgatctgatcctgcaggctcgggtcttcacgccgaagggagccgtagcaccctctgcatcgacgacgtcttcagcaaagcccgacccagcctcgggcggcgccgcggtccagggactccttcgggaatccggcccgagcaggcggctcatgcggtcacccctggggcctcggac

SEQ ID NO: 58836 - DNA, 403 bp, Zea mays
  unsure (1)..(403): unsure at all n locations
tgtgaagattcttcattccaacgtggggctagtggcgatgccagagccaacccatgttagacttagctattaagcaagtatcgagttcagctctattaaaatcaaataagtatagctgaccctctaatattcccttaaaagctattgaatcatcacttcttctaaagacagtaacacctgtatccgtaaaaagacagttgtagcccattntacataattgtgaaacgcgaagcaagttgtaatctaatgagtctacaagaaaaacattggaaatggagtggtcaggtgatatagcaattctacccaatcctttgaccaaaccttgatttccatccccgaatgtgatagttcagtggggatcttgtntttctcgtcgaggagaacattttttctcccagcatat

SEQ ID NO: 58837 - DNA, 472 bp, Zea mays
ggatcattaagtcgacctgcggcatcaagcttacatgtctcgtatgagtcattatctttctatgttaaaagcccatcagaatgaagcttcttcatgcgattctcacttatatgacccacacgacagtgccacatgtaggtaggacttaaatcattaggccgaggccttttagcactaatattacagataggtgcatcatcaagatttaaaatgaataacccattcataatggatgcaaaagccacaaacatgccattcttagagatcacacaaccattgttttcactcgcaaatgaataaccatccttcatcaaacatgaaggagacataatgtttcgactcatactaggaactcgataacaattatttaactccaaaataaatcctgatgggaggtggagttgcatcgtcccgacggtcaacgcagcaactcttgcattattgcctacccggaaatcaacttctcctcttt

SEQ ID NO: 58838 - DNA, 449 bp, Zea mays
tgaaggtctcggtgcagatgatgttgaggcatcttctctcgtccatcacgaccttggtgagcctgacatcgccgacaacggtgtcgacaactagcgagtatttccccgggctcggcacatggtcggggtggtcggcccggtcgaaagtgatgggctcgtccgaccaatctatgtagactggcgccgtcacctttaccgagcagacctcccggcgctcttgcttgcggtgccgagccgaggtattcgccgcatgccctccatagatcatgaagcagtcgcggacctcggggaacccccctgctgggtgatcttcgatcttgtcgtcgtcgtgggccctgccaccctcggcgggtggcccggccctgtggatatgacgccgaagcataacgcactcctcgagggtgtgcttgacggcgccctgatggtaggggcaccgctccttgagcatc

SEQ ID NO: 58839 - DNA, 430 bp, Zea mays
  unsure (1)..(430): unsure at all n locations
agcttgaatagatgtctgtagaanaatgctctatattactattgtaataacttgcgtgaagaataatgtaattaaatnttgctgtgtggactttgtccataccttataatacattcttacctttccatcaatgtataaagtgctttggtgtgaacgaaattagcatttttgagccgaaggcgaaaacaccttcccttcttttcgtacacagcgaagcataaaactgcttttttttctttttgctgaagccttgtctttagagccgaagcaactgtctgtgttatgatgatgatgatcctatgtatgtctaaatgaatgtttatgaatgcaaatgtatgatgtaatgtaccgtgcaaatgaatgttcaaacatacgcatacgaagccacaacgaaagccttcattcccttatgaataatcaaagtctcttt

SEQ ID NO: 58840 - DNA, 481 bp, Zea mays
  unsure (1)..(481): unsure at all n locations
tactaagcttgtgatgtgatggtcgccaacgaaacgacactctattctttgtcaactcgtggagaggtgctgcaatggtgctgaaatcccgcacaaatcgcttgtagaatcctgcatgaccaagaaaacttctaacctgcgtgacccgggtcggaagtggccaactcgtgatggcaacaattttggcctcatccatctcaatgccctatgatgtcgccacatattcaagaaaagacacacgaccgatgttgaaggtgcacttctcaagggtaccaaataaacgtgcatcacgcaaaacatcaaaaacaacacgtaagtgttcaatatgatcatcatgagacttactatagataagaatatcattgaaatataccaccacaattttaccaatgatagcacgttaaacctcgttcatcagtctcatgaaagtgctangcgcattagttaacccacaaggcatgactaaccacttataaagacc

SEQ ID NO: 58841 - DNA, 442 bp, Zea mays
  unsure (1)..(442): unsure at all n locations
agctntgccaaataaggcgcattattatacctttgatatcttctcgttctgacaggtcattcttcacataaaaccattctgtcatccagtcgccgggccatctcttccgaaaggttggcacgggacagcttgacccggagtgagaaacgaaactgtagcaaccaaaattattatgatactgttccttaccccaaggttttgtttcgtaggataattcgtgtatattgcagaagctttttgcatcaggcttcagaccttggcttctcacggcccacacgaagatattcagccttataattgcctcgggggtaagttggtgaagatagacttcgaagattttcaacacctcaacgacgaagttgctcaagggaaatcgcagcccagctttcaaaaagcttcggtacactacgacttcattctcttcagggtgtggacaagtctt

SEQ ID NO: 58842 - DNA, 436 bp, Zea mays
gatcacactggcgagagacagttggtcgcgccgtaaattattcaagaggcagaagatacagttcagatgatccgggaaaacttgaggatagcacagactcggcagaagagctatgttgatgaccgaagaagaccacttgaatctgaagagggagacttcatattcctaaagatgtctccaatttgaggaatgagaagattcactgttaaaggcacgttgtcccctcactttattggacccttcacaatctttaatcgagttggagagatggcctaccaacttgaactatcagatcatctatcagatgtgcatgatgtgttccacgtgtctcagcttaagaagtgtctcatgttcgagaggagcagttgctgatggaagagcttagtgtgcacggtgatctaacctaaactgagcatcctattaagatcattaacac

SEQ ID NO: 58843 - DNA, 436 bp, Zea mays
  unsure (1)..(436): unsure at all n locations
agctngtattttcaaggaatatgttgtgtgttattgttccaagaagcaatcctggtgactacatgatgcttggccttggagacatggtaggcccaataaattgtatcttgcaaatatttattgctttattttgcttttagtccttttctttttataacgtctgctgttagtccttgaaccctccttgagtggttctacttttaataccccaatgtttgctgagcttcatattgtttgtcttgtctatatgtatgaactctattttgtttcagaataagaccaaatgacatgttagttaaaccctctatggttttattgacatgcaaaggtaggtcataccaaagaaaaaagttactcttcgtgaactcaagtccactgttcaatgcctcaccacttttggcaaatcttagtttatccaggcagcaagatatgcact

SEQ ID NO: 58844 - DNA, 475 bp, Zea mays
tctaagggagaacatgtgttaagtctaaccaatgtaactttttaaaaagatagaccttgtgcagctggtcaagcaggacaacaagtgggaagcgctcatcacatcatgaatgtgatgactacatcaagacctctggagctattgcatatggaccatttcggacccgtcgcctacctcagtatcgggggaaggaagtatggtcttgttattgttgaagaatttttccgcttcacttgggtattcttttgcaggataaattagaaacccaagggaccctcgagcgctttctaatgcgagctcaaaacgaatttgagctcaaggtgaaaaatattagaagcgacaacgggtccgagttcaagaacctgcaagtggatgagtttcttgaggaggaaggaaataaacacggagtctccgctccctacacaccatatcaaaacggtgtggtagagaggaagaacatgacgcttatagacat

SEQ ID NO: 58845 - DNA, 450 bp, Zea mays
agcttgtggaggttcttcatccccacatgtgctaagcggtgatgccacaaccagcccatgcaagtcttagccattaagcatgcatctagaccggcctcttcttttgcaaaatcaaccaaatcaagtttgccgtctagtacacccttaaaagctagtgaaccatcacatcttctaaagacagacacatctacatttgtaaatagacaattatatcccattttgcacaattgactaacagataacaaattatatccaagcgactcaactaaaaacacattagaaatagagtgctcagatgaaatagcaattttacctaacccttttaccttgccttggttcccatcaccgaatattattgaatcttgggaatccttgtttttgacgtaggaagagaacatcctcttttccccgtcatgtggttcgtgcatccgctgtcgataatccagcttg

SEQ ID NO: 58846 - DNA, 431 bp, Zea mays
  unsure (1)..(431): unsure at all n locations
ttccactgggctatacgacgggcgccgttcctgacccggtttctggccccaactaccatcaccaagtactcgggggacgcaaggccagaactgtggctcgcggactaccagctggcctgccagctgggtggaacgaacgatgacaacctcatcatctgcaacctccccctgttcctctccgacgccgcccgagcctggctggagcatctgcctcctgcgcagatctccagctgggacgacctggttaaagccttcgccggcaacttccagggctcataagtgcgccctaggaactcctgngatctccgaagctgccgccagcagtcgggagaatccctgcgggactacatccgacgattctcgaagcagcgcaccgagctgcccaacatcaccgactcagatgtcatcggcgcgttcctcgccggcaccac

SEQ ID NO: 58847 - DNA, 443 bp, Zea mays
  unsure (1)..(443): unsure at all n locations
agcttcggtattacaaaccgacttaaagatataatgatcttntagtccataaaggtctgagtcaatgttgtgaacttttataaggggcatacttgtaattcctcacaagctgcgtcctgtgcctataaatagtgaacagcattcctttactgttcacgcattctggtaattgcaatcgcatctttcggaatccaacctttatcaaggcagaggtattattgtatttaatgatttaatatatcaaataaatataatataatataattcgtctatgatttatttaccccttttataccctttattttatgttgtcttacaatatttattgaaattttattacgaagacttaagcttcgtaattatactctcatcaaccttcgtccaaggcccattatcctcaagggaataatgtttcatggacgaaggacgttaacatttaacac

SEQ ID NO: 58848 - DNA, 430 bp, Zea mays
  unsure (1)..(430): unsure at all n locations
tnccttntacccgganacatgatacacccttcattggtgagacttttatgtagacataatcttcaacttgaaagtgcaagggttgtcgtcgcttgtctgcataactcttctgatgagcttgagctttcttcaaattataaattattcattgaactttctcttctgtttcctttgccatatcaggcctgaagaaatttctttcacctggtttagaccagtttaacggagtacgacaccgtcgtccgtacaaagcttcaaagggtgccatattgatgctctcttgatagctattattgtacgagaactccgccaatggcaaacaatcatcccatttctatgggaattccagaacacatgctcgcaacatatcttcaagtatctgatttgctctttcagttntcccactggttngatgatgataggccggact

SEQ ID NO: 58849 - DNA, 443 bp, Zea mays
  unsure (1)..(443): unsure at all n locations
agcttctaaaaggagaacacattntatgacttacatatgttcattntgagaaagacaggatttgtagcgcatgccacgcaggaaagcaagttggagcccatcatccacacaagaacatcatgacgaccgacaggccacttgagctactccacatggatctattcggcccgattgcttacataagcatcggagggagtaagtattgtcttgtaataatggatgaatattctcgcttcacttgggtattcattttgcaggaaaaatctcaaacccaagagaccttaaaaggattcttgagacgggctcaaaatgagttcggcttaaggatcaagaaaattagaagcgacaacgggtcggagttcaagaactcacaaatcgaaggcttccttgaggaggagggcatcaagcatgagttctcttctccctacacgccacaacaaaat

SEQ ID NO: 58850 - DNA, 459 bp, Zea mays
  unsure (1)..(459): unsure at all n locations
gtgggacatggactcccataggtaagacatccgtaatgaagacgcgaccacttgagcccttgaccctntacgaacaactggcaagacctgtctgaaatctccaccgaagacaatggttttaccaccaaatggtagtgcgggtcgacccattatatcgcgcatgctattgtccagtgcctccacggcttgtctcttaatcatagaagcctcgtcccagataatgagagatgctttccgtagcaactctgctgttccactctgcttcgtgaagctacatacagcgccatcgtcaatagtgagtggtatcttgaagcgtgaatgggcggttcttcctccaggcattatggaagccgcaacgccagatgtagttgttgccactgcaatcttgccctggntgcgtagcgtcgcgagcaacactctgtatagataagtcttaccggtgccaccaggtccatccac

SEQ ID NO: 58851 - DNA, 443 bp, Zea mays
agcttctccagaaaatggatgaatacataagagctgattatgatttccggccaagaagggaagaagcttacaaatactcagagatggcaggggcttcggaggaagattccaccccaggcatgttaggtcaatccataacgccagccccggtgatgataggggaagccaaccccaaaggcaacagcacagctcccaatcgtcagggccacaacagaattcctttatgccaccagctccaagaggcagagggggcagaagcttcggaggaagatacgaagatcagcctatgagactgttttgtttgttctgtggcgaagacaaaggccataccacaagaacgtgccaagtcacgattcacaagcagaaagagattaccgaagctgaagcatggcagaatcagccgaagcaagtactacatactgcttcatgctattctccctacg

SEQ ID NO: 58852 - DNA, 436 bp, Zea mays
  unsure (1)..(436): unsure at all n locations
tncacccgcttgcnctaatgatcggctaagcatggttgaatagctctccggtaagtcgctcccgcgatcttgaggccaaacgacatggaggtatagcagaaagctccaaacggggtgatgaatgcagttttttcctcatcttcttttgccaagctgatctgatggtatctagaatagcagtctatgaaggacaacatagaacatccatcagtcgaatcaaccacctggtctattctagggagtccgaagggatccttcgaacagtgtttgttgagatttgtatagtcgacgcacatgcgccaatccactntatttntntttagtacaagaacaggatttgctagccactcatgatgcagtacttctctaatgaaccctgctgccactaagcgagctaactcggcgcgaatagcttctctcttgtcaggcgtgaaac

SEQ ID NO: 58853 - DNA, 441 bp, Zea mays
  unsure (1)..(441): unsure at all n locations
agcttcngctttggtcaatattttggtagcaaaacagtgcaatagcaatgaatgctgtggtaacttcacacctacccgtttgtttatatagtgccgcaggcgggaaggtgaatcatcaaggtcttccgcaccgggtaaatagccacccgcactcactgaacagtgggccacagggtccgaaaaggagaatcgccagagcgcgcgtaactgctgtgttggggcgaaggcgaatacaccacccttcgctcgatgccttcgccgcaatcgttggaccaacagagacaagacaacggacaggctcacccttcgtcccatacgacatcggacgaagacctgtgacgaggtcgtcccatcttgcgaccttgcccagcatggaggcccacgtgtgatccggcccattgtaacatgccctgcgtggccgctgcgcgttacatgcctaat

SEQ ID NO: 58854 - DNA, 394 bp, Zea mays
gctgccatacctgtcgaagcaacagcacatgccagcgcagcatctgcagaccattaccagtaactggcctttcgcatgctggggactggatatgattggacctttcaagaaagctcaaggatgatatacccatgtgttggtggcaattgacaaattcactaaatggatagagtttcagcctattgcttctttaacctctgctaaagcccgggaactcatacaaagcataatatttagattcgggataccaaacagtattatcactgacttgggatccaacttcaccagctcagaattctttgacttctgcgagcaacagagcattcagatcaagtatgcatccgtagcacattcaagagccaacggacaggttgagcgggctaatggaatgata

SEQ ID NO: 58855 - DNA, 446 bp, Zea mays
  unsure (1)..(446): unsure at all n locations
agctnggtcattntattgctaactgttccgtctatgatagtgatcaggatcaagggaacaagagggaaaagaagaagaactataagaaggcaaagggcgaggcgcatctatggaaggagtgggattcggattgctcctcttccgactccgacaatgaaggactcgccgccaccgccttcaacaagtcatccctcttccccaacgagcgtcacacatgccttatggcaagggagaagaaggtatgtactcgaaacactacttatgcttcttcaagtgaggacgaatctagtgatgaggatgaaatagattattcatgtttatttaagggcctagatagaaccaaggtagataagattaatgaattgattgatgctttaaatgataagaataggcttctagaaaagcaagagcatcttttgtatgaagaacatgataagtttgtagag

SEQ ID NO: 58856 - DNA, 404 bp, Zea mays
catcaaccaataagaatctctctcttgttttacggtgagaacaaaggccataccaccacgatgtgccatgttaccatccagaagcatatggaaatagccgacaccgcagcacagcaagctcagccgaagcacgtcatgcatacttgcttcggatcattcaccgtacatcccataatatgtgggcaaccaccctgcagtttttgttgcttccgcgagtgaacctcaaatttgctggcaacagcctccgccttcacctccgctgtaacaaggacagcagtcagaagggagccagtatgctacacaccatatggacttcatagagcagtccgaagctcgtacagtcaacagcactgtgccagagtcaaaacacatctattgacagatatcctaccataatagcaagc

SEQ ID NO: 58857 - DNA, 443 bp, Zea mays
  unsure (1)..(443): unsure at all n locations
agcttcggcctcactttctgctgttagctggaagaaattgctttcagcattaactgactgagtgctcgacttacgtctctgaagaaagtgtcgcatcgcatccatcccctttgtccacattgtcttacctctcatctatccccacctttcactggttttaattcaggaagtcttggattcatgcatctctctcctccatgtctctggattttttttaacaaaaaactatcggttaagtacttttgcatagcccactaattaccacatccctccaagagcaagatgctggatatccatcgtcacactagctagtcctaccttttagtaactccaagtgtcaaatgcagacatcaactacgtacgtgcccaaattaaagggggcctctttcgagggtactntgtttttgtaagtatgcagttgtctccacccaaccaccagcacc

SEQ ID NO: 58858 - DNA, 464 bp, Zea mays
atcttaagtcacctgcggcatgcaagcttattagagcacaacctcttggtctgtttcttcataaatcccctctaacgtataaatttatttgtcacaagtacaaaaaccacgacaatcactctcccattcttcttccccatctctcaaattctctggctctgttgattgcctccaactatcttgctcgaatgcatctcgcttcccagaccggtggtctatcattctcttttctcatcccactccctccaatgttccatatgttgtcttctccaagcaagcatggtgacaatgcaacagattggcgagtcaataacaaggcatgacaaggttcaactttggtggcctggcaacatgtggaatgacgtggccatgatgcacgtgtggtgatatggctactttagtgttgtgcttgggtcttgactatagcacaacgacaaagacatgatacactgtcgccatgatgt

SEQ ID NO: 58859 - DNA, 484 bp, Zea mays
  unsure (1)..(484): unsure at all n locations
tatagaatttctgagaagactangggcttcggatgacgaatctcccccaggcatgtcagatcaattcacaactccagtcagagtgatgacaaaggaagccagtttcagaggccgcagcaaagttcacagtcttcaggacaacagcaaagttcttntatgccgccagctccaaggggcagaggcggcaagggctttggaggaagatatggggatcagcctaagaaactctacagcttattcggtggtgaggataagggccatactacaagaacatgccaggtgaccatccagaagcaaaaagagattgctgaagcagaagcgcaacataatcagccaaagcatgttttacacactgcttcgtgctactctccctatataccagagtacgtgtgtaatcaacctgcagcttctgttgcttctgcaagtcattcacaagcgtcatgggcccagcttccattaccaccttcacttccacctattcaca

SEQ ID NO: 58860 - DNA, 443 bp, Zea mays
agcttgtgaaggttattcatgcacacatgttcttagcggcgatgccacagccagcccatgctggtcttagctattaagcatgcatctagaccggcctgttcttttgcaaaatcaactaaataaagtttgccgtgtaatacacccttaaaagctagtgaaccatcacttcttctaaagacagacacatctacatttgtaaataaacagttataccccatatgacataattgactaacagatagcaaattatatccaagactctctactaaaaatacattagagatagaatgctcattagaaattgcaattttacctaacccttttaccttgccttgattcccatcaccgaatataattgaatcctgcgaatccttattcttgacgtacgaagtgaacatcttcttctcccccgtcatatggtttgtgcatccgctgtcgataat

SEQ ID NO: 58861 - DNA, 479 bp, Zea mays
  unsure (1)..(479): unsure at all n locations
tctaaagggagaacacattgtacgactaaccaatgttctatttgagaaagacaggggttgtcgcgcatgccacgcaggagagcaagttggagcccatcatccacacaagaacatcatgacgaccgataggccgcttgagctactccacatggatctattcggcccgattgcttacataagcatcggcgggagtaagtatttgccttgtaatagtggaagattattctcgctttacttgggtattctttttgaggagaaatctcaaacccaagaaaccttatagggattcttgagacggtctcanaatgagttcggcttaaggatcaagaaaataagaagcgacaacgggacggagttcaagaactctcaaattgaatgcttccttgatgaggagggcatcaagcatgagttctctttctcctacacccntcaacaaaatggtgtagtggagaggaagaatcgaactctattacacatgg

SEQ ID NO: 58862 - DNA, 439 bp, Zea mays
agctcgaagccatggtaagtagcatatgccattaatatacgaattgactcaagcctagctacgggtgcataggtttcaccgaaatccaaaccttcgacttgggagtatcctttggccacaagtcgggctttgttccttgtcaccacaccatgctcatcttgcttgttgcggaaaacccatttggttcctacaacattttgattaggacgtggaaccaaatgccatacctcgttcctagtgaagttgttgagctcctcttgcatcgccaccacccattccgaatcttgaagtgcttcctctaccctgtgtggctcaatagaggaaacaaaagagtaatgttcacaaaaatgtgcaacacgagatctagtggctacccccttatgaatgtcgccgaggatggtgtcgatggggtgatctcgttggattgcttggtggactc

SEQ ID NO: 58863 - DNA, 166 bp, Zea mays
tattggcctatacaccccccccctctacgcgacattcgagatctgtgtccgggtcaaagggaactttcgatatgtagcacttaacccttgcatatgtaaagcgttgccacagatcctccacaacgtgaaccggtccgcgctacccgcgagcacagtacttcttcat

SEQ ID NO: 58864 - DNA, 439 bp, Zea mays
agcttagagaaatctggtatgaatctgcgattatacccagctagtccaagaaaactctggacttggtgaacagttgttgggggtttccactccagaatatctttgaccttgctaggatctaccgcaattccttttgctgataatacgtgccccaaaaattgaatttcttccagccagaacgcacacttgctgaacttggcatatagctgatgttcccttaggcgcgtcaatacaatccgtaaatgctgagcatggtcttcttcattcttggaatatatcaagatatcatcaatgaagactaccacgaacttgtccaattcaggcatgaataccgagttcattagataagtgaaatgggcaggagcatttgtgagcccgaaagacattaccaagtattcaaacaatccatatcgcgtagtaaacgcggtcttcggtatat

SEQ ID NO: 58865 - DNA, 496 bp, Zea mays
  unsure (1)..(496): unsure at all n locations
tacggaccttagaaactcagcttggccggaagccacccaatcgcgttctagagtgtacatgatctgataacaatcaatgttcttttcaaaattacacctgtttgtgtgctcgatacacaagttgcttcggaagcgaaattgtgtgcttgatagattctgccatatttatgcttgtgcgcctatcttttgtacgtcttaataggtatgtctcagtgtctcacacactcttgttctaataggtatgaagcgtacaaatttgcgctttatcgaagaacatcgggtgtactcactgagtaagaaggggacagctaccatgttgttccttctgcactatgatcagactgtcgatagcaagcttaaggaaatgcctttagatgccctgatcgaaaggtttgctgttccactatgcctactctgtaccattgcacgtngcagacctagtcaaataagtacagtatatactgcatatcttagattgatgtcagcaatggttact

SEQ ID NO: 58866 - DNA, 450 bp, Zea mays
agcttatgaatgaactcaatatcgtcgattctcggtactttgattgacatcttgcacacattgcttatttatatacctttgatcatgtctctttcatttggtatgaatgcctatttcttattcttcttgtgccaaagctaagactaatgtgtttccaagaatatttccatgattagtattaaattgaaagggaaatggagtaatcgacaaaggagagagtaattggcccaaagcaaaaagactgcaccaccaccctgttttctaaaacatttttcaaaaaggggagagattattcaaaaagggaaaaattaataggcgtttgcaaaaaccctcttgacatctaaggggagaacttcttcagggggagcttttatttagccaaaggaaaaacatttgaaatagggggagaattttcaaaaacttgaaaatgcttttagaaatcttattctt

SEQ ID NO: 58867 - DNA, 360 bp, Zea mays
gctaacaccactttattgggtcggcctggtatttggtgatgtgctctattgcttggagtctgggcccttatatggtatctcttggtacttggcagacactttcatcttctgccgaagctaaagttcttattgaacatgttcttgcttcttccggtgttattgctttgtcaccgaacagaagcttgaacggagtaaaccctgttgatcttgatacaacaatgttgtggctccaaacccactttattaattcgcctggccactttcctttaggctgattgaaaattgacttcattatttctgttattatgattccatttgccctttctaccaacccacttgactcaagatgcctcactgatg

SEQ ID NO: 58868 - DNA, 437 bp, Zea mays
  unsure (1)..(437): unsure at all n locations
agcttcgaacaagagaagaagaattgtgaagttaatctcaaagctgaagtcgaaaagagctcgaatttgcagaaatcattgaaggagctttaggataaatgtttagacttcggcaaccgatgcgtgcaacggctaaagcaggtcttcaactcagttgaagccagttccgaaaaatttaaaccttcggtcgaagacctgccaggcacctttgatcatattgaaggcgaagttgatgctcttgacgaagtcatagctgggcatggtgacttctgtgctctgctagcttctcgcggcacagctgttgcttttatgaaggctggttgcacgcatgggaatattgtaaataggccaaacttcagcctatcactagtggacttgaatgacatccccggcctggcctgaagcattggaaacggattcataactcanatttgggc

SEQ ID NO: 58869 - DNA, 476 bp, Zea mays
  unsure (1)..(476): unsure at all n locations
aattgggtatgtttaccctttaattttatttattgttagttccctatccagggttctatttgcaaaatgctataacaatacaacttgttcgaaatatttacctattgaatgcactctatgtgtgtcaaacatatgtaatgccaatgcttatgatgccatgctcaagatntaattgtagtaacaccaggggtgttacatccttccccccataaaagaatctcgtcccaagattaacagtcctaaggtaagtaatggaaaaggaaatgtgtcacattcttatatccttatttctggtacaaggcaagggtggtgtggggttcactcttttattacaacaactatacacactttacaaattatatgaggctaaaaagcccgggaaattcttatctaaaaaatacttgagtttccatgtagcctcatcttcagaatgttggtccactgtatcttatagaacttgagagtatttctccggg

SEQ ID NO: 58870 - DNA, 418 bp, Zea mays
agcttgtgaaggttcttcatcctcacatgtgctaagcggcgatgccacagccagcccatgctagtcttagctattaagcatgcatctagaccggcctcttcttttgcaaaatcaactaaataaagtttgacgtctaatacacccttaaaagctagtgaaccatcacttcttctaaggacagacacatctacatttgtaaatagacagttataccccatgttgcataattgactaacagatagcagattatatccaagagactctactaaaaacacattagagatagagtgctcattagaaattgcaattttacctaacccttttaccttgccttgattcccatcaccgaatacaattgaatcttgggaatctttattcttgacgtaggaggtgaacatcttcttctcccccgtcatat

SEQ ID NO: 58871 - DNA, 476 bp, Zea mays
  unsure (1)..(476): unsure at all n locations
ctaaaacatcagatacttagtaatgaanagagtggtggataactatttttatcatgagcataatctctactaatattatgtgaatactgtagacgtccacaatcgtgcggtgcacgttctgccgcttcgctcacgcccgcggccgaaccctcccccgcatcccgcagccgccgacgctcaccttccatcccgcggcgcgcaccttcatcctccgccttccatcctccgcgcagccactcatcccgcagccgcgatccccgcggcactcaccttccatcccgcggcgcgcaccttcatcctccgcgaccgcccgcggatctcccatcgacgtcgatgctccgcgattaaggggatccgaggccaacaaacagcatggcgctccctgcggcgggcgggcgaagaggctcgcgcggatactcggcatgatgctccggcggaagcagagccacctccccgtcggccgcccgtgttctaca

SEQ ID NO: 58872 - DNA, 443 bp, Zea mays
  unsure (1)..(443): unsure at all n locations
agctnttatttaacaacaaggcatagtattctctatttcatatacttgngaggccctctattttcattcttgatagaacctctttctgtattgatataggcttcatcatagttcataagtgcatgcttatttatatgtcaggttggcttccactatattgcgcatttgaaaactgtgtttatatacattgcactgggcaaggccttcatgcctgtgtgcttctgcaaactggttgcttcatgaaaacatangttttggaacagagtgtgatgatacaatcctacatatcttacttagggaaaattggttctatagcattgaaagaattgtggccggaaaataccattgaaacatcttatacatgtgaaatatcatcgaaagaatgatccattacccaaaactagctttctgtcacaatatggagctaatactgtggattcact

SEQ ID NO: 58873 - DNA, 417 bp, Zea mays
tgtagcgcatgtcaagcacggaagcaaattggtgttcatcatccacacaagaacatcatgacgactgataggccgctcgagctactccacatggacctattcggcccgatagcttacataagcatcggcgggagtaagtactgtctatttattgtggatgagtattctcgcttcacttgggtgtgctttttgcaggaaaaatctcaaacccaagagaccttaaagggattcttgagacgggctcaaaatgagttcggcttaaggatcaaaaagattagaagcgacaacgggacggagttcaagaactctcaaattgaaggctttcttgaggatgagggcatcaagcatgagttctcttcttcctacacgccacaacaaaatggtgtagtggagaggaagaatagaactctattggac

SEQ ID NO: 58874 - DNA, 455 bp, Zea mays
  unsure (1)..(455): unsure at all n locations
agcagcttctaaagggagaacacnatttgggactaaccaatggttcatttgagaaagacaggatttgtagcgcatgtcaagccgggaagcaagttggcacccatcatccacacaagaacattatgacaagtgacaggccactggagctcctacacatggatttattcggcccgattgcttacataagcatcggcgggagtaagtactgtctagttattgtggatgattattctcgcttcacttgggtattctttttacaggaaaaatctcaaacccaagagactttaaaaggattcttgagacgggctcaaaatgagttcggcttaaggatcaagaaaataagaagcgacaatgggacggagttcaagaactctcanattgaaagcttccttgaggaggagggcatcaagcatgagttctcttctccctacacgccacaacaaaatggtgtagta

SEQ ID NO: 58875 - DNA, 443 bp, Zea mays
  unsure (1)..(443): unsure at all n locations
catcatcatcatcatccgagctagcattcgaatcccattcaactaggtagcctttgccatctttcttcttggtgtagaatttcttcttcttcttatcatctccatctttgcccttcttcttcttgttagggaaattcatggcgatgtgatcgggttccccacactcaaaacactttctatcattgaaagcatttcttcttgatgtttggcctcttnctaagtgacccctcttcttcttcaagaatttgttgaatttatttacaaatagagccatatctccatcactctcactttcattttcttcatcatcactatcttctttttcaattgccttagaagctttagctctgagagcgattgattcattcttcactttctttgccaaacttatagcatcgacttgagaattctttgatatatcttgagtaagatttctcccatac

SEQ ID NO: 58876 - DNA, 444 bp, Zea mays
  unsure (1)..(444): unsure at all n locations
agcttgccnaaaactgtgtgtttcctgtttttctgcaacacacacagttgaatggcatattatcaatggtcagccacactgggcagcggcggctgcagcactggctggttggcggcggcggctggagcactggctggttggcagcggcggctaaagcactggctgattggcgaactatggggcaatggctggttggcggcggcgcaatgtggggcaatggtgggttggttggaaatagcgactggatcactgggcgggggcgcctggagcaatggcgggttggtggcggcacactgccctgtatgcggagggaagagggaggaccggaggagggaggagggggccagcgacgtacctggagggcggctgatgatggccgacggtggctggcggctgcctggcgggatgattaaaggcccattaaggcccactaacgcatagaac

SEQ ID NO: 58877 - DNA, 393 bp, Zea mays
tagttatagggacaaaaacagcaagggtgcgttcttctattggctcttaccatgaccttgctgagtaccatgtggtgagtagtggatgcctgctctcttttactaagacatacgtggaagtttgacactgatgctattcaccatgggagatctgattaatatactttcatgcctaagggaaagaaaaccgtgttgcttcctatgactcccactgagatggtccactctgaacatgagaaacagactgatgcttatcttaaaggtgtgttgaactcggaaaatcaactacctgataagttaaaaactcctactttgctagccactacatctgatcttgatgactgcatgcctctattgactctgctatccttaggtgcaaaatgcttctattca

SEQ ID NO: 58878 - DNA, 446 bp, Zea mays
  unsure (1)..(446): unsure at all n locations
agcttccaatcttcggactgcatccttatatttttcaagctccggatctcttgctttgctgctcttatccacatggcccaaaataacttgcgaatcaattttaaggattgccattcttattcccattgcctttagttttcgaagccctaaaagaagagcttcgtactcggcaatgttatttgtatagctgaaatctaactttattgcataacatgttctgactctagagggtgcaactaggacaacagctgctcctgcatcgaaggtcccctaagatccatcgcaaaacatcgtccaggctttgacatcttttgttgcttcttcactctcagcccttggcgtccaatcagcaatgaagtctgctaacgcctaagattgaattgaggatctgtgcacgtaatcaatggtgaattcgttaagttccgcagcccattntctgatccttt

SEQ ID NO: 58879 - DNA, 351 bp, Zea mays
  unsure (1)..(351): unsure at all n locations
ctaagcttggctggagtctaataaatggaggcacctcctgttccacctactcgttacggacccagcgaaccactcctcgctcccgatcgtgcaccgtagcaccctaatttcgtgtttcccccaaatctgttgtgcgcgccgccgtggccagccacctctaagtccgctctcgccctccttgtccgtgtntcaacacccacgaatgcttgtgatgcttgtcggctcggccaaataagctataccgcgctagatcattaggaacgcgtcgggaatgtcttaagctccgtgggtgtacgtggaccgagctctagaatggtgaccaggctcaattagtgatcctcattggagcgc

SEQ ID NO: 58880 - DNA, 444 bp, Zea mays
  unsure (1)..(444): unsure at all n locations
agctntcccgctcacatcttcggcgttgtatttttcttcgtattactgtgggcttctcctactgtgatatcgactcgagtccgaagatacctgttcacacattatactccaaaaacactgttaaatcctgtttttgaggaccttcggaagccgaagtcccccaacatcatttcaatcaacaccaagagatctcttaccagcaacgttatgattgtgctactcaaatccaacatttaaaagatgcataatatatagtatggaagccactaacagtttattcaatataagtaaaaccaaccatgctctcacaaattatgcttcaagccttattttgcaacctgatatatatatagtaccagcatcaaacattagaatttaggaaaacaagttagcaaaaataaatgttgaaattgtaagtggcaaacatacgtttttataactcta

SEQ ID NO: 58881 - DNA, 478 bp, Zea mays
tgcacacagtctcgaagatgcatgcccttagattgtccaagtcttctacagctattacattctgtgaaaccgcattgaataagtaacacaagcgtgtgatgacacacttgacatgctctgtgtcgagggctcttaccgcaattgggaagaacaccgccatcatcacatggcagtcatgagagttgtagccaaatagagacaagtccttcatactgactagtctgctgatatcggatgagaaacctgtgggcactttgaccccacgcaaacatttgcaaatctttgttctctcatcaactgacaagctgtagctagctgggggaaggtaaggcttccctttgccactatccactggatgaagatccggtctgatttgaagatctactagatcattgcgtgatttgagttcgcctattggctactcggcatctcagcaagggtccatgatgctgtcaaaacattcttgttcatgatccat

SEQ ID NO: 58882 - DNA, 416 bp, Zea mays
agctcggaggcatctattgggagccttcttttgttttgggctcctccttttctttcgaagccttgaatgcatcgtgttgcgccttgggtgtggaggcaccgccttgctctaagttgacgatgtgtttggagtcttacaccatatgtttaaagctcacaaacttgtcaatcacctcctagggagacatttgctcatacctaagactctcatagatcaactgcacttgagtgggattacaaaaaacaagagatcttacaataaccttgaccatttatggtcatccacttcgtgctctcgaggttgcggacttggttcaccatggtcttgagctggttgtacatggcttgtggctcttcacctttattgaggaggaactgaccacgttcacccttcaatttatcccgcttgcgatcttg

SEQ ID NO: 58883 - DNA, 313 bp, Zea mays
gtgcttcaaatctagtatgacgaattacgttatgggtattttaatgactctacactaatacactcgatgtctcatcttaatggagtcctacagcaatataccgataagatatctaaattcctaattattgtaacaaattaacttatacactgatggagacgtatcctctcaactttcacacatgtaccaaggtatggaccacagatgaaacattccttgagggtagaggattgacttcaccgctatttctctttgtagcagaggattacaggtgtggggacacgcctgacgtaagataacataaaattcaaaa

SEQ ID NO: 58884 - DNA, 441 bp, Zea mays
agctgagcagagactggctttgtctgaaactcttagaagctccttcaatttctgccaagaagtgattgtccctggccgaagagaagaataccaagtctgagcaacgctcttgacggccatgacaaaagattttgccatgactgccgtattgccaccatatgaagatatggttgcttcatagctcatcaagaattgcttcgggtctgtatgaccgtcatacatggggagttggggtggcttgtaacactgtggccatggtgtagcctgcaattctgttgagagaggagaagcatcatcaaaagcaaagtttccatgatggaaatcttcataccagtcatcctcattgtggaagccttcctgatgaagctctctgtgtggaggccttcggctctgatcatcttgaacaagatgacaaacctcttcagaagcttcgtctatctg

SEQ ID NO: 58885 - DNA, 291 bp, Zea mays
ttgatttcaatatgcaagatctgggcaccagagctacaaaataaagctatgaaagccctccccgatatctctgaagcagaggatattagtctacaagccttacagaagtatgcccgattggtaaacatcccttgtcgcaaagggatgtggaagcgcgctgcattatttggctggagtatcccagctgaactgcagcagcagtagggatttccccctcttcttttggtctatctggttggtccctttcctatggatacataaaatatttatgttggatgtgcgggattaact

SEQ ID NO: 58886 - DNA, 437 bp, Zea mays
  unsure (1)..(437): unsure at all n locations
agcttatatctcccatagctctgggtgtgcttaatattcatgcatgtccgaaccattgtattctgtatcgtggcgattttgagaacgcatcaagatgcccagtttgcaatgtcagtcaatacaagaagagctacaatcaagactgtgtaaaaaattcccgaagaaaaataaaaacaagaaatccactattggacctgaaagtgacgatgacacttttgatgacatggatgggaaaaagaagtcaaagatcccagctttggtgatgtggtatcttccagtaattgatcgcttaaaacgtttgttctcaaatactagggaggctgagcttatgcgttggcatgcagaanatcgcaagcagaataacaaacaaattcgacaccctgctgatgcatcacaatggaaaaatttcgatcttatgtatcctgagtttgccaaag

SEQ ID NO: 58887 - DNA, 438 bp, Zea mays
  unsure (1)..(438): unsure at all n locations
nggcatacagctggcaatcttgtagcctctgaagtacttttctcaaattctcctcatgctcttgctcattctgggaatatacgagaatatcatcaatgaacaccactacgaacttgtctaggtaatccatgaacacactgttcatcaggtacatgaagtaagctggcgcattcgtcaatccgaatgacataaccatgaactcatatagtccatacttggtgatgaaggctatcttcggtatatctgcaggttggattctgagctgatggtaacctgacctcagatctatctttgagaacacactggctcctctcaactgatcaaataagtcttcaattcgaggcagggggtaactgttcttgacagtgacttcattcaaagctctgtaatcgatgcacatcctcttcgtgccatccttcttctccacaaataacactg

SEQ ID NO: 58888 - DNA, 451 bp, Zea mays
agcttcggccttcggaggccgaaggttgaaatgaatgaagctgccgaagaatgccagagagccttcggcgcagtctgctctttcattggaacgagagacttagtacaagagcatattgcctttagggtatggccgctcgcggagaaatgggaaatgccacaagaaaccgtaaaagaggccgacgaaggtggacttatcaggttgaagtacacttttaaatttggagataagtttgttgagccagatgatgactggttaaaaagtattgaaaatttaagtgatgaactgcttggggcttattcgaaggccgaagacactgcaatgtcagcagccttcggaggccgaaaaaagaagaggctgaatcgggtatttgatgcaatcgggtttgtctaccctgactattgctatcccattcgaaggcagaagaggaaaaacacaacctctgcaaaag

SEQ ID NO: 58889 - DNA, 435 bp, Zea mays
gtcacctgaggcatgcaagcttgtcgcacaggagctagaggctactcttctgtgtttgttaagctctagaggacagctgcactgtcttgaatgctcagcgcgacaaagctatggataaagtcgttcgcgctggacggatcctgatgaggaggcccggtgtcgcggtgcctgacgatattgttgctaatgttaaggccgcgctcgatgctgcaagccattcttcttccgttgcacctatgaaagacattgccagcaaagatgtttcgatgcagtgatgtcctgcaaagcactcttttttattgagttagcatcttttttagaggatgtaatatgaattctatgtgcatgtgacagttgtgttagaactcaaatattttgtgaacagggtgccagaacacgcccctggcaccagcaagtaaaacgttcttttttctg

SEQ ID NO: 58890 - DNA, 411 bp, Zea mays
tgtatcataaaatataaatggtcctgaattatcacttctgctattatttaacacaggatctctactagcaagaacgaagctctgagtctcccatcaatgtacatctttgtcttaccactaataaaatgatctagtcgggggataaatgtttaattttcagagttcgcctatccaccccccctctaggcgactctcaatcggtcccaagtctgtgctggtgctgcacccttccacgggatcgcacccggaaagcgtattctgcccctcggacggattgacttgcccgtctgcttctggactccctccaacttccgaaaggaaaccctcaccttcgaggtggtcgggttccgagggacctaccgcgcggtgttgggagagccggctacgccaattcatggtcgtcccaactac

SEQ ID NO: 58891 - DNA, 210 bp, Zea mays
gcagccaaccagagagcccaccaagactgggaaaaaaccccgagaaaaaaaaacacaaccacacgaccgaaggacagaccccagagaaggaggaaaaaagcaaaacccacccggagaagggtaccaccagaaaggacgcgaaacgccgtcccaaaaccagggaggccgagcctaagcggtggcccgcagaaaaacgcaagcagacaaaca

SEQ ID NO: 58892 - DNA, 443 bp, Zea mays
  unsure (1)..(443): unsure at all n locations
agcttaacagacgatccaaaccttgatagattatgatgatacttgaatagatagctgtggaaaaaaactctaaggactcttgtattaacctttgtaaaggatattataatttaagaattaaattctaccatgtaaattttgtccataccttgtaatatatttttacctttccatcaatgtgtgaagtgcttcgatgtgaacgaaaattgtactttttgagccgaaagcgaaaaacaccttcccttcttttcgtacacaatgaagcatgattctgcattcgaagctgcattcttagagccgaagcaactatttgtatctatatggtatgatgatgatgatgatcctatgtatgtctaaatgaatgtttatgtatgcaatgtatgatgtaatgtatcgtgcacatgaatgcccaaacatacacatncgaagcttatccataacct

SEQ ID NO: 58893 - DNA, 423 bp, Zea mays
  unsure (1)..(423): unsure at all n locations
tccccaccgtcgaggccgtcagcgccgcctacggaccgaccttcggctctttggatttaatatctggttcacgtcccttgagtggggacgcgaacgagagccttctggtggctgcgtccgtcctgagaccatggttgctgctgcagaggtcgctggcgagtcgcccggagcttgttgccccgtaggccctccggtgtggaggttgttcatacccgcggggacggaaccggagttccgttgtaatggcaccttgagtgccggtgtgcgttcattgtggctgtcggngcctgaacatgtatgtattttcggcacggagccgtgttttttcctcatttcgagcactatgactcacctgtcggctaactgaaccgcttaaccaagtgtgagttgcctcgtgcgaaagtgacgagtgaggtatccgta

SEQ ID NO: 58894 - DNA, 431 bp, Zea mays
  unsure (1)..(431): unsure at all n locations
agctcgagcaaaangaatagcttcgggtgctttatattatgcaagcttcggctatggtcaaattttttgcagcaaaacagtgcaatagcaatgaatgctgtggtaacttcacacctacccgtctatttatatagtgccgcaggtgggaaggtaaatcgtcaagtcttccgcaccggacaaacagtcgcccgcacccactaaacggtgggccacagagcccgagaaggtgaatcgccaggacacgcgcaatcactgcatggtggggccacctcccgctcggattattttaatcatttctcggcaacgagctcaaggaaggtgtttttcggatcttcgacatcccgaagcccacgagattttttcacggatcaagctcgttacgaaaaacgatctatcaccacgaaggggctactgttgggggtatgcttcgt

SEQ ID NO: 58895 - DNA, 431 bp, Zea mays
  unsure (1)..(431): unsure at all n locations
ctcaagctttttatagcattctcgagcaggtatcaacttgatttagcttctgcataatagaaagcttcgtcaaaactgtaaaaatcatcaacttcgtaagaactgcatgaaatttaacatcagatggccagagtacattcaactgcaagggtgacccgtgacagagaggaggccaaagccaccgagactgcccagatcttcgaagtgatgaaacaatcgggactagttgtgacagaggaagccactgaacaaggtgcacctgctgccgaaactgaacaagatgttgaggtagaaattgctaatgaggaagaagaagaagattatagcattctgatcccatcaaaacctagccacttggattttggaaaatctaccatttctgaagctgatatgcccatgatgacanagttgggctacttcggagaagctga

SEQ ID NO: 58896 - DNA, 429 bp, Zea mays
agcttcttcgagctggaccagtgagtcttctcggttggtctggatgcttcagacagcgtacgcctttgtcctctcgaaccgtattctaagtctgtgggtaagatagcctctggcccatagactataaataacggcgagaaacccatggctcggcttggcgtcgtcctcagactccagaccaccgagggtagctccttcatccactgcttgccaaatttgttgaggttgttgtagatcctcggattaagtccctgcaaaatcataccgttggcacgctccacctgcccattcttcatggggtgagctacagcggcccagtccacacggatgtggtggtcctcgcagaagtacaggaacttcttcccagtgaactgcgtgccattgtcggtgatgatggagtttgcgacctcccagcgatggatgatgttt

SEQ ID NO: 58897 - DNA, 419 bp, Zea mays
ctacaccaacatataaaataaaataattctccatttttgggataaagataaggaaagcacagaaatgacagagtaacaacctgaatctggtggatattataaaagaaattttatacccccaaattcagggtgttacaatgtgtacaagctctctaaggcgctctatggacttaagcaagccccaagagcatggtatgaatgccttaaagatttccttatttctaatgctttcaagggtgggaaagccgatcccactcttttcacaaagacttgcaacggtgatctatttgtttgccacaattatgttgatgacataatatttggttctactaaccaagagtcttgtgaggaagttaacacggtgatgatgcagaaatatgagatgtcgatgatgggtgagttgacctacttccttggat

SEQ ID NO: 58898 - DNA, 445 bp, Zea mays
agcttaaggacatgctaatcaccagttttcttgggttccaaacaaagccagtcactgctcaggctttattccaatgcacgcaagaccatgaggaataccttcaagcgtatgttcgaaggttcttgtgcctgagagcacaagcgcctacggtgcccaatgaaattgtcattgaggccatgatcaagggccttcggccagggcctacagcttaatacttcgccaggaagccccctcagactttggagaagttgcttcagaaaatggatgaatacatccgggactgataatgatttccgccaaacaagggaggaagcttataagttttcatagatgactaggggcttcggaggaaggattcaccctatgcacgtcagatctattcatagctccattcagaatgacaatagaggaagtcaacttcagaggccacagcaaagctcactgt

SEQ ID NO: 58899 - DNA, 433 bp, Zea mays
  unsure (1)..(433): unsure at all n locations
ntanggtaaaagtcataanatgaccgcaacaataaagttgaatcacatttatacccctgggatcccagaaaccctaattggaaccctgggaaaccctgaaaccaaaccctagggacctaagtgtaaaattagtccacttttgggctaaagtgcaaaaaccaagtcaaataagtattttaagttatttgggtcacttatatgagaatttgcaatccaaaacttgagatttggacttaagtgcaaaagtgccccacttaacctttttggggttaagtctggattttagtgacattggctcaactttggggctttgtaacttacaaagtatatggtttttaccctaggtcaccacatcaaagttgaagacccattatatgagaacaactntgcttaaggttgtgagcttagttcgtaagaagaatttagagaaaac

SEQ ID NO: 58900 - DNA, 443 bp, Zea mays
agcttatgaagattattcatcccaacttggtttagtctgcggtgccagagccaacccatgttagtcttagcaattaagcaagtgtcgagttcagctctatcaaaatctaccaagtatagctgaccctctaacactcccttaaatgctattgaatcatcacttcttctaaagacagtgacacctacatcagtaaatagacagatgtagcccatttgacataattgcgaaacggaaagcaaattgtaatctagagaatctacaagaaaaacattggaaatggaatggtcaggggatatatcaattttacccaaaccttgatttccatccccgaatgtaatagctcgttggggatcttggtttttctcataggaggagaacattttcttctcccctgtcatgtggtttgtgcacccgctgtcgattatccaacttgagcccccgga

SEQ ID NO: 58901 - DNA, 447 bp, Zea mays
  unsure (1)..(447): unsure at all n locations
tggcgactggcgcggcgcgccaagtcgntcgtcttgctgtgttacggaaaggagctctaccaccgcagcccctcaggcgtcctccaacgatgcatatccatcgccgaaggtcaggagctattgcaagaaatacacttgggggcttgcggtcaccacgcagcacctcgggccctcgttggaaacgccttccgacagggtttctactatccaaccgcggtggccgacgccactaggattgtacgcacctgccaagggtgtcaattctacgcaaggcagacgcacctgcccgctcaggccttgcaaacaattcccatcacttggccatttgctgtgtggggtctggacctcgtcggccccttgtagaaggcacccggaggctacacgcacctgttggtcgctatcgacaaattctccaagtggattgaggtccgacccctaaacatcatc

SEQ ID NO: 58902 - DNA, 449 bp, Zea mays
  unsure (1)..(449): unsure at all n locations
ttaagtgactgcggctgcacttggcccaacatgaagctttgtttttattgaaactccactcgagtggggctctgaagcgcctatntgttacaaaacttgcccacgaattggatcaacttatactagagaccgcgataaatccgagatagcttctaaaatagagatcaaccccaagacactttccaaacttacaaaaggcaaagatcaactcaaatactctcactcaaagagtagagaaagaagaaacatgttcagatgaaaaatctatcatattagacacgaattgaaaacccaagggctaagggtaggtacgaccatacttcctcaaaactacatgaacttagttatcaaggttcaaagcatctaagtatctcttaacaaaatgagaaggatatgaatattcaagctaaagaggtgcaagagtatgactaaatggttcaaccctcacc

SEQ ID NO: 58903 - DNA, 472 bp, Zea mays
  unsure (1)..(472): unsure at all n locations
tctgcttatctcccgacagacagaaatttccttgtcgtctgttagacatgtacagaaggcttcttctccactgccattaaatattaatgctcccttcggatatttcagttnttgggcataatgctgggcctcttgttcttctttttctgataattttctccccgaagcatgacgaaaaatataatcacgaatcttgggggatgcttctggggcaacaacactagattcttcaatagttggctttgttattttctctgtctcactttccaaagttttttcgggctctgagggtccagcttctgctgaaatctcttgctctggagctgtataaccagagatttcagctgttgtttcaggagtaacagcaactctcttctgaggtgtgctcgaagatttgatcgattccaatacgtctagcacattatccattctttttctcttctgagttgcagctggcactatttcatttttt

SEQ ID NO: 58904 - DNA, 447 bp, Zea mays
agcttgtagtgagcacttggtccttatgcatatcaagggtgtgtgacacccttgtgtgggtgctccaatgaggattagtggagaatatcgactaccgtgacaagaggaaacacttgaaaatcttttaaatccttggataaatttccacaattatatttctaaaaatttacattcttagatttttcatgatagcatactattggaatttaggcacaaattttttgtatacacattaggcactcaggtgaagttatgctaataaatatgataagcatatgtattgtcacgaagaaatcatgaagataaataaacatctagtgaagaattcaaattaaaatagacttttttctacgcccctcccatccccacctgatggcctattttgacacaagaaggtattgtggaaaaatactcatccagcccttcgcccctcctcacctattcgct

SEQ ID NO: 58905 - DNA, 402 bp, Zea mays
ttgtggtagagttgaattgatatggaccttgtttgatcaccataccccaaaacacccccctgccctgtgaactcctttactgactccggaaaccctaagttctcagagttccgtgaaggaaagttgtattcaagacttagataataagtttatattatctttgcatcctcatgagcatcccatggcatccattcttatacatatctatggttatgattagaacaccaagaagaagtggaagccactgaagagcaagtaccaccacctttggaaacacaggctgagaactgtttctactctgatatttgtggatctgagcattactcacccgtaaacaaaggcaagccccggtgcatttgccacccccttgtgtttaaaaatatttttcacttgcttgatgca

SEQ ID NO: 58906 - DNA, 441 bp, Zea mays
agctttacaccaagcatttgtccaactcttaacacacctatcagtcctttaattggggtgtcatccaaaccaccaaaccccacaagagagctttcagcggctggcccccttctcatgatcgtatgaagtagcgctcctggatatggcaccacctattatacatgttcctgcggtgggttcgtggctgacatccccgtgatgatgcacagtgggtcccatggtgtgggcccaggacttgactgtcacggcatggttcccctccaccatcatgggacccatgttgtccttccacacatgtggatttgtccattcaatatggcgccatgtcttgtcgtttctgctgtaccgccaactgtaaatgctctagtgctgaggttgcccctgacaggaaagttgtgtctgtgtcttatcgcctgtgctcctggcgtctcacattgtcat

SEQ ID NO: 58907 - DNA, 420 bp, Zea mays
tctagatatgtcgaggtgacaaatgatgagggtgaattggttgttacgaaagtcgcagctaagcaacttcgtcgggtgcccatcattcctcggctttcaagggtgttcctcaacaaggaaatagctctgcatatgacatgaccaaagaatggtgtacgtctcgtcactgatccagacataatggtccatccgtcggacggtgatgcgtggaaggcaattgaccaagtttgatcccgaatttgcaaacgaccctatgagtgtacggcttggtctatcgacggacggattcacacctttcaataccagtgcaagcccttactcgtgttggcctgtcttcattgtgccatataatcttcctcctgagttggtcaataaagaagagttcatgttccttgcactagtcatcccaagccccgagca

SEQ ID NO: 58908 - DNA, 436 bp, Zea mays
  unsure (1)..(436): unsure at all n locations
agctngtgaagattcttcatcccaacatgggccagtcggcggngccagagccaacccatgttagtcttatcaattaagcaagcgtcgagttcagctctatcaaaatctaccaagtatagctgaccctctaacactcccttaaatgctattgaatcatcacttcttctaaagacagtgacacctgtattagtgaaaagacagttgtagcccatttgacntnntggagatacagaaagcgggaggtgntctnnagaatcaacaagaaaaacattggaaatggaantgtcaggagatatagcaattttacccaaacctttgaccaaaccttgatttccatccccgaatgtgatagctcgttgaggatcttggnttttctcatatgaggagaacatacctttctcccctgtcatgtggtatgtgcacccgctgtcgagta

SEQ ID NO: 58909 - DNA, 515 bp, Zea mays
  unsure (1)..(515): unsure at all n locations
ctatgaaactcagcttggaagattcttcatcccaacatgggctagtcggcgatgccagagccaccccatattagtcttagcaattaagcaagtatcgagttcagctttgttaaaatcaactaagtatagtggaccctctcccttaaatgctactgaatcatcacttcttctaaagacagtaacaccaacatctataaaaagacagttgtagcccattttgcataattgagagacgaaaagcaaattgtaatctaaataatctacaagaaaaacattggaaatagaatggtcaggtggtatagcaattntaccaagtcctttgaccaaaccttgatttccatccccgaatgtgatagttctttggggatcttcgtttttctcataggaggagaacatccttttctcccctgtcatggtggttgtgcacccactattaattatccaacttgagccccagatgcataaacctatcaaacaaatntaggccttgatcttagtacccaaacagtcttggg

SEQ ID NO: 58910 - DNA, 451 bp, Zea mays
gagcttctaaagggagaacacgtgataggtcttacctatgttcatttcgaaaaagatagaccttgtgcagcttgtcaaacaggtaaacaagtgggaggagcacatcacagcaagaatgtgatgaccacgtcaagacctctggagctgctacatatggacctcttcggacccgtcgcctatctgagcataggaggaagtaagtatggtctagttattgttgatgacttttcacgcttcacttgggtgttctttttgcaggataagtctgaaacccaagggaccctcaagcgcttcctcaggagagctcaaaatgagtttgagctcaaggtgaagaagataaggagcgacaacgggtccgagttcaagaaccttcaagtggaggagttccttgaggaggaagggatcaagcacgagttctccgctccctacacaccacagcagaatggtgtgg

SEQ ID NO: 58911 - DNA, 494 bp, Zea mays
  unsure (1)..(494): unsure at all n locations
gaccttcaatactcagcttcttaccatgtgatcacgggtatcttgagaaggttgggcaatgcactttcctttttagtgtgtcaagctcatttntagcctctcattttcttctttgagctcttgatatgaatcatcatttgttcctgcaaattctagctcaaaggaagatttgcttgtcgacggacaacaagcattagcacatggtaatatagtatcaatttgaatacatgtgcatgagtgaggttgttgagaatttaagttttctatcacaacctcatgagcaatgtttaatatgatatgatcatctctaagattttcatgagagcataggagcatatcatatttttcttgaaaaactagattttcaacctttagcttttctacttggtccttaagcaaggtattcctatttactaattgagcgatacaatgtanagcgttatcttgctcaattgaaatagnttcatacctttggaccacatcaacatgagagc

SEQ ID NO: 58912 - DNA, 441 bp, Zea mays
  unsure (1)..(441): unsure at all n locations
agctntgggctaggcccgagcagaaaggtggtgcgacagatagggtgtcatggcggtttatgacagtgcacgggtgcgttccggtgatgggcttcggccaaactccaaattgccgcatccaggagcaataagagatcaaagactaactaaaacagggagtaatttggtaattactgaccagaggagcgctggccacggatgtttcttcttggcggagctaataacagaagagagagggaattggggctacgtgggttttccggtgagctcgagtcaagtgcttagtcgctgatgtgcggaatgtggtgacgaaacagcgcccgcactcaatttataggccgccggccgtagtcggatgaagatcggggatctctagatcgcgcttgcgagcataccgcgcggcggattccggtgacagcgcggtgatcaccgtttaaccgg

SEQ ID NO: 58913 - DNA, 449 bp, Zea mays
  unsure (1)..(449): unsure at all n locations
gtagcataggcaagttatatacgaattgattcaagcctagctactggtgcataggtttcaccgaagtccaaaccttcgacttgtgaatatcccttggccacaagtcgggctttgttccttgtcaccacaccatgctcatcttgtttgttgcggaagacccacttggttcctgcaacattttggttaggacgtggaacaagatgccatacatcattcctcatgaagatgctgagttcctcttgcattgctgaagcgtccncaatcctctgggactcaaatgtgatacaattactagtcctaggaggctagtaaacacatttatacatcagataataccaaatatgcttaaacgagacaaacctacaaaggtggcgaacaactntaagagtttntccacaactcgggacatatcatcagagtgtggctgaagcagcccgatatacgcagcg

SEQ ID NO: 58914 - DNA, 448 bp, Zea mays
agctttcatctttcttcttcacaaatagtgctggacatcctcaaagcgaagtgcttgggcgaataaatcccttatccagcaactcttgcaattgcttcttcaactctgccaactcagcgggtggcattcggtagggcctcttggaaattggggccgttcccggttgcaactcgatggcgaattcaatatcccggtctggtggcattcctggcaattcatcagggaagacatctgcatactcacagaccactgggatcttcttcaggggtaactccgtcatagagaaagtacatgactgagaagaaccctgactaggcagaattaaagtgaagttcccgcagaacggagaattaacttccacggtacggctggctacatccagcacaacttggtgcaaggtcatccaatttgctcctagaatgatgtccacattttccaatcccaacac

SEQ ID NO: 58915 - DNA, 478 bp, Zea mays
  unsure (1)..(478): unsure at all n locations
tcggtgttataacgtatccgaagatgaagggtcgaaccaacttaaagatagaatgacagtttagtccataagggtctgagtcattgttgtaaacttttataaggggcataattgtaattccttacaggctgtgtcctgtgcctataaatagtgaacaatattcctttactgttcacgcattcctgtaattgcaatcgcgttattcgggaatcaatctttgtcaaggcaaaggtataattgtattcagtgcttaaatataatcaatttaatgtgaaagtaatgttgttcatttgtaatttatttacctttgacgtttcatattctatataattntattcaatcttttacgaagatttaaccttcgtaagcgtatttcctttaaccttcgtccaaagttcattaatccttaagggaataatgcttcgttggacgaaaggcatcaacatttaacactttgtgttgccttgtcttaattcat

SEQ ID NO: 58916 - DNA, 364 bp, Zea mays
  unsure (1)..(364): unsure at all n locations
ctaagcttgtgaagattcttcattccaacatgggctagtcggcggtgccagagccaacccatgttagtcttagcaattaagcaagtatcgagttcagctctattgaaatcaacaaagtatagctgaccctctaatactnccttaaaagctactgaatcatcacttcttctanatacattaacacatgtatccgtaaaaagacangttgtaacccattttgcatatatgagaaacagaaagcangttgtaatctaatgaatcctacagaaaaacattgganatagaatggtcaggtgatatagcaattntacccaatcctttgaccaaaccttgatttcattcccgaatgtgatagctctttggg

SEQ ID NO: 58917 - DNA, 434 bp, Zea mays
  unsure (1)..(434): unsure at all n locations
gtaccacctatcccttatagtttgttcgacgcatgcctggtgctgctgctgctgcttcgaattcctcggactatctggatttgttctcggcagtagttcctgtaagtacctttaccttgatcaatcagtattaatgatcaccgagctgcatttcagcaaaaaaaatcattcgccttccaaggttcaagctcgctgccggcacatgtgctcttcatcgaaccgggcctcgttccagaagagacgctgtatctgctccaaccaaattgctggtcagagacacgcaatatttcagcacattttgatgggataccaatagaatctggtaacaaaaaaaccaagaacatctttaactctctgtgggatgcgtgtttgcttctgttgaaacagtagagagtgcacattccactagcattntatatccttctattctaccc

SEQ ID NO: 58918 - DNA, 374 bp, Zea mays
  unsure (1)..(374): unsure at all n locations
ttgtcagcaggtaacaagtgggaggaatacatcacagcaagaatgtgatgaccacttcaagacctctggagctgctgcatatggacctcttcagacccgtcgcctatctgagcataggaggaagtaagtatggtctagttattgttgatgactnttcccgcttcacttgagtgttctttttgcaggataagtctgaaacccaagggaccctcaagcgctttctaaggagagctcaaaatgagtttgagctcaaggtgaagaagataagaagcgacaatgggtccgatattaagaatcttcaagttgacgagttcctcgaggaggaggggatcaagcacgagttctccgcttcctacacacctcagcaaaatggt

SEQ ID NO: 58919 - DNA, 445 bp, Zea mays
  unsure (1)..(445): unsure at all n locations
agctgcagctntgcgtttcatccttgacattcgtgtgtgccgaacgaagcttctcgccgcattgcttcggctattcttgatagcgcttaggctgaggcctancttcgtctgctgttagtcgtgtacctgaaacacatttgttcactccgaatagttatttgaggaccttcggtgaaggtaggctcccaacaagtatccctctcatgtatttaagctcagaaaggcgccttatgggcttaagcaagcaccaagagcatggtatgaatgcccgagagattttattactgcaaaatccttcaaaattgggaaagcttatcctacagtttttactaaaatcattgacaatgatttgttagtacatcaaatctatgttgatgatattatatttgggtctactaacaaatcctcttgtgaagagtttactaggatcatgatntaggaaatt

SEQ ID NO: 58920 - DNA, 396 bp, Zea mays
  unsure (1)..(396): unsure at all n locations
tctgtacgcggtgattctgacgcagcggaagttgcgacacttctatgagtctcatccggtgactgtggtgtcatccttccccctgtgggagatcatccagtgccgagaggcctcgggtatgattgcaaagtgggcggtggaaatcatgggcgaaacgatctcgttcgcccctcggaaggccatcaagtcccaagtcttggcggactttgtggctgaatgggtcgacacccagcttccggcagcttcgatccaaccggaactctggacacatgtttttgacgggtcgctgatgaaaacaggggcaggcaggggcctgctcttcatcatgcccctcgagaagcacctatgctacgtgctgcgcctccattntcccgcgtccaacaatgtggctgagta

SEQ ID NO: 58921 - DNA, 444 bp, Zea mays
tcaagcttcggccgccgtcgtcgaccggttgtttccttatcgtttaggcctcggtctgggtgcgggagcttcttctagtcgagcgggttacgaccgggacttcgcctcggcggattgcgcggcggtcgacctcgaattgcttgtaggagctgctcggaccgccgtgagtcgcgcattctcgtccctggagtcctctgcaccggcaccgcgggtgaatttccccccccataaggttcgccttgcccccgccaatgtacaacgtcattttattccgagattaacgcgttcgcaatgggatttagcccgactccggcgatgctccgccgcagcctggtgggcggcgccgccgtcgctgtacggtgtttgagaaagagagcgcgcgtgccgccatgtccgttggattggtttcctgtggctgagattatatcacatcttaccccttcc

SEQ ID NO: 58922 - DNA, 477 bp, Zea mays
  unsure (1)..(477): unsure at all n locations
cttagaaactcagctataacaaagaaggagcgagacaagatatatgtgtttatatatagcgaattatacaaacctggagatggttcaccactccttaagtgtatatcaagaactgaaggtatggaattaatgaaagagatacatgcatgtctatgtggatctcacattggatctacgcccctgttgggaaaagatattcngccatgattctattggccgaaggcagcttttgatgcatcagaattagtccaaaaatgtgaaggctgtcaaaaatgtgcaagagaccagaagcaacctttatctctcactcaattaatacagcccacttatccgttgcaaggtggggccttcatttgctagcccacttcaccagcacaagaaatctaaaattgttgagatctacatatgttgaggtggcggagagaatatttctagtggattgcgcgaacctctaccacataactttgtcactgccaa

SEQ ID NO: 58923 - DNA, 441 bp, Zea mays
agcttgcggaagccgtagaattattctaggatgtttgcactaagcaaaaagctcaacttataactttgaaaaataagttggctagctctcaaaatgattacaaaggtttgctagaaaaattgaaactttcgcaaacttaaatagagagctatcaactaaaattgagctattagaatctagtgctccatccactgctaccgatgatggccttattaaaaagaatgaaaaacttaaggctaagttagctagctcccaagaagctatcgaaaatttgctagagaaaatggaaattcttagcatacacaataatgagctaactactaagctagaaaacattggtagcaccccagcaacatctttagttgaaatacctgaaataattaagaaagatgcttctacttcctgctttgatttaattgatgattctaacccctgcaacca

SEQ ID NO: 58924 - DNA, 461 bp, Zea mays
  unsure (1)..(461): unsure at all n locations
tcgtataccgtgaattgcaggatctgggatattgtatatgtatcttgattcggattgctcttgactgctatgnttgaactggcgcacttaaaatgggctgagattggggtgactcacccgcgatgatctgaatctattacagggctatgcgattgagtgtagtgcagcgcaagagttgcgttcccaccacggaacttattcatgaccacttcgatatggcttgctaccttgggttggtgggcatacaatgacaatttaatgctgcaaagattcagacctgaaatattacagctatctgcctcaaatcaacctaatctggtggactggaataactcgagacacgagactactgctgtttacaagaatccggacttctgtctctgtacttatcattgcttgtaggtagacaattgctgtaataggacaactgtaataggagactaacaattgctcatcctcat

SEQ ID NO: 58925 - DNA, 434 bp, Zea mays
gagcctatgttgatgatgtggtaataatgacttttctctatgaagactccatcgaagattagcagctggtcttccatagcctgacgcgatatcgagggaggcgcactctatagaaatgtgtgtttggagtaccgacaggaaaattactaggattcattgtgagccaccgaggaattgaagccatcctagaaaaagatcgatgctatgatgataatggaagcgctgcaatcacataaaaaggcgcagaggcttactggatgcatggaggcccttatcacggtcatatcatagctgctcgaaagaggcataccgttctacaagttgcttaagaaggtggacaaatttgagtggaccgcagaggcgcatgatgctctatatgcactgaagaagttccttgacgacgcaagcagtactcacgccatcatgtttagcca

SEQ ID NO: 58926 - DNA, 481 bp, Zea mays
  unsure (1)..(481): unsure at all n locations
taacatgatatttataaacctcgggtggagtgttgcttgatttggacaatgtttgatacctcaaccccccaaaccctaatctactaaagtagtgtctgccatatgaactcaaactctgactgcaaaaaccctagtttcctgaagaaccgtgaaggaaaattgtattcaagacataataatattatccttgcgttttcataagcattgcatgagcactaatgactatatgtggntatgtatagagaacgaagaagaaatagtagctgatgaagagagagctgcaccaccaccacctgaagacccacctgccgggaactgctgttatttcgatatttgtggagtagagcccgactctcctataacacaatgccagccccggtgcatttgccacctccttgctattatanaatcatactcacttgcttgatgccttaagcgataagagttgtgtgctaaacaaaatgatgcattctcttccttg

SEQ ID NO: 58927 - DNA, 427 bp, Zea mays
  unsure (1)..(427): unsure at all n locations
ngcttgtgaagattcttcattctaacatgtgtctttcggcgaagccagagccagcccatgttagtcttagcaattaagcacgcgtcgagttcagctctatcaaaatctactaagtatagtggaccctctaacactcctttaaatgctattgaatcattacttcttataaagacagtaacacctgtatccgtaaaaagacagttgtaacccatttggcatagctgcgaaactgaaagcaagttgtaatctaaggaatctacaagaaaaacattggaaatggaacggtcaggtgatatagcaattttacccaatcctttgaccaaaccttgatttccgtccccgaatgtgatcgctctctgggtgtcggtgtttctaccccggtgggtccctggaccaacgagtaaattgtcgctgcgtgtgccagacc

SEQ ID NO: 58928 - DNA, 469 bp, Zea mays
  unsure (1)..(469): unsure at all n locations
ctcacatgtctcgtatgcatcacaatttaactaagttaatagtccctcanaatgaagctgcttcatgcgaatctcacttatatgacccaaacgacagtgccacatgtatgtaggacttaaatcattatgccgaggccttttatcactaatattacagataggtgcatcatcaagagctaaaatgaataacccattcataatggatgcggaagccacaaacatgccattcttagagatcacacaaccattgttttcactcgcaaatgaataaccatccttcatcaaacatgaaagagacataatgtgtcgactcatactatgaactagataacaattatctaactccaaaacaaatcctgatgggaggtggagtagcatcgtcccgacggtcaacgcagcaacttcttgattattgcctacccggaaaataacttctcctatttcacgcttctattattatcattccctg

SEQ ID NO: 58929 - DNA, 421 bp, Zea mays
  unsure (1)..(421): unsure at all n locations
gcatcgctatggttaaaatttgtccctcaactatgcaatagcaatgaatggtgtggtaacttcacacctacccgtctgtttatatagtgatgcaggtaagaaggtgaatcgccaggatctttacaccaggcgaacagctgctcgcacccgctgcgcggtggaccgcagagaccaaatagtaactctgcaaggtgggaccgttacgcgctcagaaactgaatcgtttctcgacaacgagctcagggaaggtgttttttggaccttcggcttcctgaagccaaagtactttnttaacggatcaagctctgtacgaaaaacgatctatcaccgcgaaggggctactgttgggactatgcttcgtcgccgaaggtctggtaggaagaaacagcttctgctgaagctgtccgcatgagatgaccga

SEQ ID NO: 58930 - DNA, 356 bp, Zea mays
ttatcaaatggacgtgaaagggcctttctctatggacctatctatgaagagggctatgttgagcaacctcccagctttgaagaaagcgagtaccctaaccatgtatacaaactctctaaggcgctttatgggcttcagctagcccctatagcatggtatgaatgcctaacagatattcttattactaatggcttcaaagtctgataggccaatccttacttaattactaaaactcttgacaatgatatgtttgtatgccaaaattatgctgatgatattatatttggggcttctaacgaatctacatgttgaagaattagtacgatcatgacgacaaatatctagatgtcgatgat

SEQ ID NO: 58931 - DNA, 449 bp, Zea mays
  unsure (1)..(449): unsure at all n locations
agctntgtaaaaccaccacctcatctttcttactaagaggaacaatggtttcacctccgattctcactatatatacgtcatgaaaaaacctacccttcatggcttcaacatgtcgtttcttcacggtagatttcccgaagaccacgtgacttggcctccatggccgatcttcggcatcatcatttccactatcaacatcaaaattctcgttgtctccagaatcttcagatagctcagccaaaatctcattcattattttttcaacattggttctctccatagcttcgtaaaacctagccaatgcggggtcttcgctccttttatcttcggccacctcagctctaacaaagcaaggaaccaaagctagaaaacgaatgcaattgcaatggcttagaaaaaaactagtgtaagtcgatggcacaacaaatgttttatcatgaccctcatat

SEQ ID NO: 58932 - DNA, 431 bp, Zea mays
  unsure (1)..(431): unsure at all n locations
gggtgccaatggagaagcaganatccttgaagtcttggctatcaaattgcttgctcgtgtcgactgtgagttcggacgggactccgaagcggctaacaatgttttgccagaagaatttctgtgcagcctttgatgttattgtggatacagccctcgcctcgatccatttggtaaaatactcgacaacgacgaaggtgaacttgaggttcccctgagccgtgggtaggggcccgacaatgtccaggccccaacgctgaagaggccatgtgtgggcgattagtttcgtgaattgcgaagggctctctgatcgaggagaaaacttctggcacgcttcgcatgaccttgtgacccgatttgtggcgcagaccattgcgggccagtagaaaccttgactgatcacctttgcggctagggccctatgccctgcgtga

SEQ ID NO: 58933 - DNA, 343 bp, Zea mays
  unsure (1)..(343): unsure at all n locations
agcttgcattcgcttcagtttatcatccgctgccttttttgtcgnggagcgcgccaatgggaaaatcttcacagctgtcaagaagatgctcctcgatgaaaaaaaagacagatggaccgatttgttacctgaggcagtatgggcgctaaacacaactgagtgcaaggcgactgggttcactcctttccgccttctatacggatcggaggccatgaccccgcaagaaataaagcatgggtccccgcgtacagttccgtcagccgtccccgacgtggacgagccaacttcaaaggatctcattgatggagaccgggtcttcgccctacaggccctaaacaaatac

SEQ ID NO: 58934 - DNA, 368 bp, Zea mays
  unsure (1)..(368): unsure at all n locations
gacactatgaaactcagcttccaacacttggaggaagttngaatgggagtcanaactcctctcacaaatgaacacaaggatgaagcacacactatctctcaatgtatctcacaaggcactagggctaaactcaattgagtagctctcaattgctcgctctctcttttgtggcacttgtgttggttgtagtgggctagatcttgtgtataggatgtatcaatgaatataggtggttgggagggcttgagtatgtcaactagatgacttggaatgttgcttggactcccccccttgaagtggccggttggggtggtatttatagccaccatccaattttgtagccgttggagaagctgctggcgatgggc

SEQ ID NO: 58935 - DNA, 443 bp, Zea mays
  unsure (1)..(443): unsure at all n locations
agcttctanaaggagagcacattttacgacttatcttgttcatgttaagaaagacagggtttgtagtgcatgccaagcacgacagcaagttggtgcccatcattcacacaagaacatgatgacgaccgacaggccgcttgagctactccacatggatttattccgcccgattgcttacataagcatcggcgggagtaagtattggcttgtaatagaggatgattactctcgcttcacttgtgtattctttttgcaggaaaaatctcaaacccaacaaaccttaaaaggattcttgagacgggctcaaaatgagttcggcttaaggatcaagaaaattagaagcgacaacgggacagagtgcaagaactcacaaactgaaggcttccttgaggaggagggcattaagcatgagttctcttctccctacaccccacaacaaaatg

SEQ ID NO: 58936 - DNA, 334 bp, Zea mays
ctctctacaaagatactcgaccaggcgtatggctctcgcatgggcttccctttgacaggggcactaacgaggaatatttaaaatcttgtgcggctctaaataccttagtaaaaatatcggcacatcaatgtgagtttgcatctctaccactcttttaagcttccgcatttattggttacttaagttgtgtgctttaccattcctagtttagaatataagctatttggtatgaatggaacttaagttgctaacattctttcgcggtagagatagcatcacttatacaagaacattatgcatatttgcatatgattttgttaagagaattattatt

SEQ ID NO: 58937 - DNA, 429 bp, Zea mays
  unsure (1)..(429): unsure at all n locations
agctngctcctctgcgccctgcactctgctcgccatcgcaagctgcgtgctcctctctgccggtgcccaagcccctccagctcgcccttttgcgtcctggcccctgctccgctctctccagcgcctagctcgccatggccaccgcagcctagctcggttgcccatatccttgaatcccctccgtgatttcctgctccatttgtcgtcgntcaagccttggagctccctatgcgcgtagactgcttcttccatgtgccgcgtgcaggttcccctgcgtcggcctccagctcacgaagcttccctattggccacgcgctgctccctgtttttctggtatttctggtagtcgtgcacgtgaaactgcttcggtcggcaacccctatggccgcagcccatcttccgtgcgccgtccgccacctcgcccttggt

SEQ ID NO: 58938 - DNA, 439 bp, Zea mays
ctcaagcttgtgagcaatacaagttcagaagggagaaagctgcttcggctgatcagcctaagcccatgctcttatgtgaggacatagcagagcagaaggtgctattgggatctcaactgtctgaagaacagaagaaaaccttgataaggtttttgttcaacaataaagatgtttttgcttggtcagctaatgatctttgctgagttaacagggatgttattgagcactcgctcaatgttgatccatccttcagacccagaaaacagaggcttctaaagatgtctgatgacaaggccgaaggtgctcggaatgaagtgaaaagactcctcagtgccggagttatcagagaggtaaaatacccagaatgattggctaacactgttattggtaagaaggcccatggtaaatggagaatgtgtatcgattttactgatctcaa

SEQ ID NO: 58939 - DNA, 421 bp, Zea mays
agcttacccacataatacgaagaggttgtggctcgttcctgtgaccttccggttacaaacggtaggctctaccgctgccaggtccgcccttcttgtttgggggcacgaatggcagaataatttcttggtgattgggggcacaatgctcgggtgtacgatgttcatatgtatgtaccatagaattcaggatcctcatatttcaatatttatttaatggattgttgtttactacaccttaacctacctgtgggcagagatgatgttgaagcttggtattatattgacatgacattgtctctgtcagttcaactaaagattcaaactgaacttaagctgtgaagtgatctgttcacagtggtcactctaagctctgactcttttatatctatagcactgagccactgagctgtcatggacctga

SEQ ID NO: 58940 - DNA, 477 bp, Zea mays
  unsure (1)..(477): unsure at all n locations
tagcanaagtgcgtagatgatcagatgaggattcggattgatggtgaattgatttaaagaggttgtgcgcttatatacttatgaattggtacggtaagactatattgggctagacctaaactcttattggtctattaagcttttttctcgctaattcagatttcttatgtataaaccgaaactgcttggttatttcggttttctgagacatggaaatcgaaattactaacaattaatttggttttagttacagtttattcgattcagttcttcaatttcagtttatatcgcgtagagtcccgctacaacggtattagtgtacataggccatgcacactaaggtatcgtttggttaacgaaatgcaacataaatgataatgacaatgattcgcatctgattaacatcgataacaagttcgaataggacggtatcattttctagtgtaatatctgattatatgggtgggattaaacaac

SEQ ID NO: 58941 - DNA, 444 bp, Zea mays
agcttctaaagggagaacacgtgatattttttgtttacgtgcaattcgaaaaaaatagaccttgtgcagcttgtcaagcaggtaaacaagtgggaggagcacatcacagcaagaatgtgatgaccacctcaagacctctggagctgctgcatatggacctcttcggacccatcgcctatctgagcatatgaggaagtaagtatggtctagttattgttgatgacttttcccgcttcacttgggtgttctttttgcaggataagtctgaaacccaagggaccctcaagcgcttcctcaggagagctcaaaatgagtttgagctcaaggtgaagaagataaggagcgacaacgggtccgaattcaagaatcttcaagtggaggagtttcttgaggaagaggggatcaagcacgagttctccgctccctacacaccacagcaaaatg

SEQ ID NO: 58942 - DNA, 338 bp, Zea mays
  unsure (1)..(338): unsure at all n locations
tgctggacgtgaccctcgtacctgagacgacttgttcanttagttcccgacatgactttatcgccgcccgtcgaccaagaggtaccgaccgattcccatcccacgtcatttggattcagcctcaacccgcctagcgactttgctttggcgggcgctctcgtataggcaagttcaaaccctctggggtttcgtatgcggtcaccttgtgaccggctgacggacgtctcgacctacgggccctctgggtccgaggaagacgacgagcccagcatctgttgggatttctctggacttggcaaccccagtgccatgcgggacttcatgaccgcatgcggcta

SEQ ID NO: 58943 - DNA, 442 bp, Zea mays
  unsure (1)..(442): unsure at all n locations
agcttcatactcggctgcattgtagatgtctgtattagcaactggagagcatacttgaggtgctcgcctccaggtgcagtgaagagaatccctgctcctgctccctgcagcttcagcgagccatcaaaatacattcgccatacttctgccgtttctggattgtctggaacttgctgttctgtccactctgatacgaaatcgaccagtgcttgagttttgatggcagtgcgaggtcggaactcgatatcatgggatcccaactcgcaagcccacttggctattcggccaatggcttccttgttgtgaagaatatcccctattggaaaaccagtgactactatgactntgtggtcgtcaaagtagtggcgcagcttgcgggcagttagaagtactgcatataatagcttctgaacttgaggatactntttcttcgatggaccta

SEQ ID NO: 58944 - DNA, 486 bp, Zea mays
  unsure (1)..(486): unsure at all n locations
ntagcactngctgtccataaggagcacacggccagtagtgttgtagagagaaagggatactcaatgcaaaatgagtttaagaccacttttcacgtgatacgcggtacactactaaaagtaggttttaatactatagtaatgagattgtttccatgttcctttccacgaacgaatgtcctcggaacctggccaaagttccacgttcctggtttctaaatttagcacctttgttagagcaaaagtgctaatgtgtgttaaactttagcacaatatttttagtcaccctggttatttttttagtagctaaactttagtaaaaaatgccaatggtaaagtttagcacggggcttttatacagagccaaccacaaagcatgccggaggaagtagtattattgtagaccgcctataggagctacgagaggcagttngatctncgttggacgtggtactggatcattgaatntgatatgcgaacccttaatta

SEQ ID NO: 58945 - DNA, 437 bp, Zea mays
gcttataaggtttttatccaacatgttctgtaagtgatgccacagctagcccaagttagtcttagcaagcaaacattcatctaaatcaacattctgtttagcaaaatcaaccaagcaaagcttactgtcatatacacatctaaatgctaatgaaccatcacttcttctaaagacagatacatcaacgtttgtaaataaaaaattatattctatatgacataactcgctaacagaaagcaaattataaccaagagattctaccaaaacgacattagaaatcgagtgctcggtagtaatctctatcttacctatcccttttaccttgccttggttccaatctccaaagatgatcgtgtcatgggaatccttattcttgatgtaggaagagaacatcttctcccccgtcatgtgatttgtgcatccgatatcaataatct

SEQ ID NO: 58946 - DNA, 461 bp, Zea mays
cgatccatctataatgggaaatgctctcgagtctgtcctttttccttcggctgtcctagtggcttcctgactcccatgaacaacaatgggcccttgttctcgaagtatcttcatgcatagatatgctggatgaagtattcctttgaaagaattaagtgtcccacgaccaatgatagcattgtaggggtattccatatcaacaatgtcaaacacaacctgtttagtccttgtattgtggacgaagccgaatgtcactggcatcgtgattttgctgagtgctgcaatctgccttcctccgaagccacaaagagcatgtgtagcatcatgaatcttgtcttctggctcttgcatctggctgaaggccttagcacatatgatatctgctgcactgcctatatcaaccagaacattatggaccagacatcccttgatgacacaagatatgaccatagcatcattat

SEQ ID NO: 58947 - DNA, 441 bp, Zea mays
  unsure (1)..(441): unsure at all n locations
agcttcnggtctcttgccttgctactttttttatatggccagaaangactcgagaatcggctttcaggatggcccttcttatttccattgcccttaactttcgaagccccagtagaaacgcttcgtattcaacaatattattcgtacaacgaaagacgacattggttgttctagacttgagaaggtggttctatgacaatagccgctcctgcaccgaaggttccccaagaaccattatagaaaactgtcccagcttcaacggctttatttattaattcttcctgaacccctggcgtccagtcaagcgaggaaatctgctaactcctgcgacttaactgaagatccatgcacttagtcaatagcgaatgtcgtaagctccataggccatcttccaatcctttcacgagcttctctgttactcattatagttcttcaaaagct

SEQ ID NO: 58948 - DNA, 423 bp, Zea mays
tcacgggccactggcggagctagccgaagcactggctcgatttgtggtggctggagtgggctagccacggtggccgaagctctatcggaaatggcgggcggaaatgagctcgccggagctaaggagagggggctggccggtgaaagtgagcgcggtgtgaaatggggtgcgcctggggaggctttatatgcacgacgcattgcacgggcggtcgtggaccggcgagcgcgcgcgggcgtgcactgtgaggcgcggtgcgcgaacgggcatgaaccggaggtgtcagccacggtcgaacacgtgtgcccgttgcctctgcccatgttcaagcgctggtagggtgcaaatcttctcgaatttgggcaagatcgctgtgaaggatttgttcacctgaccttgctatgactttttgtatggacgtcg

SEQ ID NO: 58949 - DNA, 387 bp, Zea mays
agcttgtatagagcacttggttcttatgcttattaatggtgcgtgacaccctagtgtgggcgctcccatgaggattattggagaataactgctaccagtaccagaggaaacactcgaaaatctggtttttcctctgatgaagttgcacgctaatataccttaaaatttacattcttatacttctcatgatagcctagtattggagtatatgcacaaactttttgtctacacgttaggcactctcgcgaagttgtgctaataaatacgacactcatacgtattgtcacgaagaaatgctgactatatataaacatctagtgaagaatatataatagaatacactttgttcatcgcctctcccatccacacctgatgtgctattgtgac

SEQ ID NO: 58950 - DNA, 391 bp, Zea mays
ctcagcttggtcagtagattggatgtcctgttgatcccataccccaaccccccgtggctggtgctatttgtgactccggaccctagttctcaagattctgagcgaaagtgtgtcgaacttatatctaagtagaattgtgtgtgctcctcatgagcatcccatggatgcattttatgctatctgtgaatgatttagcccgaaaagagtggtgccactgcaaggtatcgaaccctttgggaccagctgaaactgttctctttgatattagggatgagtcaatactacccgtaatatgcgggcccggtgatttgcacgcccttggtttaaataatttacttgctgagcatcaggattgagtcgatgtacacgatcctgctactttcctggattg

SEQ ID NO: 58951 - DNA, 442 bp, Zea mays
agctctaccaaagggacatgataagttcctttctcaacggaccaatcaacgaagaggtgtatgtcgagcaacctctcggctatgaagatagtgagtaccctaactatgtatataaactctctaaggcgctttatgggctcaagcaagccccaagagcatggtatgaatgcctcagagattctcttatcactaatggcttcaaagtcggaaaagccgatcctactctatttactaaaactcttgaaaatgatttgtttgtatgccaaatttatgttgatgatattatatttgggtctactaacaaatctacatgtgaggaatttagtaggatcatgacacagaaattcgagatgtctatgatgggggagttgaagtacttcttgggatttcaagtgaagcaactctagccaaacgaagtatattcaagacattctcaacaagg

SEQ ID NO: 58952 - DNA, 351 bp, Zea mays
  unsure (1)..(351): unsure at all n locations
cgcctaatcctgagaagtgtgnctacggcgtcccgcgttgcatgctcctatggnacatcgcctccgagcgaggcatcgaacccaacccagagaagatcgcggccattaccagcatgggacccatctaggacttacaaggggtacagatggacatgggatgcctcgcggacttgagccgcttcatctcacgcctcggcgaaagacgtctgcctctgtaccgtctcttaatgagagccgagtgtttcgcttggacccctgatgccgacgaagccctccgcaacctgaatgcgctccttacaaaggcgcctgtcttggtgcccccggcagacagagaatccctcttggtctaca

SEQ ID NO: 58953 - DNA, 439 bp, Zea mays
agcttggggccatggatgttttaatgattatgatctttggagaggaccatcaatgacttggaaaaggctaatgtgtctaggaggaggagcaagggctcccacaacaggaaggagatcaagtctgactcggctgtgattccatttcacgttctatgaccaatctgcactaaaatggacgcctatgatgcatccagacttctattgtgacggacttgatatggttggaacgataagaagattatctaaccaactcaactggtcccaccataaaatacattcgaaggcaataggaatcgtcgaaacaagtcagcgctcacattttgttttggtgctgtgacactgtctgttgggtcgtgtatcgtgttggagcccattatgggtacctccaggggttgtgcacacccctaacatctattttaacagccgtcaccacattata

SEQ ID NO: 58954 - DNA, 384 bp, Zea mays
  unsure (1)..(384): unsure at all n locations
tctcccacccttcgcccagatttgtgttataaatctatntcctatgcttcgggccacgctatggatatcatntangtctgctggtgataagctgaagttaggtctattgacgaattttcatgcgtgcaccagttttcatgaatgcaacagctgtgccccgagaagctagaagggcacagaaatcaccgtgcccagccataacttcgtcaagagcatcaacttcaccctcaatgtgttcgaaagtccctggcaggtcttcaactgaagggttaaacttctcagaactggccccaactgagttgaagacctgcttcagccgctgcacgcatcgtgtgccgaagtctatacattnatcttgaagctctttcaatgatttctctaaat

SEQ ID NO: 58955 - DNA, 449 bp, Zea mays
  unsure (1)..(449): unsure at all n locations
agctntcccccctctctcccgtgcgcctgcgctccttcctccctcgcggcccacgcgactcatctcccttgcgccgcgctctcccctgacagcccgaccccacccgtcagccgcgcccgccctttctccctcgcgaccgccctctctctggcaggcgggccccgcttgtcagcccctttccccctcgcccgtgatcggccatcgacgctgtcggtaccctgaatcaggggtaccccttactacagtatgaagacgaggtgcccgtacgccgttccttagccacacggtgaacaacgctcgtccccaccacatgggcagatcaaggggcaccatatggcaaggaaagatgatacatctaggatgtatcagtcgagctggacctccgcgagggagcgccggacccctgtacgcacaacccggacccncgattgtggctcgggactcccgag

SEQ ID NO: 58956 - DNA, 467 bp, Zea mays
ggaccttaagtcaactgaggcatgaagcttggtatatcagatggctatatagaagtcatctttgctcactattcaggtataccattaacaccaattccaatagcggaatagaaattgtgagcacatacctttaatacttataattctgaagtaatacatgactaacaatggcttgtactgtcttgcaaaaagaaagcaaatacgatactttgcaacatgattggtccccaaatcagcaactggtcaggtaaagtagtggtcaaatttgtcacaaaagaacatggctcgtatgagatcaagctatctcgccacgttgcgtgtattactaagtactttgtctctgaatttctctcatagtctatccaacgaatggctcctgaactcttacatttgagctccttgaccaactgttgctgtagggtgagagaattcacgccaggaacaacaaagtaacaaactaaacgcaa

SEQ ID NO: 58957 - DNA, 486 bp, Zea mays
  unsure (1)..(486): unsure at all n locations
taaaggatactattcaactaaagtaagatgaagntgataagatgccaatgtatgaaaacttcctatccttcagttgttttagtattctatccttagtgggatgtaccatagtatatgttaaattcattgcattataaaatgttcaatagtgcatataactttgacgttaactatatgtgtgcacttatttaaaggaatttagtctatccttntgggtttcaataatgatgattcatttgccatccgtatataaggatcatcatttgtgaaaccctcccttgtgtttctaatgctctcttttctaagtgtttcaataaggtccttccaagtgctttcaagatggattcataatctacggatataagagtcttggttgtttcaatcattgagtgtcaattgatctcatataaaatatgatcgaatcaaggaaagatgaaagaagttcagatcacttggctgatgaaatctaaaagaaagagacacagt

SEQ ID NO: 58958 - DNA, 442 bp, Zea mays
  unsure (1)..(442): unsure at all n locations
agcacgcggctgcagcttcgattnaaaacaatttttagtgtttccgaagatgtctgaagataagaaggctactgctgagatgaagctaagtctcgacgaagagaagaacttgggatttcttatagcgatgtcgaagaccaatacagaaaaaatcactaaggagattctggaaggtttgtctgaaaacactggtgacagcgatagttatgatgtggacagtggtggtgaagactccgaagatcgcccttggcgaccaagccatgcggttttcggcaaatcaactatcaaagaaaatcatcttgccaacatgaggggaaggtatttccgggatctgtccattgtgagggccgacgaacgggaaaggacttgtccacaccctgaagagaatgaagtcgtggtgtaccgaagctttntaaagctggactacgatttcccctgaacg

SEQ ID NO: 58959 - DNA, 451 bp, Zea mays
  unsure (1)..(451): unsure at all n locations
actcagctttctgaaaggagtcnttgatcattgatcaaccttaccttgtttcccaatcaactagcatacccttgagattcttttctttagtcgggtaagtattgctgagtaattgcgtactcagggttttatcccctgttgtttctgtacgagaagttttattcccttatcttttggttagttacttcatgtggaggccttgaaacttaaaatgttatgtgtatctcttatggaaaggctttacccttccaattgttataataagttatgcactttgggtactatcaggacttgtaataattaccattcttcttatgttgtaaaacttgagctttggaaatgtaaaatatgttntgtgaagtattccgctctatctccgaagtgtgtgtgtatcgagtgtgaatactggaatatgcatgaatgttggagatccctggatgatgaagtccag

SEQ ID NO: 58960 - DNA, 421 bp, Zea mays
  unsure (1)..(421): unsure at all n locations
agctcatnctcgnagtgatgatcgacgccatctctatcgcctcctgtcagtggtgtttgttcggggctttcgtgcaagaaacataaatacatctttggcaggaggctatgacaatgacttacaaatcagacgcacgagtaaactcttatggaaaataaatatcgcgcctatatcaaacgaagttaattggataattttatgataaccagagatatgctggcctcgctcttctgtaaatagctactggctccgtccaaaaatataaatcagtaaatctcgtcgataatcatctactactacacattgcgcacgggtggcacgtgagatttgggacagatgcacaagatattttgactgcaacaaatattgacctagaaccacacgaggtgccgtggcagctacgagcccatgtgcttaatgg

SEQ ID NO: 58961 - DNA, 453 bp, Zea mays
  unsure (1)..(453): unsure at all n locations
ccagtaagnatgctacattaacaacgattgtcttattttctcgataaaagcgacattactttaccaagatggattgatatgtaccagcatactacatgagaaactttactctcatacttgagactatatgagattactaagataaagtgttagtctcaatatagtcaagatatacagataagcttcccctaaagatatgcttccagaaattaatagaattggatatatgcactcacatttaaagacaaatagggagaagcattactcatcttgatcaaggcttataaaatatgcaataaacaatttatgcctagtattctcacaatgaaaaagatttagaatgctcacaaccacaccattgatgttttgaggatcttattatacaagtaggtgttgacagtcttgatgtcctcccttttcatttgagtgtactaccttgtagttgacttcttt

SEQ ID NO: 58962 - DNA, 424 bp, Zea mays
ggagaacacgtgatttgtctaacttatgttcatttcgaaaaagatagaccttgtgcagcttgtcaagcagggaaacaggtgggaggctctcatcacaccaaaaatgtgatgacaacatctagacacctggagctgctacatatggacctcttcggacccgtcgcctatctgagcatatgaggaaggaagtatggtttaattattgttgatgacttttcccgcttcacttgggtattctttttgcaggataagtctgaaacccaagggaccctcaagcgcttcctcaagagagctcaaaatgagtttgagctcaaagtaaagaagataaggagcgacaacgggtccgagttcaagaaccttcaagtggaggagttccttgaggaggaagggatcaagcacaaattctccgctctctacacaccac

SEQ ID NO: 58963 - DNA, 335 bp, Zea mays
ttctaaagctctctatgggcttaagtcagctccacgtgctttgtatgaaaagcttgaggatttcttgctttccaaagacattcaaattgggaaggttgacactactctattcactaaaagaattggcaaagacttattagtttgtcagatctacggtgatgatattatttttggatctactaatgaattattttgtgaggagtttggacaaatgatgtctaaagaatttgaaatgtctatgataggagaattgagcttctttcttggccttcaaatcaaacaattgaaagatggaagttttataagtcaatcaaaatattttgaggacatgctca

SEQ ID NO: 58964 - DNA, 438 bp, Zea mays
  unsure (1)..(438): unsure at all n locations
agcttggctgacatagtaganaagtggttctatccttaaaccgactgagctggtttccaaaaactagctgagctggttttaaaactggctgagctagtttttagagaactgaacacatcttggggaagtctgagtggagaattcaagcagcttttccaagagcattcatgataaaaaatcaaggtttccttagaggaatttgaagagaattagactgagctcatcacaacaacttactcatattttgtggatccctcttacttgaacggtgaatcctacgactcaagaattataaaatttaaatggtcttcattcataagcacttgaatcacaccatatgatgtatatatttaatcctcagtgctttaccctttctatacatatggaatctgtgctcctcgtgtctataaaataattgtatacatgctaggagaaaac

SEQ ID NO: 58965 - DNA, 459 bp, Zea mays
  unsure (1)..(459): unsure at all n locations
tctccactggaagcgaaagcggtggactcatgcgatgatgtatcataccagcgcgacccgagacgagattctcggtgtgaaagaggagaaagaaataatctcctncaggaggaaatggaaactccgaccagaaaagtcaagatactccgagcggcgagattggactccggcgacgacgcatgagtgaccacaaccgctatcgtgggtgggtgggccggcctagcgaatggatttcttctcgctggtcgctgcaaggcagcagcagaagaagcacagcacggagcagatctgaatgaacaggcagaatttatgagtggtcctgccacctaacgcaactcatctccacaggattctcgccgcagcgatttatttcgctcgccgcacggcaccttccgaaccgagataaaatataaatagatatctttagcagccgattctactactgatcaacgggggagg

SEQ ID NO: 58966 - DNA, 444 bp, Zea mays
  unsure (1)..(444): unsure at all n locations
agcttctaaagggagaacacgtgatatgtctatcttatgttactttcgaaaaagatagaccttgtgtagcttgtcaagcagggaaacaggtgggaagctctcatcatgccaaaaatgtgatgactacatcaagacccctagagttacttcatatggacctcttcggacccgtcgcctatctaagtataggaggaagtaagtatggtcttattatagttgatgattttcccgcttcacttgggtattctttttgcaggataaatctgaaacccaagcgaccctcaagcgcttcctaaggagagctcaaaatgattttgagctcaaggtgaagaagataaggagcgacaatgggtccgaattcaagaaccttcaagtggaggagtaccttgaggaggaaggaatcaagcacgagttctctgctccctacacaccacagcanaatgg

SEQ ID NO: 58967 - DNA, 442 bp, Zea mays
  unsure (1)..(442): unsure at all n locations
agcttgngatctttctttgaattgacatctatattcttttcagtttcaacagtcactggttctcgtacttcttggtcacaagatatcaattgctcagaacttttggtctgcttgtcaagagaagtcagttctggcttctgtttagaagaatctggtgtctgctcatcaccagaagtcagttcttgcttctgtttagaagaatctggtgtctgctcgtcaccagaagtcagttcttgcttctgttttgaagaatctggtccatctggagatttgacattgtcaactggagcagcaccattgctaatggcggttgtcggagtactgtttggactactaccttcttggcctaggcaattgacattttggtctacctttgaagtttcctgacaaataagaaaatataaacttatggtatctacctcactctatagaacattagata

SEQ ID NO: 58968 - DNA, 335 bp, Zea mays
  unsure (1)..(335): unsure at all n locations
ntgtgtggaattgggagaggatatgatcactttggtgtgtctataattgaatgctacagctcttgtnagtagttgaagtgggaaaacttggatgactagaatgtggggtggttggnggtatatatagccccaaccaccaaactagccgtttggtggaggctgctgtcgcatggcgcaccggacagtccggagcgccagccacgtcaccaagccgttgggtttcgaccgttggagctctgacttgtgggcccgcctggctgttcggtggcgcaccggacaattcctgtgattgntctggtgcnacccacacgtgcactcgtcctatgtacgcatat

SEQ ID NO: 58969 - DNA, 448 bp, Zea mays
ggaccttaagttacctgcggcgtgcaagcttggaggcgataattgagtgtctactttgtgtatactcctccttcttttcttccgacgccttgaatgcgacgggttgagcttccgatgtaaatggatcatcaagctcgctgatcttcctcgagccttcgatcatgcactcaaagcttacaaaatgcccgattactttctcgggggtcattttagtatatctaggattaccaccaattaattgaacttgagtacggttaaggaaaataagagatcttagaataaccttgaccatttgatggtcatcccactttacgctcccgaggttgcgcacttggttcaccaaaatcttgagccggatgtacatgtgatgtggctgctcccctttgtgaagccggaaccgaccgagcttcgcctagatcgtttcccgcttggtgtctttgagagctcg

SEQ ID NO: 58970 - DNA, 423 bp, Zea mays
  unsure (1)..(423): unsure at all n locations
tatgaagattcttcattccaacatgggctagtttgcggtgctatagccatcccaagttagtcttagcaactaagcaagtgtcgagttcagctctatcanaatctaccaagtatatctgaccctctaacactcccttaaatgctattgaatcatcacttcttctaaagacagtaacacctacatcagttaatagacagttgtagcccatttgacataattgggatacggaaagcaaattgtaatctatagaatctacaagaaaaacattggagatagtatggtcaggtgatatagcaattttacccagtcctttgaccaaaccttgattccatccccgaatgtgatagctcgttggggatcttggtttttctcatatgaagagaacatcattttctcccctgtcatgtggtttgtgcacccgct

SEQ ID NO: 58971 - DNA, 433 bp, Zea mays
  unsure (1)..(433): unsure at all n locations
tgcgtctataacatgaacatattacttagttctcccatgatttgatcgatcgattgacgggaccggtgttaccattatggcacatatacctcccttgctcggtcgggaagcatatggctcgtgccgtcaaaccgccatgcgtcaacaagacctgtgagccatggtaccgaaaaaaccatctgtggtggcgggtcctgttttattaatgaggtcattcgacgtctacatgactcgagaggtcgttctgcgcaacatatatatacctgccataatactcctactgccgagttcattttgtttgcagtctcacatgtacttaataccctccttctgtattaaaaagtactaatcaagcccgncctcgttttgtctgtgattccacaacataggaggtgcctaagatcagcttaaagctatacatccatatcatcac

SEQ ID NO: 58972 - DNA, 433 bp, Zea mays
  unsure (1)..(433): unsure at all n locations
tgccatgctactaanaactcgtcgtgatcgagaatcagtttttgttgatcgacgacgacgcccggtggttgaagtcgtggtcggcgatgaaggtcatgcagctggagctgcgtgagatcccggtgccggcggccttggcgacttccctgttgacctccctggggttgatgctggacctggacctgtggccgagcgtggccgtggccccgcgccggaggatctcgcgcatggcctcggcctggaacagcaccgggtgcgttcgtccgaagccgttgaaccgcttgcacacgcccatgtgcgccttgagcgcctcctccagcggcccgcccttcttcttatcggacttctccngtcaccgctccgcgcacagggccgagacccagcgccccgcgaaccttgcgcgcacgccgcggatgtactctggcgtgcactc

SEQ ID NO: 58973 - DNA, 434 bp, Zea mays
  unsure (1)..(434): unsure at all n locations
agcttctaagggagaacacgtgatatgtcttactaatgttactttcaaaaaagatagaccttgtgcagcttgtcaagcaggtaaacaggtgggaagctctcatcataccaaaaatgtgatgaccacatcaagacctttggagatgcttcatatggacctcttcggacccgtcgcctatctaagcataggaggaagtaagtatggtcttgttatagttgatgattcttcccgcttcacttgggtattcttnttgcaggataaatctgaaacccaagggaccctcaagcgcttcctaaggagagctcaaaatgagtttgagctcaaggtgaagaagataaggagcgacaacgggtccgagttcaagaaccttcaagtggaggagtaccttgaggaggaagggatcaagcatgagttctccgctcnctacacaccac

SEQ ID NO: 58974 - DNA, 243 bp, Zea mays
tttagaatgttacaaatgtgacgagcatcttctcttccttggacattccgttattcttatggacaaagactctcttttattatgctcaccacttgagcattgctgagaacttcttgcatcacttccggagtcatctcttcttcttgggcgggcttatacatacctacattgacaatctcctcaatactaggatgtacaccgattaaatgcgacttcatcttatcggcccactcgtcatatttc

SEQ ID NO: 58975 - DNA, 461 bp, Zea mays
cggatccttaaggcacctgccgcatgcaagcttatgtggatgatgtggttatttatactcacaactcacaaaatacattgaagatatacagctggtcttcaacagcctacgatgatatcgatggaaacttactcctgaaaaatgcgtcttcggagtaccagcacgaaagttgctcggggttattgtcagccaccggggaattgaggccaatccagaaaagatagacgctatcatgagaatggaagcaccacgatcacagaacaaagtactgagacttaccggatgcatggcagctctaagcagattcatatcaaggctgggagaaaaaggcttactgttctataagttgctcatgaaggtagacaaattccagtggacttcagaagctcatgaagctctatacgcacttaagaaattcttgacaacaccgccagtgctaaaacctccgcgtccagccacgc

SEQ ID NO: 58976 - DNA, 346 bp, Zea mays
  unsure (1)..(346): unsure at all n locations
tctgcgcgttgatccgtncttcgtacgatcatgcgctgtgttctttcacgggatcattcctgggaagcgcgttcaggcccttgggcgactcgaccttccagtctgcttgtggacaccctccaacttcccaagggagaccctgacgttccaagtggtcgggttccgaggaacctaccacgccgtgctaggaggcatgctcgcgaagttatggccggtcccaactacacctacctgaagctcaagatgccgggccccaacggggtcatcaccgtcggtcccacgtacaaacacgcgttcgaatgcgacgtggagtgcgtggagtacgccgaggtccttcccgagtccg

SEQ ID NO: 58977 - DNA, 229 bp, Zea mays
  unsure (1)..(229): unsure at all n locations
cgtcacatcggagtggggacaagaaaaagaagatgaggaaggtggtggactacgagaccgacacctcatcgccatctatcttcagcttcgacgcgccctncgtaacttctaagcgccatgagcgtacgaagtttagtaagagccccttacactaccctcgcacttctagacatactccattacttttcgttccattaggcaaaccgggccaccttgacggtgaagatat

SEQ ID NO: 58978 - DNA, 384 bp, Zea mays
  unsure (1)..(384): unsure at all n locations
gcttcgatttctgaagctggaagatggcctttcagtactatcaaaggatgaattggctgacagtttagcatataatagcatataggtataaaagttaattttgtattttaaaacgaattatttcttctgcttatatttaatcttgtcctcctcttgcagggcttaatccttagcaatgcccttagagcacagaanaacattgaagatgaagggtatacaatggctctaaacaaccttcgttcggaggtgatcgagttaatgaatgaacgccttgaaaaagacacaatatngatttcttcgtaaacaaagtgaaagaagatgaagctagttctcaagctcaagctgagattcaaaagaatgagatcgaagaccttcataaacaat

SEQ ID NO: 58979 - DNA, 431 bp, Zea mays
  unsure (1)..(431): unsure at all n locations
agctntgaccatggcttattaaattagatgttcttgcaccaagcaaaacaaaataagttcaggagtaaacttataactgtcaaagttgttgacgcaaagtcatttcacataatttttttggtaaacattccacacacatgtttacaagaacccaaattntgcaagccgncataatattgtataaatatatagaattctttggagcccacgaacataacaacgccatggccattaaatcaactggaccaagtcagcacaaattttggtgttgcaaaaaccaaattacaaaactttgtggccaaaacattatgatgaatatgaagtttaaattattatcccattaatacttgcatggaatgcgttgctcagcatactatctcacttntttgcttggtagcattttcaaagaatgggaccttgctgatgaacat

SEQ ID NO: 58980 - DNA, 382 bp, Zea mays
agctttacatgaacgaagtccccttccagtatttttgtgctgaacaacactgcttcacagtaaccaaatagtttttttctcagtcacccccatgatagaggtatactgacaagataactgcaagctccagatcaatagatgttttggttgtcgaaaactaatcaacctaacatattttttaacatgcataggggcaacttctaagtcccagcatctaaatcacagtagcattaaaaaactataaggctatgagacatggaacttgcctatgaccgaagcatccaagtgcagttcagagaatttataggatccacttgaaggtcacctatcccagttgctgttgcagtttatttcactgaaacacgattgcaacctgcacggg

SEQ ID NO: 58981 - DNA, 387 bp, Zea mays
agcttcatcagcaatttccttccttttcccctacgctgcggccgcggcctcttcggcggcggtggtagcttcttctgcagccatgtctagcagtattttgtcaatgtgttcgattgtgctctccaggttcaaatcttcagctgaggcagctgcgacctccgaaggtgtgatttcaatatctgtcctttccttagccgctggtgtcttctgagctgaagctcttgtcggtgtcttgtcaattacctctgtcacaccgatgatcctctgtctctttactttagccgagttcttcattttttcgggctccttttccttctgaaaaaactctgtcagttgaggccccaatggacttaacttcccgggcagggattcagcattatcttcaaa

SEQ ID NO: 58982 - DNA, 439 bp, Zea mays
  unsure (1)..(439): unsure at all n locations
agcttgtatatgtgttntctataatgattttatttctggtgtctataattgaggtatagctacagttgttatgatccacatgtggtaaaaatattgtgaacaaatcatagcatgttttgactatacataaaaaatcatatttattggaccacgtctaacctatctagataaatctatgactctagcacatattatccaacgagcataaatttttattaaactctatacgagtaaatttacataagaaactatataatttagtatagaactcacttttgaggctagaaccatactctctataattaattcgggggcatttctatgtccaatatgatgaaatctgatgcaacttaagcttccctaagcttgactgcaactcacctacatctatagtgcaaacggaagtctgaactgggtttagttttcacaatacatactg

SEQ ID NO: 58983 - DNA, 171 bp, Zea mays
ggaccttaagcactgagctgaactgggtccccccatcttgagtttctgggaggcggactcctgcgcgatcgacatacacatggcggaaaccccccctttctgaggatgttttctgcacttgcccgggtgttgcttttttttttggctactccagtccatgatatgatttag

SEQ ID NO: 58984 - DNA, 430 bp, Zea mays
  unsure (1)..(430): unsure at all n locations
agcttgacattgctcccctgttgaaaaccattgccatccttaatgccagggtgtctcccgttataaagcatgctacgagcaaatttataattttcattttttgagctcatgctcgcgcaatttagcatctaatttatctatatgatcattctgtttcttaatcatggcaaggtgatcatcaataacttcaacattaatatctctacatctagtgcaaaagaaaacatgctcaataatagatgtagatggtttgcacacatttaattcttctatcctagagtgtaatctagtattctcatctctaagacatganatagaatcattgcaatcatttaaatctttgaccttagaaactaaactagcattttcatttctaatgctagacattgaatcatgacaaatgctcagctcctcaaataaaatttacatt

SEQ ID NO: 58985 - DNA, 290 bp, Zea mays
  unsure (1)..(290): unsure at all n locations
tattgtgttcatttgagctcttgcgctnggatcgcttcttttcttccttcattcttgtgattcactcaattgtaaccaaggcaagagacaccaattgtgtggtggtccttgcagggactttgtgtcccatttgattgagaaggtgaagctcactcgatctaagtgatccgttgagagagagggaaagggttgaaagagacccggtctttgtgaccacctcaacgaggagtatgtttgcaagaaccgaacctccgaaaacaaatcatcgtgtctcgctctttattccccat

SEQ ID NO: 58986 - DNA, 360 bp, Zea mays
  unsure (1)..(360): unsure at all n locations
cagactggacagngttctgcgatggttcttgggaaccttcgacgcacgagcagctgctggggtagtagcacctttgaaagtcagaacatgttatgcagcccagctagactttagttgtacaaataatattgccgaatacgaagcactcctattggggcttcagaaattaagggcaatgggaataagaagggctattctgaaaactgattctcaagtcatttctagccatgtagataaaagtagcaaggcgagagatccgaaacttgaaaaatatctggatacagttcaaagggtggaggcttctttcgaaggtttctctgtcaagaacatttcaagaggtgaaaatgagcatgcagatct

SEQ ID NO: 58987 - DNA, 474 bp, Zea mays
  unsure (1)..(474): unsure at all n locations
agcttcttgcaaagcatacggctttctagatgtatatgacgatctctagacagatggatcttatatgaatcgtatgatgaagtaccacatgagtggatatatataaaaggaatccaaatccgccgaatcgctcatgttatgatcttctacatcctaggtctccgcattccgtcatctggcttatgttcttcatgtagcattcagatcgaatgactctatgaaattacgtcgatacttccacatattatgggtaacgtaggagacatccctattttcnacccggggtcttaattaccactgcttaactttcaattcgcctctgaccatcaaattaaatgtgaataacccgtccttctctctttgaaacaaagngcgcttccngntctgtgcgtgcttaaacaattttgtttctccatatccatatcttagagtcaataatttctatgaagactactgaactaatcactgctgccg

SEQ ID NO: 58988 - DNA, 432 bp, Zea mays
agcttcttaagggatagcacatattgtgacttacatatattcattttgagaaagacaagatgtgtaacgcatgtctagcagggaagcaagctggtggtcatcattcacacaagaacatcatgacgaccgacaggccgcttgagctactccacatggatctattctgcccgatcacttacataagcatctgcgggagaaatatagtcttgttattggggatgattattctcgaacaacttgtgcggtcttcttgcaggaaaaatcacaaaccccagagacctcataagggatcttgagatcggctcaaaatgagttcggattgatgatcaaaaagattaaaaccgaccaccggacggagtccaagatctctcaaattgacgctttcttgatgatgagggcatcaagcatgagatctctttctcctacacacca

SEQ ID NO: 58989 - DNA, 374 bp, Zea mays
agctttggaatagaacagacaacgccaagaattcattttatcttggaaaatcaccatataactagctttttatgaagcaaatgatgataactacttggcaagaacgaaacaagactggtatccgcctaggatccatcttcaacaacagatagtactgctctcatacgaagaaatcatcaggagtagagaggatacaacaggtctctacaagatcttcatatttctatcacaaattatcatcactagtagtctaatggtcaagacatatggctcttctgccttcgaggaccaaggacatgttaatgtctaatatagcctcaagctctgtggtgatgtgggattttatggctggttttctactcttcttacttctg

SEQ ID NO: 58990 - DNA, 392 bp, Zea mays
  unsure (1)..(392): unsure at all n locations
agcttaagtttataaatgtcatggttcgcctattcacctctctctatgcgactgtcaccccccctcgtccatctctactgttcagtgatatatttattcatcagccgaagatcaagaggagaagcaaccagcaagaccattagctcgtgtttcatcacgcgctacttacttcataggtttgaccccaccatggcgataaggtgatggtctccaacgatgacgaagatgacgatgacaaccacatcccatggtaggatcttgaggaggaggattgacacatttgtatctttttatctttctctctttntagtatttgatgccaaaggggaagaaaataaggggtgccaaatcttgatgccatggtgaaaagcctcatgtcctatctttttcag

SEQ ID NO: 58991 - DNA, 378 bp, Zea mays
  unsure (1)..(378): unsure at all n locations
aagatgcaagctngagaaaacttggtacagnacgaaggctcgaggtcttctttatttgttgnccaacaagaacagtccacgaggagataatgagcacgttgatctattatccaaatcagcggcacaagggctgcctttaccttcggaagtattctttgagacaataagagcaccttacgtggaacttatcgaaagagcagtgctcaatatatcccctgttcatagtgaagattggagaactgagattatatcctttctccagggcaattgtctttcatatgacgaagtttataataagagaattgatgcaagagcccgaccatatgtaataatagaacgggaagtatacaaacatggagtctgttcttcattgctcaa

SEQ ID NO: 58992 - DNA, 359 bp, Zea mays
agcttcttgatggctatatttggtgggatttcattctctgcaatatctatagaaacatgcccttgcgagccattagattcatcaaatgtcacgtctatcgctatttcaacaagaccggtggtattgctgaaaacacgatacccatgcgcatttgatgcataacaaagcaagaaaccctcgtccactctgggagcaaactttgatctcttgactttcttgttaagaataaatcatttacaaccacatactctaaagtaatcaactttatgtttgttaccagtgagaagctccgacgcagtcttcttgacatcttgtgaagataaatcggttgattcatgacacgcggtgttgacccctca

SEQ ID NO: 58993 - DNA, 395 bp, Zea mays
  unsure (1)..(395): unsure at all n locations
gcttgaattgagtatgcatgatttatatgtcaccctattttcgtcaaacaatgtttacaggtaatggcggttatgtcaatgtggactaaattgcaaccagtttatgctgcaaacatgtggaatgaagccctaaacaaatgacttggcactgaggttgtagattactgttaatacttattctccctcattaagtattgggcattcacaagattattttgattcaagctagtgtaaggttaaaacaatgctgaatttctgttaaacctgtgtttntttatattgggcactcttttcatctatttttgtacctatttagttagaataaattacatgcctttactgtaaccaactgctgggttgaaatggcttggctatggtatcgttagggagctcaa

SEQ ID NO: 58994 - DNA, 430 bp, Zea mays
  unsure (1)..(430): unsure at all n locations
agctatggctcttcaagatataagctattctatatttttaaagaanatcacagcaactaaagtttcatcgaataaatatagaacacatataaagatttataacgtcaaatgtgtataccataaatgtaactaatgaagaattgaacaatacttagttaataccataaatttaattgtataattttaataaatttgagtcttaataagtaaataatatttaatttagattagggatagtagttcaacaatcccaatgccttgggtaaaattatctccaatatcatatcctaaagaatcttctatcttagatatagagaagattttttccttataggctctagcagtgttctctaagtctattctaatatagtgacactcatccatatatatatatatataatatataaaaaactctctttcaactattttt

SEQ ID NO: 58995 - DNA, 407 bp, Zea mays
  unsure (1)..(407): unsure at all n locations
agcttctgcaaatcaccacttctttatcttttggaataggaacgttattctcccctccggctcttacaattgaattaacacgaaagtatcttcctctcattgcttcgatccgcccttatttaataggtaattttccgaagacaacatggctcggtcttcatggctgatcttcggcatcttcatttccactttctacatcgaggctctcactatcgctagagttttcagatattccagctaacatctcattggtgatcttctccatgttggttttttccaaagcttcataaaatccagccagcaccgggtcaatgatcttctcatcagccatttgaacaatggtcgctagaatgccgaagctcanaatccaatcaaaatcgatgaagcanggaatgggtaaatgcaaa

SEQ ID NO: 58996 - DNA, 321 bp, Zea mays
agcttctcgcataagggatgatgagcacattgtcttctgcagcacgggcgcactgtttgacaatagactggacaggtgcgtcgcctgcaggatggccctggcgtcgcctgccagcggagtggacaggatgcattaaatgccgagggggcacatcgcctgtcagcagggtggacaggcaacgcgttctctctgcaataaatgcagagaccgcgcggcctagaggccttacatcaggctccgcccgttggcttatgtcatgcgcaacaagccacgtggcagcatctggtctccgcctgagcggggagcgcaagcgcacaagat

SEQ ID NO: 58997 - DNA, 357 bp, Zea mays
agcttgtggaggaccatatcatctaatcattttttttctggaggagaagtgggcacccaagttttgttgatgaagcactataagagcaatcaatgaagggacccatggattagttctcaagaggaaggtttgcgtgtctgcatccatgcttcttcaataagctagctgccaagcgaaacctataagcctgaagatgattctttgagtagccagaatcaacgtttgcaatcggcaaccatatgctcatgcaatgccagattatgttgaagttccatctccttgaagagttgcaaagtgaacatatgtatctgaagtatagctatacccataacccttctaagccgaatctcgaggacg

SEQ ID NO: 58998 - DNA, 481 bp, Zea mays
  unsure (1)..(481): unsure at all n locations
agctngataatcttctggtggcgatccaccgtgaagtgtgctaattacttctccttcgcctcctctaggaccttggtgagttggtggcgtgaatcctcttccacttttactcatgagatccctatattgttgttgctcatcgatcgataggttctcaacagtcggtataagaatttttgtcttgggagatatgtgtgattcttagaacgaccatttgctagtcgattataatagaattagaatgcacttgtcccaagcaaagtggacaaaaagtgtgttggcgccgatttcgggccaaacactagtatgaacctcgaggcggtgctctctgcgagagcgtggacggtccgttatcttgcacctgacaatccgcaatctcgctacaagagctactgctctctgcatgcttccatgatgtctgtgatggcgcagagtcttcttcttcgcagaaacctgaatcttgtctctcgggagagatcct

SEQ ID NO: 58999 - DNA, 484 bp, Zea mays
  unsure (1)..(484): unsure at all n locations
acctgagctgcagctgtcacttgaataataaccttatttttgccttatctgngtaagggtgtgacaatgatataaagtgtgcatattatgagaatgtgtcaactaccaccattatacacttgccatggcgagaaggagggagccctgatatgaataccatgctgaccacctgccaagcattttctggaataggcagaggcaacaatagtcctgtgtactttgtcctctcaagctttgcttgctggcagatcttgacaagcacgaacaaaatcatgaacttgttgctttatgcctggccatgcaaaattagatttaattctacggtatgtgactggaaatacagagaggccaccaatggcacttttatgtagtttcgacataatcaatttgtgtatggccttagttgctcctatccatattccttcccttacaccgaatgatgccctgtgacagagtgtaatgttccattgtttacccgtataca

SEQ ID NO: 59000 - DNA, 314 bp, Zea mays
  unsure (1)..(314): unsure at all n locations
agctggtcatnttattgctaactgtcccgtttatgattgttaccattaacaccggagcaagagggaaaagaagaagcattacaagaaggccaagggcgaggcacatatctgaaaggagtgggattcggattgctcctcctccgactccgacaatgaaggactcaccgccactgtcttcaacaagtcatccctctttcccaacgagcgttacacaatgccttatggcaagggagaaaaaggtatgtaatcaaaacaatgtaacttatgaatcttccagtgatgatgaatctattgatgaagaaatataatactct

SEQ ID NO: 59001 - DNA, 334 bp, Zea mays
  unsure (1)..(334): unsure at all n locations
ggaggcgtcnatagggagcctacttgatgtagacttttctntcttctcctcagatgctttgaaggcaacggattgcaccttgggtgtggaggaggcgcctcgctcgatgatttgtttggagcctttgatcattaactcaaagctcacaaacttccctataactttctcgggagacattagcgtgtatctacgatcaccacgaattaattgaacttgcgtagggttaagaaagacgagtgatctaagaataaccttgaccatttcatggtcatcccatatggtgctcccgaggttgcgcacttggttcaccaaaggtttgagcccggttgaaatg

SEQ ID NO: 59002 - DNA, 384 bp, Zea mays
  unsure (1)..(384): unsure at all n locations
agcttatgaatgaactcaatatcctcgattcttggaacttngattggaatcttacacacattgctcatttatatacctctgatcatgtctctttccttttttacaaatgcatattttttattcttcttgagccaaccctaagactaatgtgcttccatgagtatttctgttattagtcttagattgaaagggaaatggaatatttggcaaaggcaaggcatccactacaactctgctggtatcacttatcctttgcctccctaataaacttccactcatatccttttaccaaagggggagaaaataagaccaaagggggagaaataaaaggcctctcaagtttcttctgtttttgcgaataatgccaaagggggagaaattaat

SEQ ID NO: 59003 - DNA, 374 bp, Zea mays
  unsure (1)..(374): unsure at all n locations
taaaccttctcatacttcttcaccatcctggcagcttgccttctcaaaacactaacaattctttattattttttccccttcggcacccttgttgagccgctcataatcagggtattcaaattttagagcgtacattacccggtttaaccttcgttttggccgggtgccgaaggctgctgtcattaattggactttttttagtgtagatccccagaatttcattgcacatagtttcaatcatttccagccattcttggcaaggctccttgaactatntctcaaacttaaaacgataagggtatcgaacgagttcatatttcttctttgttccctttagcttggcatgcgcaatcacttgacttggagatgtctat

SEQ ID NO: 59004 - DNA, 414 bp, Zea mays
  unsure (1)..(414): unsure at all n locations
gagctngcccttgagcgtcatcttgtggaatatgagatgtcttcccaataatgacatcttcccctgagacccttgtttcctgatacatgaattgaacatatgatcagcattacccctaataaagataaacttgcagcgatgaagttctctacttacaggtggtgcaaggccatcatcatctagtttatcatatgacccatggcgcattccctacaagtaaaagttattagaatatatccaccgggagaagaaaagagaaaactgtaatacaatttcaaaaacacaccatagtattttccctatttggacgaccaaattcctctttgataagtgtgcccatcttctttcctcgtctctgcatatatgaagtttaaatcctcagactganagcagtnatgcactactctacttcat

SEQ ID NO: 59005 - DNA, 422 bp, Zea mays
  unsure (1)..(422): unsure at all n locations
agcttgtggtttatccaatgttaaacaagcaccatctcttaacatagattntctatggataaactcaacataagagatggcattagtagcacaagcactagtttcttatttagcaacccttttatatgtgggaggcaagcgagttgctaaaatagagaaacctcataatatggactaaatttccttgaaccctcatgcacaatatattttgaatgacatggataatatgcatgggtattcaatgaagcctagagggatgacttaatccatattattgtgtgtgtctaatatagaagaatcaaatccaaattaactagatagagaatacgtcacataattttggattgttcaccatataataatattcattcaacttccaattagacctttatttcataatcaacaactgatgtatattctca

SEQ ID NO: 59006 - DNA, 366 bp, Zea mays
agaacacgcgatatgactattcaatgtgactttcgaaacagatagaccttatgcagcttgtcgagcaggtaaacaagtgggaagctctcatcataccacaaatgtgatgaccacatcaagacctttggagttgctacatatggacctcttcaggcccgtcgcctacctaaacttaagaggaagtaagtatggtcttgttatagatgatgatatttcccgcttcactcgggtattctttttgcaggataaatctgaaacccaagggaccctcaagcgctttctaaggagagctcaaaatgagtttgagctcaggtgaagaagataagggacgacaacgggtcggagttcaagaatcttcaagtataa

SEQ ID NO: 59007 - DNA, 357 bp, Zea mays
ctaacaaaaatatttaaatcaaaatttgagcccatgcttagtctggtagagagtgttcatcaagtggcttggcaaagatatccgcttatttgatctttagtatttatgtaagaaatctcgatatcccccttttgttggggatccctaagaaaatgataccgaatggctatgtgcttagtgccgctatgctcgacgggattgtcgggcattttgattgcactctcattatcacataaccaagggactttgggtaaattgtaaccgtagtcccgcaggtttgcctattcaaagaattgcctcaacattgcctgcggcatttactctgtttcgcgtggaaagaccaccgattttcttttt

SEQ ID NO: 59008 - DNA, 409 bp, Zea mays
  unsure (1)..(409): unsure at all n locations
agctttataagccggtaacccacctgtcatgagctgccaccataacagagaatatgtgaatgcttacactagtctatgcaagtctttgggcactggacacccctccccatgtgggcagataagataacgacgtccctgagaatggggaaccgacccacgcccctcttctcatgctgcacccaccggccaccgacgctggagtgaattcaccgaccgtggctcgtttcgccgtcacccacaatgagacgtgtagctcgctctgaagagattggatgtttgtttggtttgatgggtcgttttggcgctgcctgccactgcagtctgcagcacagagatcaatgtgcgttgatggcagcctattgtgggatcccacaccttggcagtccattntatttcatcatcattcatg

SEQ ID NO: 59009 - DNA, 404 bp, Zea mays
  unsure (1)..(404): unsure at all n locations
agcttcttcacctttacttaggtggnatattatctctgcattcctgtangaacgactttggagcttcttcacctttacttaggtggtantttagctctacatccgcgtaggaatgactttggagcttcttcactttaattatcgtactcaatgatgtaaccacaggtttattacaatgtgtcaaaggtttcaccttctcaaattgtgtctaagacaagaatataaagcacaagaagcgaanatacaatagatgcgtgtcaagttcttggtccagcccctctattgctttagtaaatatgcctggactctagaaccataatgttaattgttcgagcttcgtactcctctctagtgtcacactgctactgaacttggcactaccctgaggctgctaactgtgggat

SEQ ID NO: 59010 - DNA, 472 bp, Zea mays
  unsure (1)..(472): unsure at all n locations
agcacctgagctgcagcttgacacaccatntgacatttcacattatatttctgttatcaagaatatttagttcattcctcaacatgcaaaagcgggtcttattaagtggcttagtgaaaatatccgctaattgatcttccgacctcactccttctaaaatgatatctcctttaacaacatgatctctaaggaagtgatgaccgatatcaatgtgcttggtgcgagagtgttgtacaggattattancaattttaacagcactctcattatcacacaacaaaggtaccttttctagaactacgccatagtctagaagagtttgtttcatatataaaatctgtgtgcaacaagcacctgcggcaatgtattccgcttcggcagttgacaaggcaacactatttcgctttttggatgtccatgatactagtgatctaccaagcagatggcatccctcagaagtactttttctatc

SEQ ID NO: 59011 - DNA, 341 bp, Zea mays
aggaaactactacagtttatatgtatttgacacacaattcgtttgaatagtggtcaacttaacattgtacttattaatgtattcttctttctttcagactccaaaccagatagacgacttcgtaaacaacttcttcgcttctggaggtagtggtcacaactcaaatgacccttatatgtgatgatttaagtattttggtgaatctggacgatgcgatagattatgatgtatctgtgatggaattatgagtttgcggtagattgtaatggatatgtaaaggactttggtggattgtgatgtatttgtgagaaactatggtgaaatgcgatattttgtgttga

SEQ ID NO: 59012 - DNA, 384 bp, Zea mays
  unsure (1)..(384): unsure at all n locations
gcaagcctatgaagaatctacattctaacgtggtcttatcngcgangccagagccgacccatgttaatcttagcaatttatcgtgcgtcgagtacacctctatctgaaagtaccaagtatagctgaccctctaacacacccttaaatggctttgaatcatcacttcttctaaaaaccaggacgcctacatcattgaagagacagttggtacctattggacataattgagatacagaaagcaaattgtaatcttaagaatctacaagaaaaacatttgtaattagatgggcaggtgagataacaatnttacccaatcctatgaccatacccttgaattccatcccgcgatgtgatagctcgttggggatcttgtgtcttctcata

SEQ ID NO: 59013 - DNA, 434 bp, Zea mays
  unsure (1)..(434): unsure at all n locations
gcttgaaaagcttcaagattattgtgttgttttatattatacctatggacatgtaatatgaactggactgtgaactcgtctatgaactttataagaagctggttgcattctttctcttcctaagggtttctcacgaattaattatttatttacctaattgtcttgttcaatgatgttctgtgataaaagttgagatgaatttgacgcgcctcgctgccgagagttggtttgaactgatgtaataagaaatgcttatgttccttttagcatgtcaaaacttttgtttctattctagacctncttacttatctacggtgatattgtgaggtgtcttggtatattgtaagcctagaaatggatctatcagaccgtctcgtcgtgctgtagtcggagtattgacactttctatttctatgacataaggctttcccttt

SEQ ID NO: 59014 - DNA, 328 bp, Zea mays
atggacgtgataagtgcctttctcaatggaccaatcaaggaagaggtctatgttgagcaacctcctggctttgaagatagtgagtaccctaactatgtttataaactctctaaagcgctttatgggctcaagcaaaccccaagagcatggtatgaatgcctaagagattttcttatcactaatggcttcaaagtcggaaaagctgatcctactttatttactaaaactctcgacaatgatttgtttgtatgccaaatttattgtgatgatatcatatttgggtctactaacgaatctacatgtgaggagattagtaggatcatgacac

SEQ ID NO: 59015 - DNA, 351 bp, Zea mays
tctatagcttgcttcgcactgcagtggtagggtgtcaataacttggatatctggcacacccttttataacacaatcaagtgaatatagaatacgacaactagagcaaagcatcgacttctctaaacaaccattttaatacttgctgattttggacagcagtacagcagtcagcggttttgctcataacttacaaaatattcatccaaaaatcgtgaactaagactttctataaagcttaagaagtcctctacaacttttgtattatcatcatagttagacttgacatttagaatggtcaaacaatgctagacgtaaattctgtcatgattggacagaattcgactacttac

SEQ ID NO: 59016 - DNA, 269 bp, Zea mays
  unsure (1)..(269): unsure at all n locations
gagcttctattatctagtgagaggggccacctgttctttttatataaacgnccggatagaggctccaattcgccttaaacaaaactaactaagatgttacttatcgagtgtcttcatcacttaaaaagatctgtaccaatctcatggctactacaattcgctaattgatcgcacacatacctgaaatctatatttacacatatgaactccaaatcacaatattccaaaacacaaggtattaccatattcatgaatttattcaaactgtg

SEQ ID NO: 59017 - DNA, 283 bp, Zea mays
  unsure (1)..(283): unsure at all n locations
caagtttcgtccacatcaaagcagttcatacatggagggaaaggtaaaatatattacaaggtatccacaaatttatagagtaatgtttgattcctaaataacaatattttttacaaagataattcagagaatttctctagagttcctttgcggcagcttcatcacttcgtcattgtccattaagcttcggttcattgttctttggcgtcgtcatcctgcacacaacaacagtataaggaaagtgcanatttaagagagtaagcacangtacacatattaccgc

SEQ ID NO: 59018 - DNA, 230 bp, Zea mays
cttaagtcacgagctgcactgatcaattttgcaagttttttgccaaagatatctggttgagccatacaagaaataagctggataccaatgttcaagaaacatcagtgtaatggttaaacccatatatgccaaaacaaaactcgcacaatcttataacacatttatcgtatttattatccgaacctaaattccaaattaacacattctgggacaaataaatgaatcccttg

SEQ ID NO: 59019 - DNA, 468 bp, Zea mays
agcttctaaagggagaacacgtgataggtctaaccaatgttcaattctaaaaagatagaccttgtgcagcttgtcaagcatggaaacaggtgggaggagcgcatcacagcaagaatgtgatgaccacttctagacccctggagctgctgcatatggacctcttcggacccgtcgcctatctaagcatagggggaagtaagtatggtctagttattgttgatgacttttcccgcttcacttgggtgttctttttgcaggataagtctgaaacccaagggaccctcaagcgcttcctcaggagggctcaaaatgagtttgagctcaaagtgaagaagataaggagcgacaacgggtccgaattcaagaaccttcaagtggaggagttccttgaagaggaagggatcaagcacgagttctccgctccctacacaccacagcataatggtgtggagagaggaaaacacgacc

SEQ ID NO: 59020 - DNA, 390 bp, Zea mays
gcatgcaagcttgtgaagggccttcatcctcacatgtgctaagcggtgatgccacagccagcccatgctagtcttagctattaagcatgcatctagaccggcctcttcttttgcaaaaacaactaaataaagcttgacggctaatacacccttcaaagctaatgaaccatcacttcttttaaagacagacacatctacatttgtaaatagacaagtataccccatatgacataattgactaacagatagcaaattatatccaagactctctactaaaaatacaatacagatagaatgctcattatagattgcagatttacctaacccttttaccttgccgtgatgtccatcaccgaatataattgaatcctgtgaattcttattcttgac

SEQ ID NO: 59021 - DNA, 368 bp, Zea mays
  unsure (1)..(368): unsure at all n locations
agctttaaatgttatttagaagccccgagttattgttggtatgatattgaccatgtnagggacctagaaccctgatcttctgccctatgaacttcactattgactccaaaaaccctatattgctggagtcccttgaaggaaaattgtattcaagaccttagattatatacttttattatctttgcatcctcataagcattacatgggcattcatgattatatagggctatatatagagaacgaagaagagatagaatttgaagaagcatgagctacaccaccacctgaagaaccccangccgagaattgtttttattttgacatcttgggagtagagcctaactcacctatatcacaaggcaagcccc

SEQ ID NO: 59022 - DNA, 473 bp, Zea mays
gcaagcttgagcgggaccgcaaggactacaagattgacctcctttatgtgtacgcccgggaactggacgtgacccggaaggagaagaggctggccaacaaagatgtgcacttggaccacaaggaggaggtcatctcggagctccaggcgaagatgaatgcccttaacaaaatcctggaggagcagcaggctgatcagaccgcaactgtggagagcctgcaaaggctgcaacgagagctcgatggcaagggtcgcgacgccgcccttgccgaggagaagctcatggcgaaaggtgaatctttggacaagcgggaggcataccttgctggtcgggcagcggacctcaccaggcatgagaaggatctctcctctatgaaggaaatgcttgataggcgcgagaagtctctggccagcatgagcttgaggcaaagagaaagagccgtgtccgcactttgaggtggcgcacgcgacata

SEQ ID NO: 59023 - DNA, 328 bp, Zea mays
cctgagctgcagctgaagacgcgcccgtcaaatgctacgttcttttttggacaagccattccgcgggcagatcttgagagagcccacgcactggtcctgagacattgtcccgattcaaggatggcctgagcttcagtccccttcttccttgattgctcctgcaaaaaacataccatcaaatgttctatgtagtgatatcctgcaaacacaatgactatgaatttatgtgcgtggaggtggttcaatatttgggacgggcaccaaactgtcttgggccacaaacacgttttttctgatacaatgtttgtgtaggatacaccactgacat

SEQ ID NO: 59024 - DNA, 432 bp, Zea mays
  unsure (1)..(432): unsure at all n locations
agcttgccaatacttatcaaaacagcggcatttaccagcacagcaactgcaaaccatacccataacatggccatttgcatgctggggactggacatgattggacccttcaagaaagctcaaggaggatacactcatgtacttggtgctattgacaaattcactaaatggatagagtacaaactcattgcttccctgacttcagctaaggcagtggaattcatacaagatataatattcaggttcggaataccgaatagcatcataactgacctgngatccaatttcactagttcagagttctttgatttctgcgaacaaagaagcatccagatcaaatatgcatcagtagcacacccaagagccaatggtcatgtagaaagagctaatggaatcatattggaagcactcagaaagaaagtttttgacaagaa

SEQ ID NO: 59025 - DNA, 375 bp, Zea mays
  unsure (1)..(375): unsure at all n locations
agcttgcaagacacaacatttattatttaatttctggtaagtcgaggaaatgacttggagaatagtttttggttctagggacctttgaagttgctcgttaaagtagctcgaagctcgagggctacacccattgggtgcacctatgcggtgcacacgatggagagaagcatcaaagaaagagtatttctgttaacttggcagagggtgcaatcattggtggtcttcatacaaggagtcaaggtttttctttagagcctcgagtcaattgttcttaaaattaactcgagccttgngagcttgtggtggatatatatcccctaggtcctctagcgtggattctgtgcatgggtccttgaagggtctaaaaagtcccgg

SEQ ID NO: 59026 - DNA, 293 bp, Zea mays
ataggtactacatattaatcctcttatattgaaacggaaatgtgcccttgggccatttctagggattttgatgattaaatgtccaacacaagtgcttaaatgataaactatgccaaagtgtggataaggtgcaaatcaatataaaggtatgattctacacttagtacattggttttgtgtactaacatgtttgtctaagtgctagaatcagagaagaatctatggtaaaagcttggttcgaagcagccaaaagtcttgctcagtttgggacaccggacagtgtccggtgcgcc

SEQ ID NO: 59027 - DNA, 196 bp, Zea mays
atcttaagcacctgcagctgcaagctctatgatccatctagagggtgtctatttgcttacgtgtagatacgggtggatagaaacggcgtggcatggtagacaaaactaacttagatgtgactgatggcgcgtatcttcactagcgaaggacgaggccaatatcatggcggctaccaatgactagatgtgtcgcaca

SEQ ID NO: 59028 - DNA, 418 bp, Zea mays
agcttgtcacacaggagttggaagcctccctcctcactatcaaggccttggaggatgagcgtgtcatcatgaaggcaatgtgcgacaaagccctggataaggctgttcgcgatgggcgaatcctgatgaggaggccccgcgtcgtggtgcctgaagacattgtcgccgatgtcgtggccacccctgatgccgcaagccgtccatcttcttctgttgctcctgcagacgatgctttctacaagaatactccagcgcaatgatttgcctgaaaaacacttgtttatcgagttagcatattttagagaaaaagtgtaatgtgagttctgtatgtgtgcaacagttatgtttgaactgtttgttccgtccgtagggtgcctgaaaaaacatccctggcactataaccacgatatttcttttt

SEQ ID NO: 59029 - DNA, 234 bp, Zea mays
  unsure (1)..(234): unsure at all n locations
atgcaagcttctgatccatctatatagngaatagctcttgagcctgtccattttctcttcggctttcctaaaggctatctgacttccatgaacaacaatgggcccttgttctcaatgtatcttcatgcatacatgtgctggatgaagtatttctttgaaagtattaatggtcccaccaccaatgactgcattgtcggggtatttcatatctacaatgtcaaacacaacctgttc

SEQ ID NO: 59030 - DNA, 343 bp, Zea mays
  unsure (1)..(343): unsure at all n locations
tgagctacaagcctcatgaatatgagagaaatttggtgattctttttatctcatgcgcttggattgcttctatacttcattctatcttgcgaacaactcaaatagtactacatggtagacacaccaatcgtgtggtggttctcgncgagatatatgcttctctttgattgagaacaagaaactcattcggtccgacgaaccgtttgacatgaggaaatggtttaaatagacccggcctttgttaccactctatcggtgagtatgtttgctaaaaacgaacctcggtaaaacaaatccttatgtcatacacttatccgcttgcgatgattgtacaccctctatc

SEQ ID NO: 59031 - DNA, 232 bp, Zea mays
gacgtccgatattggactatgcttactggtactctcccctaaagtgatgtaacccatgagaacttttgcgaacaatgaattgtaaccatgttatcctcgttcaaatagatgttgtgttatgacattttctttctgtgtgatataaagcatattgttcgaaattatgaattgggataacagtggtggcaatgtctgtcttcatatggtaactacgtaaagtctcgggcataac

SEQ ID NO: 59032 - DNA, 456 bp, Zea mays
agcttaacaaccatgcacagcaacaatctgtctgtaggggacatgacatcaccttctgccacgcatatcagtgggaaacacagtcacatacaaaatctcagaatttactgttatctcatcttctctgtaactctgcatgaggctgcacagccgcaaatacgtggctgtttggctgaacatctagtgagtagtgacaaacttccactttgccataaaaactcagcactcaagatgattagtagctatagtgtatccgttcaagtttagacacaccatcaaataaagcaattattcgcaggtctaacagcttgcagctcactatatccctctagagacaaccacccagaatgcgcaactcaaccactcagcatcagaacagtcagctctcaacgcaattgatgcctccagggcatctgcatgggtcgcgacactccatcaaatacaataattaatgct

SEQ ID NO: 59033 - DNA, 472 bp, Zea mays
agcaggcacgcgagcgttatatagcatttgtataagacaactatttctcacttacagactaaacccatatagaactggggccaatttaaccacggataatgaacatattaaaaactcaactcatcgttacaacttacaaagatggctctatttgacaagtgtggctgctttccattacactatgagaaacattcaacaacaaatcatcttgacaagcagtaggataagcctgtgggcatagcactaccattcacggtgtcttgatctaaaagcatcatataagggaccttcatgttctctcaacatggatctcacacattcccggaccctctatatagaagtaagacaaccaacatgtattgacgattacagatactttataactggaaccatatcaaatataacatactacaagatggcttacatttgctattcgaaaccaggcgccgcgtcacaccttgctatataaaca

SEQ ID NO: 59034 - DNA, 366 bp, Zea mays
agcttgacattgtctcccttatggaagccaatgccatccttaatgccagggcgtctcccactatagagcatacttctagcaaatataaatttctcattttccaagtcatgctcattgattttagcagttaatgtagctatgtgatcgttttggtgtttgattaaagcaaggtgatcatgaatagcatctacattaacatctctacatctagtgcaaatagaaacatgttcaactgtatatgttaagggtttgcaatcttttaattcaacaatcttagcatgtaaattgtattctcatttctaagattggaaatagaatattgcaaacatctagatctttaccctaacaaatcaattttcattctca

SEQ ID NO: 59035 - DNA, 358 bp, Zea mays
taacatagattctctatggataaactcaacacaagagatgtcatttgtagcacaagcactagtttcttaattagcaacccgttatatgcgaaagacaagcgtgtggctaaaaacagaaaaacctcataatatggactagatttctcttgagccctcatgcacaatatattctgaatgacatgaataatatgcctggttgttcaaagaagtccagagggctgacttaatccatattatggtgagtgtgtaagttagacgaatctaatcccaattatctagattgagaaacgtcacataatgttggattgtcaccataagataaaatcgttcatcttccaattagaccttattcaaaatc

SEQ ID NO: 59036 - DNA, 395 bp, Zea mays
tgcaagcttatgttcggtgacaaagcaataacactctacaaagcaagaacgggttcaataagagccttagcttctacagaagatgaaagtgacttccaagtaacaaaagataccatagaagggaccagacttcaagccatatagcacatcaacaaataccaggccaaaacaataaaatggcgtgacagaaaagttagattgaaaaacatcaagtcaggtcatttagtgcttcaaagggtggctaaccccgatacagtagggaagcttcagctcatatgggaaggccctttcttggtggtatctttgttaagacccagttcttacaggctataggaaatgaacggtaatgacatacccaggtcttggaatgcggatgagcttcggcgatattatgt

SEQ ID NO: 59037 - DNA, 304 bp, Zea mays
agcctctaagcactagatgatgatttgggagctcggatcgtattttttctctgaatgtgtcttggagtgtttggctttgctcttgcaacggatatggaactcacataactcggatgccaatgaatgacgtcggtggggtgtatatatatactccaaccactatctatcacgtggctcgttttgctggcgatgggcacacctgacagttctgtggtgcaccccacaatcactgttcacatgccggtgtgtgccacgccagcacacccattgcggtttggagcggaccaccgttggaaccctttgt

SEQ ID NO: 59038 - DNA, 431 bp, Zea mays
agcctgtgttacaagaacgaaagtgggagcgctgttgtatttctgatcttgtatgtggatgacatattattgattgggaatgacattcctatgctggagtccgtcaaggcttcactgaaaaagagtttttctactaatgacttaggggaagcaccatatattttgggcataaggatctatagagataggtcttagaggcttatatgattaagtcaagatagtacattgacaaggctttgaaatggttcacatggaacagttcaagaaagggttcttacctatgtcacatggtatacaccttagccagatgcaatgtcctgcgacggcttatgagcgggagcacatgagttaggtaccatacgcctcatcaattggatcaatcatgtatgccatgatatgaacacgcccagatgttcatacgttataagtgc

SEQ ID NO: 59039 - DNA, 468 bp, Zea mays
  unsure (1)..(468): unsure at all n locations
agcttgacacaggtatccgcacgttaaaccttattcccatttcttctcatagacaacgcatccccatggatccgcggtcacacaccatcatacttttgttatcaaaaatggatacaaccaattcctgacctcgcgcgagtgctagaaaaatcactcgacttctaccgagatcctgatttagcataacagctactcgacctagcatactagtatccatctcataaggaattctgagctcatgcaactagggtttcaagcaactcctacacttaagtgcaccgtacaagcctacaaacaataagtgtagtaaaatagcatatataaacagttatgcataaaaccggggcttgcctttaattaaacacttangtagtggttgctgggggacgtgctcacttggtgagcattcactggttaagtccattcttctttgtgcactcaccgactgcaccttgtggatgcaccaca

SEQ ID NO: 59040 - DNA, 339 bp, Zea mays
actttgaatagatacagttagtccataaatacatatgccataattaccacacccaatgaattgcagttaaaaatagatttttttatctcatccgattcacgggaagaaaacgaatcatggagccgatccgttcccgtgacaagtgcagcctttagcttgccggcgacttccccgagcgcccgccgggaagaccctttcgacgaccacgcacgcttcgaagcctcacgcagctctcttgtccggccgcgcaccgcgctttctttcttccccttcattagctccttcactgaagccgcgatctcttctcgcgtgaccaaaccgtggccgttgccgcgcgcc

SEQ ID NO: 59041 - DNA, 357 bp, Zea mays
  unsure (1)..(357): unsure at all n locations
cctgangcatgcagcttataactcctaggagtacctattgctattttcggatgcctcgagggcttaaaaatgctagaggaagggtcagcagaatgactgccaatgttcttcactctcaaataagtaggaatgtgttgacttatgttgatgacatcatattgaatagcacacaacaagaaaatcatgttgtcgacttgcaagagatgtctgcttatttcacaccacctggtctcaagttgactcataaaaatgtgttttctgagtaaagaagggcaaatctcttggctgcctggtatcaacaaatggtatctaactaatccaagcaagctcgagctattctttggatggaaccaccat

SEQ ID NO: 59042 - DNA, 302 bp, Zea mays
  unsure (1)..(302): unsure at all n locations
agcttgccttcgctttagtctatcatccgcagtccatctgggtcgtggagtgtgccaatgggaaaatattcacagctgtcaaaaagatgctcctcgatgaanaaaaaggcagatggaccgatttattaccggaggcagtctgggcgctaaacacaactgagtgcagggcgaccgggttcactcctttccgccttctatacggatcggaggcaatgaccccgcaagaaataaagcatgggtccccgcgtacagttccgtcagccgtccccgacgtggacgagccaacttctaaagatctcatt

SEQ ID NO: 59043 - DNA, 452 bp, Zea mays
agcttcgcacctctgaactaactcggctgctttattctttgctgttggccaatagaatcctgacctgaagaccttcccgactagtgttctggaggctgcatgtattccacattgcccagcatgaacctcctccagaaggtgctccccgatagacgggagaatgcacttcatgaggacgcctgatgcaccccttctgtacaatgtctccccaatgagtgtgtagtgagctgactgtctggcaatgcgctcggccgagttcctgtcatctgggtcttcttcattctttatatacttgatgagtggccttctccagtcatcagagtctgactcgggctgatctataatgttgcattcttctgtttgatccattgagatactcggctgcagtatttcttgcacaaagactccgggtgggacctgagctcgactggatcctatcttgatagtacatc

SEQ ID NO: 59044 - DNA, 316 bp, Zea mays
  unsure (1)..(316): unsure at all n locations
gaacaagagggagaagaanannaaactatanaacgcaaagggcgacacatgctcttcttccgactagaagaactataagaaggcaagggactagaagaagaactaggcaaggagtgggattcggattgctcctcttccgactccgacaatgaaggactcgccgccaccgccttcaacaagtcatccctctttccaaacgagcgtcacacatgccttatggcacgggagaagaaagtatgtactcgaaactctacttatgcttcttcaatgaggacgaatctagcgatgaggatgaaatagattattcatgtttttt

SEQ ID NO: 59045 - DNA, 355 bp, Zea mays
ggagcatcagctggagcgttatggggacccacttttgtttagtcttctttcttcacctgtgaagacttgaatgctacggagtgcacatccagtgtggaagaagcgccttgctcgatgatattcttggagcctttgatcatcaacttaaagctcaccaaatttcctattactgtcttaggagacattaaattatatcttggatcaccactaattaattgaacttgaatgggattaagaaaaacgagtgatctaagaataaccttgaccatattatggtcatcccactatgagctccagaggtgggcacttggttaccaatgttttaactggtatacatgggttgcgggcttttctt

SEQ ID NO: 59046 - DNA, 297 bp, Zea mays
  unsure (1)..(297): unsure at all n locations
agcttgtgaaggttcttcatccncacatgtgctaaacggcgatgcctcatccagcccatgctagtcttagcaattaagcatgcatctagaccagcctcctcttctgcaaaatcaactaaataaagtttgttgtctagtacacccttaaaagctaatgaaccatcacttcttctaaagacagacacatctacattggtgaataaacagttatatcccatattacacaagtgactcacagacaacaagttatatccaagcgactcaactaagaacacattaaaaatagagtgctcggat

SEQ ID NO: 59047 - DNA, 319 bp, Zea mays
cagcttggcggaaagacagctgtctgagctgtctagtccttgctgacgtcctcttgcttccgtaagggggctgagagccgccgtcttcatatagcgtgcggagcgccatcattgcttgtctggcggagcgagccaaatgggacgccggtcttgtttaccgtagcctgaatcagcttggcgtaaggtaatgatggcgccccctgttgacgtggtcggtccgtgccctatgtagagcgatgtggaggctcctccgaagtcgacgtctagtctgtcttccgaggcccaggtctagtccgaccccttggtctggcgaggcgga

SEQ ID NO: 59048 - DNA, 360 bp, Zea mays
  unsure (1)..(360): unsure at all n locations
gcataattatacctttgatatctcctcgaactgtcaggtcattcttcacataaaaccattatgtcatccagtcgccaggccatctctttcgaaaggttggcacgggacagcttgacccggatcgagaaacgaagctatatcagccaaaattattgtgatattgttccttaccccaaggttttgtntcgtatgataattcgtgtatattgcagaaactttttgcatcaggctataaaccttgtggtctcactgcccacacgaagatattcacccttataatcgcctcgggggtaagattgttgaagatatacttctaatattnttagcacctctacgacaaactctctcaggggagatcgt

SEQ ID NO: 59049 - DNA, 303 bp, Zea mays
gcttacccatgatgaggcatgtgaccagtttaaaggttctcagtcatcaagctacattcgcgataatccttaattaacctgtgatgaggacatccttcactattacccgttggcaaagacgcaattggcccagttgacccaattgtagtcggacagcgaccgtgtgagcctcataattatcccacctcgcttaacttgggaggaggaaaccactttgaaatggagagtcacccttcccccattgaactagtcttttggggcgattgggcctttccttgagttgggtgtgcttaatgaactgtt

SEQ ID NO: 59050 - DNA, 301 bp, Zea mays
  unsure (1)..(301): unsure at all n locations
ggggaagagnggaagctaccctcgtctccgacgaagaaccaaccgcgccgggagaataacctcttcagcgggaatctcgccgacgaaggaaccgacgccgaaatattcggcgacatcatgaagccagagagcgggacccagcgcagcctgtgtcacgagatgagatctcggagatgggagaaaccccagaagaacgggtcttcagggaaagaaggaattcccgacgacgtgatcgtcggcaagctcaagagcaggccgaacaggaggcaagacaatgccgagagaacccctctctcggacg

SEQ ID NO: 59051 - DNA, 291 bp, Zea mays
taaataaagagagagttgcttgacatatgaacattcagacgactgggtctgtccatctatatttaaaacatgtttcttagtagaaagttctatttttggggggagcctgtccagggctggcacaaaagtagtagggcgtggtttataggatgaacacgtatcctgccgcaagcttggtgcaccaaacgtcactagcgccggtcccggtcaagcagcagcccggaacgcagaacattcgcaatcacatggcggaacagcgctcaccatccacggtcgggacggacggcatta

SEQ ID NO: 59052 - DNA, 263 bp, Zea mays
ttttattttaccctttggggaatattgtatcactttaaattaacctacagactagccacaaaattgagacatgaaaacaatgaatgaatatagtttacatagacagagaataacattatgaacattttgcaatttgaaccaccctatttggagttcatatgcgaaagatatgaaatttacaagttttagaattcaaaacactaaattatctatttctgtgatttaagtaaagtccaggggtctctctgcaagaaaacagggac

SEQ ID NO: 59053 - DNA, 314 bp, Zea mays
tgctaacattccacctgtgatgttgagcgtgatctacacatcgcaaatacatttccacgcgctgaggtactctttcacattgcccataccgactgtggatgattaagctgtactcatattgaggtgatacccatcaacttgaagaattgagtccaaaaagaacttatgaagatcttgtcttttgtactcacaatagacttgggaaggccatgttatttcaccatctgatccaaaaatatttgagcaacaaatggagcctagaaaggatgtttaaaggcataaagtgcgcatacttttagaaacgatcaaccacc

SEQ ID NO: 59054 - DNA, 181 bp, Zea mays
cacctaaaaaaaaaaggataacccgagatgaaactaacagcttacccataagaaaaacactaaggatgcggaaaaaggatcgagaagggttacaaaataactatatttgcaaaaactataagggatctacttcaacttaacgccataagattataacctattgcggtactaatacaaaaca

SEQ ID NO: 59055 - DNA, 419 bp, Zea mays
aatattaatgcataagccttgaagaagtccctatctctgaaatgcttcatatacatccttcctcaccagtcctcttgagccagcggctatgattctctgtaagagtatgtggcaagaatgtgtttcacgtttccaaccacacttgaaccatcttcacttatgtatcttgctaggttatcccgcaatccatcaagaaacttgatacctttgaggaactagcaaaacttgactctctgatccttacccaacacatatggagcatgtggagccctgcacaccgaagtgccatcattgttgcaagtgcagtctatgtcttatgcccatattatacaaatctactcttgcattatgtgtgtccatagacttgcctggatactaaatagtgtgcaaagatatgttacatacattttctctatggc

SEQ ID NO: 59056 - DNA, 270 bp, Zea mays
tcgcacctaaaactcagctgcagctacaacctctagacgaggttttcttgagagcaatacatctctagacagtgcggccgtgtctaactgcggaaggatggacaagcctgtcttggtaagtttccataacacactaccagccattggaaaggctcctttgaactctctgggagaaggtaggaccccttaatgtgctcaaccgagaagggaaaattggacctacttggacttgaacaaggatatgtagagccttttaaacctaaaatgcta

SEQ ID NO: 59057 - DNA, 290 bp, Zea mays
cgagatcgacctcaccggacttcggtcttccgccggcgcgcgtggaccgagctattcagtgagtctccgaccgattccttgcacccatatcttctctggcatcccgtgaacctctctgacccatccaattgctctatctcgccgtgaccaggccggactcctcgccgtcgacgagcatccccgcctgctcgcgtggaccgaccgactccggccatcttcgacggcgacccgcacaccgttgtgatccccgagacctcccctacattctcgaccacttcaccggagcaatc

SEQ ID NO: 59058 - DNA, 303 bp, Zea mays
actcaagcttcagctccatctatgttatggattgctattgagtcagaccatttttcttctgcccttctggcagcttcctgacttccatgaatatcgatgggtccttgatcccaaggtatcttcatgctaatatatgcatgatgaagaaatgctttccaagcattgatggtgccacgaccaataattgcaattgtagggtatcccatgtcaacaatgtcaaatacaacttgctcagttctatcgttgttgatgaactccaatgtcactgacatagtgatcttgcccaatgctacaatctgtttc

SEQ ID NO: 59059 - DNA, 394 bp, Zea mays
  unsure (1)..(394): unsure at all n locations
gagcctgngcagggatggcgagcggcggagctcgcctttcacggcgaacttccgtgatctctggctcggacgaagctcgaggtgtgcggtgccaatggctaatgcctcttggacgcatttatatgcgagggcacggcacaggcgcacagggcggggcgaccacacacggtgcgcgcgctgtcgcggtcagtccgcgctcggccggncaggcaagcgatcgaacacgtggctttttgcttctgcccgagttcaagcgcccatacgttgaagatcttcgcgaatttgggcgcgatcgctgcacaagatatgctcccccgacagagctatgtcgtttgtgtgtggaagaccaacgcgttggggcagtgtacacacagttgtcgcttcacacaggtgg

SEQ ID NO: 59060 - DNA, 316 bp, Zea mays
ttgagaaaaacctatatctctcaagaacggctggcataacaatccacccctgaaatttgagccttaaggacagatccttatgataaccattcatgacaatagtgaaattttaagagcggcgtaattatgtccatcgttctagagatggcttaatatatgaaccatctcaataaaatgggaaacgagacggtggcatatacattacatgcactctcgattaaggagacggcggtagaaccacagttgggacaccattacaatctatagacataaataccacccattcattttattatcagctgacagtctagaaaaa

SEQ ID NO: 59061 - DNA, 317 bp, Zea mays
  unsure (1)..(317): unsure at all n locations
tatgttgagcaacctctcggctttgaagatagtgagtaccctaaccatgtgtataaactctctaaggcgctttatgggctcaagcaagccccaagagcatggcatgaatgcctaagagatttcttatcactaatggcttcaaagttgaaaaagccgatcctaccatctttactaaaactattgcaaatgacttgtttgtatgccaaatttatgttgatgatatcatattttggtctactaacaaattaactcgtgaagagnttagtaggattatgattcacaaattcgagatgtcaatgatgggggagttgaagtat

SEQ ID NO: 59062 - DNA, 396 bp, Zea mays
acatggcaaactttgactcactggtcttcagcttcttcatcctgaataaatcaaagcagtatgagaaaagcgcaaatttcaacgagaaggtaaagtaacaggcacaaattttttttccggcttaaggtgctttcgagcttcgtcaccagccatttttcgcccgcccttcatccaaatttgcattatgaatctattttctatgctccaagcttggctggggatatcagttaaatctgccggtgacaagctgaacgttggtctattaacaattttcccatgcgtgcagccagatttcatgaaagcaacagctgtgccccgagaagctagcatggcacagatatcgccgtgtccagctataacttcatcaagagcatcaacttccccctcaatgtgttc

SEQ ID NO: 59063 - DNA, 385 bp, Zea mays
  unsure (1)..(385): unsure at all n locations
aacncagcntctaagggagagccattgcagaggaacaaagttatctttagaaagacaggacttgtagcgcacgccacgcacggaagcaaggtggagtccatcatccacacaagaacatcatgacgaccgacaggccggttgagctactccacatggatttattcggcccgactgcttacataagcatcggcgggagtaagcactgtcttcgaataacggacgattattctcgcttcacttggggattctttttacaggaaaaatctcatacccaagagaccttaaagggaatcttgagacgggctcaaaatgagttcgccctaacgatcaagaaaataagaagcgaccaccggaccgagttcaagaactctcancatggaagctt

SEQ ID NO: 59064 - DNA, 364 bp, Zea mays
aaaaacaccgagcacaactgaagctgctacccgtgtttacccccttgctgggcattcaactctctcgagcaaatcgcggcaagaagacactcactatgcgaatcataacaacgatggcgggctgctacaatcttctaacagacccccacagagagccaagcgctaagaattggcttagcactcagcaggactgcccctcttctaagagcgataacttccctctacccaacagagagaacacaagagagggaagaaatattgatccaatggtgatggacgcgtggctcacttgagtcttgttgagcgccaggaggccctttataatctaaagggctaagatccgtggaacctcatttgaagcacc

SEQ ID NO: 59065 - DNA, 343 bp, Zea mays
  unsure (1)..(343): unsure at all n locations
cacaaacaactggggggaccgaactttaaattctaaccacaactcgctagctcaactctagctggaaccacactggataagaggaagcactcgaacaatactataattaacaaaaacactatcancgcaccgctggaggaatagccaacatatctcaaagacctcctctctctctgtcctggacgcttctcgtacgccatgggtaacacgtacgcctttacctgcagcacgccctttctttcgtttctatccgtgcgacaacaccaagtcgagtacatccaaagcaggctctcaactcccaatgatggnggccgcttcggagccagctccaagacatatgaac

SEQ ID NO: 59066 - DNA, 260 bp, Zea mays
acatatgcagggataagcggaacaagtctctgcaggcatatcctttaccaataaaagaaccatgtttcgacacaacacatttatttgactcaagaacaactttgtatccatctcgacatagcatagaggcactaacgagattcttcttgatagagggcatatgctgcacgctcttcaatggcaccgccttttccgaagtaaacttcagaatgaccgtaccaacaccaaaaacatgagcacgcgacccatattccattaac

SEQ ID NO: 59067 - DNA, 406 bp, Zea mays
  unsure (1)..(406): unsure at all n locations
caccgaaatccaaaccttccacttgcgaatatcccttggccacaagccgggctttgttccttgtcaccacaccatgctcatcttgcttgttgtggaagacccacttggttcctacaacattntggttaggacgtggaactaactgccatacctcgttcctagtgaagatgttgagctcctcttgcatcgccaccacccaatctgaatcttgtagcgcttcctctaccttgtgtggctcaatagaggaaacaaaagagtaatgttcacaaaaatgagaaacacgagatctagtagttacccccttttgaatatcaccgacgatggtgttaacggggtgatctcgttggattgcttggtggactcttcggtgtggcgggcttggaacttgttcatcttcctcatcttg

SEQ ID NO: 59068 - DNA, 439 bp, Zea mays
  unsure (1)..(439): unsure at all n locations
ctaagggagagctcatcttatgactaaccagatgacaatttgagaaagacacggtttgtagcgcatgccaagcaacatagcaagttggagcccaccatccacacaaaaacataatgacgactgacatgccgctcgagctactccacatggattcatgcggcccgatatgcttacataagcattggcaggagtaagtaatgtcgtgtgattatggatgattattctcgctgcacttacgtgaactttttgcaggaaacattactaacccgcgagaccttataaggattcttaacatgggctcaaaatgagttcggattaaggatgaanaagataacaagcactaatgggactgagttcaagaactctcatattgaatgatgtcttgaagaggacggcgataagcatgacttctctgatcgctacacacttcaacaaaacg

SEQ ID NO: 59069 - DNA, 307 bp, Zea mays
cggaccctaagcaacgcggctgcagcttaccatttatttttacgcttctcttttctagacctgcttggtgccctagcgaccttatcgccgcatgcatctcattggagatgaaagccatctctttattcttgagttccgcagtcttggattgtgccaccttgcgttgatacggctccctgctattcattgccttgagaacaacatgtatgtgctcattgaatggaccactcaatgcgcaggccacggatcttgtctacttgatcattattcgcccgctcaccaacactaccaagaatctcctctggcg

SEQ ID NO: 59070 - DNA, 355 bp, Zea mays
  unsure (1)..(355): unsure at all n locations
tctatagggagagcatatcttttgactaacaaacgttcatttctataaagacagggnntgtagcgcatgccaagcacgaaagcaagttgtgtctcatcatacacacaagaacattatgacaagtgacaggccactggagctcctacacatggatttattcggcccgatcgcttacataagcatccgcgggagtaagtactgtctagttattgtggatgattattctcgctccacttgggtgttctttttgcaggaaaaatctcatacccaagagaccttaaagggatttttgagacgacctcataatgagttcggcttaacgaacaagaaaattacaagcgacaatgggaccgag

SEQ ID NO: 59071 - DNA, 354 bp, Zea mays
tgccgcactcactgtatagtgcgaagctgtcacatacaatagcagaggagcccctggcgcgggtggagttaacaatggtagaactatcaagtattgcttcagctcttctaaggctttctgctgagctgatccccattgaaagacttcggtcgacttcagcacttcaaagaatggtaaatttctctctgctgatctagaaatgaatcgattcaaagatgccagtcttcctgtcagccgttgagcccccttctttgttcttggtggctccatcccaaggatagcttcaattttatttggaatagcttcgatcccttttgttgaaactagacaaccaaggaattttcccttttttac

SEQ ID NO: 59072 - DNA, 477 bp, Zea mays
tttatagtgtgcttagactgtctccagcggcaaccttaaaatatgagacatggaactgtagatgacaccgttcgagactatttgcagagtaaagtttaaaatagttcagggatgtaatagaggatctactggagatagccttacaacatattataattttctcataaatggtgtgctttggtaataactatttcacgtttgcaaaccgtaataggtgaattaagctacatcatcccattaaccgactataaaaaaaaatctgaacccatccaatctagtacttttgctgttgataggcatctgaatctcaataacacagaaaaaaaaagtgatgtggacaagaagcgacataacataggggaaaaaaagattctacacacaatctgtattatatgagcggtgtacgtgatggttcttttcggtagcctcatcatgacgaatggctgcaacgacgaagacgaccacgggacatggata

SEQ ID NO: 59073 - DNA, 461 bp, Zea mays
  unsure (1)..(461): unsure at all n locations
ctgcagctttgactaacctttatatcatgtggtttatgtaaagattgcccgtagcatgtgcaaagtagcatgtcatatctcataatgggtgaacgttgtcagcgtgtagagaagaccatactcctggatgatgtcaagatgtctttaagaaactaaagaaaaaatcaccagaggatggctatttgtggacacacggntccatgcnccatgctctaaggacctatttgcctctgacaaaggtaaaggtccactatgatagagaccttgatagatggcataactgttaatgaggattgtgcccattatggaggcgaaaggtgtaccaaagaccattgtgcaaagcatgccaccatccatgtagctatgacanagggcaacatgtgtatctgaggccactatgtggcatatgtcaccattcttgtagccatgtctaaacatgcttaatgtattgacagcattat

SEQ ID NO: 59074 - DNA, 226 bp, Zea mays
  unsure (1)..(226): unsure at all n locations
tggagtcatatcccacagaaatcatgataccgaaagccgcttgaacctcttcacatggatctattctgcccgattgcttacataagcatcggcgggaggaagtattgtcttgaatacnggatgattatatctcgcttcacttgggtattctttttacaggaaaaatctcaaaacccagagacttaaacggattcttgagaccggctcaaaatgagttcggcttaat

SEQ ID NO: 59075 - DNA, 296 bp, Zea mays
gaccgggtaagcctctgcaccgattcccaattccgctgctgacatcggcctctaccatcaccactgcggaggctcctcgggcaccttaattgaactataccgccgtggtttggccggatcatgagccgccgacgacccccgccgcctgtactcgtggccagggtaggtacgatcaccttcgacgccgaccgcgcacaccgacttgaccgttgataacttccggacggtactgaccaccccgtcggagctctactgctcgcggaagctccatcgccgtaatctatgccgtgggtact

SEQ ID NO: 59076 - DNA, 423 bp, Zea mays
  unsure (1)..(423): unsure at all n locations
tgcaagcttaaccttgtaacgaggattagctgtcttttgttccaaaggtggatggtccttaagtctccttgaaatccttaagggtgaatgcttgagatatatataacatgctctcataagtgcataaaatgtcataagcatcacacttatactatgacacaatgcactttacactctttatgatatagacatggtctcattaacctaattatgtgcacttggcattntagaccacaattttttcccctctctatgcacatatttagggggagcaatctatattggatagaaatggttaatcttaattgacataatctttttaatcatgtctctttcctttggtacatttgcatatttcttatcttcattgtggtgcaaggctaagactaatatgttntcatgagcatctcatgtattaagtct

SEQ ID NO: 59077 - DNA, 366 bp, Zea mays
gtcacctgctgcatgcaagcttcttagggagaacacgtgatatgttttacttacgtgcatttcgaacaagatagaccttgtgctgcttgtcaagcaagtaaacaagtgggaggagcgcatcacagcatgaatgtgatgaccacatcaagacccctggagctgctacatatggacctcttcggacttgtcgcctatctaagcataggaggaagtaagtatggtttacttattggtgatgactattcccgcttcacttgcgtgttctttttgcaggacaagtttgaaaccttagggacccttccgcgcttttaatgagagctcataacgagtgtgagctcacggtgaagaagataaagagcgacaatg

SEQ ID NO: 59078 - DNA, 373 bp, Zea mays
  unsure (1)..(373): unsure at all n locations
ggagtttctacaattctcttacgagtagtgcttgaagactttattgtctccaatacatccattacattaaccatgctttttcttttgggggtcaatgctggacccttatggcttattaggactttaacttttactgaaggacttaaaatttcagatgtccttgttgctttacccttcggatcatctatcttctctatctccggcattatgaccggctcttcaatattccgcacgggagatggctccctggctctcgggaccgaagaggattcaccgacaaacttgggcactatggtcggntcaatatatcgcggccggtgtgtgagaaccttaatcttcttcctcttcggtgctggctcactaagagcggatg

SEQ ID NO: 59079 - DNA, 476 bp, Zea mays
gcttgtcagatgaagcattagggcgtttattggttttctccactcctcttgagaagatcacatgctggccctctttttttccttgacaagaatcaagaagcaacaaaaattacagcatataccaagatgcaaatcttttttttcttaagtatgtagaaggttaaaacattttttagaacaaaactgtcgggtgctagctccattcatatatagatcgcttttctagtttaagtgttctttagatattatgacagattacatatgcaaacctggcctctgtatggtcgagtaggtgagatttccactttcattcatgtgttgtctgactgtgtcatccacattgacaatggggttcttatattgtccttcataattgcttgtgtagccctcttcattttttttcctttgaagaagaatttacacatcactaagggcttgttctgttacatgggatataatccacatggattaatccg

SEQ ID NO: 59080 - DNA, 485 bp, Zea mays
gtatcaaatggacgtgaagagtgccttcctcaatggaccaattaatgaagaggtctatgttgagcaacctcctggctttgaagatagtgagcaaccatgtatataaactctctaaggcgctttatgggctcaagcaagccccaagagcatggtatgaatgcctaagagatattcttgtcgctaatggcttcaaagtcggaaaagccgatcctactctctctactaaaacaattgcaaatgatttgtttgtaggccaaatttatgttgatgatgttatttttgggtctactaacaaatctacttgtgtagagtttagtaggataatggttcaaaaattccagatgtctatgatgggggagttgaaatatttcttatgatttcaagtgaagcaactccaggacggcaccttcattagccaaacgaagtacattcaagacattcttaccaagtttgggatgaaggatgccacacccatcaagacaccc

SEQ ID NO: 59081 - DNA, 468 bp, Zea mays
  unsure (1)..(468): unsure at all n locations
ggcatgacacaaacgtgaatgccatatatctgactcttcatatttataacagaatgcaccagtttattacacacatcatgcagtgataagcggaacaagcctccgcagtcatatcctttaccaacaaaagtaccatgtttcgacacaacacatttattatactcaagaacaactttgtacccatctcaacatatgatataggcactgacgagattcttttgatagaggcacatactgcacgctcttcaatggcaccgactctcccgaagtaaacttcagaatgaccgtaccaacaccaagaacatgagcacacgagccatttnccattaacaaggcgccagacctcccgacctggtaggagtagaacatagaggcatcaacacacacatgaatattggcccactatccatccaccactcacgtgaattacaaactggaagaacagatggtacaggaataccataccca

SEQ ID NO: 59082 - DNA, 292 bp, Zea mays
gttgaatagatctctgataagtcgctccagcgttcttgaggccaaacggcgtggaggtatagcacaaagctccaaacggggtaatgaatgctgtcttttcctcaacctcttttgctaggctgatctgatggtatccagatagcagtctaagaaggacagcatagaacattcaacggtcgaatctaccatctgatctattctaggaagtcaaaaggggtcctttcgacaatgtttgttgagatctgtatagtcgacgcacatgcaccaatccactttattttttttgagtact

SEQ ID NO: 59083 - DNA, 454 bp, Zea mays
  unsure (1)..(454): unsure at all n locations
aactctcgcgagaccgtttcacatttgtttctaaccaatgtatattcattatcgcatgtgatattctatgcatatttactttatttgctctcttgtatggtgtactgtttgttccctaattagaatggatggatgtatgtgtgcttgcaatcgcatacagaacgatccggtcgaagaacccgatgaactcgcacgagaagcccctgagcaacantcacctggtggaggcaagtgtcccttgacctatcttttgcctattcactctgtaattcacctcccgcattacacatttatgcctaaggattgactagcttttgttatccatgtcctctgttaccctattgggttggattattattgtttagctttatgctatcgctcaaactctaatcaatgaacatgatgagattatctatgatacgctgctttcccttctcttaatatgatgttatac

SEQ ID NO: 59084 - DNA, 367 bp, Zea mays
gcaagcttcgcatctctgaactaactcgggtgtattgttcttcgccggccgccaatagaaatctgagctgaaaacccttccgactagtgttctggatgctgcatgtactccacactggcctacatggacttccttcagaagttgcttcccggtggacaggagaacgcacttcatgaggacgcctgacgcgccccttctgtattatacctccccaatgagtgtataatgagctgattgtctggcgatgcgctctgccgagttcttggcatctggatcttcttcattctttatatacttaataatcgggtgtctccagtcatcagagtctgactcgggttgatctatgatgttgcattcttctatttga

SEQ ID NO: 59085 - DNA, 482 bp, Zea mays
gagaacacgtgataggtctaactaatgttcaattctaataagatagaccttgtgcagcttgtcaagcagggaaacaggtgggaggctctcatcacaccaaaaatgtgatgacgacatcaagacccttggagatgctgcatatggacctttttggacccgtcgcctatctgagcataggaggaagtaagtatggtttagttattgttgatgacttttctcgcttcacttgggtgttcttcttgcaggaaaagtccgaaacccaagggaccctcaaacgcttcctcaggagagctcaaaatgagtttgagctcaaagtgaagaagataaggagcgacaacggatccgagttcaagaaccttcaagtggaggagttccttgaagaggaagggatcaagcaccagttctccgctccctacacaccacagcaaaatggtgtggtagagaggaagaacaggacgctaatcgacatggcaaggactatg

SEQ ID NO: 59086 - DNA, 347 bp, Zea mays
  unsure (1)..(347): unsure at all n locations
gtgtgcctaaggactcaaagggtgttagttttggtgatatacttatcatatgcttcttattgtattatatggtgataatgcataattagtgctttcggggatatgaatcaattggtatctattgtgtttgtcctgtaaatgatattcatgtggttttggtgctttaaattaatatcttaatggtgaatagtggtaaggtgatatttctgtggtatatccattaaattggtgtttaactctgaatctgtgcatttgtgtgttatacgcatcacagtttaattattgacataatgtatcccacangtgctacagatagttatgcttcgaattaccctaagtatgtgcaa

SEQ ID NO: 59087 - DNA, 460 bp, Zea mays
  unsure (1)..(460): unsure at all n locations
tgaagccatggtaagtagcataggctaataatatacgaactgactcttgtctagctacgggtgcataggtttcaccaaaatccaaaccttcgacttgggagtatcctttggccacaagtcgagctttgttccttgtcaccacaccatgctcgtcttggttgttgcggaagaccaatttggttcctacaacattttgattaggacatggaactaaatgccatacctcattcctagtgaagttgttgagctcctcttgcatcgccaccacccaatccgaatcttgtagtgcttnctctaccctgtgtggctcaatagaggaaacaaaagagtaatgctcacacaaatgtgcaacacgagatctcgtggttacccccttatgaatgtcgccgaggatggtgtcgacggggtgatctccgtggattgcttggtggactcttgggtgtggcggcctttgttctca

SEQ ID NO: 59088 - DNA, 414 bp, Zea mays
  unsure (1)..(414): unsure at all n locations
tgattacaaaatgacttcgtagctgtaacttcttggagattaaacagttgactgtcgacagcacttgagaaactcttgagataacttttgttaatgtaactgaaacttgtcattctgtgcataccttgtaatatatgcttatccctccattgatgtatgagaaagtgcttgatgtggacgaaatatttctttctcgagctgaatgcgaaaaaacacccttccttctcttcttacgcggcgaagcatagaanacaacattttccttctttgcaaacgagtattttttgtacacgaagctctctctttcaccctttgttgttctttttgccgaaccaccacttatgctttgatgatgatatcctacatatgcctggacgactggctatgaatgcgaatgctatgcatgtatgtgat

SEQ ID NO: 59089 - DNA, 291 bp, Zea mays
tctaattgactcaagtctaactatgggcgcatatagttcaccaaagtccaaacctttaacttgtgaatatcccttggccacaaggtcggctttgtttcttgtcaccacaccatgcccaatttgcttgttgcggaatacccacttgtgacctacaacattttggttaggacgtggaacaaaatgccatacctcattccttgtgaaggtgttgagctcctcttgcattgccaacacccaatccaaatcttctagtgcatactccaccctgtatggctcaataaaagacacaaa

SEQ ID NO: 59090 - DNA, 470 bp, Zea mays
  unsure (1)..(470): unsure at all n locations
atctgaagctgacaagctgaagattggtctggtttcaatgtttccatgcgtgcaaccagccttcaaaaaagccgtagctgtgccccgagaagctaccacggcgcagaagtcggcgtgcccaccaataacttcgtcaagggtgtcaacttcgccttcaatatattctaatgttcttggcagattctcagctgaaggtgtaaatttcgaagagctagcttcgacagagtgaaacacatccttcagccgctgcacgcatcggctgccgaagcttaagcatttctcctgaagttctttaaaggatttctgcaaattngagtatttatccacttcagctttcaggcttgcttcaaaatatttcttttcttgctcgagattttctgaatgacggagcaattcattctttaatatgtcattttcagtctggacttcagctaaagagccttccatggtctgaataacaaaatccttct

SEQ ID NO: 59091 - DNA, 418 bp, Zea mays
cctagctacgggtgcatatgtttcaccgaaatccaaacctttcacttgggaatataccttggccacaagccaagctttggtccttgtcaccacaccatgctcatcttgtttgttgcggaagacccatttggtgtctacaacattttgattaggaacgtgaactaaatgccatacctcatccctagtgaagttgttgagcctctcttgcatcgccatcacccaatacgaatactggagtgcttcctctaccctgtgtggctcaatagaggaaacaaaagagtaatgctcatcaaaatgtgcaacacgagatctagtagttaccctcttatgaattgctgcgacgatggtgtcgacggggtgatctcgttggattgcttggtggacatctggtgtggcggccttgctcatatcctcttgc

SEQ ID NO: 59092 - DNA, 462 bp, Zea mays
acccggcagaacttcaccggagaaccaatatcgttctcgccggacttcggccttttttctacgcgcgtagaccgagcaatccggtgagtcgttcttcaattcctcgcacacacaccttccttgatccctggtgaagctctctgacccatttgattgatcaattgtgccctagataggtgggactcctcgccgacgacgagcttccccgcctgcgcacgtggatcggccgactccgaccatccccgacggcgacccgcacatcgacgtgacccttagaaccttccctacaccctcgaccacctcactggagcagtctcgccaccagtaagcccctccgccctttcctccgtcgcgggaactggttaattggtggaaggacctccggttatgtttagtggaactccatgggggtttctgaactatcagtggcacatttgaatagtaaccaaggactagtctgta

SEQ ID NO: 59093 - DNA, 418 bp, Zea mays
  unsure (1)..(418): unsure at all n locations
gcagctntgaatgtgtcttggaatgaatatcgtgtctctgtattgaaagcgtatgtgtagaatgctcggttatgttgaatggaagtggttggagttgtatttatagccaccatccacttcctagccgttgctccttttctgccaaccacagacggtccgcgctcctggtctggacagtccgcccctgcacatcaacgactgagatcgcaacggtcagcaataacagctatatcaacggctataagtgcattaaatgcgtcatcagatgtcagacacatcagttgcgaattgtatacgtggaggtcctgcacccttcagggggtctagactatgtacatggggtgtgggacccacccatgccgaggggtctagacttgttggtgaagtcctgagcatataccaccctgacacgtagtag

SEQ ID NO: 59094 - DNA, 359 bp, Zea mays
  unsure (1)..(359): unsure at all n locations
ttgtaaaatcaactaaaataaagttggcgtctaatacacccttaaaagctagtgaacccatccttcttctaaagacagacacatctacatttgtaaatagacagntataccccatggtgcataattgactaacagatagcaaattatattccagagactctactaaaaacacattacatatggagtgctcattagaaattgcgattttacctaacccttttaccttgccttgattcccatcaccgaatataaatgaatcttgggaatccttattcttgacgtacgaggtgaacatcttcttctcccccgcctatggggtgtgcatcgctataataatcagcttgacgcccgatgataaa

SEQ ID NO: 59095 - DNA, 352 bp, Zea mays
  unsure (1)..(352): unsure at all n locations
catgcacttggtcttagatgaaacctctgttttagttatggagagcaatantacaactcttcgcttccgcattcttttgtgcgcttaaggcgttgctaagtattataccctatatgaaaaaaatgaatgggttaatataagaacaaaagaataatccccaattcataaacttccacaaatataaattttgtaccttcatactgttatatgcaaagctatctgcaagaacgtccttcgtcatggcgtataggccagcttcaagctttgggaaccccatacttctggccatctcccggcagacggataatactttggtgtctgggaggcaatacaagaaaatatctttatctgt

SEQ ID NO: 59096 - DNA, 469 bp, Zea mays
  unsure (1)..(469): unsure at all n locations
actgagcttttgaacgnactaagcacatgtcgggagaagaggattccgttttttctagtacccgagtgaagccgggcgcggactttatccctcatacgacctgagactgggtctcccattctagatatggggggtacaaatgcgggcactgcacagcggcggccggggtcagtggaacattgtatgccaatgcggtgaggcctggacgcgaacggagaatcgatggggacggttgacatgtgtggtgacagagtgccctgacatgtcgcgtgtttaggtttaccttgcaaggctaaaactcgattcgaatcgtctgcttctcgcagctaaagagactgcttgatccattgtactgcattgagtaataagaggaaatgagatgactggaacaagctgttgattgataaaatgtctgataccatgtatgaatagctaggtgcacatctagttaaaaggatcatactagaac

SEQ ID NO: 59097 - DNA, 331 bp, Zea mays
gggctggccatcgggcataccacagggtggagaagaattgagccctcccattctatataattcaggtgactaacgtaccttctatgacataaaataagctccccggactgtagacccaatgtagaaaatgccgagaacatgaatcatatgcgtagatatgaaccctaatacctccctgtgtgtcaggtgctataaaacaacagcttcacttcatttcggtaagtaatcagtgacaactaacacgaatctatgctcttttgatgaagatgcctcaaaatatcccttctcttggtcaaccctttcgatgaccgaccaatcattcttaaactgc

SEQ ID NO: 59098 - DNA, 422 bp, Zea mays
  unsure (1)..(422): unsure at all n locations
gcttctctttcgatagcttcgatgcaactactgtgttcttggcttgagacatcttatcttctgaactgacgaaaatatgttcttaaatctgaagctctgaaaattaaagaaactaagcaactgttggaaagcaagagctaagaaatcaaggaaaccaaagcaggcgtaccaaatgtgctcgggtgggttcttatttatacgctctgcgcgctccaagttggagggccccgtctgtcatcgactgttgctattctagcaaagggaaggtgtttttcggaccttcggcttatggccctcgtccatatcgcaatctgaattcgttattctaacaaattaaccttgcgagggctactgttggnggccttcgtcttccgaaggttctcaaaaacatgatataacattgttttggagataatatatga

SEQ ID NO: 59099 - DNA, 494 bp, Zea mays
  unsure (1)..(494): unsure at all n locations
acctatcaaactaagctcggtattcttatcacaacactatgggtattggtgtgatatatgaaaattcttcttcacgaatcatgaaaagaagggaaggtgtttttttcgtcaaagactcaaaaacggtacgtatgtaaaatttcatgcatcgtaaagaacaagtatattacattcagggttacaagatattacacatattatatttcagaagtttttacaatagcacttagtcttccctaagtacaacttccgcagcttcgttaaggagttgattaacaacttgatccatgatagcttcagccatctttttaatttcatcgtctcctttcgggtgagggcccggagacgctttagtaggatctgaaggagagcaggatatgcctacattactattacaaattgcgaacgaagttaaaatcaaaatacaacacaatanaatcattagttatacctaaattgccttnggctctgcgctttctcagcagctctgtact

SEQ ID NO: 59100 - DNA, 234 bp, Zea mays
gactacgatgacggccataccgtcacgtctccggtgaacaactcccgctgggcttgggcggcggcgccacttaaggatgtttcaccccgacgttattcgtttcttactgagcccaattgagacggcggtgacacgaattgctgtggtgaagtatcgacggtgagatacgcggcaccgcagatcttttggtactgtaccatggcagagatcatcagccgacctgacagcgtgatt

SEQ ID NO: 59101 - DNA, 380 bp, Zea mays
catatgatgatcgccccaagtagcaatccaaaagacccatgagcttcgaagtgggtggcacgtctattcttggcagaagaagactcatactatgggcatgccttaatgagatatatgaactcaatatatattcttcatttcccattggcctttttttcattacaaatagctagtcattatggagaaaatacttctctaaccacttcagcactgagaagcctcttaacatagtctcttgctcctttggcttcatcatttgacatttctcgaagctactgcttacttggtctaatggtgtgatctacattgagagaatgtccataatggctctgttgacaccacatatgttattggctgaccaatcaaaacatctttgttgt

SEQ ID NO: 59102 - DNA, 313 bp, Zea mays
  unsure (1)..(313): unsure at all n locations
gtacatgagggagcccatcatgctcatgtactccttctgatgcacgagctcaccgtccctatcggcatgaagcgccatcgtggtggacatgggcatctaaagaggatctggctcacccatgttgaacctcctcaggacatcctttgtatacttgccttgatgcataaagggcctatcttatgtctgcttgatttgcataccaagaaagaagttcagctcgcccatcatgcttatcctaaactgcctgctcataagatttgaaaacttggacacangagcatgagaagatccaccacatattatatcatccacg

SEQ ID NO: 59103 - DNA, 366 bp, Zea mays
aatgaccctctaaattaacttgaatcacttttatacccctgggataccagaaaccctatatggaaccctggaaaaccctgaaaccaaacccttggggcttatgtacaaaattagcccacttttgggttaaagtgcaaaaaccaagccaaataagtattttaagtcatttggttcacaaatatgtggacttgaaagccaaaccctaagttttggactcatttgcaaaaaggacctcgattttgattcctatgctaagtctgaaaacaaggttgtaggcccaactatggggctgtgtagctttcaaaatagtgagaattcatgttaggtgaccacatcaaagttgaagatcaatcataagagaacaac

SEQ ID NO: 59104 - DNA, 272 bp, Zea mays
tactacgagcaccccggtgcaagaaatataatcctcattctgcctcttgtgttacatcttgcatgaatccatctgggcagggacacgcgacataaaattcactatttggttgagggtcccccgggtccgaaacaccgacatctttgttgctcttgttgcctggattggtttcttcttctcactctaattcttctaaatgctgtgtaaagctacaagagacacctaattgtgtggtgattcttgcagggtcttactgacccgtgtgattaaaa

SEQ ID NO: 59105 - DNA, 401 bp, Zea mays
  unsure (1)..(401): unsure at all n locations
attttatcaacattttctactatatgtatatacagatgtaattgtggacattactccacaactcatcgcactcaatctaagatccaaatcaaacaattatcataagaacaatcactcaagtgtatagatacctaaaaaaatacttttattnttggtcctaagagcaggtctcctattcctaaagggcactttatgcacaggatttcaaagtgtgaaatccacatttgtattttagaagtgaacaggtaagagtaatcagaagtaaagcagcattagatgagaaaagattaaggtaagtttataatagaatcacagtagcacacgttggtagataatggtggtccagctctatctacgtttccgtctacaggcaacattcctctgataccacttctgtcaca

SEQ ID NO: 59106 - DNA, 474 bp, Zea mays
  unsure (1)..(474): unsure at all n locations
tctaagtgatgaatcaatatcacaaattcattatatgcatcttttatttatagttgagcattaacttcagtaaaattcatgctggcatatcaaagtaacggaatggttctaagtatgtcgtccaatcatgtagtacacatgaaatcaagacactaatatttaatgcccattacaaatcaaggaatgtaaagtagttaaatcataaatacaatagagtgattntaattacctcctctcgtcgaggcacccagntatttgaccggagatcaatcacatcacgaaccataaacctcaaacgtggtgcaagctggggattcattngtagctccttcatctggataaagtaggtatcattgatccgccgagaactttggttttcatcaagctgttaccaatcgattgaaaaatgacagatggctaacatcttctctcaggcatgtttttatctgcccagacccaatactctgatacaaa

SEQ ID NO: 59107 - DNA, 325 bp, Zea mays
tctcttagacatagagtgtgtctatacgtcttcatcgctaaacaatggcaggaagccttgtctgttaatgcatctgccacaacattggctttgcctgcgtgataatggatttcagtcataatcttaattagtcaagcctgttctgctatatcatctgactgggaaatgtcttaaactcttatgacttgtatagatatgacacacattttctaccaatagtgacgcctaattttcacggcatggaccacagcagctagctccagatcatgatgtgggtaatgctcttcatgtcggcgcaactgcccagaagcatatgcaattactc

SEQ ID NO: 59108 - DNA, 465 bp, Zea mays
acatgtgctagtcggcgatgccttagctcttccatgttagtcttagcaattaagcaagtgtcgagttcagctctatcaaaatctaccaagtatagctgaccctctaacactcccttaaatgctattgaatcatcacttcttctaaagacagtgacacctacatcagtgaatagacaattgtagcccatctgacataattgagatacagaaagcaagttgtgatctaaagaatctacaacaaagacattggaaatggtatggtcaggtgatatagcaattttacccaatcctttgaccaaaccttgatttccattcccgaatgtgatagctcgttggggatcctggtttttctcatatgaggagaacatcttgttgctccctgtcatgtggtttgtgcacccgctgtcgagtatacaacttgagccgccggatgcataaacctacaaaacagatttagttcttgac

SEQ ID NO: 59109 - DNA, 312 bp, Zea mays
ccttactacctgtataaaagacgcagtacccacgcggctatttttaatcatgtggtaaaggagctgtatgtgggaccaggccatgacttgccccagccttgggcaaatactctgggccagcaacagcacctgacctcaccacatgggcgggttcggtgctcgccacgtgtccagagaaagtgacatactctgaggtatcaccagtgagtccgaacccacatgggaaggtgttggacccctgtatatatggtccgggcctccaaagttggtccaggacctccatgtgtgcgaaccagattcctagaatgggat

SEQ ID NO: 59110 - DNA, 425 bp, Zea mays
  unsure (1)..(425): unsure at all n locations
gttattgaagaatgatgttaaattcaactggtcttcgaagtgtgatgaagcctttgaacaattgaagacattattaaccactgctccggtattggctcaaccggacatcaccaagccttttgatgtatattgtgatgcatcangcagtggactcggctgcgtgctaatgcaagaaggccgagtaattgcatatgcnttaaggcagttgcgccgacatgaggagcattacccaactcatgacctggaactagctgctgtggttcatgccctgaaaatttggcgtcactatctgctgggaaatgtctgtcatatttatacagaccataaaagcttgaaatacatcttcacccagtcagaattgaatatgaggcagaggcgatggcttgagcttattaaggactatgaactggaaattcattatcacc

SEQ ID NO: 59111 - DNA, 371 bp, Zea mays
  unsure (1)..(371): unsure at all n locations
acccacgaaaagcaaatgtaggggcagatgcactcagncgcaaggcttcctgccattgtctaacagtgaggacttctgacattacattatgccaggagatagagaaattaaacctgcgaatgattcagcatgggacttcaaatcatttgaagctggagtcagtcatcttacacaggataattgatgcacagaaagatgatgagggtatgaaacacatacctgagaagaaaaggctagaacagccaaatgtcagagaagaaatcaaggtgggtatggttaacaatcgatagtggtgccgagaatgagagaccgccgcaatttaatgaaccatttagcgtatttattctccggagcctaaatgatatgactaa

SEQ ID NO: 59112 - DNA, 359 bp, Zea mays
cgactgcagcgtgcaagctttgaaaaagggcgagggagagctttgtctctatttatgagaaaacaacacgagaaagatttttatgtctaaaacccttaaacttaagaatgctaccatctacactagagagaataacatcctctaccgcgaaattgcgaaaaaacctaaatacataattgaggctcagaaagtgaattaaaattctaagactcaactcatagcccaccttgatatagagtgatcatttgagatagcaattttacccaaacctttaacctttcctttacgattatctccaaaggtgatactatcataatatgagcaatcttcctcactcatttggggaaacatcttcatat

SEQ ID NO: 59113 - DNA, 224 bp, Zea mays
cccatggtagtcttaactattaagcgagtggtgagtttagctctattaaaatcaactaagtgtagctgaccctctaacactcccttaaatgctaacgcatcatttctatgtcttaaaacagttacggctataatcgtaaaaagaccattagtagcccattttacataattgagaaactgtaagccagggataggctaaagaatctacaaaacaacattggaaat

SEQ ID NO: 59114 - DNA, 478 bp, Zea mays
  unsure (1)..(478): unsure at all n locations
acataatactcagcttctgcttgggtactcncttcgcccctcgctctcctgatgtatttcttcaccctcctcctccagatgtcaacgagtggtaccagcaggcgtatggggtacctttttctacagctgatgacgtcgaagaggaagaaaccttttttgatgatccggagcagtttgaccctcccccatatcgcggggatccgggtcaatcatcctcttaccctccgccccaggacccgtctggcagtgctcctcctccggcccagtctggagaggaacactttgcctacgacctggcgcaacacctctttgctcctcatcaacctcctccccactggtgattcttggcttgacgcgtctctctctctctctctctttttggntcttggggccaaaaagggggagaacgcttattattcattacttctattnttgtaatgaacacttgtgctcgtataactactatttgctgcatgca

SEQ ID NO: 59115 - DNA, 412 bp, Zea mays
agcctttctgcgcataggttcgtgatcatcttatccttcgtcataatcgccctccgtcccactcaagcttcgtgctgaccgtactctatgatactcataacccgagtctgaagatacctgtacacatatctcacatggaaaacattggcaaatcaagttttcgaggaccttctgaagccgaaaggccccaacagtaacccctcgcaatattaatttgctggaacgataaattcatattgcgacatggacgaaggctctaagccgaaggttcgtaaaaacaccttccctttgctagaataacaacagtcattgacaagcgggaccctccagttttcaatgcactaggtgtataaataagagctcaccacgagtttatgtggcacgctttcttggcattctctcttgctcactt

SEQ ID NO: 59116 - DNA, 432 bp, Zea mays
  unsure (1)..(432): unsure at all n locations
gcttatgttgatgaagtggttattaatacagagaactcttaantcttcattgaggatctatagctggtcttcaacagcctgaggcagtaccggcggaagctcaatccataanaatgtgtctctgtagtgccagcttggaaggtgctcatattcattgtcagccaccgaggaattgaagctaaccccgagaaaatcgaggctatcatgaggatggaagcaccacgatcataaaagaaagtgcaaaagcttactggatgcatggcagctttaagcaggttcatatcaaggttaggagaaaaatgcctaccattctacaaattgctcaagaaggtggacaagttccagtggacctcataagctcaggaagctcttgatgcactgaagaagttcttgaccacaccggcagtgctaaagccgccacgcccagccatg

SEQ ID NO: 59117 - DNA, 409 bp, Zea mays
  unsure (1)..(409): unsure at all n locations
agcttgtcgtagccgacttccgttntaagattcttttacaacataataagcataacaaggtcactataacaaagtggaggaagcttaaaggggatgtggcccacactttcaaggagagagttattgaggagggcccttgtgcagaagagggagacgcaaacatcatgtggaggaagatggcgacatgcatcctaaagatagcttcagaagagtttgggttgagtcaaggaaacaaaagggaagttaaagacactcggtggtggaacgaagatgtccaaaaggctatcaaggagaagaaagactgcttacaacgcttacatcatgacaagtgtgcaaacaacatagagaagtacaggatagcgaagaagtctgcanagcgagcgattaatagagcccggggtcaagccta

SEQ ID NO: 59118 - DNA, 298 bp, Zea mays
atttctcacaggcggcgccccgcgcccataaataaagaacagaattcctttactgttcaggcattctgggaattgcaatcgcatctttcggaatccaacctttaccacggcagagggattattggattcaatgagtcatcacatcaaacaaacatgggataatataagtcatttatgaattattcaccctttttatactctttattctacggtggcttacaacatttattggaattttattacgaagaaataagcttccgaatcatattctcggtaacctctcgctaaggctcattat

SEQ ID NO: 59119 - DNA, 305 bp, Zea mays
agcttctgcacccggtgtgtgctatggcttatagacgtgtctcactctatcggagctagctcttcgaaacttacgccttcagcaaagaacctgtcaaaaacatataacatattgaggcaggttgatgcctgacaagttatggtggcacgctgactttggccttggagcttctggggccaactaatgctcttttgaaggctggctgcacacatggaaacactgtgaacagaccacatttcaccctgtcagcttcagaattgctagatatcccaagcttagccagaagcatcggaaatagattcatg

SEQ ID NO: 59120 - DNA, 321 bp, Zea mays
  unsure (1)..(321): unsure at all n locations
tattcggacctatanaaactcagcttggcagttattgctactgtcnttctatgatagcgaccatgatcaagggaatcagagggagaanaagaagaactattagaaggcgaagggcgaggctcatcttggcaggaaggggatcggactgctctctccgactcgaaatgaggactcgccncactgccttcacaagtcattcctcttcccaacgagcgtcacacttgcctcatggtcagggagaagaaagtaaacactcctaatactagtacttatgcttcttcaagtgaggatgagtctagtgatgatgatgagatacaatac

SEQ ID NO: 59121 - DNA, 361 bp, Zea mays
  unsure (1)..(361): unsure at all n locations
agcttcctggcaatctatcagatattggatatggaaaacctganaaccataatcatggacttcatcaagtttgatgtcggcaacgtggtcatggtgaccggcgggaggaacaccgggcgtgtatgagtgatcaataacagggagaaacacaagggcagctttgagaccattcatgttgaggactccgtgggccaccagttcgccacccagatgggcaacgtgttcaccatcggcaagggcaacaagccgtgggtgagcctgcccaagggcaggggtatcaagctcagcattatttaggagcagaggaggcgcgatttcattgtccaggctgcttgcaacgcataagttctctgaacgtgct

SEQ ID NO: 59122 - DNA, 425 bp, Zea mays
tcaatggaccaattttagaagaggtgcttgttgagcaacctcccggctctgaagatagcgagtaccctaaccatgtatataaactctctaaggcactttatgggctcaagccagccccaagagcatggtatgaatgcctaagagattttcttatcactaatggcttcaaagtctgaaaggccgatcctactttatttactaaaactcttgaaaatgagttgattgtatgccaaatttatgttgatgatattatatttgggtctactaacgaatctacatgtgaagagattagtaggatcatgatacaaaaattcgagatgtctatgatggaggagttgaagtatctcttgcgatttcaagtaagcaactccacgagggcacattctttatccaaacgaagtatattcaagacattcttaccacgt

SEQ ID NO: 59123 - DNA, 495 bp, Zea mays
atcttaagacacctgcggcatgcaagacttaataatttcccaggttaaacattgtatacatgtagttaatctaggaaatcctcaattaggttatcccatcaaattatgcactatatcaaaaaataaacattattatatgcaatgaataggtacaaacagagtatgcagagggagaattcacttgccttgctcaaaagcgtcttgcgggtcgtccttcaacgtattcgaatcgcctaccgcacaatcggcttctaatagagtcgcatatcgtacatactaaaataaaacatacacaaataaataaacatgcgccatttcataaacatacaccattatatgcacattaacacgtcacactaatcacatcttaatgacgtactaatcgcgtaatacttattattcaatatagctattaatggaattctattgggaaatatgagtggtgtataaatatagttaaatatattctacatcattaataaaataataatatta

SEQ ID NO: 59124 - DNA, 471 bp, Zea mays
  unsure (1)..(471): unsure at all n locations
cagctcaaattggcacaaatgtcttgacatatgttgatgacatcatagtcaagagtatgtttcacgagaatcattgcagatttacaagagacatttgccaacttcaggaaagcaggcctcaaattgaatccagaaaaatgtatcttctgagtaaagaagggcaaattccttggatgcctagtgtcaacaaaaggaattgaggccaacccgagcaaaatagaagcgatactttggatgaagctgccaaagttaacaatgggtgctcagaggatgataggaagacttgcatcattgaatagattcatctcaagatcaacataaagaaatctatcattctttgaagtgttaaaattagccgaagtcttccaatggggatcaactcaacagaaagctttcgaagatntgaagcagtaccttatatatctgacaaccccgaccccaccttcatcaggagcaccaccactacgatat

SEQ ID NO: 59125 - DNA, 290 bp, Zea mays
ctgattcacaccctctatacatagcactctatatctggtcgtttaatacgtacttctcaaggagacttgatgagaaagaaagaatgtttctagacaagtcttatagaattctttttggaaatgccttatcacctctgcagagatgggctctgcttctataccaattgtgacagaacctactcaggcattaaggccacctacagttgtgcttgtgcaacggacttatgacatccctgacgtgcacctgacacttgacaatttgggatctgaatatctatcctttccagagc

SEQ ID NO: 59126 - DNA, 386 bp, Zea mays
  unsure (1)..(386): unsure at all n locations
gtcgcgagctctagaatcactagaggctgagttatggttgggataggatgatcttctaaagacactggtgattaaaaattacactatattatgtcaatataatgacatgcgggaaaagatatagctgactaaagtttctatccaggttataacttgattacggatttgcctctcatccgattataatttgttagagattaacctacattattggagataatctcctgaatatagaatgaacactcgtgtctgtattaacatatggaatatggtacacatgatgttgctactgcgcananaatatttttatgaacctaacgtgacttgaatggactagatttgagtcacatctcgaaagttatggattaatgaagtgctggagctat

SEQ ID NO: 59127 - DNA, 204 bp, Zea mays
ccaccaacaattgcattgtaaagaaattccatggcaacaatggcaaacacaacttgctcaattctaagtggtgttgatgaatccgcagggcaccgacatggtgatcttgcccagtgctacaatctgtcttcctccgaagccacagagaggattgtgtgcatcatgaatcttatcttctaactcttgcatttgtctgaatgcttt

SEQ ID NO: 59128 - DNA, 469 bp, Zea mays
  unsure (1)..(469): unsure at all n locations
ttaatatgtccttggtccttggctctctattattcataagtcttgaccacgagattgtaagtggtgatttgtgatagaaatatgaagatcttgtagagacctgttgtatcctctctactcctgatgatttcttcgtatgagagcagtaatatctattgttgaagatggatcctatgaggataccagtattgtttcgttcttgccaagcagttatcatcatttgcttcatcaaaagctagttatatggtgatatttcccagataaaatgaattcttggccttgtctgttctattccaaagcttctctttttgctgaacaatgaagagatcgaaataatgctatatagaacaatttggtatataatatgaggagaaatgtttgccctgctggcaacaccacanataattaactggtgttataagttctctctcacaattattatacctagaaatggtgcataaatcgatac

SEQ ID NO: 59129 - DNA, 351 bp, Zea mays
tttattccccgctcgccaaccgagaaatcggttcgttcgaagatttataaatgagaattgtttctccaggtaattatctatagcccgggaatcaagtgttcataccatggatgaatatatttgatttcaaatcaaattgaacatgtaacaccccaagtgttacaaagaccatggttacatttatgcactaatgactgtgatcacatgtggaaaaaaagaagaacataaaaccttggaaacatgggttagcttagaaaagattatggcaaggggtttaaccacacaattggtacaattgtcatgaggacccaaggtgattaaaccctaatgacacctaagagcactatactt

SEQ ID NO: 59130 - DNA, 499 bp, Zea mays
  unsure (1)..(499): unsure at all n locations
aactaagctttcaggtgttaaaggttctcaacacaccaataaaaagaccatgaattgtgttatataaaaagagcaaaagacaaccaaagtgtgccctggtctggcgcaccggactgtccggtgcaccaccggacagtgttcggtgcaccacggaaccaaactctgaacttgccaccttcgggaattctgggagccgctccgctgtaattcaccggactgtccggtgtagcactggactgtccggtgtgctagtggagcaacggctacttcgcgccaacggtcgtctgctgagagcagttaatgcgttgcagtgcgcgcagaagtcatagcaaagccagaaggcgcaccggacagtgaacagtgactgtncggtgcaccactggactgtccggtggcctagaagacagaagctccaacggtcgaaccctaacggtcgggtgacgtggctggcgcaccggatagtgttcggtgtgccatgcgacaagcagcttcaccaaca

SEQ ID NO: 59131 - DNA, 363 bp, Zea mays
  unsure (1)..(363): unsure at all n locations
tgcagcttggaaggtctctcccccatgttgttagcggcgatgccacagccagcccatgctagttttagctattaagcatgcgtctagaccgaccctcttctttgcaaaaacaactaaataaagtttgccggctaatacacccttaanagctagtgaaccatcacttcttctaaagacagacacatctacatttgtaaatagacaattataccccatgttgcataattgactaacagatagcctattatatccaagagactctactaaaaacacattagagaaagagtgctcattagaaaatgcaatttacctaacccttttaccttgccttgatgtccatcaccgaatataattgaatcttgg

SEQ ID NO: 59132 - DNA, 387 bp, Zea mays
  unsure (1)..(387): unsure at all n locations
aacactcatcggtcttgatgactattgtagagagggaaaggattgaaaaagacccgtattttgtggactcttcaatggggattacgttcttggtgaaccgaacctcggcaaaacaaatcacctgtgtctcttgaatttattgcttgtgatttgtttgacttctccctctttaagatctcttgctatattctttgttgatattatgttgtgctgcttcaagttaaattctcataaagaagcaactccttgtaagaaagaacttgtgttgattcccttcttaactaagtcttcttgctttattcatcatagatatgtagctntatactccgactattctgtatcttgttctaaacgctaactgnggatcaagtgttctttaaagtcgta

SEQ ID NO: 59133 - DNA, 427 bp, Zea mays
  unsure (1)..(427): unsure at all n locations
tctccgacactgcggtcgcttgtctcttctgcggnggtggtagtttcttctgcagccatgtctagcaatattttgtcaatgtgttcgattgcgctctccaggttcaaatcttcagctgaggcagcttctgcagctgcgacctccgaaggtgtaatttcaatatctgtctctttcgcaactgctggtgttttctgagctaaagctcttggcggngtcttgtcaattacttctgtcacagtcataattctttgtttctttgccttggtcattttcttcgatttttcgggctccttgtccttctgaaaaaactttgtcagttggggccccagtggacttagcttcgcacgtaaggattcagtcattaccttcagaatttcctcaatgtcaacggcacagggtgttgtgcgggtttcttcttcgtcggata

SEQ ID NO: 59134 - DNA, 293 bp, Zea mays
tttgatgattagggccatctccctaatgtcgagcttggaggcagcaattgagtgcctacttggtgtagacacctccttcttctcctcccgtgccttgaatgcaacgggttgggcttcagatgggtcgccaagctcgatgattatcctcgagccttctatcatgcactcaaaacttacaaaatgcccgataacttcctcgggggtcatcttagtatatctaggaataccacaaatcaattgaacttgagtgggatttataaaaatgagagatcttacaaaacatctaccacttc

SEQ ID NO: 59135 - DNA, 317 bp, Zea mays
ggcaacgggggtttttggagcgctaggacactgcctttgctggccgagccatggggcagcagagaggagctaagatggggcgacgagcacgatgagtgtactctagccttctatcatgctctcaaaagttacaacatggccgataactttctgagcggtcattttattatatcttggattaccacgaaactatagtactagagtgggaggtataatagtgctagagcgttaaagaactattaccactatgtgtgcgttccaacattatataccaaggttgtgcgcctggggtatcaaacggttgagccggttgtaca

SEQ ID NO: 59136 - DNA, 417 bp, Zea mays
  unsure (1)..(417): unsure at all n locations
agcttcngctctgtcgaggagtagctctcttctgtggagatattgcacgtacggngtctgccagtattgatcaggcgtgaccccgcgttgctccccctcgacgtgcaacgtctcgccctctggggctgagggtacctctggccgaactgagggtgcctttggccgagccgagggtgcctcggactgtgccgagggtacctcgggctgggccgagggtgcctcaagctcgggcgtgtcgtctatcttgacggagggttgatgcatatctctggagaagacgttcggnggaaccgctgttcgccctgaggctatattatccagttcgtccgcagtctcgttgtagcgccgagagatgtggttgagctctatcccgtataacttgtctttcaggcgtcgaacctcattgcaatatgcctc

SEQ ID NO: 59137 - DNA, 360 bp, Zea mays
ggccccgcgcagggacgttggtgctatccaatcgagagatgtctaaagactattcgaaagaaatggagaaataaatgcaaaatcgaggcttccattgcagaggcatacattctagaggaggtctcagacttcacaacaacttattatggtgacaaactgccgagcgtgcataatccaccccctcgttacaatgatggcgacaatgaatcgaaccttagcatatttcgaggccaactctgaagcgcaagtggctcgaccacgaagaccctgacacatgaagagtggcgacatatcatgctatacgtattgaccaaccttgaagaggtgacgccatacatggaacaatttcttcatgaattc

SEQ ID NO: 59138 - DNA, 391 bp, Zea mays
  unsure (1)..(391): unsure at all n locations
aatctacaatgttatatcatgactgcaacctncttctcttccattcttgttgccagcatagtgcatattgtaccattaatcccctcatgatccatataccacaatccattacgcctggtagctgtcccaagactcttccctgtttccctctcctgaattaaacaattatctcgatcaagaataatacgacaatccaattgatcaaccaaggcacttaatgatatcaagttgacaggaaaggttggcacatacaaaactgatgacaacttaatagatggagtgcattgcactgtgccaacacccttgatgggttgtggtgtaccatcaacaagtttgtataatatctttacgtgtgggtggataatctatatatgataganaatcactggac

SEQ ID NO: 59139 - DNA, 307 bp, Zea mays
gagaaatggttgaacttcagcaaccggtgcatgcaacgactgaagcaagtcttcaactcagtcggagccagtcttgaaaagattaaaccttcagcttaagacctgccaggcatctttgatcatattgaatgcgaaagagaagctcatgatgaagacatagatgggcatggtgacttctgtgctctgctgcttcttgaggacaactgttgctatatgaaagctggtgcacgcaccgtaatattgaaatatgccgaacttcaacttaacaacagcggacttgaatgacaccccgcgctagcctcgaaca

SEQ ID NO: 59140 - DNA, 180 bp, Zea mays
gttcacattttatattactaagggtgataaaatatttgatgagttacctacacatggtaattttgaattgtcccttatcactccttttggtgagaaattaacaaggctctaccatgcaaatggcatggctctttttttgattacaccaacgattgtgtttggcttcctttgccaatacaa

SEQ ID NO: 59141 - DNA, 301 bp, Zea mays
  unsure (1)..(301): unsure at all n locations
aagaaaagcccgagaaccaaacacgccccaaagtgccaaaccgcacgagctcacacctaaccatgaccacagcactcacctctctatgaaaagacacgatccacaacccaataaggccccggcgataagaccaaaaatgcancccctcaagcacaactaaggggagcaccacacaaaagaaagtcaagccaacgacaaacctgtaacacgccttcccggacagtgcaacaccaccacagggccaagcaaacaacagtccagagcaccagagaagccaaacgaaagaaagagatcgcaagac

SEQ ID NO: 59142 - DNA, 354 bp, Zea mays
  unsure (1)..(354): unsure at all n locations
cgtcataatcgccttccgtctcactcaggcttcgttctgaacgtactcttgtatactcataacccgagtctgaagatacctgttcacatatttcacttggaaaacattgtcaaatcaagtttttgaggaccttcggaagccgaatgcccccaacagtagcccctcgcaatattaatttgctggaacgataaattcatattgcgacatggacgaaggctttataccgaaggtccgaaaacacacctttcctttgctagaatagcaacagtcattgacaagcgggaccctccagttatcaatgcactangtgtataaataagagctcaccacgagtttatttggcacgctttcttg

SEQ ID NO: 59143 - DNA, 389 bp, Zea mays
agcttgtgcaggccggtgcataggcactttatgttctgcacctgctatggctataagggtgagtccttttgtaacttggctccaacctccaacctgtgacatcgggaaaaaaataagaattaagatcaagttataaatttcattatgttgcagaattttattagagcgaaccgttcttgttctgaccttcccatgtgcataccaaaggtaccaatataccactgttggaagcttgagagcatctattgagtaccttgtcgcaagtacaggaactacaacattcgtgttcccactgtgaacaggtaaagaggagaaatgcacccagtcaatagtcgatgcaatacattggaatacatgctattattttgatgaaacttagtttagagaat

SEQ ID NO: 59144 - DNA, 365 bp, Zea mays
  unsure (1)..(365): unsure at all n locations
atgaagatccttcattccaacatgggctagtcggcggggctttatcccacccatgttagtcttagcaaatataatcaagtggcgagatcagctctatttaaatcaactaagtgtagctgaccctctaacactcccttaaatgttactgaatcatcacttcttctaaagacagtaacacctatatccgtgaaaagacagttgttacncattttggtaattgagaaacagacagcaagctataatctaaagagtctacaagaaaaacattggaaatagaatggtcaggagatataacaattttacccaatcctttgaccaaaccttgattcccatcctcgaatgtgataggtttttggggatcattg

SEQ ID NO: 59145 - DNA, 460 bp, Zea mays
cttctcacgggccacactaagatattcatccttatgattgcttcgggggtaagctggtgaaggtatatttcaaatatcttcagcacctctacaacaaagctgcttaagggaaatcgtagtccagttttcaagaagcttcggaataccacgacttcattttcctcaggagttggacaagtcttctctccttcatcagccctcacaacagacaagtcccggaaatatctgcccctcatgttgacaagatgattttctttaatacttgatttgccaaaaaccgcatggcttggtcgccaaggtcgatctttggagtcttcaccaccactatccacatcatagctgtcactgtcaccagtatcttcagataaacacctccaaaattctttagtaatcttctctgtattggtcttcgacattgattgaagaaaacccagatgcatctcctcagaaagacttagct

SEQ ID NO: 59146 - DNA, 397 bp, Zea mays
  unsure (1)..(397): unsure at all n locations
cttgatgcttaagaaaaatatatctttattcgcgcctatctctatttatcaagaggatgtatgaaagcttccccaagtttgggattatttgatctcaagaacaatcaaaattggagcctggttaatactggatttnttgaaacgaatgcatacctcaaaatctatctctgactgtaaatcccatccatactcatttattataaaactttaatcccaattcatactattcaacggaatactcagtatgtcggcctctaattaattatatttgactcagctcaatatctctatgttcaactccaattctaaagaatcaacatcggcgatgattttaaaaagtgcgattgcttctttatcattatccgacagccgcatatctggatgattattttgatta

SEQ ID NO: 59147 - DNA, 323 bp, Zea mays
  unsure (1)..(323): unsure at all n locations
gtctgtaccctaanactagggtaccccttactactgtatgaagacgcactacccacgccgctatttttagtcgcatggtgaaggagctgtacatgggaccaaaccatgacttgttccagcctccggcgattactctggaccagcaacagcgcctgacctcaccatgtgggcggctccggtgccgccacgtggccagagaaagtgatatactccaaggcatcaacagtgagttcggaccctcatgggaaagtgccggacccttgttcggaccccccaggtggtccaggacccccacgtgtatggaccagaccccaagaatggga

SEQ ID NO: 59148 - DNA, 409 bp, Zea mays
catctacttgttcacctaccatacgaagctaatgtaggaggtcctgtgcaatatagatggatgtatcacatcgaaaggacactaaaaaagctacgtgcaatggttggtaataagagaccagttgaaaggtgcatcgctgaagaattcaaatacaaagagatagcattgttcacgggcctgtactttgcagaggaacacaatgtcaatgcccatacgttgcggtatcatgtcgacgagccccctattagtgatattgagaattttcaatggaggggcaaaactggaggacccagcacaacatacttgttcaccaacgacgaatggaagactgctttactcttcattgataacaacatggaagagatgagtcagtttcttctgtaagtgtaaacattattttagtcattgc

SEQ ID NO: 59149 - DNA, 466 bp, Zea mays
  unsure (1)..(466): unsure at all n locations
tgacccacgttacaaaatgtcatcttatgtcatgtagaatcttgattttctcaactcatgatcttgcagaaccaatcaaacagtacaaatttatctattccccagcttcgctggccattttgccgagattgaaaatgctaaatagtaaatacaatgcaaggcatctgttttaagtgaaccgaagaggtcatgggtttacatcacaatgaccggatattaatttgtgtcacatactcaattgtcagttgtgggggagggtggtggtcatgtttttggggttatatgagatatgtgttacttcatgtatagataaagatgctggagacatggtgctaggctacaatgtccagcttcttttctgggatacataaactctcttttaaaagaaaaaagaaaacaagaatcttatgaaactggttctgacacggttacagaagagagagaangatggtgctctgatcctcat

SEQ ID NO: 59150 - DNA, 396 bp, Zea mays
gtcttgcttggatgccccttgcggtcttttatagccgtcttgaatctcttgatgatgagagccatctctctatcattaagtctggccgtctcaatttgtgccaccttgctaggtagcattttcttgctctttgttgccttgagagcaagagattgaggctcattgatcggaccgtttagagcggcgtcgacgtatcttggcctcttgatcatcatccgcccgcttacaatttttcgagtcctctccggcgtcatcatcgtgtcctgcgattctcacgatattgttacgagatgacgatcaagaacggtaaggaccttatcttacgcggacgacgtcgtggtccgccatcgcggctttcgagctcttatttgttgtaatggtctgagccggtgaagt

SEQ ID NO: 59151 - DNA, 430 bp, Zea mays
  unsure (1)..(430): unsure at all n locations
gcccccggcgcacggggagntagtgctgttagatctatcacacactgncccagntcttcaaaggccttctgctggattggtccccactgaaagacttcggctgacttcaacacttcgaagaatggtaaggttctctctgctgatctggatatgaatctattgagagatgccaaccttcctgtcaatccttgagccccctttctttgagttggtggctccatctgaagtatagcttcaattttacttgaattagcttcaattccctttgttgaaaccaagcatccaagaaatttccccttctttactccgaagacgccatttttcggattcagctttaggccagctcgtctgaaactggcgaanggctcctgcccatcagcaatatgattctacctgtttgtgcttcttacaatgatgtcatcaacataag

SEQ ID NO: 59152 - DNA, 160 bp, Zea mays
cccacaacaccccaaaagcatagagcacaacactcgaagaagcgacaccacaccaaatggcagtgtgacagtgaaaagcgtgaacgaagcagttgccctaagaaacacaaaaacacgggaaggaaggccgaaaaaaatttacccaactgggcaaccggac

SEQ ID NO: 59153 - DNA, 406 bp, Zea mays
  unsure (1)..(406): unsure at all n locations
aagaacgagggcagatctcttgaatcttgtggatttgaactccttgaagtacctcataacaagggtgttacggggccctcttctgctgttgctacttgagcaggttgcggataaatgactaacacacggttgattctgggagaacacacttcttatcttcacttcactatcttcttttcaccgaccctttctttctctttgctcttcccactggaggattctatcaaagagnattaccatcatacagaggaggaaaccgaagatgttgaaccatgcacaacagtcttcaacccaagaatcaccaagcattgtgatcttatgggcgagggagtgggaaatggngttgcttgcgatttggcacaagggatttatctggagtgtgctctgcttgaatgagatgggagtt

SEQ ID NO: 59154 - DNA, 419 bp, Zea mays
  unsure (1)..(419): unsure at all n locations
cgctntagccttttctgttctaaactttctgactagcagagaagcttcatgttcagctctgttattatagcttcggcttctgctaataagccttcagttgtctggagttcgaactttttcttttcaaaagcagctgagtgttcttttattttggtttctaagatttcaattataatctcgtgctttttatcttttagatcctgttgcatcttcaaagctttgctcagtagcatactctgtacgcgaacaactttcgttaggaaacatctttgttataaaaataaaaaggtagacagagattcttttaccttataattggaatataacaaactaccgacgatgtgctgtcgtcggtagcggctaatatcggcttcgagcttctggaaaccgatactccttgatagagtaccaataacctt

SEQ ID NO: 59155 - DNA, 311 bp, Zea mays
  unsure (1)..(311): unsure at all n locations
acattttataccctgccggttatcccgaacacaaaattatgagaattcactctatgaagtctcactctggctctcatcatgcttttatgtataagagtgaggcatctagttccaggcaatcaacacatgctaaattgcctaagaagaaaactcctattgcatcaaatgaacctaatatttcatttaagactttngatgcatcttatgtgctcactaacaaatcangcaaagtagttgccaaatatgttgggggcaaacacaaggtgtcaaagacttgtgtttgggtacccgaggtgcttgtttcaaatgtc

SEQ ID NO: 59156 - DNA, 380 bp, Zea mays
  unsure (1)..(380): unsure at all n locations
agcttcacgggccactggtggagctagccgtatcactggctcgactttggggtggctggagtgggctggccacagtggccaaagctctggcggcaatggcgggcggaattgaactcgccggagctaatgagaggtggctggccggtgaaggtgagcgcgaggtgaagtggggcgcgcctgaggagactttataagcgcgggcgagcacggtcgagggcggggctctgacatgcgctcggngcgtgcgcggcgaacgccagtgcgcgctctggcgcctggcacagcgtctagcacgaggcagcgcagagagaggtcaagttcaaacgcggattgggcccaaatctttgagattaaaggcacgatctcattgaaagatctct

SEQ ID NO: 59157 - DNA, 393 bp, Zea mays
  unsure (1)..(393): unsure at all n locations
tccttaatctttgntggtgcttatttagtatactntaatgtttgtatatggcccaagccatgattcntaaattttcatgctcttttccccattttcttgaattttgtttatagggctcaattagggtttttattgtggttgcacattttgcctttntgaaaaacccatttgttttgaacatgatacttttaagtataagcttagtgggttctttatccttaaatcaacttgatgttcatgcttaattttggttcacataagatgatggttcttgggttagcacttgagagaaaccctangtgacactggggtgtcacagcttgtttgggcataaagagagataatccaagaatgaaatngatcaagagccaaaaactccccctctaccataat

SEQ ID NO: 59158 - DNA, 376 bp, Zea mays
  unsure (1)..(376): unsure at all n locations
ctaagctgtgaagggtcttatccncacatgtgctaagcggcgatgccacagccagcccatgctagtcttagctattaagcatgcatctagaccggcctcttcttttgcaaaatcaactaaatagagtttgccgtctaatacacccttaaaagctaatgaaccatcgcttcttctaaagacagacacatctacatttgtaaatagacagttatatcccatatgacataattgactaacagatagcaaattatatccaagactctctactaaaaatacattagagatagaatgctcattaganattgctattttacctaacccttttacctggccttgattcccatcaccgaatataattgaatcctgggaaatccta

SEQ ID NO: 59159 - DNA, 424 bp, Zea mays
  unsure (1)..(424): unsure at all n locations
acaaaaatgcctattgtgctcgagtcacccaaaccggcccagttacncttcatccgcgcggcctagccagttgccaccgagcccaactcaattccgtcgatcctgccacatcggtgtgccgaacgggtggagcccgcccgtcaatcatgtggcgcgcgctcttctccacccgggtcgttgacacctnggaccacttcatcagaccttcttctccctataacagatcgatcgggttgcttgacccagccgactcggtcattggccctcacctgcatataatccacaaccacctctccngtgcggcctcgcgaaaccagcgcagccacgaagtcgagttgagaaccaccaagacgccctgtgtagcgggacagaggggagagtgcagccgccatcattgatccgccacgggcgaaatcattgagcg

SEQ ID NO: 59160 - DNA, 527 bp, Zea mays
  unsure (1)..(527): unsure at all n locations
ngngattgtaccaatnganagagcacaatctctatntatgaatctccatgatatatcttacaagagaatgtattagtaacacaagcaatagtttcctatttagcaacctctagtatatgaatgacaagaaggttactaaacaaggaaacctcatgatatgaactaaattacccttacaagcatcatgcataacatcaattgtaaaaaagatgaaagtagcatgattatttaattaagtttacatggcaagtttaattcatagcacggagagtgattaatggagaagactcaaaaccaatttaaacaagaatgaatacatcacatagtattggttcgatcttctttgaatgttgaatggcacactccatttgtgaaacacattctcatgttgtgagactacataaacacttaaatagaaacattagtctcacaactctagtcatatagagaattccncatntggtaagtgctataagaaattgaatttcttacttagcactctattcatttaagaacatgggataata

SEQ ID NO: 59161 - DNA, 374 bp, Zea mays
  unsure (1)..(374): unsure at all n locations
cgacactatgatactaagctttgtggaatgngagaggatntgatcactcgggtgtgtcttgtattgaatgcctagctcttgtaagtggntggaagtgtgaaaacttggatgacttgaatgtggggtggttgggggtatttatagccccaaccaccaaactagccgtttggtggggctgtctgtcgcatggtgcaccggacagtccggtgtacaccggacatgtccggtgcgccagccacgtcaccaggccgttgggattcgaccgttggagcttctgacttctgggcccgcctggatgtccggtggcgcaccnaacatttactgtataatgttcngtgcgctcaatacaccggtgctgacttctgcgcgctctg

SEQ ID NO: 59162 - DNA, 520 bp, Zea mays
  unsure (1)..(520): unsure at all n locations
tactntgatttctgtgacctatggagacatatagaatgttggcatcttgttgttctctctcttctggagtgcgatcttttaaaaacatgatatgaactcagaattntttatcatgataaaaagtctgtttggattgatggttacattatgctacttcatgcttccatgtctcactctgtgattctgttccacttgattctgatataactaaagtttctaatgttgcatattcccaaacacttacccggntcattcttctatgctgtggttngagaatccaggaangtgtcgacctctcgctgttagttgttttgagattactggtacccttactgcttccagaagttgcaagcataagccttctataagaatatgatcatggaatcgatcaaaaagttgggagaatcgtcagtttgtagagcacttcanaccaacaattggtgtactacaaatcaacatataacatggttccattgcagttagcaatgtaccaatgggatantccagtacttagtcttca

SEQ ID NO: 59163 - DNA, 508 bp, Zea mays
  unsure (1)..(508): unsure at all n locations
aagcttagcaactggggctgcagctctgcaaccaatggactccaatcttgagactctctcccttcgggaggcccgaagccagaagaggaaggctgtcagcccgacactgcaagatgatgagctagaccaagacatcagagacatggagatgcttcatcaacaggtgcagaggaagaaggaaaagatggccaggctagctgaactgcaaaggcagatagacgaagcctctgaagaagttcgtcatcttactcaggatgagcagaaccgaagacctcaacacaaagaccttcatcacgaggatgtcttcaacgaagatgactggtatgagaatctccaccatggaaatttcgcttttgatgatgcttcttctctatccgctgagctgcaggctacaccttggcctccgtcctactaagccgcccagcttcctatantttgacggcattcagacccgcagctagttttgatgagctacgaagcagcagtatattcgtatggtggcaatact

SEQ ID NO: 59164 - DNA, 504 bp, Zea mays
  unsure (1)..(504): unsure at all n locations
gcttcgcagaaaccccatgaatagntcaaattctgaaccagttacatcttgcacactctgaataatgtcatttattcaagctcaacanataacataaatagagaattgaacaatgtaaacaatcgtatggtcaaaaactgaaaacagtcaacatactttctttaccaaatccgttataaatctctccatttctgcttgaggtttcagtagctctgctttaagaggaaaaacctaaatcaaaaaaaaaaaacacagacacattcttgatctagcacgctacaatntaatntatccacaaaacatgtaaatctctcaattatagatatgtaccttgtctcgaagaaacaaataatcttctcacgaatctctgatccttgctccacatgcttaaataaagggtgtaaagaatctggccaatataaggtacgcattaacagaaggaaccaatggacatataagagaatgaacaactganaaggagaaatcatacaatacaagcatagt

SEQ ID NO: 59165 - DNA, 507 bp, Zea mays
  unsure (1)..(507): unsure at all n locations
gacacatgatactcagcttgagagacctcatgattgggagacatttggtctttattgtgctcgatggggtgcagcaattctagagaaggctagttgcgaccatgttaaaactgcagcccagaccgaagccgccttctccacagacgacccgaaagacctctcggttgaagctactttagcgggcggaaaattctactccgatgtttgggtaaacggcggccgagaatnggccaacaaaatcataaataagaatgacaaagaaacccacgacgctcgagaagaagctaaacgagccaaagaagctgtcgagcgtgcaaggcgtataggtattattattgaatcttaagcttggtggttattttctggcttcggactaatggttcgtctgctacaactgaactctcaacgctgcccgagccatacgacctccaggttgatcccgtcatgaaagaggcgctggatgtaatgagtgtcgctaattccatcgtcgacgaagtcattgacagg

SEQ ID NO: 59166 - DNA, 513 bp, Zea mays
  unsure (1)..(513): unsure at all n locations
gccctccgtcgatgatcagatcgctatccactacgccatcagtggccttcgtgccggcgtcctctacagtcattgtatcagagatccacccaaaaatctccaggagctatatcagctctttgaaaaatatgccaaatccgaagagctccaccagcgcaaggttgagtctcagcggaagcccaaagatgccccgcagtccagccgcacatggacgaggactccgcagccagactccggtcgagacggccgcagtcagcagcaagtgcacaacatcgccaaccagcatcccgctgctgacccccctcgccgccaggaatatcccccccaaggccgcggaaatggaactcgtggcaggggccgagggcgcgcgcagccgccgcgccgattctactgcctttntcacggcaaggactgcgcccaccanaccaaagactgtcccgaaacgaaggccaccagagacagaatggcacgggcgcagccagccgacaaccncagaattgtcgcgcacaacta

SEQ ID NO: 59167 - DNA, 499 bp, Zea mays
  unsure (1)..(499): unsure at all n locations
tgcagganaaggagatggtatgaagcnnttgggtgctngagagagtncaattcaattttattaactcaagctatcaatcttcaatgatctatatccaagattgacccaaagttattttgaattgttatatctaaaactcatacaatctcggggaagatattgatgttgtaggaaataaagaattaatcctatgccgaanagtcaaggcctacaacatggaggaaagccaaaggatggtaacaattatgcttntaagtgcaagtatcttanaattatcatttcttatatgtcttgtgtagtcacatagaanaagaaagcacttcaaatgtttttaaattatgtcaccattctttgaaggaattcctctcatatggtagattgtacattcattacttctataccatggcatgctntannatgttgtagtatctcatggcatgctntacactagtcatcctattattgccatgttctagatatagagagatattccatgttc

SEQ ID NO: 59168 - DNA, 498 bp, Zea mays
  unsure (1)..(498): unsure at all n locations
ctcagcttctanagggagaacacgtgataggtctaactaatggttatttctaaaaagatagaccttgtgcagcgtgtcaagcagggaaacaggtgggaggctcttatcacaccaaaaatgtgatgaccacatcaagacccttggagatgcttcatatggacctcttcggacccgtcgcctatctaagtataggaggaagtaagtatggtcttgttatagttgatgatttttcccgcttcacttgggtattctttntgcaggataaatctganacccaagggaccctcaagcgcttcctaaggagagctcanaatgagtttgagctcaacgtgaagaagataaggagcgacaacgggtccgagttcaagaaccttcaagtggaggagtttcttgaggaggaggggatcaagcacgagttctccgctccctacacacctcagcanaatggtgtggtagagaggaagaacaggacacttatcgatatggcgaggactatgc

SEQ ID NO: 59169 - DNA, 415 bp, Zea mays
  unsure (1)..(415): unsure at all n locations
cgtgaaggttcttcatccccacatgtgctaagcggcgatgccacagccagcccatgccagtcttagcaattaagcatgcatctagaccggcctcctcttttgcaaaatcaactaaataaagtttgtcgtctaatacacccttaaatgctagtgaaccatcacttcttctaaagacagacacacctacattcgtaaaaagacaattatatcccatattgcatagttggctaacagatagcaaattgtagccaagagactcaactaaaaacacattagagatagagtgctcattagaaattggcaatttaaccaaaccctttaccttgccttgatntccatcaccgaatataattgaatcttgcgaatctntattcttgacatangaggtgaacatcttcttctcccncgtcatatg

SEQ ID NO: 59170 - DNA, 433 bp, Zea mays
  unsure (1)..(433): unsure at all n locations
tgtgaacagtacaagttcaggagggagaaagcagcttcagcagaccagccgaagcctatgctcttatgngaggacatagcagagcagaaggtgctgntaggatctcagttatccgaagagcaagagaaaaccttgataaggtttttgttcaataacaaggatgtttttgcatggtcagccaatgatctttgtggagttaatagagatgttatcgagcactcgctcaatgttgatccatccttcagacccagaaagcaaaggcttcgganaatgtcagatgataaggccgaaggtgctcgtaacgaagtcaaaagactcctcagtgcacgagttattagagaggtgaagtacccagaatggctggctaacactgttatggtaaaaaaggccaatggcaagtggcgaatgtgcatcgattntacagatcttaaca

SEQ ID NO: 59171 - DNA, 522 bp, Zea mays
  unsure (1)..(522): unsure at all n locations
ctaagcttgtactcggagatatggtgttaagtatgtatgtgggtnttcagatggcctggaggcagcggcgtggccagaatgagcgcgtttcttcaccgncgccaccgnctcccactctacaggagctgatggctcagcagaatgagatcttgaggcagctagctcagcgtcagccaccacctcagcactatggtggtggagaccatcagcgtcaccccgcggcagctacctaccaggagttcctcagtacccagcccccattgttcacaagggcagaggacccacttgatgcagatgtgtggttgcgagtggtggaatccaatttcccactactccatggagcttgcttagaagtcactaaagtcaggttcgccacccagcagcttcgtggacccgtaaggacttggtgggaccactttcttgccatgcagctagaggatcgagaggtggagtggagagagttcaatgcagctntcatgggacaccatataccagccaggattatggaccggaagctcaatg

SEQ ID NO: 59172 - DNA, 505 bp, Zea mays
  unsure (1)..(505): unsure at all n locations
tcgcatctctgaactagctcggctgcatcattctatgctgtcggccaatataatcctgacctgaaaaccttcccgactaatgttctggatgctgcatgtattccgcactgccctgcatggacttcctccaggagttgcttcccggtggacgggagaacgcacttcatgaggacgcctgacgcgcccctccgatataatacctccccaatgagtgtgtagtgagctgattgtctggcaatgcgctctgctgagttcttgtcatctggctcttcttcattctttatatacttaataattggttggcctcagtcatcagagtctgactcgggttggtctatgatgttgcactcttctatttgatccatcgagatgctcggctgaaggatntcttgcacgaagatcccgggcgggacttgagttcgaccggatccgagcttggacagtatatcagccgccgtgttccgatctctttctatatgatgatactccagaccttcngaattat

SEQ ID NO: 59173 - DNA, 488 bp, Zea mays
  unsure (1)..(488): unsure at all n locations
ggatggccaagtcaagaagcagggcccagggctatttgtatctgaagttcttagtatatcaaagaaaaactatacagaattagagaagggttatatgctgttttgatggcatccaggaagcttcggcattactttcaagcatacaatattgttgttccttcttcacagccgttgaaggatattatgagaaatagagaagctactgggcggattggaaaatgggctacnagaactcaatgaatttacattgattatgtgcatagatcttcgatccagtcctaggcgttagcagacttcattgctgactggacgccaggggctcangatgaagaaacaaataaagatgccgaagtatggaccagtgtttgcgatgggtcttgtggaaccttcggngaaggagcagctgctgtgttggtctcgccatccaaagntaaaacttgttatgcggcanaactcgatttcagttgtacaaacaatattactgagta

SEQ ID NO: 59174 - DNA, 506 bp, Zea mays
  unsure (1)..(506): unsure at all n locations
tgtgaagattcttcatccaacatgggctagtcggcggtgccatatccttcccatgttagtcttagcaattaagcaagtgtcgagttcagctctatcaaaatctaccaagtatagctgaccctctaacactcccttaaatgctattgaatcatcacttcttctaaagacagtgacacctacatcagtaaaaagacagttgtagcccatttgacataattgagaaacggaaagcaaattgtaatctatagaatctacaagaaaaacattngaaatggaatggtcaggtgatatagcaattttacccaatcctttgaccaaaccttgatttccatccncgaatgtgatagctcgttagggatcttggtttttctcataggagggagaacatttcttctccccagtcatgtggtttgtgcacccgctatcgatgatccaacttgagccctcggatgcataaacctacanaaacaatttagttcttgactntaggtacccaaatgggtttg

SEQ ID NO: 59175 - DNA, 453 bp, Zea mays
  unsure (1)..(453): unsure at all n locations
tcgtcctaaccatgctcttgtatactcgcaatctgacttcgaatgtacctgttcacatatttctcttggaaaacggtcaaattacgtttttgaggaccttcggaagccgaaggcccccaacagtagcccctcgcaatattaatttgctgtaaagataagtttatattgtgatatggacgaaggctatgggccgaaggtccgaanaaacaccttccttttgctagaatagcaacagtcattgacaagcgggaccctccagttttcgacatactgngcgtataaataagaactcatcccgagtttactcggcacgctctcttgccaactgctcttgctcaaccatcttttagcctgcgcgcgacaacactngctnggttnntttaaattttaagcttcggtttcgggagtactntctcagcgcttgcgaagatgtctgaagataagaaaaagtgt

SEQ ID NO: 59176 - DNA, 347 bp, Zea mays
  unsure (1)..(347): unsure at all n locations
cgcccgagcttagcctcnggtgagacggaggtgcatctgctgacttgaaggaccctcaggcgaggcgtgaatccgcctgtgactaccgtccttgcccgaggctgggctcggatgaggtcacgtcccttgggagacaaggccttgacttgaaccgcgctccatcagtcgtgtatggtttgttctgaagatgttttccagccaggtttatgagcattgtgggtaaccctaattactgtacccgacagtagcccctgagcctcgaagggagtgtaggtactcgctttgaggttcntgccgtattttgcaaggggaccagcccttctcggtcgtatnttgttccgatgggt

SEQ ID NO: 59177 - DNA, 480 bp, Zea mays
  unsure (1)..(480): unsure at all n locations
tcgtagcctttctctcgaatcggtcacaatctcagaaatctgttaaacagagcagaaggctgaagaaattccaaataataattgctatatggtcaagaacagagtgcatgcaaactgaaactggttattaggattgcatctgaagaaactatggtgctgtgacagctgctagtactgaccaggcctctttggacgccgtcgggcttgatggcgatgaaagtgcgctccatctggaatcacagcagaggagtgttgtgagcttgagacataaaaagggagaaaatttctgtcactangatgacaaaatcacatgggagcccactcgatcatattgagctggcctaccccctgcctgacatatagcccagaatgcgtgaaacaataaaaataaaaagaatagaatgagggatccagggtaggtacctctgcagcatgagcctcctggtcctggagcatgtaaactgcatgaggaaaggacta

SEQ ID NO: 59178 - DNA, 493 bp, Zea mays
  unsure (1)..(493): unsure at all n locations
ctcggcanaagcactacatagttttataatcaccaagaatttattctatgttgaactgaatcaaacaattcatttgttgaaatctgctctgttagtggacagaacacaacaatcattntgtaaaactcataattctcatactgtcaggcctatggttgtgaaattttaacacaagcaagataagaaaagcatctacaactttcttataatgaccatgaacagattgtaacattagcttaagcaaacaattcactctctganatctgtacagatattggacagattcagttactgaatttgcaaatagcacaacttctaaacgatcagacttatggctgtaanatcttagcacaagtaagataataaagntatctacaactttcttatatggctcttctacataaaacataatttagttcatcanacaaacagcacgacgaanacagtacgtgcagcccanaacaaccaccaataaaattcagcttctattcac

SEQ ID NO: 59179 - DNA, 489 bp, Zea mays
  unsure (1)..(489): unsure at all n locations
tcgatggagagcctacttaacgtatactcttctttcttttcctctgtcgctctgaatgcgacgggttacaccttgtgtgtggaggtggcgccttgctcaatgatttgtttggagcctttgatcatcaattcaaagctcacaaactntcctatcacttcctcgggagacattagtttatatctaggatcaccacacattaattgaacttgagtaggattaataaaaacgagtgatcttagaataaccttgaccatctcatggtcatcccatattgtgctcccaaggttgcgcacttggttcaccaaagtcttgagccggtagtacatcgcttgtggctcctcccttgatgaagcatgaagcgatcgctccccctcgatcgtttcccgcttggtgatcttggtcacctcatctccttcgtgcgcggtcttgagcacatnccatatatctttggcactcttcacccatgcaccttattatactcctctcgac

SEQ ID NO: 59180 - DNA, 431 bp, Zea mays
  unsure (1)..(431): unsure at all n locations
accaccaaagaggcgcaatcgcgctcgccggagttcggaaccccgccagcgcacgtggaccgggtgagtctctgcgccattttccgattcactgcacacatatcctctacgtcatcccgtggagctcatcgtgccgtttaattgaactagatcgtcgtggttaggccggagctctcgccgccgacgtgttcacccgcctgcgcgcgtggactggtcgattccggccacccncgccgtcgagccgtacctcgctgtgaccaccaggacctcccaaagctaaccccgcccctcgccggacctctctcgccgccggtaagccgcgccgccctattcctttccgcggttattggttacataaggggagggacctcgtgggagaagaagaaaaggccagggggttttgtgcgctgtcagtgactcaggggaatagt

SEQ ID NO: 59181 - DNA, 472 bp, Zea mays
  unsure (1)..(472): unsure at all n locations
ctcagaanacttcattgtagaattgcagctggtcttcaacagcctgaggcgataccggtggaagctcaatccagaaaaatgtgtctttggagtaccagcanggaagttgctcggattcattgtcagccaccgaggaattgaagctaacccggaaaaaaatcgaggctatcatgagaatggaagcaccacgatcatagaanaaagtgcaaaggcttactggatgcatgacagccttgagcaggttcatatcaagactangcaaaaaaggcttaccattctacanaatgctcaagaaggtggacatgtntcagtggatcgcanaagcataggaagctctcgatgcattgaagaagttcttgaccacgccaccagtactgaagccaccacgccgagccacgccggatcagccagcagaagatcttgctgtatacgtctnctgcacgactcacgtggtgagcaccgcgttggtagt

SEQ ID NO: 59182 - DNA, 444 bp, Zea mays
  unsure (1)..(444): unsure at all n locations
aagctgagcagtctacggcttaccaggaactaactgagggcttttatctttcggaggangacgggagaggggctggccacggtgagtgctctctggcggcactagcaggtcgcggggaggtcgccggagttaatggctggcttgggcaagtccggcgaggtacggaggaggtaacggggaaggcagacaaccactgtggcgggctttatagccgtggcgcgagcgtggtcatgggcggacgcaggcgcgcggcggttcgcgcacagacgtgctctgagcgcgcccccggatgccagctcgcgtcgaacacgtggaagcttgcttctgccatggttcaacggccgattagagtgccatagcgtgcgcatcttggcaaggtcactgtgtacggtcgcttctctgctcaaatactatcttttcgctgtgagttccaagtccagatat

SEQ ID NO: 59183 - DNA, 480 bp, Zea mays
  unsure (1)..(480): unsure at all n locations
tatctaggtggcgtctcccattcagcttgatggcgccaaggaataattatttagttcgttntattggtatcatctaattttctaagacttttgctatgtaataatgatacttgtgacatttatatctatacactctgtcattatatgtgatgttcttctttggtgcacatatgagacgcacccggctttatcccttaaatccgggtatgacaaaagtggtaatagaggaaatgttgactgtaggacgaaacctagatagaaatggacaaaacccttacctacttatctgtactctgattctttctatacttatcctgatcctgtctcatcttttgttggtctactatgactactcttacctctttactttagaaagacaagaaggatttcacaccttggaatcctacatctaagacctcttanagagatacgagacctangacacatatatatatatatatatatattctctacctgaag

SEQ ID NO: 59184 - DNA, 450 bp, Zea mays
  unsure (1)..(450): unsure at all n locations
ctcaagctggaatagtgccgaagctctctggaggccatcaagacagcatatagtatcttctcctactctgtataantgttctttgataaactaagaacctctgatacacaatatattggggcctgcctcttgacttgaccatcaagcttctgctggacaagtgctgcacttactgctgagtgcgaagctgccacatataataacaaaggagcccctggcattggtggagtccatgttgttacatctatcagatactgattcagctcttcataagccttctgctggataggtcctcatcgagagacttcggctgactatagcactgcgaagaatggtcagtatctctctgctgatctggatatgaatctattgagagatgccaatctatctgtcaatctttgagcgcccttctttgagctggtggctccatccgagtatagcttcaattta

SEQ ID NO: 59185 - DNA, 280 bp, Zea mays
  unsure (1)..(280): unsure at all n locations
tccctgttggaagccaatgacatcctttatgctattgtgtctcccactatagagcatgcttctagaagatatanatatttcattatctatctcatgctcattaattttagcactaaattgagctatgtgatcatcttggtgctaattaaagctaggtgatcatggatagcatcaacattaatggttctacatctaggacaaatggaaacatggctaacagtagatgtagagggttcgcgagcatttaattcatcaatcttatcatgtaacatggcattct

SEQ ID NO: 59186 - DNA, 488 bp, Zea mays
  unsure (1)..(488): unsure at all n locations
tcngcattctgcattattgcttctacgcggagtcttcgtcttgaggggctaaaccaaggctgaagatggcttcggcgagcctctgtattattttgccaaaggtgtttttgccttgaggaccttcggcggagaagaagaccccaaacaatagagttaggcggcagagttgcgtaccatgtgaatgcggtaccagtaagagacaatgagaataaaccgacacagtaggtttccctatcaaccaattctcctaggtgtgttaagaactggcttacgtgctcatgcatacttttcctgctttcaccgganaatntagagaaatccgatatccttgtcccttgcggatatggcttggtgtcgaatgggtgattataaggtttccgatacgactgtcacgatatggctacacttacaccgagcctttctcggagtagttcagccatttcttccttgaatttttccatagcgcctagtggcaagccaccggtcct

SEQ ID NO: 59187 - DNA, 453 bp, Zea mays
  unsure (1)..(453): unsure at all n locations
cgaggagatggagagganggagcgactgngtcgcgaggcctgtgtggtgatttgatgttgccagctagggctctggatgctcccaanaattgctttcggatggaaggattggaattggataaatatacgtgcatcccagtctaagaaataataattgtatttaaaaagtttcatccagaaataataatcatattttgaataaaaaggtaagcgatatatattntgatcgacacgattaattacataatatgtaaatttcgacgtgcactatagatttgtagtcaaagtatttctgagatgatattgtttttataccaataaaaaaggatcaaatacgtgcagtacgatccaatgttataattgtataaatttaaaaaacatggatggtggtaaaagtcggttagtttgaacaatcactagaagaagctatatacaggtgtgaagaaaaaatat

SEQ ID NO: 59188 - DNA, 484 bp, Zea mays
  unsure (1)..(484): unsure at all n locations
tcacgtctggcacctccttanagaggctttccaggtctgcgattatgttctcggactcggngagggcctcggcttactccacgcactccatgtcgcattcgaacgcgtgtttgtacttggggccgacggtgatgaccccgttggggcccggcatcttgagcttgaggtangtgtagttggggacagccatgaacttcgcgtagcatggcctccccagtaccgcatggtaggttcctcggaacccgaccacctcgaacgtaagggtctcccttccgaagttggagggcgttccgaagcagactggaaggtcgagttgtccgaggggctggacgcgctttccggcgatgatcccgtggaaaggcgcagcgcctgtccggaccgaggacaaatcgacacgcacgagcccgagggtctcgacgtagatgatattgatgctgctgccttcgtccatgaggaccttggtgagcctgacgtcaccgatgac

SEQ ID NO: 59189 - DNA, 383 bp, Zea mays
ctcagctcggaagccatcacaagttgattgaagaatggcattaatatctattgtgcttctaagtgtaatgaagcttttgagcacattgagacattattaaccactgctccggtattggcttaactggacatcaccaagccttttgatgtatattgtgatgcgtcacgcactggactcagctgtgtattaatgcaagaaggccgactaattgcatatgcttaaggcacgtgcgccgacatgaggagcattacccaactcatgatctggagctagctgctgtggtcatgccctgagaatttgcgtcactatctgctgggaaatatctgtcacatatatacagatcataaaagtttgaagatatcttcacccagcacaaattgata

SEQ ID NO: 59190 - DNA, 471 bp, Zea mays
  unsure (1)..(471): unsure at all n locations
gctttncttgtcatcatcaaccttgacatagaactactcctacttccagcctgctgcccattagcttcggtagctgattacgggaaactctgtggttcttcgataagcaaaattatagcaaccaaaaatgtcatgcaatccatctttcctagccttcgtctgatagtgcagctcgtgaactcgacaaaagctgtccgcaaacggctccaccgcttggcttcggagggcccagatataaacactaagcctaacgatagtgttaggagtcaactgatgaaaatagataccanacctattcagtacctctgcaataatcccatgtagggggaatcttaatccagcctttagagaactcttganaatgactatttcatctttctccggctgtgcggtagtttcttcctccccgaagcgtaatagcttcttctggctgtcacttgaaaaacctgattttaccatcttggagagatc

SEQ ID NO: 59191 - DNA, 506 bp, Zea mays
  unsure (1)..(506): unsure at all n locations
agaaactaagctgaccgcgattctcaagctcgaatggatttagtttatttttactcacaacggattcaaacaggcacaagcaaatatatacttgcataacaacattacaccatacaatatataatattataaaagcgagcaatataaaatagagagcgcttctactggtacgcgatgaaaagaaccgcgatagtcgaataagctacagtcgaggggttagcgtgtttacactaagcaagtattaattaaaatatttaattcgacgtaattatattaattgacattcatgagatataaattaaaactacttagttntgactaacttactgttataattggggatgattaaataaataactaattaactgacatgattgattataagcgaacggtttattatcgtacgcgaacaacgcgcgaatggcatgcgacacacgcgaacggcgcgcgacaatgtgtgtgaacatcacgcgcgacactcgcgaacgacacgcgatgatgcgcgc

SEQ ID NO: 59192 - DNA, 359 bp, Zea mays
agccacaggccagtacacaaccataaaacctattgttcaatagagagcaaaacaacctgaagctgcctggctgggcaccgacagccggtccaccgacttgtcagcgcaccatgacccactacaacttgcagcttcgaatctgggagcgtccctataattaccgactgccgggtgccactgatacggctccagaccacagcgctgaacgtcactaagtgacacgcccatccgccagaataacactgcaaagccaccacatgagaagatgtcgtgcacacgactgtcaggccactgcaaactctacgcaacccactgcggtaccgctggcacaaggctctcgaagcaatctctgacaatcc

SEQ ID NO: 59193 - DNA, 494 bp, Zea mays
  unsure (1)..(494): unsure at all n locations
ggagaacacgtgataggtctaaccaatgttcattnttatatattataccttgtgcagcttgtcaaacaggtaaacaagtgggaggagcacatcacagcaagaatgtgatgaccacgtcaagacctctggagctgctacatatggacctcttcggacccgacgcctatctgagcataggaggaagtaagtatggtctagttattgttgatgacttttcacgcttcacttgggtgttctttttgcaggataagtatgaaacccaagggaccctcaagcgcttcctcaggagagctcanaattgagttgagctcaaggtgaagaagataaggagcgacaacgggtccgagttcaagaaccttcaagtggaggagttccttgaggaggaannggataagnaagagntctctgctncctacacaccacagcaaaatggtgtggtagagaggaagaacaggacgctaatcgatatggcgaggacgatgctttgagaatta

SEQ ID NO: 59194 - DNA, 492 bp, Zea mays
  unsure (1)..(492): unsure at all n locations
atatgaaacatccacctatactgaactttatctttactcttacctcatatggaagatgtataaagagatgctgcataggatcgaagaaacccggtggaaatattntttccaatttgcactaaagcactggtgcctctttctccagctgttccatcacatctcttctgatctctttagcacacaactgtctgtagaaatagcttacttcagctaacgttttccacacagcttctgaaatgtatccacgaaacattacaggcatgagcctctccataattatgtggaaggcatggctcttcagtccattcatcttcattgtctccaagttcacagatcttctataaccagcggcataaccatcggcgaatgtaatatccttcatgcacttcatcacttctctccattgcttagattncagacaatagtcagcttttggttgcctccgtttctctaacaccagggtggatgatcacatatactgctagacatgcg

SEQ ID NO: 59195 - DNA, 504 bp, Zea mays
  unsure (1)..(504): unsure at all n locations
gacataaatacttacctagtttaacattttgctttttgcgggaatggaaatttttgagagttaaactaggtatgaagcanggataatgcatagacatgctttctcttccttttatacaagatatgcaaggaatgtataggaagatttatgtacatgtgtaaatgagaggaagtagctntacccttttgtaccttcacatagagacgctctcttcattgtgctttgtccttagtcttagttacttgagacctatattcaagacaatgtatggaaatattttgcacaatagagagttctacaactagtgatccttttctaggttatagttatcatatatcaagtgaatcatgaattgcatcaatctatcctgagttctccttttgacttagtgcatatcaagagagatattggttgatagtatatgaggcactaagagacataagtgttaattggaagtattcaatgatcgaacaaataacagatgcgatcaanagaacaacatat

SEQ ID NO: 59196 - DNA, 463 bp, Zea mays
  unsure (1)..(463): unsure at all n locations
ttctgaagaatgcctccgaagctgccctttcttctgctataagtcctaaaagatgctcttaaagctctttgtaaaaatcattatatatggcaaagaatcgtcgaagaatgtaaaatctttgtaaacatttatgaataccttgtaatattacctttcttccgctgttacttgatttgatgtggatgaaaccaatgcttccagtttttgagccgaaggcaaaaaacatcttctcttcttttcgttcacaatgaaacattcttgagtcgaagcatctattaattgtctcatgcaatgtatcatggtgcgatgaagctaaagatgtctaatgaatgtttgtatgaatgcaaagtatgatgtgatgaagtatgcaagtgcatgccgaagatagcanaaccaacacaaatacgcacacaaactctgcatccncttaagaacgactctggagtctcttcacatcttagtt

SEQ ID NO: 59197 - DNA, 345 bp, Zea mays
tgaagaactaactcacacaaaaagctcaccaagtgcacatgtcataaagctgagcggcttgaatagacttatgccatgggtgaacctaggcaacagttaccagaacttcagccctggctgcttgagcgatcctcacagatggcaaactagtgacttagtgagcaaagccaacttaacataagtgtactggattgttgattaaaatgagctcctctagttcttatgtgttacaagagataacgtgccctaccaacagaataatgatcgtctgctaaagctctactgattatgtcacatgataacaatagttaactgacagatatttcatgataataacgccccaac

SEQ ID NO: 59198 - DNA, 487 bp, Zea mays
  unsure (1)..(487): unsure at all n locations
gctgcaagcctatgattcagaacatagcattacctcattattgataatttaggctcacaaaataatgtcattagacagtgtagataagcctttatgaccttgaacatgggagtaattacacggtcacatttctggtagtgctggaggccccatagaagatcacaactcaatagatactctctacttttcccttcacaattagtattgatgtctgaatcttggagataccctaccaaagctgacattgaagctntcttcanagactcctgcaaaccacctgtagaaatcacgagccctgagagcacagacttgctataatagctaacctgaagaagtttcaccaatcgtggatatgacacagtaggaacctaaaggtaaaatgtaaatcagttaaatgtgaaacaacaatatcaccaccaagtcaaataatatccacaaactggcgacagaataataagtggtgtanataattattaagtcaatattt

SEQ ID NO: 59199 - DNA, 347 bp, Zea mays
  unsure (1)..(347): unsure at all n locations
agacgcaaggtcgaacagccatgccgcccgtcgccttgcgcctncgtgccgttatccctccgttccgccatgcccttcacccaagacatacatattaccttcggtgtctttccacacgcttggacttagcttattttcggtgccatgcccgaacctcggttttccgcctctgtgccatgggcgaacccctcgtttcggcccaaacgcaaggccgaacagccatgccgccccgtcgccatcctgcccttcacccaaggcatacgtcgcagcttcggtgtccttgcacacgcttggacttgagcttttttttggtcgtgcacgaacccacggcggtcttcggccacgct

SEQ ID NO: 59200 - DNA, 502 bp, Zea mays
  unsure (1)..(502): unsure at all n locations
aaacataaattcttctttcagacattgagatgatttcttatattatcttcagcatcgatttcaccggaccaatcagtaaactctctacctcccccggcacatggcaaccccaaaatgagatgaaccgtatcttttgttatcttaagttctttgccagcccctgcgcgtatggtcatgtcatttggatctaatttgtccatcaaccacctgataagtgatctgctttccaatgcatcagttcgcagatcanatatgctagaaaatcccaacctagcgacggcatcacgctgccgatcgctcattatccatgatgatacaataacatccaagggaatgcatcggatattcaatttctggaagcataaatgaatattcattaatacaganagtatatatataggtagaactaatgatactatatntattacaggctctgtaacacctagtataaaacacttaaaaaattaaacaccatatcttgtgataataatatgcataaatg

SEQ ID NO: 59201 - DNA, 416 bp, Zea mays
gtatgcaccccgacacccgttttcggaatgggtgacgtgctgttctaaattgcgcaaaaccaccccaaacatgattttggacctaaagtagtggattgggcatgttcgttgcgaaaaacgaagaaatggttccggtggcgaaaactcgtgctttgtatgcacccccgacacccgttttcggaatgggtgacgtgcggcaacgaaattgcgcaaaaccaccccaaacatgagttttggacctaaagtagtggaatgggcatgttcgttgtgaaaaacgaagaaatggttccagtgccaaaaactcgtgcttgtatgcaccccgacacccgttttcggaatgggtaacgtgcggcaacgaaattgcgcgaaaccaccccaaacatgagttttggacctaaagtagtggattgggcatg

SEQ ID NO: 59202 - DNA, 506 bp, Zea mays
  unsure (1)..(506): unsure at all n locations
taatataataatcaaagcccttcgtaaagtntgacatgntttggacattgtttgtctcccaaacccaaaaccctagctntctaaggtaatatttgccttatcctaatagagtactgcctcagaaaaccctagttacccaggtgtaccatgaaggaaagttatattcaagatataacttaccatgttttatcataactgcatatccatagcatcatatgagcattcatgaatatatatggttatatatagaaaacgaagaagtaagtgtcgaagaagaagagactgcaccaccaactgagactccacctgccaagagtaattnttatttttatatctgtggaatagatcccanatccnctacaacacaaggcaagccccagtgcatttaccttttccttgtgattntaaactctttatcgcttgaatgatgcattangtgataggagttgggtgtaaacaaatagtgcattcctttcttgaactgttacccttcttgatacctattt

SEQ ID NO: 59203 - DNA, 257 bp, Zea mays
attatattatttttcgaccagaaagggaaatgcaaaccttgaatctgatatcaagaacaatggccattttataaaaaaaggactaatcaagagtacgtttttattatccactatgcggatcactgaaccttatatccgttacaatcataatattacattttatgggactaatattttataagtatagacaaaactcattgggcacaaaattataaacataatgatatcaaaatcaatcatcatatccgatcgcctat

SEQ ID NO: 59204 - DNA, 519 bp, Zea mays
  unsure (1)..(519): unsure at all n locations
tagaagcactgtcgtttcttagtccccccgacatgatcttttcctcacgctgttaagcgttagaacgaggattaggctccgataccaattgaaagttgcctagaggggggggtgaataggcaagttaaaagtttttcaacaaaaactagaagcaaactgggtaaaactgaattgatctcgaagttcacccagttaattntggaaatgagatgttctaaatgatccacagggttcaaagtagtagatctgagaagggcacttctcanaatccacacaccananagatataaacaaatctttcacggaatggtgagagaacgaagaacacgaataagcacaatgaacaagaacacaagagacacaagatttatcccgaggttcggtcacaccaccaatgtgccctacttcctcngtgaggcgcccacaaagagccnggtctctttcaaccctaatccttcctttgccgaccacaaaggtcaagcccacacactaatctttgctcaaacgagcgggtaatac

SEQ ID NO: 59205 - DNA, 468 bp, Zea mays
  unsure (1)..(468): unsure at all n locations
ctaagcttgtcaaccatctcacgactggcaagattatggcagctccctccatcaattatcatctttactactttggcttgcactctggctcgtgtttgaaaaagattatgttgntgtccaatttcagcttctttcatttgaacactcaagatntgtgtaaccacaagagtagtaccatgctcaaattcacatcccgtatgttcttcagatatatcaatgtcatcttcatttcctgcttcagcttcctcttcactcgctgatgtatattctccatcatcagtcacaaggatcacacgattatttggacactcctttatgacatgaccacgacctccacacttgaagcactgaataccactactcttggctgtngaacccactgatgttgaagtggaagctgctggtttataactcgtgtntggagcagcaccgttctttccactagaattgccttgaatattggatcgc

SEQ ID NO: 59206 - DNA, 483 bp, Zea mays
  unsure (1)..(483): unsure at all n locations
ctatctgagatgtnttgggcagtcctatcctagacaatggtcttcttggttatccctttgctgaatttggtataatacctggtatcatatagctctgggaaattatccttttgaagtattatatggtcatgccccttctcagtttgggttggtttcaggagagcaatgctcagtgccagagttaaaagacttgctgtctaaccggcaacagatgttacaacaagtgaagatgcatctgcaaagggcccaggaccgtatgaaaaagcaggctgacaagggtcgtatggaaagaacattcaaggtgggtgatcgggtattcttgaagttacaaccattttgccagacttcaattgctgcccgttctagtcgcaagctggctttcaggttctttggtccctttgaagtgattaagcaagtgaatcatgtggcctatgaattagctntaccatctggcagtgccattcacccagtttttcatgtttc

SEQ ID NO: 59207 - DNA, 514 bp, Zea mays
  unsure (1)..(514): unsure at all n locations
ctaagcttctaagggagaacacgtgatanggttgactaacgtgcaattcgatatagatataccttgcgcagctggtcaagtaggtaaacaagtgggaggagcacatcacagcaagaatgtgatgaccacttcaagacccctggagctgctgcatatggacctcttcngacccgtcgcctatctgagcataggaggaagtaaatatgggctagttatcgttgatgacttttcccgcttcacttgggtggttcttttgcaggataagtctgaaacccaagggacccttcagcgcttcctaaagagagctcanaatgagtttgagctcaaggtgaagaagataatgagcgactgagagcacctagaggggggngggtgaatacgtgatcctgtaaaaacttatacttatagccacataacttagattaagcgttatcacagtaatttgcaagtggctagagagaactcataacacgagtaccacaagatagcaatcacagagttgacaccgtggtta

SEQ ID NO: 59208 - DNA, 546 bp, Zea mays
  unsure (1)..(546): unsure at all n locations
gcgacactctcgaaactcaagcttgtcattgtgtccgtgatgatgcaggtatgtgacgaagtcgagcctcatgtcttaaacccagtatgggaccacgtagagcttgagcatctgcagagggcccatgaggaaggcgaggccagctatgagtgcgaccatggcgagccagcacgccgtggaggtgagcacttgtttgctctcgctgggctggaagaggtcgctggccgggtggaaatgggagccggacttgccggagctcctgttggccaggtataatgggtagacgagcatanggaagggcagcctgaagcgcagcatcatgacgacgctgtccaggctcttgaacagacgctcggngagcttgatagtcatagatgatagatagacatgcaatgcacgatgagatatataattattgcagttgcatgtggctagctagggcacgagaggaggcgtacgtaccggatgccatgactcgtccttgtccacgtggccgtggttctggtggtgcgtcctgtggctaatccgcctgcactagaacataca

SEQ ID NO: 59209 - DNA, 503 bp, Zea mays
  unsure (1)..(503): unsure at all n locations
actcagcttatttataaggtgaagttaccatgtaaaccaaacagttcattttataactatgtaaactctatggtgaagttactcacgatggagctngtgtaacaaagctaaaaatggtggtgtcgagcagactcaaacacccctagatctgatctttagattcatcatttcttttaagaagaatactgtttgttgaatccgaagttgagatatatatggacctatttagcatagctgttttttnttgttggaaaaaaagacaacttatctatgaagctagtgaanaacgacttacttattgctttcttttagttcattctaaggagcgattgatctgatatagcttctaacttctgtggcagttggttcatagcagaatttgagaatctggatagtgcacacaatctagtgcanatttcattatcacgttagactggtagcagcggtggcctgtatgtcatcttggacctgtagaataccggatctgagaataaaaaaaatgt

SEQ ID NO: 59210 - DNA, 501 bp, Zea mays
  unsure (1)..(501): unsure at all n locations
tctanagggagaacacnatttaggactaacanatgttctatttgagaaagacagggtttgtagcgcatgccaagcaggatagcaagttggtgctcatcatccacacaagaacatcataacgaccgacaggctgcttgagctactccacatggatttattcggtccgatagcttacataagcatcggcgggagtaagtattgtcttgtaattgtggatgactattctcgcttcacttgggtgttctttntgcagganaaatcacaaacccaagaaaccttatagggattcttgagacgagctcanaatgagttcggcttaaggatcanaaatattagaagcgataatgggacggagttcaagaactctcanattgaaggctttcttgaggaggagggcatcaagcatgagttctcttctccctacacgccacanaaaatggtgtagtggagaggaagaatagaactctacttgacatggcgaggaccatgcttgatgagtac

SEQ ID NO: 59211 - DNA, 408 bp, Zea mays
  unsure (1)..(408): unsure at all n locations
gaacttcacacctactcgtctgtgtatatagtactgcacgtcagaaagcgaagcgccaggattnttacaccaggcggacagccgcttgcactcgctgcgcggtggaccgcagagaccaaacagtaactctgcaaggtgggaccgctatgcgctgggaaactgaatcgttcctcggtaacgagctcagggaaggtgttttttggaccttcggcttcctgaagcttaagagactctnttcacggatcaagctcgttacgaanaacgatctatcgccgcgaaaggggctactgttgggactatgcttcgtcgccgaacggtctgtaagaagaaagttgtttcngctgaagctgttcgtatgggatgaccgaagggtccttttcatgaagcttcggaattattaaccgacat

SEQ ID NO: 59212 - DNA, 460 bp, Zea mays
  unsure (1)..(460): unsure at all n locations
cagaacagcccattatttgttctattttttacatatccagaaaactcatagaatagaaaagcgtatatgctgtcttgatggcatccaagaagcttccgcactactttcaagcttacaacataattgttccttcttcacaacctctgaacgatattatgaggaaccgagaagctactggaaggattggaaaatgggctgcagagctcaatgaattctgtattgaatatgttcatagatcttcgaatcagtctcacgcgttagcagacttcattgctgactggacgccacgggctcatgaggaagaagcaaataaagacaccgaagcatggatagtcgtttgcgatgggtcctgaggaaccttcggagcgggagcggctgctgtgttggtttcaccttccacagttaaaactccgtatgcggcatagcttgattntagttgcacaaacaacattgtcgagta

SEQ ID NO: 59213 - DNA, 501 bp, Zea mays
  unsure (1)..(501): unsure at all n locations
taagtcctacttaattatctggtagtagtatagattgagtcctatttctttagtgccttcacttgttctctaaagcttgttattataggctggcagcattgatgtactccattgctactatgcccatggagaggagaacgaaaactttcaaaggcgaacatattggctgttggaagagtaagtgctgactgttgcattcatgtcattccacactcatttgggtggtagactggtagttaactcatactcagaggagagtgtgactgatatgactntcttatttttcagggatttcactcatattgttcttgtacattacctagaagtcaaggtacattcttttcatagtcgattaaccttctctctcatctttcccctttntgtgtatttccttgttgggtgacttgtcactggaaaatggcttgtgggagatcttanttgatgagtacacatcggatntatcacctgtgctangaaatacgtctaanacacctatattca

SEQ ID NO: 59214 - DNA, 504 bp, Zea mays
  unsure (1)..(504): unsure at all n locations
ngacacaattaaaagggagatgcattgcccaaccttctcaagataaccgtgatcacatggtgaagaagcttgagacgggaacaaccgtggcatgcattaaatcccttgaaggaaatgtcaaggacttgaggattgccaagaggaaggaacaaaagatgagaatcaatgcatcctccaaaagcctcaaccatgcctccataaaaggtaacatccaaggtaataatcaagccacacttcacactaagagaaataagaggtgtagtgaatgctttgaaaaggggcacttgattaggtcatgtccttacattaaaaatggcttgattattaacaaggatgatagactntgttttaaatgctccaagaagggacacttatttagatcttgtccncatttaaaacanaaaggcattatgttagaaaagaaaatattcactaaccatgtagcaagcaagaaacaacgaaggaagaaatcttcaagagttgaagatcgactatgctacatat

SEQ ID NO: 59215 - DNA, 464 bp, Zea mays
  unsure (1)..(464): unsure at all n locations
tgtgaagattctncattccaacatgtgctagtctgcgatgccttatccagcccatgttagtcttagcaattaagcaagtgtcgagttcagctctatcaaaatctactaagtatagctgaccctctaacactcccttaaatgctattgaatcatcacttcttctaaagacagtaacacctatatccgtaaaaagacagttgtagcccattctacataattgagaaactaaaagcaagttgtaatctatagaatctacaagaaaaacattggagatggaatggtcaggagatatagcaattntacccaatccttngaccaaaccttgatttccatccccgaatgtgatagatcattgnggatctnggtgtttctcgtaggaggagaacatcttcttctcccctgtcatatggtttgtgcacccgctatcgatgatccaactngagcccctatatgcataaacctat

SEQ ID NO: 59216 - DNA, 516 bp, Zea mays
  unsure (1)..(516): unsure at all n locations
cttgaactagctgaaaacgnctagaatattccttgatgcttcttttctatgattngtgaagctaaggctagccttatctccgaaaaaggtttcaaatatcaaattgagaaaacattcttaaagaatcatttcttagatcttttgttttcgtttacaaattctccactccaaacaagggacatattcgtagattccaaactacatcgatgaaatatggtgatatctttttccaacctgtattcctccgtatcaaagtctactttctttctcttggaggtcaaggttatctgttacacctagatctaaagttaaatctaggcgtgaatcaaatatatgttatgatcaagtctcacatatataacgatgtatgatacagaaatcaatgccacatctttattatataataggaattctatacaaaatagctaaataatctctactgctccttacaagaatagtgtaggcatccacaaatacttgatgcatggttctgccatcgcacccgtacgcgatatc

SEQ ID NO: 59217 - DNA, 517 bp, Zea mays
  unsure (1)..(517): unsure at all n locations
nggagtagcagaggattcaacagcaacaacaaagcaatgtagtctctatctttttgcggtaggctatagttaaaacacaagtacccaacatgagtcccaagcaaattcagaggaaagcagatgattgcaagaggaatacaaagaattatgtgtgtaccattgtttcaatattgacaatctctcccagtagtgacaaccaatctgtgaataagaatagaatatcttcggctagaccactggagcttgagaagattttcttggtagcatcatanactaccttctcacctccgagcttggatggcaaagtagatatattagtagttgtacaaaaggacaatgaatcaatacatgctatagacatatttcttcagtagtaagaagctaactgtgtgcatcaatattctanaagaatgtataataagaaaaacaaggtcaataatctagagcattcaagccaaatatatgtaactgcagcaatgactggattggaaatattctcaactcaacaattagaata

SEQ ID NO: 59218 - DNA, 511 bp, Zea mays
  unsure (1)..(511): unsure at all n locations
ctaagctcggcacatagagagaatgggtgngtacgttacattggtgatgttaattaattgggttctaatgcaatttaggtgggttggatgagtcaacaatgtgttttctctatgggtggattgtgttgggttgagtgggttacaaggattgagtttcatcaatagaaatatcataacacaagcaaatgctatgtcggtggccagtgacctgcaataaacaagtagaactctggagccaaatttcatagaaataataaacgtaacaattcagaagaataaatgctaactagcttatgcaatttgataaacaagagggttctcttcataaattaatagctcatgatagagatataaaaatatatgtattatactacgatgtgcacaataaacataatggcttggcacaattgaatattgatgctatctanaattgatgatatctctacattgatcacaacaacacatgattattnttctaatactacaaatgactatcgagccagaactcatg

SEQ ID NO: 59219 - DNA, 520 bp, Zea mays
  unsure (1)..(520): unsure at all n locations
tgacaggaccacaatcttgttgttcctgttcacctgcaaccctgtgtagagtatgtatgtgtgggagacagatatcccccaggtccactagaagattagaaggcctcgcgaaaggttttgggcctattatcttgcaaggtcgtcccctcgtgggccacgggagaactactggcagaatgggtcgatgcagggaaggagcggacgcgggcccaggcggctcacgggatttaagcgttatccacagcgctaatccgatcttcccgcgcgacacacttggacatcggaaccaaatgagaataagtcggcaagaatgtaggaagatgaattcagtcggttcactattacttangtatacatcgttatcatacacgcatgtagtgccccacggtcggatatataaggcctanggggcaccccatcaaaaacaggtcattcatcagtcgtctactcagttcattagctttctccatactggagaactcncttgtaacccaccacataaagatccacaccaggaagt

SEQ ID NO: 59220 - DNA, 117 bp, Zea mays
tcaatggtcagaatccaacggcagtgatgacgtggcggcggcactctacttgttctgtgtgcaccggactgtccggtgcgccatctatcagtcagcctcccaacagacacatttggt

SEQ ID NO: 59221 - DNA, 491 bp, Zea mays
  unsure (1)..(491): unsure at all n locations
caacccttgaacaaggacaagctgccttcgctccaattgtgttgtgtcttaagnctctctgaaatacttaacggacaatgcttaaattgtaacaacatgctttcataagtgcataaattgtcatgagcatcacacttatactatgacacaatgcacttcacaatctgtatgatatagatatgttctcattaacctaattatgtgcaattggcatttaagaccaaaatatatgttcctgtccatgcacatacttanggggagcaatctatattgtatagaactatgatcatcgctaattngatgcatcctttgtgatcatatctctcttatgtctatgactaatgtgttctcaagtgtatctcaaaccaagtcatacgtatattgaaagggaatnggagtcttctgcgaagacaaaggcttccactacactctactcatccttcgtcgacctaccgttctctctccatactttgtataatcttcactcatat

SEQ ID NO: 59222 - DNA, 452 bp, Zea mays
  unsure (1)..(452): unsure at all n locations
ggcacacatagctcatttgaataccttcgatcatatctcttctatatgctatgactaatgtgntntcaagtctatttcaaaccaagtcataggtatattgaaagggaattggagtcttcggcgaagacaaaggcttccactccgtaactcatacttcgccaccactccgagcaactctctcttctttgggggagaaatgagcatcaaggaaaaggacttcatccttgggggagagagtaaaagctcanaagcaaaaggaccggacctcatctttggtataatcttaactcgttacttatgaccaaaggggaagaaattacttcgagggctctaatgattccgtttttggcgattcatgccaaacaggcggagaaatgagaaatgagtccaaagcataaggtccgcaccaccaccaccaaattcaagaacttagtgctntccaaaagtcttta

SEQ ID NO: 59223 - DNA, 503 bp, Zea mays
  unsure (1)..(503): unsure at all n locations
tctcttggtttagaaactaanagaaatgatatgttatcctctgagttgtctgcttgccatgaatctgtctctagtttaaagattntaaatgatgaattaaatgctaagctagaggaagttaacaaaactaattcatgtgtagagcatgttgttatttgtaatagatgtaaggatttcaatgttgatgcctgtgatgaacatcttgcttctattaccaaattaaataataaagtggcaagtcttaatgctcaacttaagactcgcaaggggtgatttgataaattgaaatttgctagggatgcccacattgttggtagacacccttcaattaaagatagacttggttttcgaaaggaaaccaagaacttaacaagccaaaggactcctggtctcaacaaggagaaagggaaggcccctatggcaagtagtcctcataggatccatgcttctatttatgatagaaaaattgctagtcgttctcattataatgagaagtatgttca

SEQ ID NO: 59224 - DNA, 511 bp, Zea mays
  unsure (1)..(511): unsure at all n locations
tcngtgttatagcatgcccgaagacgaaggatngaactgacttatagatagaatgaacctttagcccataagggtctgagtcattgttgtaaactnttataaggggcatgattgtaattctttacaggctgtgtcctgtatctataaatagtgaacagtattcctttactgttcacgcattcctgtaattgcaaacgcattgcccgggaattattattggtcaaggagaaggtatatatgtacttaaattctatgttctgacacttttatgttcatataataacatatgtgaatgatgttacttatttctgatacgtttgtctttaatgtctcatgttttgtatattatttcatattattttgtaagtttaatcacgaaggtatgaccttcgtgatatttcactcatggtcttcgtctgaagttcattaaatcccttggggaaataatgcttcaacggacgaanggcattaatatttaacattnntatgtgccttgttcttaattatagca

SEQ ID NO: 59225 - DNA, 502 bp, Zea mays
  unsure (1)..(502): unsure at all n locations
tcgtcttaccatactcttgatactcgtgacccgattccgaagatacatgttcatatatttcacttggaaaacattgtcaaatcatgnttttgaggaccttcggaagccgaaggcccccaacaataaacaactacgaatgtgaatttgatagacacaatggctgctaaatcangagggatatttgaggtgtttgtaactgatgttaggagaaaagtgcatgtttttccaatgattcttttagcaacattgtcgaaacaaaacattcgcatttcagccgtgtcatcagcagccatgaaattgagtntgtaccttgaaatacaaatatattgaagttgtgaaagttttgattatgaaggaatgtaaacagcaaggtgaataatagattgatttgtatatctaataatggcctaattatgtataccttagaatagcatttgtcgagccacatgtcctaatgatgacaatgatgaccgcatggatggtttgttggacatgtatacat

SEQ ID NO: 59226 - DNA, 378 bp, Zea mays
  unsure (1)..(378): unsure at all n locations
catgtcaggacgaaacacaatcccagctcaagcgaagacagaggccatcatacccaagggcattaacacaactcctaatcatctgggacacaacacagctccttcagatcaccagccccaagaggcagagggggacgaagctttggaggaagattcagctcacaaccaagaaggtttttctgcttgttctatggagaagataaggggcacacaactacgacatgacaagttacaatacagaagcaaaaggagataactgaggccgaagcacggcagaatcaaccgaagcaagtccgacatattgcttcgtgctatnntccatacattgctaagtatgtgggcaattaacaacaattctcacaacccacagtgtcagta

SEQ ID NO: 59227 - DNA, 474 bp, Zea mays
  unsure (1)..(474): unsure at all n locations
cacactatgatactcagcttcgcatctgaaggcagntaccttggaggaaagatataatctcagtccttcaatcttcactatgaacatgagatatagtgagcactgctctttcgagaagttccaccgaaggtgctcttattgtctcaaaaatacttctgaaggtaggggcagcccctgagccgatgatttgactaacaaatctgcatgttcattttcgcctcgtgggatgttcttgacggagaaaccttcgaaagaagcctccaaccttcgaactgtatccagatatttttcaagtttcggatctcttgccctgcaacttttgtcaacatgaccagaaataacttggtaatcagttttaaggaccgcccttcttatccncattgcctttaacttctgaagccccanaagcaaagctntgtattcagcaatattatttgtgcagttgaaatcaagctntattgcatagcatgttct

SEQ ID NO: 59228 - DNA, 451 bp, Zea mays
  unsure (1)..(451): unsure at all n locations
cgcctccaggtgcagtgaagagaattcctgctcctgctccctgcaacttcagcgagccatcaaaatacattcgccatacttctgcggtttctggattatccggcacttgctgttctgtccactctgatacgaaatcgaccagtgcttgagttttgatggcagtgcgaggtcggaactcgatatcatgggatcccaactcgcaagcccacttggctattcggccaatgacttcctcgttgtgaagaatgtcccctattggaaaaccagtaactactatgactttgtgatcgtcaaagtagtggcgcaactcgcgggcagttagaagtactgcatataatagcttctgaacttgaggatactttntcttcgatgggcctagaacctcactgatgaagtagacaggatgttgtaccgggtatgcattcccttctttcactcgctcgactaccaa

SEQ ID NO: 59229 - DNA, 488 bp, Zea mays
  unsure (1)..(488): unsure at all n locations
ggcattgcatatntaaatnnnctgtattgcatctatggcttgtctaacctatgtgatataaccgccaatgaagcgagtgaaaaagcttaactcgggtcaaacctgtacaagtctagctntaagcttttagcacttcaattcttactattcatgcgattattggttcttgaaatatgcatgaggcactgcacttacggggagtattcataactcatatcactcttgataaacccctagtgcaaaccagaatgtaaatttcaccatttgcctattttctctaaacattatctagcctatggcacaatatnttgaaaagtatatgagggtaccaatacctgtcccaacaagtgttattttgtgtgattatannagtgggatttggtttggttaggagttagatagaacaattcacacatttccaaactcctctctgtctgggctcaccggacagtccggtgtgcaccggacactgcactgtgcaatgtccg

SEQ ID NO: 59230 - DNA, 360 bp, Zea mays
  unsure (1)..(360): unsure at all n locations
tcanaagctaaaacttagcagatcacagtgcacaagagnctaaaaatgagtgatcangagtggttggccagaaagcgtgcaaaataagtttgcggtatggccgtatttatacgcttgatgcgttgaaagttgaaagaccccacttgtcattgaatgttgctattctagcaaagggaaggtgttttttcggaccttcggcataaagccttcgttcatatcgcaatctgaatntattatttcaaacaaattaatattgcgaggngctatctgtgggggccttcggcttccgaaggtcctcanaaacatgatttaacagtgtttctagagtgtaatgtgtgaacaggtaccttctgacttata

SEQ ID NO: 59231 - DNA, 512 bp, Zea mays
  unsure (1)..(512): unsure at all n locations
gaaactaagcntgacaatgttctgcgatggttcttggggaaccttcggtgcaagagcatatgcggtcctagtggcaccttcaaaagtcaaacatgttatgcagccaagcttgacttcagttgcataaataatattgctgagtatgaagcacttctgttggggctttggaagttgagagcaatgggaataagaagggacatcctgaaaactgattctcaagtcatttctggccatgtagacaaaattagcaatgcaagagatccgaagctcgaaaagtatctggatacagttcgaaggttagaggcttctttcaaagggttttctatcaagaatatcccaagaggtgaaaatgagcatgcagaattactagccaaatcagcggctcaggggctccctctaccttcgcaagtattttttgaaacaataaaggcaccttccgttgaactcatggagagagacagtacttgtatttctccagtacatagtgaagattgaaggactgannatatatc

SEQ ID NO: 59232 - DNA, 398 bp, Zea mays
tactcagctgatgagctgacgaagacagagtcacaatttgatgcatcttatctgatctgaaagtgccttctaatggcttgcaattgctaaggatgaaaaataaatggtaccaaaggaatggtgcaggattgttcaaggtgctctaatacaaaaattttcagatggtgctatggaaagttaaaagataggatttccagttatagacgggaataagttatacgggtgagtctgaactaaacaacacataccactactacaaaacttttggccaccaaaaaatatttatctgatgactcaaagagatttctaagtattactaaaataagcttatagcactttgaaaagagtaagcacttttgaatgaaaaatagccctgcctatgatccacaaattatagc

SEQ ID NO: 59233 - DNA, 489 bp, Zea mays
  unsure (1)..(489): unsure at all n locations
tanattccttgcangtttatgcattttggggctcaagctggattatctacagcggatgcacaaaccacatgacatgggagaagaagatgttcacctcctacgtcaagaacaaggattcccaagatacaattatctttgaagatgggaaccaaggcaaggtcaaaggcttgggcaagatagccatcaccaacgagcactccatatcgaatgtatttctagtagagtcgcttggttacaaccttctgtctgtaagtcaattatgtcacatgggttacaattgtcttttacaaacgttaatgtatctgtctttagaaggagtgatggttcactagcttttaagggtgtattagacgacaaactctacttagttgaattttcgaaagaggaggccgatctagatgcatgcttaatagctaagactagtatgggctggctgtggcatcgccgtctagcacatgttgggatgaagaaccttcataaacttctaaa

SEQ ID NO: 59234 - DNA, 521 bp, Zea mays
  unsure (1)..(521): unsure at all n locations
ctcaagcttgtaagaattgtaaatcaatgcacattctccatttaccattggccttcttcaccataacagtattagctagccactctgggtatntgacctctctgataactccagctctaagaagcctctntacttcattccgagcaccttcagctntgtcatcagacattttccaaagcctttgttttcttggcgtgaaagatggatccacattgagtgaatgctcaatgacataactggtgacaccgcaaagatcattagctgaccaagcaaagacatctttgttggtgaatagaaatattagcanattctnttcctgttcttcagataactgagaccctagtnagtacctttgttctgctatatcttcacatagaagcataggcttcggctgatccgccgaagcagccttctctcttttgtatcgatactgctcacaggcttcgactccatctatgttatggattgcctttgaatctgtcccagttccttcggccttcctgtagcttcttgactgcatg

SEQ ID NO: 59235 - DNA, 506 bp, Zea mays
  unsure (1)..(506): unsure at all n locations
ntctcaagtactcctcattaacatcttctggcaggttaccaatataagcagacttcatctgagtgtacacaacagacatcacgatcaanagttctaacagaagatgactatatntgtaaatcgtatcgaggcaaaaatgtttccttttttctacattaccttggccatttcatcaggatccagatgagactctntatcagcccaatttatcgcaggatgcaaaatatcaccaagcatganatctgttcttgaaccgatgcggattacacgtgctgcagcctgtgatngactagttgaggaatgaaatcaaaggaagctgacttgaagagatagcaaaggacctaagaacatcttcaccaagatgttattagatatctgtcttttcctcgcatcgcagtggcganaactcagatcagtggtgattgatgaatcaagatcttatctagataaacatacttgtattctgtatgtggcagctgtgattgatatcaaatgagaagtacata

SEQ ID NO: 59236 - DNA, 410 bp, Zea mays
  unsure (1)..(410): unsure at all n locations
agatagactccagcgaaggaagattccttttatatctatggncttcttgtccctgtacaacaataggacaagagttctatgtcatggcaccgggtgtcaggggtcatacagcataccgagcccacgtcgtatgagaaccacgcttctttatgataaaatgttcgagtatgaggaggaaggcatagtgcaagtcccgactcaccggcgcccaacgacgagtaaaaatgcgtggagcgtacccgaccttgtgtcgtatgataaacggcagggagctagtgtagcatcccaaatattcacatcttgagattttctcaaactcgctctatattcaaaatgaatatcaaagttcatttcataaagtgtgtttgcaagtcgatatcagcaaataaaatatgagggtctatattctt

SEQ ID NO: 59237 - DNA, 419 bp, Zea mays
  unsure (1)..(419): unsure at all n locations
tataccacagataagcattgaagtgcagatataacgactagtaatacagagagtcaggatacaatacagaacagagcacacagacgcaaggatntatcccgaggatcggccaagcctgaaatgcttgcctagtcctcattggagttagccacacctgagcttggagtctatatcaactccttcctccgtttgctcagatctgtcaatatgacagatagagcctttcactattgagatgggttacaacaacaccgtggctgcttacaaacttctcggcagcacctccgtagagtaacaatacgctcaagaccttgctctagctcttagcagctctttccactctctaaagctatagctgtgctttacacaactatagagttcacacaaggggagagtagaattgaccgatgatgctacac

SEQ ID NO: 59238 - DNA, 481 bp, Zea mays
  unsure (1)..(481): unsure at all n locations
gcttcgggacaactgcaaagctctgntcggacgtcagcgcctatgtgcatatgcgccacgggcttctcgggaagatgtggggatcagacaacaagacattactgtctattctgtggtgaagacaagggccataccaccaggatgtgccacgtcaccatccagaagcaaaaggagatagcagaagctgcagcacaacagagtcagccgaagcaagtcatgcacactgcttcgtaccattcgccttacaatccagaatatgtatgcaaccactctgcagcttctgttgcttctgcaagtcaacctcaagcatcttggcaacagcctccaccgtcaccaccaatgcagcgaggacagcagccacaacggagtcagcacactcaccttcagagggacttcacagaggagtccgaagctcgcacagtcgatagcactgtgccagagtcgaagcacacttactgacatatatcctacctcgacagca

SEQ ID NO: 59239 - DNA, 448 bp, Zea mays
  unsure (1)..(448): unsure at all n locations
ttagcgtntggctccanaccttggcttctcacagcccagacaaaaatccccattcttataatagcttcgggagtgaagtgatgacggtagatttggaatgtnttcagtacctcaacaacaaaattgctcatggggaatcgaagcccagccttgaggaagcttcggaaaatcacaacttcatcctcttcangggtgggagaagtcttttccccggcatcagctctcacaatagatatgtctcggaagttatcgccnctcatattatcaatgtgactctgctngatggttgttttcccacaaactgagtgacttggtcgccacggtcgatcttcggcctctntcncatcactttctacatcatagctgtcgctatcatcagtatcttcggacaaaccttcgagaatctccttcgtgatattctctgtattagtctctgccatcgctatca

SEQ ID NO: 59240 - DNA, 495 bp, Zea mays
agctcaaacagttgtgcatgctccattcgcctgctccttccatcctgaataatgtataatatctcacaacaaatggcagacaagatatatatagagggtccatgcacatgcacgcaaggttgctcgttacgtttcgaattacacagcaagaaatcaatgaaccagcagatgagctgctcatctgacacaagttcactttgtaagcaaaataaccaagacaatatcaaatctggcatgagatcctgtgtcagtgtcatgctcaaactctcctcgagactagaaacatacataacaagcacttgctcaatctaccggctcattttgctttgtctgaccctgtattctcgaaaaatcaactagtactctgtagcatgctcggcaggcagcctcaaccagccttatggcaactggcacggcagccaacaccatggtgcaatgtttgataaaaaaacatcacacatatcatttatgtagtacacctacaagtatgtatag

SEQ ID NO: 59241 - DNA, 394 bp, Zea mays
  unsure (1)..(394): unsure at all n locations
ccgacttanagaggaacatgttgcttatttctctatagatcggccttaagtcaatcgtaaacatgaagggcatgtaatgtattttatacacgctacgccatgtgcctataaataggtgaacagtaccccgtactattcacgctggcttgtactcgcttgtgcgtcacgcttggactttctgtcttctgttcaaccaaaggtacaaacgtaattcaatatcgttcttacttatccatgatgatataatacagatatattaataatgtcatatgattattcatgttatttctcatgtttcatatgcttcgtctctcattaacacatactgcgatgatgaaggtacgtgcttcaagaccttcgtccgaagatcgttatatcctaacggaaataatgc

SEQ ID NO: 59242 - DNA, 493 bp, Zea mays
  unsure (1)..(493): unsure at all n locations
ttagagagagtgattnngtgtgttcatttgagctcttgcgcttggattgcttcttttctttctcattcttcttgtgatcaaactcaattgtaaccaaggcaagagacaccaattgtgtggtggtccttgcggtgactttgtgtcccgtgtgattgagaagagaagctcactcggtctaagtggcccgttgagagagggaaagggttgaaagagacccggtctttgtgaccacctcaacggggagtatgtttgcaagaaccgaacctcggtaaaacaaatccttgtgtctcgctcttcatttgcttgcgatttgtttttcaccctctctcttggactcgtttatattttctaacgctaacccggtttgtagttgtgattaactntgcaaatttcagtttcgccctattcacccnccctctaggcgactntcaattggtagcanagtctggtgcttcattagagcctaaccgctcgaagtgatgccgggagatca

SEQ ID NO: 59243 - DNA, 227 bp, Zea mays
  unsure (1)..(227): unsure at all n locations
tattggctcaagcgaaccccaacagcatggtctgaatgcctaaaagatattcttatcgataatggcgtttacagcggaagagccgatcctactctctatactataacacttgcgaatgatatgattcgatgccgaatctatgcagatgatatcatatttgngcctactaacgaatctacatgtgacgagttaagtatgatcatgactcagaagatcgagatgtctat

SEQ ID NO: 59244 - DNA, 473 bp, Zea mays
  unsure (1)..(473): unsure at all n locations
agtaccagnttcttcagccgaaatttgttctgttaattctgtttctgtggcttccaaggatttcaatataccgtggccggtgagtaagaacctttatctnttttctctccggcgctggctcactgggagcggctgaagccacttcctttgctgaagcagtattttttctcttctgaccccgtgttggataacggtagtcagggtagacaaacccaattgcatcaaatactcggntaagtctcttcctcttttggcctccgaaggccgctgatagtgcattatctttggccttagagtatgacccaagcaattcatcacttatggcctcaatactcttcagccagtcgtcatccggctcgacgaacttatctccgtatttgaatgtgtattntagtctaactagtccaccttcgtcaggttccctgacgggttccttcggcatttcccatttatttgcaagcggccatactctg

SEQ ID NO: 59245 - DNA, 435 bp, Zea mays
  unsure (1)..(435): unsure at all n locations
tggctgggtattaccgccgctntatcaaaggattctccatcatagcgaaacctatgaccgaacttctcanaaaggacaataagtttgtatggactccaaaatgtgaggaaagtttccagatcatcaaggaaaagcttataaccgcgccccgtttgtcactaccagatatacaccaggatttcgtcatcttctgtgatgcttcaaggcaaggcttanggtgtgtcttgatgtaaaatgaagaaagtatcatctatgcatcccgtttactcaagccacacgagcagaactaccccacccacgacttggagtcggcagccatagtacacgccttgaaaatatggaggcactatctaattgggaacaaatgccacatcttcaccgatcacaagagtctgaagtacatcttcactcagccggacctcaacctctgtcaaa

SEQ ID NO: 59246 - DNA, 534 bp, Zea mays
  unsure (1)..(534): unsure at all n locations
gaactatanaaactaagcttgaatgagtgacctccacatttttgatatgcatgtacatcttatcatacatctcgnggatcagataaaaatattacggccactatatttacatcatatgtttcaagttggagcgatacctgngagtattaaaagaatatgtgcgagatcgcgctcacccagagggttcaatcatggagggatacactacagaagaagtgattgagagttgtatagattacatcagagacggaacaatgatatgtgtgcctgtacctaaacatgactggaaactatgtgggagagggagaatgggcaagaaaactcttcgcgttgatgattacaagctagtacattgtgctcatggtagtgtactacaacatctcgcgatagcagagccttacatagaggaacaccttgattatcttcgtacagaatatcagaaccacacagatgactgtatcatgagggagcacatacatcgctctagcgaatgggtatatggacanaacattccattcggagactctttggaag

SEQ ID NO: 59247 - DNA, 487 bp, Zea mays
  unsure (1)..(487): unsure at all n locations
cgctaacctcctcanggtggtccacacagtactgcatgtgctctttaagctntgatctttaaaggtgagaacaaatagaagttagtcaacgaagccaatgggtctaaatggtttatcaaatattatataaaatgaacaaaggggacacacccaaacttcctgttcaagctgttcgctgcaacagtagctgctttcccgcctccatactttttggtgaagtcttccttaactctgtccaagaaagctatggngatttgtcgcccaactgattcaacagcaactacacaatacgctgcagaatagcaaacaatatttatcatttagatgttctagagcattagttgaatgataaagtaagcaccaaagcagaaatatattaactgatatttcatgttaaactaagaactttcacaanggatagataagtaaaagcaaatagtcatatttgcttcagattaaaataatgaagtaatggatgttctatatt

SEQ ID NO: 59248 - DNA, 397 bp, Zea mays
ctatcaaatggacgtgaaaagtgccttcctcaatggacctatctatgtataggtctttgctgagcaacctctcagctgtcaagatagtgagtaccctaaccatgtttacaaactctcaaaggcgctctataggctcaagcaagccccaatagcatggtatgaatgcttgagagactttcttatcactaatggctttcaagtccgaaaagctgatcctacactctttactaaaactatcgcaaatgatttgtttggatgccaaatttatgttgatgatattatatttgggtctactaacaaatctacttgtgaagagtttagttggatcatggtacaaaaattcgagatgtctatgattgggagttgtgatatttcttatgatctcaaatcaagcaac

SEQ ID NO: 59249 - DNA, 395 bp, Zea mays
  unsure (1)..(395): unsure at all n locations
tatcgcaaccctcatatatatatgcaaagcagcactgcgcgatggtccccacaatatagaaggtttcgctattctagcgaatggaaggtgtttttcagaccttcagctaaaggcctttggtcgtttcacagtctgaatttgttacaaaggaacaaactaatactgcgaanggctactgttggggccttcatcttccgaaggtcctcaaaaacacggctaactatttattttatcatattatcaagtattcaggagcttccgtaccagaaaagcttcgacatagatcaatggaagtacaacaaagcaagctttgtcacgatgatacacggangcgacgtatggagaatgtgttgttcaagttgttagtgcaaatgacaatactatcccctgtacat

SEQ ID NO: 59250 - DNA, 430 bp, Zea mays
tgatatcctcctcctcaagaaatccttcaatttgagaatccttgtactccgtcccattatcgcttcttatctttttgattcttaatccgaactcattttgggcccgtcttaagaatctctttaaagtatcttgggtttgagatttttcctgcaaaaagaatccccaagtgaagcgagaataatcatccacaataactagacagtacttactcccagcgatgcttatgtaagcaatcaggccgaataggtccatctggagtagttcgagcggcctgtctgttgtcataatgtttttgtgtggatgatggactccaacttgcttccctgcttggcatgcgctacaaatcttgtctttctcaaaatgaacattggttagacctaaaatgtgctctccctttagaagtttgtgaagaatcttcattccaacatg

SEQ ID NO: 59251 - DNA, 422 bp, Zea mays
  unsure (1)..(422): unsure at all n locations
tagctggtgacgaagctcgaagtcacctcaagccggtgatattgttattcttgatgcttaccttctccttgaaacttgagtttaccttataacgctttgttatgtacaggatgacgaagccgaagggcaatgatccgaagcttggcggatgatccgaagcttggcggatggtgatgaagctgaagacattgctatgaaaaaaactcgagaaattcttgaattatccttgtaaagaatattgtaatttaagaatcagatactactctataaatttgtccatacctagtaatatattnttacctttccatccatgtgtgaactgctttgatgtggacgaaacttgtattttttgagccgaagggcgaaaacaccttcccttcttttcgtacacaacgaaacataaatctgcttctttttcctct

SEQ ID NO: 59252 - DNA, 408 bp, Zea mays
  unsure (1)..(408): unsure at all n locations
tcaagattttccccccgccacgcggtcgaattccgctaggttcgtttatattgtcgcgccatccgcggggagggtgaacctagccacccgatcacacgcacaagcgaggagggagatcagtcaagcggggtccacagccaacgcgcaaccgtccctggtggtcggaccgattttggtgccatgtcttcgccggcttcctcgtaacaaacaggacgagcttcatttggggtaggagatgggactgacgagatggccctacgcgtaagcgacagcgcatcagcaagcgtgtgaccaaggatggggcggctgacgcgccgggcccgctggcaagtgacacagtgaaaaagaaaaagaaaaggggggcgcaagtgggccggcggggtgcttttcagcccagcangcacagtg

SEQ ID NO: 59253 - DNA, 387 bp, Zea mays
  unsure (1)..(387): unsure at all n locations
gcttctgaaatctggaggccgatgtctccatgccggtggtgtattatataattgattntagataagagacgacgcactctcactgcatggctgcttatcttatgacacttgttcatacttcatactggtgttttacactgatggcccgtttgttttccttgattttgagaaattaaaatctaactaatggagtagtctattttttataatgtgacattccataacttttcaacatttatatataagcctatctcaaatttatggggtgaaagataggaaatgattctatagaattacatggtacttttctaatgtacaacttatagcacactcttctactngcttctgtatagcataaagtgagnggataactatttctcttatatg

SEQ ID NO: 59254 - DNA, 346 bp, Zea mays
tcaagattgtccccccgccacgcggtcgaattccgctaggtccgttgagattgtcgcgccatccgcggggagggtgaacctagccacccgatcacacgcacaagcgaggagggagatcagtcaagcggggtccacagccaacgcgcaacggcccctggtggccggaccgattttggtgcgatgtctccgccggctccctcgtaacaaacaggacgagcttcatttggggtaagagatgggactgacgaaatggccctacgcgtaagcgacagcgcatcaacaagcgtgtgaccaaggatggggcggctgacgcgccgggcccgctggccagtgacacagtgaaaaa

SEQ ID NO: 59255 - DNA, 342 bp, Zea mays
  unsure (1)..(342): unsure at all n locations
tcttgattccgatgatcattttgtggttgaagtgctgaagatataccagatcttccttcatcagaataccctcgaagctataattaggatggggattctngtctgggctgtaaggagtcacgggatagagccaagcgcaaagtgcttctgcagtatgcacgatctcttatatgagatgaaggcttccgacataaacagtatcacaacaacttccggtgtatggattattgctcgcccaatgcaaccaactagtgcaacttccggatagatggcctgggcctgatggangatggtttgtgtaaaatgattaaggcacgaagaataaaaaatattaaccccatt

SEQ ID NO: 59256 - DNA, 385 bp, Zea mays
aatgaagcttcttcatgcgattctcacttatatgacccaaacgacagtgccacatgttggtaggacttaaatcattaggccgaggccttttagcactaatattacagataggtgcatcatcaagatttaaaacgaataacccattcataatggatgcaaaagctacaaacatgccattcttagagatcacacaaccattggtttcactcgcaaatgaataaccatccttcatcaaacatgaaggagacataatgtttcgactcatactaggaactagataacaattatttaactccaaaataaatcctgatgggagggtggagtgcatcgtcccgacggtcaacgcagcaactcttgcattattgcctacccggaaatcaacttc

SEQ ID NO: 59257 - DNA, 424 bp, Zea mays
  unsure (1)..(424): unsure at all n locations
ttggccccacctgcaggctcgcatcatcccctgaggtgggttctatggccactatctataccctgaaactagagtaccccttactactgtataaagacgcagtacccacgcggctatctctagtcgcgtgctaaaaggctgtatgtgggaccagccttgggcgactactctgggccagcaacagtgcctgaccccaccacatgggcgtgtccgaggccgccacgtgtctagagaaagtgatgtactccaaggcatcaacaatgagtccggacccccatgggagagtgtcggacctgtgtcggacccctgtatatacggtctaggcctacaagtttggcccatgacctccacgtgtgcgaaccggacccctagaatgggatctagaccccncgtatggggtctgggccgcccacagtggggtccc

SEQ ID NO: 59258 - DNA, 378 bp, Zea mays
gcagctatgaaattcttattccacatgggctagtctgctatgccatagccaacccaaggttgtcttagcaaccaagcaagtgtcgagttcagctctatcaaaatctaccaagtatagctgaccctctaacactcccttaaatgctatggaatcatcacttcttctaaagacagtgacacctacatcagtaaatagacagttgtagtccatttgacataattgggatacagaaagcaatatgtaatctaaagaatctacaagaaaaacattggaaatagtatggtcaggtgatatagcaattttacccaatcctttgaccaaaccttgatttccatccacgaatgtgatagactcgtggggatcttggttttctcatat

SEQ ID NO: 59259 - DNA, 426 bp, Zea mays
gagaacacaatttaagactaacaaatggtttcttttagaaagacaagatttgtagcacatgccaagccgggaagcaaggtggcactcattattcacaccagaacattatgataagtgacaggccactggagctcctacacatggatttattcgggccgaatggttacataagcatcggcgggagtaagtacttgctagttattgtggatgattattctcgcttcacttgggtattcttcttgcaggaaaaatctcatacccaagaaaccttaaagggattcttaagacgggctcaaaatgagttcggtttaaggatcaagaaaattagaagcgacaatgggacggagttcaagaactctcaaattgaaggctttcttgaggaagagggcatcaagcatgagttctcttctccctacactccacaac

SEQ ID NO: 59260 - DNA, 372 bp, Zea mays
  unsure (1)..(372): unsure at all n locations
ctgcagctactcctcctggagggccgtcatcatcttcttatttgaggcccggaacatacaagctggccaacaatcaatgcgaggtctatagcaacgcttggaacatccgacagctacgtcgcttttacccttaagatgttttcaagtcgttcatatacctcgttttctatacatacgcaaataaagtctaaccgtcaaggaagggtcaaccttgcctcggcaaagcccgaccctccctcgggggctagaaggggggaccccctctgcgtcaaaatttttcctcggaaaagntttctaccaaaacggctntcgtgctnttcgactatatcgataacagaatcctgcaaaaacgagtaaagagcgcacgttatc

SEQ ID NO: 59261 - DNA, 432 bp, Zea mays
tcacccaacgattgatactgaattatcttcaacccttaccgtgttatgaccgagcaaaaacatatgttttttcgttagtatatatgttcttgtattatcaaagcttttatgtgctcaaaacatatgcccataaatgctttgtcgccttcaacggtattatcaaagcttttatgtgctcctggtatacgtgtgaatgtcagccatcgtgctgttacttttatttgcaggttttggaaacctccccgtgcaggggaggtgctgtcgaatttttttgttgacagacttgtttatttttttgcagaggtcttcctagccgctgcgggtctgcctcgcgtcgccactgcaccgacccgctacagccccactagcctgactccaccaccaccctaggtataacctttatttccgcatcatggtcgtagatcacgtaac

SEQ ID NO: 59262 - DNA, 411 bp, Zea mays
atccttatagtcacctgctgcatgcaagcttgaagccatggtaagaagcatatgcaagttatattctaattgactcaagcctatctatgggtgcatatgtttcaccgaaatccaaaccttcgacttgtgaatatcctttggctacaagtcgggctctgttccttgtcaccacaccatgctcgtcttgcttgttgcggaacacccacttggttcctacaacattttgattaggacgtgggaccaaatgccatacctcattcctagtgaatgtgttgagctcctcttgcatcgccaccacccaatccgaatcttgaagtgcttcctctaccctgtgtggctaatagaggaaacaaaagagtaatgctcacaaatatgtgcaacacgagatctaatggttacccccttatgaat

SEQ ID NO: 59263 - DNA, 429 bp, Zea mays
  unsure (1)..(429): unsure at all n locations
ntactccttggtcttcggaagctaaaggcgatgggaatcatataggtggttcttaaaactgattcccaggttatttctggtcatattgacaaaagttataaagcaagagatccgaagcttgaaaaatatttagacatggttcgaaggattgaggcttccttcgaagggttttctgttaaaaatattcctcgtggagacaatgaatatgctgatttattagctaagtcagcagcacaggggctgccattaccttcggaagtatttttcgaaacaataaaagcaccttcggttgagcttcttgaaagagcaatcctcaacatatcccctgtttatagtgaggactggagaaactgagatcatctctttcctccagggtaactttctttcagatgacgaagcttataacaggaggatagaggcaagagctcg

SEQ ID NO: 59264 - DNA, 286 bp, Zea mays
  unsure (1)..(286): unsure at all n locations
gagtaccctaatcacgtgtacaaactctcaaaggcgctttattggctcaaacaatccccatgagcatggtatgaatgcctgcgagatttccctatcactaatggcttcaaagtcggttaagccgatcctactctctttactaaaacaattgcanaagggattgttngtatgccaaaaattatgttatgatatcatatttgggtctactaacaaatcaacttgtgaagagttagtaggatcatgatacaaaaattgagatgctatgatgggggaagtgaatattttc

SEQ ID NO: 59265 - DNA, 441 bp, Zea mays
cataaaactcaagcttcaacctctccaagtgccacaattgagacaagtgatctttatttattagtgacttgagagagtgtgattcatgtttcatttgttgctcttgatgcttggttttcttttaatcatgctttcttcatctccttctaaactctcaagtgacttataaagctaacaatagacacctaagtgtgtggtggtccttgctgagtcttagtgatccttgagattaagaagaagcaatcaaccggtctaagtgatcgattaagagagggaaagggttgaaaaagactcggccttcgtggccttctcaatggggagtaggttcattggaaccgaaactcgagaaacaaatcgctgtgttcatttgtgttaatcattaccttacgatttgattcttcccctcccctctctctaagttctcttgctcacaatcttttc

SEQ ID NO: 59266 - DNA, 363 bp, Zea mays
  unsure (1)..(363): unsure at all n locations
agtcacctgctgcatgcaagctngcatgctccaccactctgcaacgggtaccctattatttggaactgtgatcctgtgggtctatgcatatcggttggcttcctagtctaaatcctgcacgtcctgttgcatgaatcaaaggatgaaagataccagatggtgggtcctataagtgtgctcctaaaccttcaaagccgaatctgtgtgtatgtccatgtcccagtccagaagtaggtagtctcatactgtagagactacctcctaacggctaggtcatcaattttttctttggtatactggtgtccagccttgacacgtcgagcctatctctcatggggccaagtaccatgtggaagttgatga

SEQ ID NO: 59267 - DNA, 431 bp, Zea mays
  unsure (1)..(431): unsure at all n locations
tgaaaataacttaattataactatacaaatattaggtctattattttaatattttataaagttatatgtggtatgtctaagattaagggttcataagataataaaacacattcttaaacattacttttatgaaaaactaataaatggcttaaataaatttttatgtgaaaaatcataatcgtattattaaacacctatttatgaagagctatgatatatgccttaagtgaactttcatacaaaagataatgaacaaataactatctttaatttttattagaaagtacatggcttgtgttctttattaagaaagctatatacaaaacaatatgtaaactaacattntaattattattaaagaacatgaacactaatttcattattttattctctagtaaaaactgagtgatatatacaaataatatggactc

SEQ ID NO: 59268 - DNA, 339 bp, Zea mays
  unsure (1)..(339): unsure at all n locations
gctaatatcattcaggcctaaatattctgttatcttgtataccttcccagaagccttctcaaatgctttaacaatctccagcacatatgttcctcttccggttccaaggttgtacgcttcacaccctgcaaatagtatcaaattttaaaataagattccaaagtacatacacaaatgaatcaaacacctcgcacatgatggaaatagaaaatatggacagatacccatgtatccaaaatatntcattgtagtgaacatatgcaaantgcataaaataagcatatctggtacgcaagctgcaaaaagtatatttatccatacagtattgtgccttgtaca

SEQ ID NO: 59269 - DNA, 440 bp, Zea mays
  unsure (1)..(440): unsure at all n locations
acactaaacacctgcccaacacttaacacacatgttagttctttaattgggttgtcatccaaaccacccaaacccataggagagctttccaataagttctttccttatatcaaagattattccttttcaccaaggaatctctaccaggtggaatcttttgccgccctacacaagataaagtcacaaataagagtaagggagggagggagagagtacaatctcaagagatcaaaaccagcaactcaacacaaaagagagaaacacaagcgcacaatacacaaagtacgaagaacaacactaggatgacactcaaatcttgctagagtcacatgattgagttggagcagagtgttaccgtgttgagagtcttctggtatgcttgtgtgctgaatggaggtgcatangggatgtttatataggcaaaagaggcctacgagtag

SEQ ID NO: 59270 - DNA, 345 bp, Zea mays
  unsure (1)..(345): unsure at all n locations
agcttgccctaagcccctagctcctcgcccgcacgtgtctgtgtcgttcttcaccattcggcgtcggcaccagagctcgaagtttgccttccatcgacgctagagccgctcgccgaaccctatgtcgtcctcgtcctcaccgatcctcgctgcttcgccgaccaccatcgaccgtcttccccgctcgatcgaccgtccaacagcccctatatcgtcgtacacccctgcgtatcgtactagtggaggaagaatgtngaaaatctacaaactaccccctagatatagggttgaattgggttaagaaccttgcatctgaagactgctgtgacccatgcatcattacct

SEQ ID NO: 59271 - DNA, 394 bp, Zea mays
  unsure (1)..(394): unsure at all n locations
actaagcttatcggtccatgtgtgaaaggcataatataaacttttttctccatttgagggctcggtcgcgtgaacccgtctatcttganaaacccaaagcagttgaatatgcataggtgtgatgagaaatctcattgggtattatcgatttagatgtcgtacttcaaataaagactggatcactgtatgcatcgtagtaaaaagtgaaactaaagtggtaaatgaaagctagattaggccaagtgactactcagagtttattttatgttttgcggagaggcatcgatactttttacttttgtagttaaaattgtgagcttttgaggatggatgttatgtatgactttgggaatgtttaccttccaagttgtataagtatgttggcgcgtgagat

SEQ ID NO: 59272 - DNA, 326 bp, Zea mays
tttcatgcctacactttttaaccaatgggggtatgtacaatgatagttaaccccaacatgatggcccatagaacataacacgatgtactaccttgcggctactcatgtttgctgctatggcaatcttcttatgccctgacgactgagatctgcgttacatctacgtgcatgggaagcttcttgaatatggatgatgatcacagtgcgccgcacggcacgggcgcactgcttgacatggactggacaggtgtgccgtctgtaagatggacctggcgccccctgccatgggagtggacatgacacattatatgctgaaggggcacatc

SEQ ID NO: 59273 - DNA, 435 bp, Zea mays
  unsure (1)..(435): unsure at all n locations
ctaagcttgggaggttcttcatcccacatgtgctaagcggcgatgttcctgtttgtctatgctaancttagctattaagcatgcatttagaccggcttcttcttttgcaaaatcaactaaataaagttcgccatctaatacacccttacaagctagtgaaccatcacttcttctaaagacagacacatctacatttgtaaatagacacgtatatcccatattgcataattgactaaccgatagcaaattatatccaagagactctactaaaaacacattagagatagagtgctcnataaaaattgcaattttacctaaccatntcaccttgccttgatttccatcaccgaatataattgaatcttgggaatccttattctcgacgtacgaggtgaacatcttcttctcccccgtcatatggtttgtgcatacgct

SEQ ID NO: 59274 - DNA, 461 bp, Zea mays
  unsure (1)..(461): unsure at all n locations
tcgttagaatttagtttatctactaatgagagtaatattttatctntntcaagagcttcatttcttagtgtgataacttctgaacgcagattcccaagagctatgcgtcaactgtcatcctccacatccttctgggccttcaaagccttgcttaaaattaagccctagaaaatgaagagtgagaatgtaacagcggcaagaaaaagccataatagttgacatgtcatagtacacacaccttcagaactattgtagcaagactatctgcaagttgatcttttgacattgcagataggccaagttcaagcttctgattgtgacaccccatgtgtctatttcgggttacgtcgggagaataatcctaatctcggatgctccgtanaaatttctatttctcgatcgtgcctatctctgttatcanggtttctcttggaagtcacctgaattggagtattcaatcg

SEQ ID NO: 59275 - DNA, 177 bp, Zea mays
taaatctgaaacctaaggaactctaaagcgcttcttaaggagagctcaaaacgagtttgagctaaaagtgaaaaaaataataagcgacaacggatctgagttcaagaaccttcaagtcaaagagtatcttgaggaggaaggcatcaagcatgagttctctactccctacacaccaca

SEQ ID NO: 59276 - DNA, 320 bp, Zea mays
tgacctaaagacccataatatgttgtgtcattattgtagttgattgtaaagggcataaatgtaattatacacttgctgcgccatgtgcctataaatatgtgaacaatacccctgtactgttcacacaatcttgttatcgctggcacattacacatgaattattgctttctgccaagacgaaggtataaatgtaccttaatattatgttgtaacatttaggcttgtataataaaatatgtgaataatcttattgtgtttgatatatcattcccttatgtttatattcttatatttatcccacactggttaattctatcatg

SEQ ID NO: 59277 - DNA, 361 bp, Zea mays
  unsure (1)..(361): unsure at all n locations
ntgagtggaatttggcgaggcattgatctctttgatgtgtcttttaattgaatgctacagctcttgtaagtagttggaaggtgaaaaacttggatgatttcaatgtcgggtggctcggggcaccttaaacgaccacccccctttcaccctccttccacccctccctccaaacctcccccccatcatccccctcttatcacttcccctttcgtctcttcccctccctataatttcccccttctacctcacaccccctacctttcccacccctctaaccatggatccttccccctcctatagttctccaacacttgatcgtcctgttcctatctccccaccgctcccctacttcctgcacccc

SEQ ID NO: 59278 - DNA, 358 bp, Zea mays
  unsure (1)..(358): unsure at all n locations
gcttagtattcaattatgagaatacaatgacaccctataataaagtagggtatgataccacagaagatnttccaggtttagagttaaaaaagagagaacatgtttggtaattgcagaacaagtgggtatctatttgacaatgaattgccaaaccaaaggaaacttcatattgaaaacaaaatggttttatcaataaataggaaatataacttttcaatgtcaatcctacacattacaaaaaaatcaataacaaaagacaatgtcctacatccatcgtggtgtcaaatcaaacctacagccccctagaaaacatcaacattacctgtttcgtatcttatttccgttatcttggaacaat

SEQ ID NO: 59279 - DNA, 430 bp, Zea mays
tggttgccagatgttatggaaaacttcaatgacttgtttttctataaggattaccgctgaaggtgatttatgctgcgccatttgttgaatactggagcttattttttaattcttgatgctctaccatggcctctgggattattaatggtctgccgaaaaaggtattaaaggttctacaagtttgggcagactggttcctattttgcagaaagaacatcatcgtcatcggagcggaaagagaggaatgacgatgtacatgattatccgaggaaacggcgtcggagctagagtagaagccgcagcccagtcacaggaaagggatggagagcacaatcgtagcagagactaccgatcgcatgggaacgatgtcgggagggatagggtacgcgagaaaagcacaagccgagagcgagacgaccactacgacaga

SEQ ID NO: 59280 - DNA, 406 bp, Zea mays
  unsure (1)..(406): unsure at all n locations
gcttagaggagaatctaaggaagctatcaatggttgttcattntgcatttgtgcatctattaaataattataatgatgctgaatcctgacatgatttcccatcattctatgtgtccacattgaagaatgcaaaagagagtttatagaagtcagagagaagagctttggatgaagtccgtgatttaacggagcgagtgcatcgtttgcaggtttatnttttttctcattgccatatatacaagttttattggatcgggtgtcattntacatctatcagttcttatcttgctgatattngtgaggtacgatatatngcaaattattttttgtagattcatcccttcattatgtttggtatgtgcagttgtcacatttgtataaaaagcctactgagtgctcttctcat

SEQ ID NO: 59281 - DNA, 419 bp, Zea mays
  unsure (1)..(419): unsure at all n locations
tgtctgtcggaatcgaacgaagctccagtttgatacctgcttcttgtgaagaaagtattaacgttccacaagttcataattaaatggccagagtgcgctctaccgccagggttgagcgtgagggggacgagactgaagcttcggagactgttcccatctccgaagctatgcaacgatccgggctggtgacttcggaaaagatccctcatgatgatgcagaacaagcagaacaagcaatcgctgaagcagaagaagaagatattgaggaaactgattctgaagacgattatcgcattgccatgccaagcaagcccagccacttggacttcgggaaatctactgtttcgaaggctgatctgtccaagatggtaaagtcaggcttttttactgaaaatcagaanaagctattacgcttcgga

SEQ ID NO: 59282 - DNA, 443 bp, Zea mays
  unsure (1)..(443): unsure at all n locations
tcacctgctgcatgcaagcttcggcaccttggcccgttcaatgtatctatgttgttgcgtcaaaaccttgatctttttgcccttcggcgcagcatatatggccaaagtaacaacttttcttttctttctttgctttcgcgagggatagctataatctggatatatgaaaccaatgacatcgaaaactctgtttaaccttctcttgcctcgtccttcgtaggccaaggtcatggcatcatcttcngcccttgtatatgccccaagaagctcatctatggttgcctcaatacaatccagccaatcatcgtttggctcatcaaactgatctctatgtctgaaggtatatntcagatagaccaagccatcttgactagacctggcagcagcttgcttcggcatcttccagtcactcacgataggccatactctatatgcaatgtgct

SEQ ID NO: 59283 - DNA, 447 bp, Zea mays
  unsure (1)..(447): unsure at all n locations
ctataaaactcagcttcaaaanagatagtgcttggcaacgatgatgagctatcttttttatgttnttttctcattctattcaatcgacttctgtttccttctgcttcttggggcattacaaacaatgaggtactcatgacttcaaacatggcccgaatggctgatattgactggtgtcaactagtttacacggatttgtgcgatgctgccgcacgttggcataaaaggaacaaaacaaacatcacagcaacaatatatggatgctcactcattgttttagtaagtaattttctcttgtttactgtgcatatatatggtatgcaaatatttgntatgtactaattttatatatttgtgcattccttattttcagatttactatcttgatcacctacatcaccctgctgctccggataacaaatatggtactccacgcattaagttttt

SEQ ID NO: 59284 - DNA, 340 bp, Zea mays
agcttgccatctaatacacactcataagctagtgttccatctcttcttctaaagacagacacatctacatgtgtttatagacagttttatcccatattgcattattgactaacagattacaaattatatccatgagactctactaataacacattagagatagagtgctcattagaaattgcaattttacctaacccttttaccttgccttgattcccatcaccgaatataattgaatcttgggaatccttattctcgacgtaggaggtgaacatcttcttctcccccgtcatatggtttgtgcatccgctgtcgataatccagcttgaacccccggatg

SEQ ID NO: 59285 - DNA, 429 bp, Zea mays
  unsure (1)..(429): unsure at all n locations
agcttcccccatccgatcctcgncttcaggagccgagcgctctttctccttctggccccaaaagcttccgaaccagaagagcccttcttgctcaatgatcgcctcccacacgccgtcgtctctgacgacagcgaaacaccacctccctttccaatcgttggcgctgtcgtcgccgtcgtcgtcaccgtcgccgacgtcgtcgacgtgcttctgtacgaccccaaacgcggatcctaagccgtcgtcatccacgtccaacaggtcgtccatcttcagcccggcggccgcgtttgatgagcgcctgtggcctcctcctgtgccgtctcctcaagatgatcctcttggtcttcacgaccaccttgatgggtatccggacgaggaggaagacagtgacctgcatcaccangcgctgacagtagcaccacacca

SEQ ID NO: 59286 - DNA, 309 bp, Zea mays
  unsure (1)..(309): unsure at all n locations
gtcctcaatcagtagtagagacactggcataaccgtcaacatttatctacatgcataatccatgatgatctgatgttacacatatcatatgttgtataacacgcttttgtattatgctgccggntacatgttatcatcggtgccatcgttcctaatctaccatggttcacgtcatgatatgatatgatattattaagctgtggtacaccctgcagatgctgcgggatcatatcagcactgcacgtgggccccctggcaatctccagcatgtcggataccgcggtgtgaacgaactgattctgcttctct

SEQ ID NO: 59287 - DNA, 390 bp, Zea mays
tattacactaacaaccaagtcacatatgaggccatcttattttgtctagatcttttagaatatatgggagtgaaacatgtgaaggcgtttggagatactcagctatttgcccagtacattttcaaggaatatcaccgtatggatagtacttaaataactatcttgaaaaatggtgggacataattcgttcttgtgacgaattcgatattcggcatatgtctagagctgagaattatagagctaatagcttgacacaagacgcattaggttattgggtcaaacgagggagaattcacaactttgaaagttcgacaaccgatgttgcgcctagttcctatgtcgcgaaccgtccgggctatatagcgggaccatatatggtatggtcagact

SEQ ID NO: 59288 - DNA, 291 bp, Zea mays
acagaatatcattccacaaacactactggattaactaagcttgcattcccatatctcaattcacttagcatatagaaagcagaacaaaatatcattccacaaacactcacatcgatgcagcccttataaagatgctccctccataaccacctccacccttctcattgctatccccaccgttggcgagaactgtgccattcatgaccaggtcctcatcaaacagccacacgatgccaccaccggcaccaccatagtccttctcaacgctggtcgagcccactttgctcccgt

SEQ ID NO: 59289 - DNA, 418 bp, Zea mays
tatctatgctgtacttgttgcgtccaggaagttgcgcaactatttttaagcacacagggttgtggtggtgacctcctacctgttaagggccattctccacaactctaacgccacatgcaacattgccaagtgggcagcggagcttgctgagttccaactggacttccagccttgccacgctgtcaagagccaggtcctggctgacttcatcgtggaatggaccccttccctaagcactcctgggggtccggatcccgattcggaccccacacctatggagcctagggctctggtcttcaccgagccccactggacgctcttcttcgatggatccacccgctagcagggtggcggcactggagtggtcctcatcgacccaagaggagatcaagtgaagtacatggtgcaccttgagttc

SEQ ID NO: 59290 - DNA, 321 bp, Zea mays
  unsure (1)..(321): unsure at all n locations
tctctgtcaaaaatattcctcgtggagaaaatgaatacgctgatctgttagctaagtcagcagcccatgggcttgccataccttcggaagtattttttgaaacaataaaagcaccttctgtcgagcttcttgaaagagcaatcctcaacatatcccctgtttatagtgaagaatggagaactgaaattatctctttccttcagggtaattntctttcaaacgacgaagcttataacatgagaatagaagcaagagctcgaccatatgtcataatagaaggggagctatataagcgtggggtctgttccccactgctcaagt

SEQ ID NO: 59291 - DNA, 430 bp, Zea mays
  unsure (1)..(430): unsure at all n locations
cttagaatactaagccttggacaaaatcttatgttaatgcttaggattatcggatatctttttttatcaagntaatcaatgtcctattattagactcggcctatccattggcctaagcataatatggagatgaattaagcaacttaattctatataattcagcaaattcacgtacctcctttgacataaaagaagttccttgatctatagtcaaggtctagggaatgccgaaactatgaataatatgctcagttatgaactcaattacctccttgtgtgtcatgttcttcagagcaacggcttcagtccatttggtaaagtagtcagtggcaactaacacgaaccgatgcccctttgatgatgaatgatgaatttctcctataaagtctaatccccatcctcatgaatggccaaggcttgatgatagaat

SEQ ID NO: 59292 - DNA, 342 bp, Zea mays
  unsure (1)..(342): unsure at all n locations
cacagatcgagtcatcttttcaagtgttctctcatcttanccaacagcatgtagactctgtaataatctggagtagctcctgctggtgagccgaattgatatactcaaagatgtgtatatcagattgacaactgctccgaatatattcagttctattctatcatctcaggccagagatgttattccctttgctgctaagctcttctgagaacaatatggtttcttcggcctttccctcgccagctgcaagcacagtggtcaaccctttgtacttgctgtgagtccgacgatgccaatggctgccgccaactagaatgcagaaanaaggatgctgcatggatg

SEQ ID NO: 59293 - DNA, 438 bp, Zea mays
  unsure (1)..(438): unsure at all n locations
tgagttattntattacagaccagactaaaagtgagtgcagagtatttatattatacaaaccaagggaggcacaaactcctcccgataagctaaaagcgaaagatcctaagtggaggaccgagtcctcccgcacttcagtcttgtttttcctcatttggtaccaccttggagcaaaagcaacaaaagtttgtcgcttcctcacctaaaaacaacaaagggataaaccctgagtatggaatactcagcaagtcttacccgactaaagaaaagactctcaagggtatgctggataaataggagtcaaggagaggcttttagcaagaatcaacttatacntttgcagaagtagcttactaaagtgagtccttactttcaatcttttaacgccatattaagtattaatagactctatttgcatctagtctaatttcacatcac

SEQ ID NO: 59294 - DNA, 485 bp, Zea mays
  unsure (1)..(485): unsure at all n locations
agcttcttcccttttgtggcagatatcattatcgacccggatatactcattcattntctgaagcagcttctccagagtctgagggggtttcctgacgaagtattgagccatatgttctggccggagccctttgatcatggcctcaatgacgatttcattgggcactgtgggcgcttgtgctctcatatgcaagaacctctggaaatacgcctagaggtattcttcgtggtcttgcatgcactggaacaaagcttgagcagtaaccatctttgtctgaaacccttggaaactggtgatcagcatatacttcagcttctgccataatgtgattgttcctaactgaagagaggagtactangtttgcgcaacattcttgactgccatgacgataggattcgcatgactgcagtattgccncatatgaagatatagttgcttcgtagctcattagaaactgcttcggatctgagtgcccatcatacatg

SEQ ID NO: 59295 - DNA, 434 bp, Zea mays
  unsure (1)..(434): unsure at all n locations
tctgtgccaaanatcagagaaagctaagggatggttatttatttgttattttccaatgtttaatgccaaaaatgcactttccactaccttgttatttgaaaaatgtcaaacatcagatttcatatttttcctatgttcttcataacaaaacattaactattccaagggttggggtgttttctccttgggtttatttttgtagggtttttctaagttttccttgttttcttaaaataaaaggtatcctatttattttatactaaaccagggtataataaatttttctagtatactacattgaataagtaccctaacaaaaataggggtgccccctggttccttaattaaatcacctttcttattttctttaactntaagcacaatgtgaaataaatgacaaactctaccttaatggggtgtacagagaggtttat

SEQ ID NO: 59296 - DNA, 328 bp, Zea mays
  unsure (1)..(328): unsure at all n locations
ctatgttgagcaacctcccggctttgaatactgtgagtatcctaaccatgtctataagctctctaatgcgctttatgggctcaagcaagccccaagagcatggtatgaatgccttagagattttcttattgctaatggcttcaaagtcggaaaggccgatcctacactctttactaaaactcttgaaaatgacttgtttgtatgccaaatttatgttgatgatattatatttgggtccactaacgagtctacatgtgaagagtttagtaggactatgacacagaaattcgagatgtctatgatggtggagtngaagtatttcttatga

SEQ ID NO: 59297 - DNA, 415 bp, Zea mays
  unsure (1)..(415): unsure at all n locations
ttggcaataaaataacaatatggagaagatctaattattattgttatatnngggagtatatgatgttacaattctttagttttcatacaatcttaattaaatttaagacttgttgatttttttttcaaatattgaaatgccctgtaatccggaacaaaggaagtagcaagaatgtgattgtcagctagcacatgcatagtgtactcccatcagcccacgaaagactatagtagtcaagaaaaaaaaagattccaatgtgggtagcagtaagaacacacatctgaattaaagtactagttgctgctagctggctatattttgccagcaattgatcgcttgatttatgtacatatgattaacagggcgcacatataaatcagccattcagcacagcaatgacacgctacgatgagta

SEQ ID NO: 59298 - DNA, 343 bp, Zea mays
  unsure (1)..(343): unsure at all n locations
gctgcatttcccaaaagttntctcatagtcatcctcaatcagccatgaacactcactgagatatcgttctgtatgactatcacacaatagttcattgagaagataagtattcatcttcctagagtgacacagaatcttgaatagcctattatttagctcctctggaataccttcaagtgatccaatacatttagaatgtttcgcaagagtatttaagcataagtttgtaagtgatggggcagcttgagctggtgctggattcttcccatcctttgaaggcgatcaaacaatgaccctacttgcagatttgttcagctttgaagaattcaactctcgagctctc

SEQ ID NO: 59299 - DNA, 434 bp, Zea mays
  unsure (1)..(434): unsure at all n locations
tgccttcgcttcagtttatcatccgcagtccaacggggtcttttatctcgccaatgggaaaatcttcacagctgtcaagaagatgctcctcgatgaaaaaaggcagatggaccgatttgttacctgaggcagtctgggcgctaaacacaactgagtgcaaggcgactgggttcactcctttccgccttctatacggatcggaggccatgaccccgcaagaaataaagcatgggtccccgcgaacagttccgtcagccgtcaccgacgtggacgagccaacttcaaaggatctcattgacggagaccgggtcttttgcctacaggccctaaacaaataccaagcccagaccanagcatggcgcgaccatgcagtcatcccgagggaagtcagcgaaggggacctcgtactcgttcgaacagctcggacggagtct

SEQ ID NO: 59300 - DNA, 277 bp, Zea mays
cgtcactaccactccattctaccccgacgtcctcttcatcatggggagagtggaatcgtcccccatctccgacgacgaaccaactgtgcctgtggaagaaccacctcagaaggatactcgccgacgaatgaaccgacgtcgtatcacccggcgacatcattgaaccggataacgatatccggcgcagcgtgtatcgcgagacgaaatctcagtggtgggagaaactccagatgaacgagtcttcatggaaaggatgaactcccgccgacgtgatcgt

SEQ ID NO: 59301 - DNA, 438 bp, Zea mays
  unsure (1)..(438): unsure at all n locations
ntgtgttcagttctgatattnttgcttcagcttccgccagtatatcttctgctgcctggagttcaaagttctttttctcaaaagcatctgattgctcctttattttgttttccaaatttccaattataacttcatgctttttatcttcaagatcttgctgcatttgcaaggctttgctcaatagcatactctacacaaacacaaccttcgtcagacatgtttttattataagcaataaaagttaagggacaaatcatttaccttaaaattggagtaaaacaaactaccaacgacatgttgtcgtcggtagcggctgatatctgcttctagcttcgggaatccaatacttctggacagagtgctgatgactttggcccctgtttggtcccgaatacactctaatttctcatcatcaacgcctccgaagaggagagcccc

SEQ ID NO: 59302 - DNA, 393 bp, Zea mays
  unsure (1)..(393): unsure at all n locations
atgacactntcccttcaaacgagttaagctccttcttatcattccaacttcttccttgagctctttattttcttgtgtgatagaaatatcactaattcctgaaatttctagctcaatggaagattggcttgcttgataacaacaattgttagcacatggtaatatagtttcaatntcaacacatgtgcacatgtgagggtggtatgatttcaaattagttaacacaacctcatgagccatttctaacatgatatgtgaatccataaatntattatgagagcatacaagcatatcatgnttttctcgtanagctatattttcaatggttagctgttctaccgtgttnttgagcatagcattnttattttctaatngagcaatatatgatgaatg

SEQ ID NO: 59303 - DNA, 405 bp, Zea mays
tggtgccaatggagaagcagaagtccttgaagtcttggctgtctaactgcttgtcgttgtcgactattagttcggacggtactccgaagcggcaaacaatgttttgccaaaagaatttttgtgcagtctttgatgttattgtggaaacggccctcgcttcgatccatttggtaaagtattcgacagcgacgaaggcgaacttaaggttcccctgagccgtgggcaagggcccgacgatgtccaggccccagcgctggagaggccatgtgtgggtgatcagttttgtgaattgcgaggggctgcctgatcgaggagaaaatttctggcaagcttcgcaggactttgcaacccgatttgcagcgcagatcattgcgggccaatagaagccttggcggatcacttttg

SEQ ID NO: 59304 - DNA, 417 bp, Zea mays
  unsure (1)..(417): unsure at all n locations
agacttgccaaatatggcgcataattatacctttgatatcttcccgtactttcaggtcattcttcacatataaccattctgtcatccagtcgccgggccatctcttccgaaaggttggcacgcgacagcttgacccataccgagaaacgaaactgttgcagccaaaattattgtgatactgttccttaccccaaggttntgtctcgtatgataattcgtgtatattgcagaaactcttcgcatcaggttccagatcttggcttctcacggcccatacgaagatattcagccttatgatggcttcgggggtaagtnggtgaagatagacttcgaatattttcagcacctctgcgaacaaagtgctcaggggaaatctaagtccagctttcaaaaagcttcggtacactacgacttcat

SEQ ID NO: 59305 - DNA, 437 bp, Zea mays
  unsure (1)..(437): unsure at all n locations
ntaagtccttcagcaaatgttgagacaataaaaaatcaaatgtgtgtcatcggtgactccgaagagaaaaagaatggtcaatgtgttagatgtcttggaaacaattaaatcctcaagcacaactccgaagaggactgttgcaatttccgaagctaaaactgaaatttctgatactaaggctccagagccagaaactgaagctgaagctgggccctcagagcctacaaaggtaaaatcgttgaaaaccgaggaagaaaaaataacggagccaattcttgttgaagaaatcagtgctgttgcccccgaagcatcccccaaagtccttgattatattgttggtcatgcttcggggaaagaattatcagataaagagaagcaagaagcccagctctacgcccaaaaactgaagtatccaaagggggcgttaatattcaatg

SEQ ID NO: 59306 - DNA, 412 bp, Zea mays
  unsure (1)..(412): unsure at all n locations
agcttgccgcagtatgacagacgtcgtctcgtgtcctgcttttgttgccgacggcgccgccttgtgcacctccactggcaccaccctcatcatgttctcgcgccccggcctgtgcgccttcacgcgccttgtgcggcttgccgcgtttgcggcctcgtgtcgaggaggactcccccttcttcttgtcaccctggcatgcctcccactgctcccgagtgagatgtatcttcccgccgatagtgataggcccatagagagcatgtggttcgtcgccgtcgatcaccttgatgcgaccaatcgcctcttcgatcgtcatcatggagaggtctagcagagactcgatcgagcgagccatcttgctatacttctcggtgatgcaacggaagagcttctcaacngctctctcctcatc

SEQ ID NO: 59307 - DNA, 426 bp, Zea mays
  unsure (1)..(426): unsure at all n locations
cgaggaaatgacgctcattatcaagagctttttttttatccttaagcaaaggaggggggaagattacaagccttgctccaagaaagcgtgctacaagtatggtaagcccggtcattttattggtaaatgtncattatctaatgatagtgacaggggcgacgacaagaaaggaaggaggaaagaaaagaagaagtactacaagaagaagggcggtgatgcccatgtgtgtcgggaatgagactccgatgagagctccaccgactcctccgacgacgaggacgccgccaacatcgccgtcaccaaggcctcctcttccccaacgtcggccacaagtgccttatggcaaaggacgacaaaaagaagaacgtaaaatctagagcctccactagattacgacatctagtgttgagggtagctctagtgatg

SEQ ID NO: 59308 - DNA, 375 bp, Zea mays
tttaactctagaaacttgttatctatacttgtgctttctttcccatatatggtgttataagaagcgttcatgaatttcatatctgtgcctaggatctaaaacaatatctatgttcattagcgcatgcacatctgtccagtacttattatacttatatttcatcagatccagcatctcttctaccttatgaatatcactagttctccatttctcaatagccaaattaatgccacagatcttagggaataatgatttgctgtacataattagtgtctgacaaaatctcggatgcatatagaacattttaatctacgcaaagttctctacataacccaatcatctggcgttggcttaatgatgcacatactttcttta

SEQ ID NO: 59309 - DNA, 422 bp, Zea mays
  unsure (1)..(422): unsure at all n locations
aagctntacctaatggacgtgaaacgcgccttcgccaggggttcaatccattatnagggccangnngagcaacctctcggctttgaagatcgcgagcaccctagctatgtttaccaactctctcaggcgctttatgggctcaagcaagccccaagagcatggtgtgaatgcctaagagaatttgctatcactaatggcttcaaaggccgaaaggtcgatcctactttatttactgaaactctgaacaatgattgggttgtatgccaaatttatgttgatgacattatatgcgggtctactaacgaatctacttgtgaggaatttagtcggatcatgacacagaacttctagatgactatgatgggggagttgaaatacctcttgggattccaagtgaaacaacttcaagacggcacctttat

SEQ ID NO: 59310 - DNA, 385 bp, Zea mays
agtcacctgctgctgcaactgagtttgttttacagaccatactaattgagtgcagagaagtaatattatacaagccaaggaatgcacaaactcctcccgataagtttaataaacaaaagatcctaagtggaggaccgagtcctcccgcacttcagtcttgtttgtcttcttttggaaccaccttggcatataagcagcaaaagtctgctacttcctcacctataaacaacgaatggataaaccctgagtatgggatactcatcaagtcttacccgactaaagaaaagactctcaagggtatgctggttatatgggagtcaaggtaaggcttttcaatcatcaatgaactctgttttgcagaaatgcttactaaagtggatcctta

SEQ ID NO: 59311 - DNA, 415 bp, Zea mays
tgaagccatggtaagtagcataggcaagtaaaatgcttattgtttctagcctagctacgggtgcataggtttcaccaaaatccaaaccttcgacttgtgagtatcccttggccacaagtcgggctttgttccttgtcaccacaccatgttcatcttgcttgttgcggaagacccacttggttcctacaacattttggttaggacgtggaactaaatgccatacctcattcctagtgaagttgttgagctcctcttgcatcgccaccacccaatccgaatcttgaagtgcttcctctatcctgtgtggctcaatagaggaaacaaaagagtagtgttcacaaaaatgagcaacacgagatcgagtagttacccccttttgaatatcgctgaggatggtgttcacagggtgatctcg

SEQ ID NO: 59312 - DNA, 379 bp, Zea mays
  unsure (1)..(379): unsure at all n locations
ttgaacggcgattactcgtagctcggatatngtttcttttctattcgcgacgcacagcgaatacaaacttgcacaaacaaacatatactcgcattataacattacatcatacaagataaaatattataaaagcgagcaatataaatagagagcgcttctacagttacgcgagaaaaagaaccatgatagacgaaactatggtcgaggggttagtacgtttacgttaaacaagcactaattagaacatctaattcaacatatatatattaattgatattaatcaaatgtaaattaatactactacttagtgttgactaacttactattgtaatagttgacaattaagcaagtaacctaatgaatatgattgattctaaac

SEQ ID NO: 59313 - DNA, 429 bp, Zea mays
  unsure (1)..(429): unsure at all n locations
ntagtgattagcgagagagatttgccgtattcttttgagctcttgcgcttggattgcttctttctttctcacttgttcttgtgatcaaaactccattgtaatcaaggcaagaggcatcaattgtgtggtggcccttgcggggaagttttgttcctagtgttgatttgagaagagaagctcactcggtcggaaggaccgtttgagagagggaaagggttgaaagagacccggtctttgtgaccacctcaacggggagtaggtttgcaagaaccgaacctcggtaaaacaaatccttgtgtcacactccttatttgcttgagatttgttttgcaccctctctcgcggactcgtttttatttctaacgctaacccggcttgtagttgtgtttatatttgtaaatatcagtttcgccctattcacccccctct

SEQ ID NO: 59314 - DNA, 301 bp, Zea mays
atgctggtctggtgaacaaataccttgcagtgatcttgcccaaattcgcgaagatttgctcccaatcggcgcttgaacaggggcagatgcaacgggaacacgtgttcgaccgcggctgacacccctggttcacgcccgttcgcgcaccgcgccttcccagtgcacgcccgcgcgcactcaccggtccacgaccgtccgtgcaccgcgccgcgcctataaagccttcccatgcgcgccccacttcgccccgcactcaccctcaccggccagccacttccccttatctccggcgagcttaatt

SEQ ID NO: 59315 - DNA, 433 bp, Zea mays
  unsure (1)..(433): unsure at all n locations
ntctcgactaagtcggggacagggcctcatggacgggtgattgtacgcgtaagcggcaaggccgaccgagccgagggattcccacgcctctgggatacagatacctcactcgtcccttccgcgaaaagcaactctcgctcacacaaacatccctgttaccgacagagtccagatgctcgaaacaagaggaaaaaaggcgcagcttcgcaagcgcggcgagggtgtgttttttctggcctcggcggccgcagaaagcacacgctacaagatgatctgatcctgcaggctcgggtcttcacgctgaagggagccatagcaccctcggcatcgacgacgtctacagcaaagcccgacccagcctcgggcggcgccgaggtccaggggctcctccgggaatccggcccgagcaggcggctcaaccggttaccccccg

SEQ ID NO: 59316 - DNA, 368 bp, Zea mays
gtagcatatgccaataatatacgaattgactcaagcctatctgcgggtgcatatgtttcaccgaaatccaaaccttcgacttgagagtatcctttggccacaagtcgagctttgttccttgtcaccacaccatgctcatcttgcttgttgcggaacacccacttggttcctacaacattttgattatgacatggaaccaaatgccatacctcattcctagtgaagttgttgagctcctcttgcatcgccaccacccaatccgaatcttgaagagcttcctctatcctgtgaggctcaatagaggaaacaaaagagtaatgctcacaaaaatgtgcaacccgagatctagtggttacccacttatgaat

SEQ ID NO: 59317 - DNA, 435 bp, Zea mays
ggccagtacctgtcaaaacaacagcacatgccagcacagcagttactaaccataccagtaacttggccttttgcatgctggggattggatatgattggaccttttaagaaagctcaaggaggatacacccatgtattggtggcaattgacaagttcactaaatggatagagtttcagcccattgcctccttaacctctgctaaagccgtggaattcatacaaaacataatattcagatttgggataccgaacagcatcatcactgacttgggatccaacttcaccagttcagaattctttgacttctgcgagcaaaaaagcattcagatcaagtatgcatctgtagcccatccgagagccaacgggcaggttgagcgagccaacggaatgatattggaagcacttataaaaagggtctttgataaaaatgaaaaa

SEQ ID NO: 59318 - DNA, 459 bp, Zea mays
  unsure (1)..(459): unsure at all n locations
gtcacctgctgcatgcaagcttatgactnnttggtctttttgttgaactggtttatacacacactatttaagtgtttgtgcaaccgatatagaatggcaattgaaaagaaattccctagcaatccaatgttgattntgtatgattctattcctcttctgcagaactggggaatccttctcaaatccaaagatcaacattcgttgtatgattttcagtcagtgtctggaggggcctgagcttgaggtgatctatagtctggtggctcgtctacggcatagtgttctaccgaggataggtctgcaggtgatccaacgagccaaagagcaatcttcttggccctgtcttggtctctttgaattgtgtgtcggcctaggttggtatcggttctttggtttagcaagggtctggcgtctactgttatactgagctggatggaatgcttcatttcctaacttctg

SEQ ID NO: 59319 - DNA, 442 bp, Zea mays
cctataaaactaagcttattcttcgattctcaataacttctcataggaggagcttttgttaataaaaagaatcaacttcgtcaaaacctaagaaattagcatcaaatggcaaggtgcgttcaactgctagagtcacacgcgacggggaggagaccgaagctgccgagactgccccaatctccgaagtaatgagacaatcatacctggttgtgtcagagcgtgcttctaacgaaggtgcacctgctgccgaagccgagcaggctgacattgaagaatgtgaggctgatgaagaagagatagattattctgtcatgccatctaaacctagccacctagatgttggaaagtctgctgtctctggggccgatatgcccatgatgacaaaactaggctacttctgggaagccgagaataagctggtttgttttggcggagaagaaat

SEQ ID NO: 59320 - DNA, 384 bp, Zea mays
  unsure (1)..(384): unsure at all n locations
ctgcactaagtccctagtgccgatgtgctctgcgacaactctaaattcatccagcgcaatntgtgttggaccctctggtgtcatattgcacgggggtctggtctcttcgaatatcaactctaacggactctggaccagcttcttcttatcatcgtcaactttgacgtataagcattcagatttccacgcagctggtcaattgccttctgtactgatcactggaaactttgagtcttgcagatacaaaattgaacagccaaagtttcatgtacccatctctctaccttggctgatatgagctcggcactggtaatacctcggatatggttcacccttggttcgatagccatatgtaacctaacctacatacatatgagtactgat

SEQ ID NO: 59321 - DNA, 412 bp, Zea mays
  unsure (1)..(412): unsure at all n locations
taatcctcgaaaatgtgtntntggggtaccagctggaaagtttctctttttatcgtcagccaccggggaattgaggctaatccaaaaaagattgaagctatcatgaaaatggaagcgcctcgatcacaaaagaaggttcagcgacttactggatgtatggcagctctgagcagatttatatccaggctgggagaaaaaggtttgccattttacaagctactcaagaaggtggataagtttgaatggacttcagaagcacaacaagctctaaatgcactgaaaaaattcttgacaacaccactggtactgaagccaccccagtgagctacgtcaactcaacctgctgaagatatgctactatatatctcttgcacgactcacgtggtaagcaccgcgttggtagtcgagcgag

SEQ ID NO: 59322 - DNA, 376 bp, Zea mays
ggtacccatctcttgattggtccatcattgttatttaacaaagatctatgaacccaaatgtcctttgtgttatcacttggtaaactcattacctttctagcacatattgcaattttgggttgcctaattacatgagaattaattgacaagctatgagtgggaatgttaccaatgggacaatctttgcattgatgtcccctttttcagcatgtgtagcataggcgttctccaagttttgaagatttcttctttccttgggttgtgcttgctacatggttagtaaaaactttctttttaacatcatgcctttttgttttaaatatggacaagaattaactaagtgtcccttctttgaacatttataacaaagtctatc

SEQ ID NO: 59323 - DNA, 433 bp, Zea mays
  unsure (1)..(433): unsure at all n locations
ntataaactttccaggtgagcatcgaatagctcgtgtcttatttatacccttattttcatctccaccaacaataccaacattgtcatcaccagacccatcgccaccaggaacaaactctgtgtctttttcatcatcactttcggcgtcttgtataggagggactttcaaccttaatctcttcttcctttcctttaattcatttntatctaattgctttctcttgttttcaacacggggagagcgacggacagcatgagcgccttgctggcctgatacattctgatcttgatccattataaaaaaacactgaaaaaatgggaatgcaaaaaacatgagggcacaaacacatggtacagatctcataaccaaaaattgctaatcaacaaactaaaacacacagtacaaaaataggaacaaaaactagttgcaata

SEQ ID NO: 59324 - DNA, 333 bp, Zea mays
taatggtcatgtgttgttcgaatgacacacttgttgtcatcatatatgatgcaccaataaaccatatatagccgtcaatgttcatacaatctctgtaatggaccacactctgtcctttgaaacaattcaaagaacttaaccaattcagatcatatcttaagataagagggacctaaaatctcatttccgatgatactcatcaagtatccatcttatgggaaaaacatgaccaatagaattgttcataacttttcatttcatcccaacaatgggatgaccaattcaatcttacccagcatggtaagtatcatcacttgaaaagtataacatatg

SEQ ID NO: 59325 - DNA, 433 bp, Zea mays
tctaaaggagaacacgtgataggtttaactaacgtgcaattctaaaaagatagaccttgtgcagcttgtcaagcaggtaaacaagtgggaggagcgcatcacagcaagaatgtgatgaccacctcaagacccttggagctgctgcatatggacctcttcggacccgtcgcctatctgagcatatgaggaagtaagtatggtctagttattgttgatgacttttcccgcttcacttgggtgttctttttgcaggataagtctgaaacccaagggaccctcaagcgcttcctcaggagagctcaaaatgagtttgagctcaaggtgaagaagataaggagcgacaacgggtccgagttcaagaaccttcaagtggaggagttccttgaggaggaagggatcaagcacgagttctccgctccctacacaccacagc

SEQ ID NO: 59326 - DNA, 422 bp, Zea mays
agaacatgtgatatgtctaacctatgttcatttcgaaaaagatagaccttgtgcagcttgtcaagcatgataacaggtgggaggagcgcatcacagcaagaatgtgatgaccacttcaagacccctggagctgctgcatatggatctcttcggacccgtcgcctatctaagcataaggggaagtaagtatggtctaattatttgtgatgacttttcccgcttcacttgggtgttctttttgcaggataagtctgaaacccaagggaccctcaagcgcttcctcatgagggctcataatgagtttgagctcaaagtgaaaaagataaggagcgacaacgggtccgagttcaagaaccttcatgtggaggagttccttgaagaagaatggatcaagcacgagttctccgctccctacacaccac

SEQ ID NO: 59327 - DNA, 427 bp, Zea mays
tcatgcaactgctgccagaaatgagaggtgaactgcttttctctatctgacactatcttctttggcacaccatgaagacaaacgatccgagacatatacaattctgccaatactgcactgttgtagttggtcttgacaggtatgaagtgggctgacttggtcaagcggtccaccactacccaaatggaatcctatccggctcgagtgcgaggcaatccgactatgaaatccataccgatttcatcccatttccactgagggatctgcaacggttgcaacaatccagcaggtctctggtgctctgccttaattcttcggcaactatcgcacatagccacatgctctgcgatttccctcttcattctgtaccaccagaatttcttcttcagatcctgatacatcttctcactgccagggtgaatcgaat

SEQ ID NO: 59328 - DNA, 336 bp, Zea mays
  unsure (1)..(336): unsure at all n locations
taatgtataaagtattcgacgatgtagtataattaatatactttgtcatgaatatttttttatgaattcgctagtagtaattgaatgttgttccttgttttcaaggttcaaactgcacatcgtccaccacgtgagaaaccttcgcagaaaaaacaattgtatgccatgcatatttgcatataaccaccgagaaagacgaataatctctcanagggctagaagcttatggaggaggagaatattgtagtttagatatagatttgacggtcttttatttttaacactagcataggtgagcgatttacatgcagataagctatattatagtaaaaagat

SEQ ID NO: 59329 - DNA, 431 bp, Zea mays
tgtgaagattcttcatcccaacatgggctagtcggcgatgctctagccaacccatgttagtcttagcaattaagcaagtgtcgagttcagctctattgaaatcaactatgtatagctgaccctctaacactcccttaaaagctactgaatcatcacttcttctaaagacagtaacacctgtatccgtgaaaagacagttgtaacccattttacataattgggaaacagaaagcaagttgtaatctaaagaatctacaagaaaaacattggaaatagaatggtcaggtgatatagcaattttacccaatcctttgaccaaacttgatttccatcctcgaatgttatagctcgttggggatcttggttttctcgtaggaggagaacatccttttctccccagtcatatgggttgtgcacccgctgtcaatgat

SEQ ID NO: 59330 - DNA, 294 bp, Zea mays
agcttataacaggaggatagaggcatgagctcgttcatatgtcatgatagaaagggagttgtacaagcatggagtttgtgctccgctactcaaatgtttatctaaaaccgaaggtatagagctaatgaaagaaatacaagcacgcctgtgtggatctcacattggatctatgccggtacttggaaaaaatttacgccacaggttttatttggtcgaaaggcagcttctgatgcagcggaattagttcaaaagtgtgaaggttgtcagaaatgtgcaagagatcaaaaacaacct

SEQ ID NO: 59331 - DNA, 436 bp, Zea mays
  unsure (1)..(436): unsure at all n locations
tcggttgggcgctgcacggaggagatccgagcanggtcttctctgtagcttgggattgagctcggcaagcaccacggagcagggaaccgacgcgccgtgggagccgtgcgcgcgtaggagatcggctgggaagagacatgcgaagaagaaagagcagagaagatagacatgcgcgctggagaagataaggagagcgcgtagggaaatatctggttcacgggcggcagaaaaatctcaatcggatgagatcgtgcgtgcacaaaaatctaggcgccgtgaagaagataggctgggcacgcgtagataaagcagcggtgaaaaatatcagagagcaaagcggcgtggggataagctcctggaatattttcttttctttttcagatttttagagattcacagatattcttgaatcgggatctttagccacgaacaaaga

SEQ ID NO: 59332 - DNA, 428 bp, Zea mays
  unsure (1)..(428): unsure at all n locations
tcaattntgtctatattgtggattgcttttgaatctgtccaatttccttcggcctttctggcagtctcttgacttccatgaatagcaataggcccttgttccgaaggtatcttcatgcatagatatgctgggtgaagtattgcacaaaagcattaagtgtctctcgaccaatgattgcattgtaggggtactccatgtcaacaatgtcaaaaacaacctgttcagtccttgtattgtgaacaaagccgaaggtaactggcattgtgattttgccaagtgctacgatctgtcttccttcgaagccacataggggatgtgttgcatcgtgaatcttatcttctggctcttgcatttgtctgaaggccttagcaaatatgatatccgcggcactgcctgtatcaactagaacattgtgaaccaaaaaaccc

SEQ ID NO: 59333 - DNA, 216 bp, Zea mays
ggaattcgcacttcatgatgacccctgacgcgccccttctgtattataccctcccaatgaatgtatattgagctgattgtctggcaatgcgctctggcgaattcttgtcatctggctcttcttcattctttatatatttaataatcggttggcctcaatcatcatagtctgactccggttgatctatgataatgcactcttctatttgatcacgtg

SEQ ID NO: 59334 - DNA, 445 bp, Zea mays
acacataaaactcagcttctaaaggagaacatgtgataggtctaaccaatgttcatttctaaaaagatagaccttgtgcagcttgtcaagcaggtaaacaggtgggaggagcgcatcacagcaagaatgtgatgaccacttcaagacctctggagctgttgcatatggatctcttcggacccgtcgcctatctgagcataggaggaagtaagtatggtctggttattgttgatgacttttcccgcttcacttgggtgttctttttgcaggataagtctgaaacccaagggaccctcaagcgcttcctcaggagagctcaaaatgagtttgagctcaaagtgaagaagataaggagcgacaacgggtccgagttcaagaatcttcaagtggaggaattccttgaagaagaagggatcaagcatgagttctccgctccctacacacc

SEQ ID NO: 59335 - DNA, 413 bp, Zea mays
  unsure (1)..(413): unsure at all n locations
agtcttgatccatggattgaacatcgccatctattttgcatcaagagactgatggtgtacggagattctctggtagtcattagccagataaacaaagagtgggattgttcaagcgattcaatgggaaaatactgcactgccgtccgaaagctggaagacaaatntgagggtctggagtttcatcatgtagaaagagatcggaacacagcggccgacatattatccaagctatgatccagtcgaactcatgtcccacctggagtctttgtgcaagatatactacagctgagcatctcaatggatcaaacagaagagtgtaatattatagatcaacctgagtcatgctctgatgactggagaaggccaatcatcaagtatataaagaatgaagaagaaccagatgacaagaattc

SEQ ID NO: 59336 - DNA, 431 bp, Zea mays
  unsure (1)..(431): unsure at all n locations
tatgaagattcttcattccaatatgggctagtcggcgatgccagagccatcccatgttagtcttagcaattaagcaagtgttaagttcaacattgttctcattaaaatcaactaaatatagctgaccctctaacactcctttaaatgctattgaatcatcacttcttctaaagacagtaacacctatatctgtaaatagatagttgtagcccattttacacaattgagaaacaaaaagcaaattgtaatctaaagaatcaacaagaaaaacattggaaatggaatggtcaggagatatagcaattttacccaaacctttgaccaaaccttgatttccatccccaaatgttatagctcgctggggatcttcattnttctcataggaggagaacatccttttctcccctgtcatgtggtttgtgcacccgcta

SEQ ID NO: 59337 - DNA, 355 bp, Zea mays
  unsure (1)..(355): unsure at all n locations
ttgtggcctctgatgctgacttactttgtcntcattctttgatgagtggatagatccgacgtgccttgggtggattctccctccgaatcccctggtcatctcagagaacctgtatgcttcctcccttctttgacgaaagtcattatcggcgtggatgtattcatccatattttgaagcaatttctctatggtctgacggggtttcctggtgaaatattgggccgtatgtcctggacgaagcaccttaatcatggcctcaatgacgatttcattgngcactgttggtgcttgcgcacttaaacgcaagaaccttcggacatacgcactgatgtattctccgtgatcttgcgtgcac

SEQ ID NO: 59338 - DNA, 447 bp, Zea mays
  unsure (1)..(447): unsure at all n locations
aatactcaagcttgtgcaaagtccactcgaactaatcttcggagaaacccgactcttttgttacatgacaccagaaggtccaacacaacaagcgttgaatgaattcagaattattgcagagcatatcagtacaagagacctggttcaagagtttttggctttcaaagtttttcctagtttaaaagaatgggaaatgccgaagctacaaggggagaagaaagaaggtgaacttgtgcgtgtaccttactatttcaagtttaagaaatactttaaaacaccttgccaagagtggctggatacaattgaagtaatgtgcaatgaaatacttggcaactactccaaanaagaagatcaattgatgactgcggcctttggcacccgtccgaagcgaagactgaatcgagtgctggacgccttgtgttttgaataccctgactatgaaaatct

SEQ ID NO: 59339 - DNA, 317 bp, Zea mays
ttaagtcacctgctgcatgcaagcttcatgaatgtgtccatgtcagcctactcaagatatgggtggtcgagcctcccgcgacaccaccaccgttacccgctgttcatcatggatccatctaccctgagccggaatgtgctgtacgcactcgcatcgctcgcggggttcgacaggtgctcatccgctggaagggagaacccgtcgcttcctacacatgggaagatctcgacgccttcgccgccaagtacccatcgttccagctcgaggacaaactggagatcgagggggggagagatgtcatgtacggcatccactac

SEQ ID NO: 59340 - DNA, 436 bp, Zea mays
  unsure (1)..(436): unsure at all n locations
ntatcaaatggatgtgaaaagtgccttcctcaatggacctatcaatgaagaggtctatgttgagcaaccttccggctntgaagacagtgagtatcctaatcatgtctataagctctctaaggcgctttatgggctcaagcaagccccaagagcatggtatgaatgccttagagattttcttattgcaaatggattcaaagtcggaaaagccgatcctacactctttactaaaacccttgaaaatgacttgtttgtatgccaaatttatgttgatgatatcatatttgggtctactaacgagtctacatgtgaagagtttagtaggattatgacacaaaaattcgagatgtctatgatgggggagttgaagtattttctaggattccaagtcaagcaactccaagagggcaccttcattagccaaatgaagtacact

SEQ ID NO: 59341 - DNA, 387 bp, Zea mays
  unsure (1)..(387): unsure at all n locations
ttctagagcaaggcttatcatataaaaaacctttgtataaaacaggggatcaaggaaaggtaatcaaattctcaaggaaggaaatgcagcaatttctttatcacacatctcctatcacctaatgcatcaagcaagtgagaaagattttaaataagcaaggaggtggcatatgcaccgggcttgccttgtgttatatgtgagtcgggctctgctccacagatgtcaaaatataagcatttcccggcctgaggttcttccggtggtggtggtgtaactcttgcttcttcaacttctacttcttcttcgttgtctatatataaccatatataatcatgaatgctcatgtaatgcttatgaaaacacaaagataataanaatatattatct

SEQ ID NO: 59342 - DNA, 435 bp, Zea mays
  unsure (1)..(435): unsure at all n locations
tgcatngcatatntaaatntcttgtattgcatctagggcttgtctaacctagttgagataaccgccaacaaagcgagtgaaaaagcttaactcggatcaaacttgacaagtcttagttttaagtttttagcacttaaattcttacttactatgcaattgttggttcttgaaatatgcatgaggtactgcacttatggggagtattcaaaactcaaaacactcatgaaaacccctagtgcaaggccaaaatgcaaatttcaccatttgcctattttctctaaaaattatctagcctatggcaaaatattttgaaaattatgagaaaatatatgagggtgccaatacctgtcccaacaagtgttattttgtgtgattataagttgggattaggtttggttgaaaactagatagaaaaattcaaaaatttcaaaattt

SEQ ID NO: 59343 - DNA, 364 bp, Zea mays
tttcgttaacacttttgaccactttgttagacaataagattcagtgcgacagactttgcacagtaaagcccacttctaaaaggtagctaagtggcttcagtttaattttgaatcaattaggtatgaattacgcaaggatacatcaaaactatgtgttatctcataacagcatagaaacatcggatccacggatcaaacaagacaaactgtgtacatcaacataacagtcatgcacatctataacatgataagcactgactctgaactctgatgaattcataagcatgactatgcaaacttattgcatatattaaaacaacatcagtcatgaagtgtccaagataagaagattacaaacaatcta

SEQ ID NO: 59344 - DNA, 434 bp, Zea mays
  unsure (1)..(434): unsure at all n locations
tgttcactcccgcagnggtgtaatcctgtggaggtcgaatttgtttggctntgcctttcttgtcatacaaagcctttccaaggcgagccacttcttgctttaattgttcattttcctttgcaacctcatccgaacatgtctctacaacaatattctcaacaacgacttggttgcaggagttagaatcatcaattaaatcaaagcaggaagtagaagcatctttcttaattatttcaggtatttcaactaaagatgttgctggggtgctaccaatgttttctagcttagtagttagctcattattgtgtatgctaagaatttccattttctctagcaaattttcaatagcttcttgggagctagctaacttagccttaagtttttcattctttntaataaggctatcatcggtagcagtggatggagcactagat

SEQ ID NO: 59345 - DNA, 420 bp, Zea mays
ttaaccctctcgcgagacctttgaccgtttcgttgtaaccttatttatttgtgatctcgaatgtcatacttgatgcatattcactttatttgttcccttgcatgatgtactgtttgtttcccaatttgaatggatgaatgtatgtatgcttgcaatcgcatacagaacgatgcggtcgaagagcccgatgaactctcacgagaagccactgagcaacactccgttggtggacgcaagtgtcccttgacctatctcttgcctattcattctttaattcacctaccgctttacatatgtatacctaaagctcgactagcttttgttatccctgtgcttgattacctatgtgggttggattatcactgtgtacctttatgctattgctcaactctaatcactgaacatgatgagattatctat

SEQ ID NO: 59346 - DNA, 432 bp, Zea mays
agcttctccttgtcgtcatcaaccttgacatagtaccactccgacttccagcctgctgcccatttgcttcggtagctgattacaagaaactctgtggttttccgataggcgaaattatagcaaccaaaattgtcatgcaatccatcttttctagccttcgtctgatattgcagttcgtgaactctgcaaaagctgtccgcaaatggctccactgcttggcttcggagtgcccatatataaacactaaacctaacgatagcgttaggagtcagctggtgaaaatagataccgaacctcttcagtacctctacaataatcccatgtagggggaatcttaatccagcctttataaagcttgtgataataacaatttcatccttctccggcttttgagtagtctcttctcccacgatgcgtaatagcttcttctga

SEQ ID NO: 59347 - DNA, 395 bp, Zea mays
  unsure (1)..(395): unsure at all n locations
agctttcatccttcttcttcacaaacagtgctggtcatcctctttgcgaagtgcttgngcgaataatacccttatccagcaactcttgcaattgcttctttaattctgccaactcatcgggtggcattcggtaaggcctcttggaaattggggccgttcccggttgcaactcgatggcgaattcaatatcccggtccggtggcattcctggcaattcatcanggaagacatctgcatactcacagaccactgggatcttcttcaggggtaactccgtcatagagaaagcacatgactgataagaaccctgactatgcagaatcaaagtgaaattcccgcagaaaggagaattaacttccatggtacgactggctacatcaagcacaacttggtgc

SEQ ID NO: 59348 - DNA, 431 bp, Zea mays
ttggactcatttgcaaaaaggaccctaattgagaattactcttgtctgaaatttcagagttttggctcaactttggagccttgtaactttcaaactatagagtttttgccctaggtcaccacatcaaaattgtagaccaaacaaaggagaacaactttgcttaagagtgtgagctcagttgttaagaaaaatctggagataatcatgctcaaaatctggctgtcaggctgttattgtctgaattttcagactaacaaaggactgacatcaactccaagctcaattccgagcatgatccagtgctcaactaagtttgcaccctatagtagaattgtagctggtttgtaactctgcaactttgctacagagagttgatgaagttcttatgaaaaatctggagaaaagttgctttgaaaatgctctgtcaaaca

SEQ ID NO: 59349 - DNA, 361 bp, Zea mays
acatgtgctattctgtgatgccacagacagaccatgcttgtcttatctattaagcatgcatctagaccggcgctcttttttgcgaaatccactaaataaatggtggcggctaatacaccctgtaaagctagtgaaccatcacttcttctaaagacagacacatctacatttgtaaatatacagttatatcccatattgcatatatgactaaccgatggcatattatatccaagagactctactaaaaacacattatagatagagtgctcattagaaattgcatatttacctatcccttttaccttgccttgattcccatcaccgaatataaatgaatcttgggaatccttattcttgacgt

SEQ ID NO: 59350 - DNA, 367 bp, Zea mays
ttttagaaagacaggaatcgcaccgcacgccatgcggggaagcaagtcggagcccatcatccacacaagaacatcatgacgaccgacaggccgcttgagctactccacatggatctattcggcccgactgcttacataagcatcggcgggagtaagtattgccttgaaacagaggacgattattctcccttcactcggggatcccttttacacgaaaaatctcaaacccaagagaccttaaagggattcttgagacgggctcaaaatgagttcggcctaaggatcaagaaaataagaagcgacaaccggacggagttcaaaaacctccaaatcgaacgctcccttgaggaggagggcatcaagcatg

SEQ ID NO: 59351 - DNA, 134 bp, Zea mays
gatgtgtagtaacatactatatgataaacattattctcatgtgagagactatatgaaacttctaatacgatagcatttgctctcttacataatcaataatgataataattggacctctcccctacaagataatg

SEQ ID NO: 59352 - DNA, 428 bp, Zea mays
cataaaactcagctaatcaatgaaagtgcttagcgaagggggactttttattgtgtatcaattctttctcctactgatggtgtattgtccttgtcatttccttgtagtgttatatacttctagagcatgaaaaggaatctaaattaagtattagctatacacagcctctatcctgaaaagagagagagagagaaaaaagcgaggctgtggtatatcgtctgtgatcgtgtttattgcaagtctttttcatatgcacctttattgcaatgctttgtgtgaaatgattgctccaatcatgaattaggaagcatacttccccatccttataaaattacatatatatacctttatcaaaagttgcttagagtatctccagcagctccctaatcatgaattaggagagatgctgcagcagatagccaacaatc

SEQ ID NO: 59353 - DNA, 460 bp, Zea mays
  unsure (1)..(460): unsure at all n locations
atcctctaagtcacctgctgcatgcaagcttgtggagattcctcacaaacgggtttgatattttgttttataccgcgacactcaagtttgatctttggatcactctgagaggggttgagtgcaacccttgaccgaatgatgtcaccacaacctgtagtatgctttggctgaaccacgggaaaaatcgttgtgtctcttgtccatttactttattgtgatttctttcttcctttgagcataaacttcacttacatattgctcctagtttaatacacatctcaagagagcaatcaagtgaagagtcattctttctctcctcttctcatccgaacttggttntaattcaatataacccatttattggaccatagtttgtgttgttatagcaagttttgcaggatcacccattcaccttccctttatgtgatctncaaaatgaattgagaaaatgattctttga

SEQ ID NO: 59354 - DNA, 432 bp, Zea mays
tctgcttcaatccacaagtttctatagattgatgcctgatgtttttcagtgttgtcgagcaccttatcctcctggtgattagtaagaacctgaaacgaaaggtgtaacataaggtacatactttggaagaaatggctgtaataattcaaattaagcaggagcatgatgttccaaataatgactaaagctacctgtgaaacagtggccttaaattctgaatcagcattctcctgttctgagtcttcatgcattgacctccaaaagtgtttcctcacataattaatatctttgaatttcatttggctggagttactcaatccatcatcatttttttgttcaaccttggagacagatgaaatgaattaaggctagaaacaaaaaggggttctatttatatttaatgtctggacactggagatcagagatcaccat

SEQ ID NO: 59355 - DNA, 368 bp, Zea mays
gtagcataggccaatttttatcgaattgactcaagcctatctacgggtgcatatgtttcaccgaaatccacaccttcgacttgggagtatcccttggccacaagtcgagctgtgttccttgtcaccacaccatgctcatcttgcttgttgcggaagacccatttggttcctacaacattttgattaggatgtggaactaaatgtcatacctcattcctagtgaaattgttgagctcctcttgcatcgccaccacccaatccgaatcttgaagtgcttactctatcctgtgtggctcaatagaggaaacaaacgagtaatgttcacaataatgtgcaacccgagatctagtatttacacccttatgaat

SEQ ID NO: 59356 - DNA, 311 bp, Zea mays
aatggtgtggttacctcacacctactccgactgtttatataagcgacgcacgtaagaacgtgaatccccacgaattttacaccatgcggacaaccgcttgcactctctgcgcggtggaccgcaaaaaccaaacagtagctcttgcaagtgggacccgtacgcgctcggaaactgaatcggttctcgacaaccagctcaagataggtgtcttttggaccttcggctttcccaagcttaagaaactttttcacggatcaagctccgtaccaaaaacgatctatcgcccgcaaaggggctactgttgggactat

SEQ ID NO: 59357 - DNA, 450 bp, Zea mays
  unsure (1)..(450): unsure at all n locations
atcctcttagtcacctgcngcatgcaagcttcagctccatctatgttatggattgcttttgtttcantccagtttacctcatcccttctggcatcttcctgactcccatgaatagcaatgggtccttgatccgaatgtatcttcatgcaaaggtaagcaggatgaagaattgcttcgaaagcattgagggtgccacgaccaataattgcattgtaagggtattccatgtcaacaatgtcaaacacaacttgctcagttctggtgttgttgatgaatccgaaggtcactggcatggtgatcttgcccagtgctacaatctgtcttcctccgaagccacagagagggtgtgtagcatcatgaatcttatcttctggctcttgcatttgcctgaaggccttatcaaatatgatatcagctgcactgcctgtatcaaccaagacattgtggacc

SEQ ID NO: 59358 - DNA, 123 bp, Zea mays
tcaacggtcagaatccaacggccgggtgacgtggctggcatacctgacagtgtccggtggcgcaccggactgttctttgcaccatgctacataatccctcaccaacggtcactttggcggaac

SEQ ID NO: 59359 - DNA, 344 bp, Zea mays
tacttgtcaaaacaacaacatctgccatcacagcaactacataccataccaattacttggcctttcgcatgctgtggactggatatgattggacctttcaagaaagctcaaggaggatgcactcatgtattggtagcaatcgacatattcactaaatggatagagttcaagcccattgcttctttaacctctactaaggccgtgaaattcatacaagacataatattcagattcgggataccaaacagcatcataactaacctatgatccaacttcacaagttcagagttcttcgacttctgcgagcataaaagcattcagatcaagtacgcatctgtagcaca

SEQ ID NO: 59360 - DNA, 431 bp, Zea mays
  unsure (1)..(431): unsure at all n locations
tctaaagggagaacacgtgatacgtttgactaacgtgcaattcaatatagatagaccttgtgcagcttgtcaggcaggtaaacaggtgggaggagcgcatcacagcaagaatgtgatgaccacatcaagaccactcgagctgctacatatggacctcttcggacccgttgcctatctaagcatangaggaagtaagtatggtttagttattgttgatgactattcccgcttcacctgggtgttctttttgcaggataagtctgaaacccaagggaccctcaagcgcttcctcaggagagctcaaaatgagtttgagctcaaggtgaagaagataaggagcgataacgggtccgagttcaagaactttcaagtggaagagttccttgaggaggaagggatcaagcatgagttcttcgctccctacacaccac

SEQ ID NO: 59361 - DNA, 378 bp, Zea mays
tgatgcatgcaagcttgaagccatggtatgtagcataggcaagtgatatacgaaatgactcatgcctagctacgggtgcatatgtttcaccgaaatccaaaccttcgacttgggagtatcccttaaccataagtcgggctttgttccttgtcaccacaccatgctcattttgcttgttgaggaagacccacttggttcctacaacattttgattatgacgtggaactaaatgctatacctcattcctcgtgaaattgttgagttcctcttgcattgccaacacccaatccgaatcccttaatgcatcttctaccctgtatggctcaatataagacacaaaggagtagtgttcacaataatgagcaacacgagatcgag

SEQ ID NO: 59362 - DNA, 428 bp, Zea mays
  unsure (1)..(428): unsure at all n locations
tccaccttttgaattggactatcgacggcagaaggcgttgtattattgctatccnctatatgctnctctgtgaagacctagtgcaggagctctgctatttcatttaatgagaaaagggagacaagagtctttaaaagttgctattacatataacgaaaaacactccaacacaatccaaaaaaaagaagacattacactacacatggatgcccaactgcagctcgtctcaacgccatttcttgtttggccacatgaaagaccacttgtgtcgatgtttgcttgccctcaaagatacgccgattccgctccttccaaatattccaggtgaagtacataagcaaacctgaaacagtgagttgatcttctttcgatctgttttggagcacaacagcccaccacgaatcgaagctctgaatatctgagctggg

SEQ ID NO: 59363 - DNA, 457 bp, Zea mays
  unsure (1)..(457): unsure at all n locations
aacttntaactctacattctgagattgcacatgtggttggctgatccttttgttttggccataatatctcaccctttggcattaatcaccaaacgggagacctatttggccctttaacctcattgccataccaaaatgtcatataagaacatattggcatgtatagcacaacaacgaacttgggacaagatacatttataccggaatgcagtggaagctctttctttgtacaagttcactgttcccttcaatattcctttgagactatatcacgaatactaacaaacatgtaatctaacggagtanagttgtagctcatctccaactaaacatgtgcatcatttgcatatggacttgtgatgcccggtgatgacctgtacaactcgaacaaccaatgtacgcaatgtatagacatcaatcttaaagtgcatgatcaagacataatcacatgttgctt

SEQ ID NO: 59364 - DNA, 438 bp, Zea mays
  unsure (1)..(438): unsure at all n locations
ctaagcttacttggtgtagacgccaccatccatccgtcgggtgacgtggatggcttttcgtgcacctcgggtggcgaggcggcgccttggtccaagttgaccatatagttggagtctttgatcattaattcaaagctcacaaacttgccaataacctcctcaagagacatctgtttatatctaaggtctccacagattagttgcactttagtgggattacaaagaacaagtgatctaagaataaccttgaccatctcatggtcatcccacttggtgctccgaggttgcacacttggttgaccatcgtcttgagccggttctacatggcttgcagctcttctcctttattaaggacaaatcgatcgagttcntcctcgatcgtctcccgcttggtgatcttggtcacctcgtcccctttgtgcgccgttttgaggacgt

SEQ ID NO: 59365 - DNA, 397 bp, Zea mays
  unsure (1)..(397): unsure at all n locations
tccttcggaccgtgtctaaatatttctcatagcttctggtctcttgctntacaactcttgtcaatatgaccagaaataacctgtgaatcagtttttataagcgcccttctaattcccattgcctttaacttccgaagacccaaaagcaaagcttcgtactcaacaatgttatttgtgcagctgaaatcaagtcttgctgcgtagcaagttttaactttggagggtgcgaccaacacatcggcttctcctgccccgaaggtccacaagaaccatcgcagaatactgtccaagcttcggcatctttactcgcttcttcttcctaagctcctggcgtccagtcagcaatgaagtctgctaacgctcgtgactgaatcgaagatctatgcacataatcaat

SEQ ID NO: 59366 - DNA, 430 bp, Zea mays
tggagaaatccgggataaatctgcgataatagccagctagtcctatgaaacttcgaacctgatgcacagtggttggcagtttccactctaaaatatccttgaccttgctatgatcaaccgcaatcccatttgcagacaatacatgtcccaaaaattggatttccttcagccaaaacacgcagttgctgaatttagcatataattgatgttcccttaagcacgttaatacgatccataaatgctgagcatgctcctcttcattcttggaataaatcaagatattgtcaatgaagaccatcacaaatttgtccaactcgggcataaatactgagttcattatatatgtgaagtgggcatgagcattcgctaatcttgaagacataaccaaatattcgaataattcgtaccgcgtagtaaatgcggtcttggg

SEQ ID NO: 59367 - DNA, 414 bp, Zea mays
  unsure (1)..(414): unsure at all n locations
tcggctntgtgcccttcagctntgtcatcttgctcctcagctttgtttagcttctattgagnttcggatcgtctgttaagcttcggctttgtgctcttcagcttcgtcaacttgctcctcagcttcgtcatcctgtacataattaagtattggaaggaaaattcaagtttaaaggaaaaggtaagcacaacgtatgattttgttaccggcttaagatgactgcgagcttcgtcaccagctatgcttcgtccacccttcgtccatactagttttataaatctgtttcctatgctttggacaagactggggatatcaaccagatctgctggtgataaactaaaattgggtctattgacaacctttccatgtgtgcaaccagatttcaggaaggcaatagctgtgccccgagaagct

SEQ ID NO: 59368 - DNA, 461 bp, Zea mays
  unsure (1)..(461): unsure at all n locations
atgcaagcttatcaagccgatatgtgtgttattttaattgattaagttcagcctgactcacgaaccatcccatgggcttgaatcgaatccggcactgtcatatgcactcacatgaaggccttctcccaccacccccacattcatcacctattcaccttatctataatttctattcgaccaacttcagaaagatttaatagtttccccaataattagttattacatgtgagctaaatttgttaagggtgaattatcatatgtactccaacagttagagatggtcgaatacccgctcttagaatcacagttgataatgaattacaaatagtatatggtcgagctattgtgtgaggttgtgatgagtatataatgaaatatatgatgaaaccacatattaggtccctgtttatttatcatgtngtaatttatcagatacaaatattcaagaactaagataatac

SEQ ID NO: 59369 - DNA, 430 bp, Zea mays
tgacaataagcactagacaatgttagttgtcagttttgattatatgacactgatttaaacgacaccagctttatcatcttattgtatccaaaatttatataattttgtacaaaaattgttaattagatattatatttttcctaaattgtctaaaattttacgagtacagattaattactaaaaataaaaaactatataaaaagagcttagattttttttatctctgattcatttcttatctcataagcctaaaaattatacttgagctatataatactattactaaattactaaatattttgttttattaatcaagttaacttgtttttcttctaattactaaccaaatcaattgtacattattttttttataaaaacttactaaacagtaataaaattatcttcaatttgtacacaaatcttctcctaa

SEQ ID NO: 59370 - DNA, 520 bp, Zea mays
  unsure (1)..(520): unsure at all n locations
gatccttatagtcacctgctgcatgcaagcttctactgaacaagtgctgcacttaccgctgtgtgcgtatctgccacatattataacataggagcccctggcgtatgtggagttagtgttgttagatctatcaaatactggttcagctcttcaaaggccttctgctggattggtccccattgaaagacttcggctgacttcagcacttcgaagaatgtgaagtttctctctgctgatctggatataaatctatcgagagatgccagccttcctgtcaatctttgagcccccttttttgtacttggtggctccattcgaagtatagcttcgatnttacttgggttggcctcaattcccttttgtgaaactaggcaaccaagattattccacttctttactccaaaaacacatttgtctggattcagctgtagaccagcctgtctaatattagcgaatgtctcctattaatcagcaatgtgtgtatcctgcttcgtgctctntacaatgatatcatcaacat

SEQ ID NO: 59371 - DNA, 435 bp, Zea mays
tgtgagcagtataaatacagaagggagaaggctgcttcagtctatcatccgaagctcatgcttctatgtgaagatatagcagagctgaaggtattgctgggatctcaattatctggggagcaggagaaaactctaataaggtttttgttcaacaacaaagatgtcttcgcatggtcagctaacgatctctgtggtgtcaacagggacgtcattgaacattcgctcaatgtcgatccatccttcagacccagaaagcagaggcttcggaaaatgtctgatgacaaagctgaaggtgctcggaatgaagtgaaaagacttcttagtgctggagtcatcagagaagtaaaatacccagaatggctagccaacactgttatggtgaagaaggccaatggtaaatggagaatgtgcattgattttactgatctcaacaag

SEQ ID NO: 59372 - DNA, 413 bp, Zea mays
agactttattgtctcttattgtctcttttgtcaattgtcgacttcttgtggggagaagtattgattatgggaaataggggggagttttgaaatctttgatcaatctgctttggaatgactctctttatgcttcaacatgtgtgtttgacttatagatagagattggagtttgatttgcaaaaacaaaccaagtggtggcaaaggatgatccatatatgccaaaattgaatcaaaaccaatttgagtttttatttgaagtggatttgcacttgttctagttgctttatgttgtgttggcataaatcacccaaaaggtggagattgaaagggaaatgtgcccttgggccatttctaagtattgtggtgattaagtgcaaacacatgtgccaatatgtgaaaatatgcccatggat

SEQ ID NO: 59373 - DNA, 422 bp, Zea mays
tccatctggaccatcacgaactacaccatagaatgaatcctcttttggatgatggagtgagcttatgatcagagcttctttccagaaatccgccatctgcaaaattagataaatctgaactagaatcattttgaacagaaaaatatgttcaaatttactttctcctcagcccagctggatagctcaaaatatcattcagaaaataatgtgaaggactttgaggaaccagtactgtaatgtcagtgcaaacatctgcaagcacaaaacctaaaatagatggaactgacaagaaaattagacataccaaacgctctctctcagatggtcttcctacaaagcaactcgcttttattcttttaacagcgacatcacatcctcttcatttaccatgataaactggcccataagtacctgaacccagc

SEQ ID NO: 59374 - DNA, 369 bp, Zea mays
agcttcgcgggagaaggttctgccttgaagtgatccatcttatttatcctctctcgcgtctcttgtgaaggccctgtgcatccccttttatatatacaaagggatggtccaactgtacatatgagggtgtagctacgtgctaacgtggccagcggatatattgctgatccctgtataaacgtatctatcggtgcggcccttggtcctgctgacgtttctttgctttcgtatagagctgataacaatcgacgtcatggacgcatgcatggaaccatcattacctgttgccggagtaatctatatgtgacactggtctttgttcttcgtagcctgaggcggctatctaggggtagggtaatgatgtatccc

SEQ ID NO: 59375 - DNA, 427 bp, Zea mays
aaaactcagcttacaagttcctccaactcaagatcggtcaacgatccatattttttttctagtggatcagactctgggcgagatcaccaacggagtaaccactcgctcacctctaactaatttttgtgagcattactcgtttgtttcttctattgggcctttcagggtagaataagccttgcaagataccgactgggtgttggccttcacgaagagctcaaccacttctatagaaatgaaatttggagcctggtgccacttcctaagctaaacattgtgggaaccaattgggtgttccgcaacacgcaagatgaacacggtgtggtgacaaaaaacaacgctcgacttgtggcaaaaggttatgcccaagtcacacgtttggatttttgacgagacttttgcttctgtagctccgctagaatcaatt

SEQ ID NO: 59376 - DNA, 364 bp, Zea mays
  unsure (1)..(364): unsure at all n locations
atcctcttagtcacctgctgcatgcaagctnggccaaaacaatttaaataatactccaatctttcttctcaagtggggattcaatanggaattctgaaattcagaattctgaatttcagaccttgagacaaagaccaagcgtgttcatcttgatccctatctcaaatcctaatgaacccattgacaaaaacgtgtctaactaacccctctatcacatgccagaagatgacattgggacgcgagccccagacacgacataaccctggatttgcctcgagtttgagcagagagatagaccggatttcatggctccaaatctctgaaaccagtaggcaaaatcctatgacccccacacaagatcggt

SEQ ID NO: 59377 - DNA, 410 bp, Zea mays
  unsure (1)..(410): unsure at all n locations
tctacatgcttgccacagnggtcggctaagcatgtctgaatggctctctggtaagtcgctctagcgtttttgggaccgaacgacatggaggtatagcagaaagcttcaaacggggtgatgaatgttgttttttcctcgtcttcctttgccaggctgatctgatgatacccggagtagcaatcccagaaggacaacacagaacacccaacggtcgagtctaccacctggtctattctgggaagtccgaagggatccttctgacagcgcttgttgagatccgtatagtcgacgcacatggccaatcctctttattctttttgagtacacgaataggatttgctagccactcaggatgcagtacttctctaatgaatcctgtcgcgactaagcgagctagttcagcatgaatg

SEQ ID NO: 59378 - DNA, 330 bp, Zea mays
cccatgcactctatgcaccgccacaccaatcattggtccacggcacgatggcaagcagagcaagttgaattgtgtaggtaatacagaatcatcattgtatagtgctttgcccgccggatggtatcaaactggaattgattgtcttggcagtgcttcaagaaatcgatcctgctgtcaaaatacttactctccattgtcggatctccatcatcagtctctggaagaggttgtacctccatctgtcagacagttagccactacggttagtatattgatccatcatgcatctattgaatagaaacaagttgtcaacttatttcatcgggaaaa

SEQ ID NO: 59379 - DNA, 415 bp, Zea mays
ttgccaaataggacgcataattatacctttgatgtcttctcgtgctgataagtcattcttcacataaaaccattctgtcatccaatccccgggccatctcttccgaaaggttggtacgggacagcttgccccggaccgagagacgaagctgtagcagccaaagttattatggtactgttctttgccccaaggctttgtttcatataataattcatgaacattacagaagcttcttgcgtcaggcttcagaccttggcttctcgcggcccacacgaagatatttagccttataattgcctcgggagtaagttgatgaagatagacttcgaaaattttcaacacctccacgacgaagctgctcaaggggaatcgcaatccagctttcaaaaagcttcgatacaccacaacttcattt

SEQ ID NO: 59380 - DNA, 376 bp, Zea mays
  unsure (1)..(376): unsure at all n locations
agcttggtgccaatggagaagcataagtccctgatatcctggctatcaaactggttgccgttgtcaactgtgagctctgacgggactccgaatcggcaaacaatgttttgccagaagaatttctgggcagtcttcgatgttattgtggatactgcccttgcctcgatccacttggtaaaatactcgacggcgacgaatgtgaacttgatgttcccttgggccgtgggtagtgtgccgacaatgtccatgccccatcgctgaatgggccacgtgtgggcgatcagctntgtgaattgcgaatggttgcccgaacggtggggaacttctggcatgcttcgcacgacctcgtgactcgattcgcggcgcatatcatatc

SEQ ID NO: 59381 - DNA, 397 bp, Zea mays
  unsure (1)..(397): unsure at all n locations
ntatcaaatggacgtgaaaagtgccttcctcaatggacctttcaatgaggaggtctatgttgagcaacctcccggctttgaagatagtgagtaccctaaccatgtttataaactctctaaggcgctttatgggctcaagcaagccctaagagcatggtatgaatgcttaagaaattttcttatcgctaatggcttcaaagtcggaaaagccgatcctactctctttactaaaacacttgcaaatgatttgtttgtatgccaaatttatgttgatgatatcatatttgggtctactaacgaatctacatgtgaatagtttagtaggatcatgactcaaaagttcgagatgtctatgatgggggagttgaagtatttcttacgatttaaagtaagcaac

SEQ ID NO: 59382 - DNA, 413 bp, Zea mays
  unsure (1)..(413): unsure at all n locations
tttccttgattcctgaaagcagcatatccttgagagtctttntcctttgtctggtaagacttgcgaaagtacactccattctcatggttttcgaacccatgttgttgtaggtgatgaaactgccgagttttgctgttcttgctcaaaagtggtgccaaagcataacgaaaatcagttaacttggtgacgggatgatgtttacctncactgtatgtaataataagtatgcactcatacacctggtgttgaatagatactctctctatattttatgaatgtaannatatgtattgtaatccttacgcttattctttactccgantataaaaattataagcacccaagattttcaactatcataacttatcgcaccaatctataagcaaacaaccaaactatattctgactaatct

SEQ ID NO: 59383 - DNA, 417 bp, Zea mays
  unsure (1)..(417): unsure at all n locations
gtacttgtccaagcaacaacatctaccagcacaactactgcataccataccagtgacttggcccttcgcatgctggggactggatatgattggacctttcaagaaagctcaaggaggatacactcatgtactggtagcaatcgacaaattcactaaatggatagagttcaaacccattgcttctttaacctcagctaaggccgtggaattcatacaagacataatattcagattctggataccaaatagcatcataactgacctaggatccaactttacaagttcagagttcttcgacttctgcgagcaaaaaagcattcagatcaagtatgcttctgtagcacacccaagagccaacgggcaggttgagcgagccaacgggatgatactggaggcactcangaaaaaggtcttcga

SEQ ID NO: 59384 - DNA, 435 bp, Zea mays
  unsure (1)..(435): unsure at all n locations
ttaccaaatggacgtgaagagtgccttcctcaatggaccgatcattgaagaggtctatgttgagcaacctcccggctttgaagatagtgagtaccctaaccatgtctataaactctctaaggtgctttatgggctcaagcaagccccaagagcatggtatgaatgccttagagatttccttatcactaatggattcaaagtcggaaaagccgatcctacactctntactaaaactcttgaaaatgaattgtttgtatgccaaatttatgttgatgatattatatttgggtctactaacgaatctacatgtgaagagtttagtaggatcatgacacagaaattcgagatgtctatgatgggggagttgaagtacttcttatgatttcaagtgaagcaactccaagaaggcaccttcctaagccaaacgaagtatac

SEQ ID NO: 59385 - DNA, 434 bp, Zea mays
ttatcaaatggacgtgaagagcgccttcctcaatggaccaatcaatgaagaggtctatgttgagcaacctccctgctttgaagatagtgagtaccctaaccatgtttataaactctccaaggcgctttatgggctcaagcaagccccaagagcatggtatgaatgccttaaagattttctcatcactaatggattcaaagtcgaaaaggctgatcctactttattcactaaaactcttgaaaatgacttgtttatatgccaaatttgtgttgatgatattatatttgggtctactaacgagtctacatgtgaagaatttagtaggattatgacacagaaatttgagatgtctatgatgggggagttgaagtatttcttatgatttcaagtgaagcaactccaagagggcaccttcattagtcaaacgaagtata

SEQ ID NO: 59386 - DNA, 395 bp, Zea mays
  unsure (1)..(395): unsure at all n locations
gggtggattggagtngttggtaactgggtgtcagtccactcatccaggaagtatgccaagacctgtgattntatggccttccgaggggcgaatgatagcgtttcgcccatgagctccaccgcctactttgctatcctacccgatgccacacggctctggatgatctcccccaggatgaatgatgacaccgcagtcaccggatgagactcgaagtagtgtcgcaactttcgtcgtgtcagaatcactgcgtaaagcagcttctggatctgcgggtagcgtactttggtctcggaaagcacttcgctaatgaagtagactggcctctggacgagcagtgcatgcccttcttctcgtctctcgactacgatcgcggcgctgaccacctgagtggtcgc

SEQ ID NO: 59387 - DNA, 418 bp, Zea mays
  unsure (1)..(418): unsure at all n locations
nttgtgcacttactaccttgggcaagaggagggaaaaccctaaacctctcttgaaccctatcttctgaaaccatggttgagaaggggagagaataatctaattgtgccaaccatgagctaatctttaaccaaactttaagtaactntataaccagcaattgtgggaaagaaatgttgcaaaaagacccctgcagaaaccccagattcattccttaagtggagagagagctagagctctctaattctctctaagtcaaaaactacacctacactaaagatcaaccgtgttcaccttgaagatggcaccaaaaccacctatgttctataccaaaaatgtggcataccacctacttcacccactggaaaaagttgagcccgagactttgacgtttgacatgccttggcatggtttctgtca

SEQ ID NO: 59388 - DNA, 351 bp, Zea mays
cttcatcccaacatgggcttgtctgcggtgctctatccaacccatgttattcttatcaattaaacatgtgtcgaactcagctctatcaaaatctactaagtatagctgaccctttaacacaccctttaatgctattgaatcatcacttcttctcaagaacgtgtcacctatatcatttaatagacagttgtatcccatttgacattatcgggaaacagaaagaaagttgtatgtaatggatcaacaagaaaaacattggaaatggaatggcaagtgaaatagaattttaccaaactttgacaacccttgtttcatccccaatggatactcggtgggatcttgttttctata

SEQ ID NO: 59389 - DNA, 361 bp, Zea mays
  unsure (1)..(361): unsure at all n locations
tactcctncctgngaagggtcgttcatcatcgccaagattttgtttctcataacatacaagctggccaacgatcaaggcgaggtctacaacaacgcttggaacatccaacagctacgtcgcttctacccttaagatgtttcaagtcgctcatatacctcgatctctttacatacaccaatagagtctaaccgtcaaggaagggtcagccttgcctctgcgaagcccgaccctccctctggggctagaacgggggaaccccctctgcattaaaattttactccgaaaaagtctttctgccagaacatcttttccgtttttcgacaacttcgatagtgggatccttgaaacgacgagagtaca

SEQ ID NO: 59390 - DNA, 403 bp, Zea mays
  unsure (1)..(403): unsure at all n locations
gcttcatttccatcatattatggattgcctttgagtctgtccaatatccttcagcccttctggcggcttcttgacttccatgaataacaatgggcccttggtccgaatgtatcttcatgcaaagataaactggatgcataattgcttcgaaggcattgagaataccacgaccaatgattgcattgtgagggtattccatgtcaacaatatcaaacacaactcgttcagtccttgtgttgttgataaatccgaatgccactgacattgatatattgccgagtgctacaatctgacttccttccaaaccgcanaggggatgtgtggcatcaataattttatcctctggctcttgcatctgtctgaaggccttaacatatatgatatcacgtgcactgtctatatc

SEQ ID NO: 59391 - DNA, 443 bp, Zea mays
  unsure (1)..(443): unsure at all n locations
actcaagcttgacattgnctccctgatggaagccatatgccatccttaatttctangcgtctcccactatagagcatactactagaaaatttaaaattttcattttctaactaatgctcggcaatattagcatctaattttgctatatgatcattttgttgtttaatcatagcaatgtgatcatgaatagcatcaatgttaacatctctacatctagtgcaaatagtgacatgctcaacagtatatgtagatggtttgcaagaatttagttcaacaatcttagcatgtaaaatagcattctcatctctaagactggaaatagaagcattgcaaacatctaagtctttagccttagcaattaatttttcattctcatttctaacgctagcaagagaggcattcaattgttcaatcttagcaattgaattagcattatcatttct

SEQ ID NO: 59392 - DNA, 453 bp, Zea mays
  unsure (1)..(453): unsure at all n locations
agcttggtcatttatcgctaactgtcccgataatgaatgtgaccatgataaggtgaacaatagagaaaagaagaagcattacatgaatgcaaagggcgaggcgcatctatgataggagtgggactcggattgctcctcctccgactccgacaacgaaggactcgccgccactgccttcaacaaatcggctctcttccccaacgagcgtctcacatgtcttatggcaagggagaagaatgtgagtactcaagactccacttatgcttcttctagtgagtctagtgatgatgacatagattattcatgcttgttcaagggcttatatagatctaagatagataaaatcaatgaattgattgatacattgaatganaaggatanngctttataaaagcangangaattattgtatgatgaacatgataatattgtagaggcacaaaaatcatatgc

SEQ ID NO: 59393 - DNA, 434 bp, Zea mays
tggggatttaccaattgaaagagcacaatctctacttatgaatttccatgaaatatcttaaaaaagattgtattagtaacacaagcaatagtttcctatttagcaacctctagtatatgaatgacaagaaggttactaaaaacaaggaaacctcatgatatgaactaaattacccttacaagcatgatgcatgacactgatttaaacatggtgaaaatagcatgattattaatagggcaagtttaattcataacatggtgagtgatcaatgtagaagactcaaaaccaatttaaacaagaaggaatacatcacatagtattggactgatcttctttgaatattgaatgacacattccatttgagaaacacattctcatgttgtgagactacataaacacttggatagaaacattagtctcacaactctagtcat

SEQ ID NO: 59394 - DNA, 444 bp, Zea mays
  unsure (1)..(444): unsure at all n locations
gctgttgntgtattgggaatactggtatgtatgatgttctgagattattttaaggaagttgactctttgtatttctgaggcttatttactatgcaatcaccctattggcgagccaattatctaacttatctacaggatcaccatattcatgagtcaaatctcacatgtggctgtgctttacaattgtaaaatccctttagaaatctcctataatattgcttttctatcttttcagtagaatatagagtaaaatccatggatcgtcaaatttatgccataacctcctagcccctaaccacagccgtatcgacctttctccagcagtttgttagtggcaaaattctccttctgatgtaaaatacggtgtatgtgtcacttgcgttntcactaatggaacattttattgtggatggttcaagtgtgtgcttgtgaatattaactatg

SEQ ID NO: 59395 - DNA, 429 bp, Zea mays
ctataaaactcagcttacacctctggctaactcggatgcggactcttcttgttggccaataaaaacctgacctgaaaaccttcccaactagggtcctggatgctgcgtgtactccacattgcccagcatggacttcatccagaagttgctttccagtggctgagagaatgcatttcatgaggactcctgatgcaccccttctgtatagtgttcccccaatgagtgtatagagagctgattgccttgcgatgcgcttggctgtattcttgtcatctggctcctcctcattttttatatatttgatgatcggcctcctccagtcatcaaaatctgactctggttggctcaaggtattacattcttctgcttgatacagtgagatgcttgggtgtggtatttcttgaacaaagactccatgtgggacctgag

SEQ ID NO: 59396 - DNA, 362 bp, Zea mays
catgcaagcttgccttcgcttctgactatcatccgcacttctactgtgttctggatcgtgccaatgggaaaatattctcatctgtcataataatgctccttcatgaataaatgcagattgaccgacttattacccgatgcagtctgggcgctatacacaactgagtgcatggcgaacgggttcactcctttccgacttctatacggatcggatgcgatgaccccgcaagaaataatacatgggtccccgcgtacaattccgtctgtcgttcccgacgtggacgatccatcttcaaatatcttattgcggagaccggtcttcgccctacatgccctatgcaattccaagccataccatatcat

SEQ ID NO: 59397 - DNA, 430 bp, Zea mays
tgcacagtaatactacgcacagaggaggagggatcacgctctttctggccaaaccactctaaatgctcgcgtgttcgtgtggtctgcgatctcttatcaagataagcataacgctatatccccttcctcatcttacgattcacggcgggtgcatttcaccaaccggtcgaagaattacctctcctacaataaccctcttctcatttggcaggtagtgacgggtcaccgaactaggggtacacgcaatgctccttaatctgtctggaaaacattctcaaaacagaccgtaaagaccggttagcgcgattcatagttgaagcctcagggacgcgatctcgtctcgcccgagcccggtctcgggaaataacagtagctccagacagattcacgcctctcccgaaggcctcctcacgcagtgggcgcaccctcc

SEQ ID NO: 59398 - DNA, 424 bp, Zea mays
  unsure (1)..(424): unsure at all n locations
tgtgaacagtgcaaatntagaagggagagagcatctttattttatctgcccaagcctatgctgttatgggaggacataacacagcacagggtgctggtgagctctcaattatcccaagaacaggagagaaccttgataacgctcctggtcaacaacgaatatgtgtgtgcatggacatccaatgatctttgctgaggtaacaaaaatgatatagaacactcgctcaatgttgacccatccttgagacccacaaagcagatgctcccgaaaatgtctgatgataaagccgaacgtgctcgctatgaagtcaaaagactcgctcactgcaagagttagtccagaagtagagcacccagaatggctagctaacactcgctatggaaaaaaggccaatagggaatggacaatgtgtatcgattgtaca

SEQ ID NO: 59399 - DNA, 438 bp, Zea mays
  unsure (1)..(438): unsure at all n locations
agcctaatgatngaatggctagtcttaatgctcaacttaagactagcaagcatgatttcgataaactaaaatttgcaagggatgcctacacaattggtagacacccctcaattaaggatggacttggcttcaagagagaagctaataacctaacaagccataatgctcccattcccgccaaggagaaatggaatgcccctatggctattattgtgcaaaataaccatgcttttatgtatcatgataggagacaaactagaaatgcttataggagttataatgcttatgatgattttgactctcatgccatgtttgcttctagttcttcctatatgcatggtaaaaatatgtctaggagaaatgctattcatcatgtgcctataaagaaatgtattcatgctcctangaaagtagtgaatgaaccttctacaatttatt

SEQ ID NO: 59400 - DNA, 422 bp, Zea mays
  unsure (1)..(422): unsure at all n locations
nttatctttntctttntttatttgtcctttctattgtcttttctatttctaattngaaatacttaaaccaaattcaatttcctgttttgaatttcagattccaaacttcattaaaaatcccaatataaagataactcctattatttatttataatatattttattttattctcttttttagtgtctactcattccttacttctagcttatttccacattcaaatttttttttaaactcaaatgtatacttttgtcttaattttcagatttgccaattgtatcaattgaaatacaaatgtgaatataaaccacctcattttaaatattactatgttattctccttctcatatttgtttctaacaatagttgactcaattacaaattaattntcttatttccccaatgtactataataactata

SEQ ID NO: 59401 - DNA, 423 bp, Zea mays
  unsure (1)..(423): unsure at all n locations
gctgctaaaagccttttcatctangggcttggtgaaaatattagttaattgggtgtgggtgctaacataagcaatttcgatatccccttttgttggtgatctctcaataagtgatactggatgcctatgtgcttagtgcagctgtgttcaacggaattatctatcatgcggtttgcactctcattatcacatatgagagggactttgctcaacttgcagtcatagtccctaagagtttgcctcatacagagtaattgtgcacaacaatatcccgcaacaatatattcggtttcagcggtggacatggctattaaagtttgtttctttgaagcccaagacactagagatctttctagaaactgataagtccctggtgtgctcttcctggtcaatttacatctatcataatcggcatcagaatac

SEQ ID NO: 59402 - DNA, 429 bp, Zea mays
  unsure (1)..(429): unsure at all n locations
tcagaaaatctggtatgaatctgcggtgatacccagctattccaagaaaactccggacttggtgaacagtcgttgggggtttccattctagaatatctttgaccttgctaggatctaccgcaattcctttagctgataatacgtgccccaaaaattgaatttcttccagccagaatgcgcacttactgaacttggcataaagctgatgttcccttaggcgcgttaatacaatccgtaaatgctgagcatggtcttcttcattcttggaatatatcaagatatcatcaatgaagactaccacgaacttgtccaattcaggcatgaataccgagttcattaaataagtgaaatgggcaggagcatttgtgagcccgaaagacatcaccaagtattcaaataatccataccgcgtagtgaatgcggncttcc

SEQ ID NO: 59403 - DNA, 370 bp, Zea mays
  unsure (1)..(370): unsure at all n locations
ctatgtatggattgctttngagtcaatccaatttccttcggcccttctggcagcttcctgacttacatgaatagcaatgggtcttgatccgaatgtatcttcatgcaaagataggcaagatgaagaattgcttcgaaagcattgatggtgccatgaccaataattgcattgtaagggtattccatgtcaacaatgtcaaacacaacttgctcaattctaatgttggtgatgaacctgaaggtcactgacatattgatcttgcctaatgctacaatctgtcttactccgataccacagagagggtgtgtagcatcatgaatcttatcttctggctcttgcatttgcctgaaggcctaacaaatatgatatc

SEQ ID NO: 59404 - DNA, 433 bp, Zea mays
  unsure (1)..(433): unsure at all n locations
tgtacgtctaaggtacctggcctttgcctcatgcaggacctctctaacgtagtataccggcatctggatggtttggacccctgcagtcggtcccgagtcctcaaactcctggccttccatcaacatcgtggtggtcggaccaccaccttctcctaggggaactttctaactcccctggagatgtcgtgctgccctttcngcgaccagcaccatgctcaccgcctcggaagccactgcaatgtataagtgcaatggctcccctggctccggagctaccagtattggcagggacacaaggtgctgcttcaactcttgaaaggctcgttctgcctcttcngtccaagagaatggaccggacttccgcaatagcctgaagaagggcagcaccctcttagccagtcttgagatgaagcggctaagggcagctagtgat

SEQ ID NO: 59405 - DNA, 402 bp, Zea mays
  unsure (1)..(402): unsure at all n locations
ttaagtcacctgctgcatgcaagcttncctaagtaaaagtgttcactaatatgtggtctccaagtttactatagaaactatagtataaagtctctcagattaatcaccaaacagctccaaactgagcaccatatgctgcaatatagatttcagaaattgaacaaactcaatctccgctaacctgatagcccaactttaggcagcttttactccaattgtcatataacatccaacaaaactgtcttaaggagatttgttcatcatcatatgagcttcactatcttatgtagagcacaaaacatgtatagctcagctaaggaaaccttgaaagttatctggtcatggcgaggtggactaactgccgacgatggtcaccacctatggactggtacaccaagctcc

SEQ ID NO: 59406 - DNA, 320 bp, Zea mays
gatctttgccttctagaggtacttcttcttaagcgcctccttgtcgaatccttccttggacttggacttgccggagttgtactcccgcttgcccttgcatcgactagagtggtggtcgcgcaggccagcctcttacttgcccttcatggggtagctgacgatgaagtggtctgggtcaccgcagttgaagcatcgaacctttgacccaccatgccgccagttctggtggtggttgtggaaccacgtgaacctgctagccacaagcgctagctcctcatccccgtggctctctacatgctcctcagtgatggtcaacaaag

SEQ ID NO: 59407 - DNA, 195 bp, Zea mays
ttattctctaagacactaaacctctcaagtttcccacagagaaagatctgtatgaaggctcaggacaataattctaacgaaggttgatttatttcgtcaagcgctgaactgtctcgtcaagtgtctggagccagccattactaatgtgtcagtcaacagctataaacaagtcagtcttggtaccaatatgccaaa

SEQ ID NO: 59408 - DNA, 421 bp, Zea mays
  unsure (1)..(421): unsure at all n locations
tattgaaggatgcagatgcaagaatattttcttctgggtgtgaatattctacgctgtcatttttagtccacttatatcacttgaagtgcttacatggttggtcaccagaatcatttacaggactaatggatctgctatctggtattcctggagctaatctacccaagacatactatgaagcgaataaaattatccgtgacttangtcttgatatgagagaatccattcttgccccaaagattgcattctttttcgaggagattttgccaaacaagatttttgtcacgtgtgtgagagctctcgttggaaagttgataagaacgattcaaatgcctctgtagtgaaatctaacgggaaaacgaaaccagccaaagcgttgcgttactttccattgattcctaggatccaaaggttattttca

SEQ ID NO: 59409 - DNA, 334 bp, Zea mays
tttgattgagaccttggttggattaattccctgtgttacctatgtgatttcaaattggtcactttaatcgagcaataagaaataggtatattcttgtcatgtgctttaattgtagtgtttctgttctccacctctccttgtaagagtttgcattacatggcattcattcttatatatacctatatggctatatttagaacgcgaagaagaagtggaagtccctgaagagaagacaacaccacctttggagtctcaagcagggtctcgtctctactttaacatctgcgggcctgatactaactcatctataaacaaaggcaagccccggtgtatg

SEQ ID NO: 59410 - DNA, 435 bp, Zea mays
tgttatcaatgtggacgtgaaggtcattacttccgtaactgtcctgagaagagttcactaccggatacctctgagataaagctatctcagtctccagacatggaatatgaacaaaaatgtacagaaacttctatcaacatcgtgaagaacaacaaaaggaatagaaaaatgtttggatatatgagtagtccacctcaaccacaagcaaaagctccgaaacacatggatacccaaacataagaatcaagccagactcaactatatgagatacagacacccaatcaaccctcacccctggttggtcaagcaaagttgactcgcaaagaactcaaagcaagaggtgcttgtttctactgcaagaatgaagaacatatttgtcggggaccataattaggggtaccctcaagacgcctaattctcagctggtaaccccca

SEQ ID NO: 59411 - DNA, 424 bp, Zea mays
caaagccatggtaaggagcataggctaataatattcttatttactcaagcctagctacgggtgcataggtttcaccgaaatccaaaccttcgacttgtgagtatcccttggccacaagtcgagccttgttccttgtcaccacaccatgctcatcttgcttgttgcggaagacccatttggttcctacaacatcttgattaagacgtggaactaaatgccatacctcattcctagcgaagttgttgagctcctcttgcatcgccaccacccaatccgaatcttgtagtgcttcctctaccttgtgtggctcaatagaggaaacaaaagagtaatgttcacaaaaatgtgcaacacgagatctagttggtacccccttatgaatgtcgccgaggatggtgtcgacagtgtgatctcgttggattgc

SEQ ID NO: 59412 - DNA, 468 bp, Zea mays
  unsure (1)..(468): unsure at all n locations
atcaccgctgctgcagctttctgacaatgctgcacttaccgtgttgctatctgcacattataacaagaccccgcgttgtggagtatgtgtaatcatcaatctgttcactcttcaagccttgctggatggccccttgaagacttcgtgacttacacttcgaaaatggtaagttctctctgctgatctggatataaatctattgagagatgccagccttcctgtcaatctttgagcccacttttttgtacttggtggctccattcgaagtatagcttcgattttacttgggttggctcaattccctttgttgaactatgcaaccaatatatttccccttctttactccataaacaccattttctggattcagctttagaccagcctgtctaaaattagcgaaggtctnctataaatcagcaatgtgggtatcctgcttcgtgctctntacaatgatatcatcaacataag

SEQ ID NO: 59413 - DNA, 432 bp, Zea mays
tgtgagcagtataaatacagaagggagaaggctgcttcagtcgatcagccgaagctcatgcttctatgtgaagatatagcagagctgaaggtattgctgggatctcaattatctggggagcaggagaaaactctaataaagtttttgttcaacaacaaagatgtcttcgcatggtcagctaacgatctctgtggtgtcaacagggacgtcattgaacattcgctcaatgtcgatccatccttcagacccagaaagcagaggcttcggaaaatgtctgatgacaaagctgaaggtgctcggaatgaagtgaaaagacttcttagtgctggagtcatcagagaagtaaaatacccagaatggctagccaacactgttatggtgaagaaggccaatggtaaatggagaatgtgcattgattttactgatctcaac

SEQ ID NO: 59414 - DNA, 401 bp, Zea mays
  unsure (1)..(401): unsure at all n locations
ggatcttaagtcacctgcatgctgcaatcttcggcatggcccactctntcatagttggaaacaccttgaaagccaaaaattcctgcactaagtccctagtgccgatgtgctccgcgataaccctatattcatccaatgcaatttgggttggaccctctggtgtcatattgcacggtggtctggtctctccgaagatcaactctagcggactctgaaccagcttctctttatcatcgtcaactttgacgtagaaccattcatatttctagccagctggccacttgcttcagtgactgatcactgtgaaatttgtagtcttgcggtaggcaaaattatatcagccgaagtttcatgtaacccatctcccctatccttggtctgataatgcagctcgtgcactc

SEQ ID NO: 59415 - DNA, 431 bp, Zea mays
  unsure (1)..(431): unsure at all n locations
tctaaagggagagcacattntaggactaaccaatgttcattttgagaaagacagggtttgtagcgcatgccaagcaggaaagcaagttggctctcatcatccacataagaacataatgacgaccgacaggccactggagctcctgcacatggatctattcggcccgattgcttacataagcatcggcgggagtaagtactgtctagttattgtggatgattattctcgcttcacttgggtattctttttacaggaaaaatctcaaacccaagagaccttaaagggattcttgagacgggctcaaaatgagttcggcttaaggatcaagaaaattagaagcgacaacgggacggagttcaagaactctcaaattgaaggcttccttgaggaagagggcatcaagcatgagttctcttctctctacacacctc

SEQ ID NO: 59416 - DNA, 414 bp, Zea mays
caagctttcttaaatgtaactagaattatataaaatgtttataatatttatatatgtaagcatgtggattataaaaaaagatccaaccatctatctaaaaatactaattgtatattacaaatattaacatttttatatatttaattaaactgtaaatagtttaagctcacgaaatacgacaccaacacttcagagcgaggtagtaccattcttggcgaacgggtgatcggccatgaatcatgattgataccttactggcatcaacacagcagacagcgcaatctgtgatgtaaacgatatctatgttattttattgtgcgcagcatttcctatatattatagccgaacagaaacggcaacgatgaagtcatccacgtcgtcaaaaaaaaattgaaccatacgatcgtcaatcac

SEQ ID NO: 59417 - DNA, 434 bp, Zea mays
taaccacatcgctcggcgctactacgagactgcggacgagctggctaaaatagcctcggggcgaacaacggtgcccccggacgtcttctcccgggatctgcatcaaccctccgtcaagatcgacgacccgcccgagcctgaggcgccctcgacccagtccgaggtaccctcggtccagcccgaggtaccctcggcacagcccgaggcaccctcagctcggcccgaggcgccttttgttcagcccgaggtaccctcggcctccgagggtgaggcactgcgcatcgaggaggagcaaagcggggccacgcctgatcgaaactggcagacctcgtacctgcagtatctccaacaaggagagctacccctcgaccgagccgaggctcggcgggtggcacggcgcgccaagtcattcgtcttgttgggcgatgagaaag

SEQ ID NO: 59418 - DNA, 429 bp, Zea mays
  unsure (1)..(429): unsure at all n locations
gtgcagcttgagttagaaggaataacactaacgcatgtttttgtttggnggacatacatttggggttctcacatttacacatcagctcgggcttataagtatctaattgggcatactgaaatacatccagttttcaagtggctatggaaatcctcttgccagcacaagcacaaagttttcttttggctgctcttaaaagagagactgagtactagaaatgttcttaggagaaaaaacatggatctcccctcctatgactgtatcctatgtacccagtgtgtagaagaaacagtataccacattttcatcaagtgtgactttgcacagcagcaagatgactccttggctgttcttgagagcttcaaaaggcaattgggagttccattgtacacggaaataaccgtactcatgtgttggagtatatggact

SEQ ID NO: 59419 - DNA, 363 bp, Zea mays
agcttctaaagggagagcatattttaggattaacttatggttcatttgagaaagacagagtttgtagcgcatgccaagcatggaagcaagttggtgctcatcatccacacaagaacatcatgagactgacaggccactatagctcctacacatggatttattcggcccgatagcttacataagcatcggcgggagtaagtactgtctagttattgtggatgattattctcgcttcacttgggtgttctttttgcaggaaaaatctcatacccaagatactttaaagggattcttgagacgggctcaaaatgagttccgcttaatgatcaagaaaataagaagcgacaatggaacggagttcaa

SEQ ID NO: 59420 - DNA, 422 bp, Zea mays
  unsure (1)..(422): unsure at all n locations
tttgaagccccaacaggactgcttcggattctgcaatgttgtttgtgcactggaattccaacctagctacatatcaagttttgatttttgatggtgcaattaaaacagctactgcacctacgccaaaggttccccacgagccatcacagaacactatacaagcttcgtcatctatcaaatgtccttcttcatgagcccctagcgtccaatcggcaataaagtctaccagtgcttgagattgtatcgaagatctatgaacaaagtcaatggtgaattcgctcaactctgcagcccacttgtcaaccctttctgcagcttctctgtttcttatgatgtactttaagggttgagacgaaggtgctattatatggtaagactganaatgatactgaagcttgctgaaagtcatcaaacaacatata

SEQ ID NO: 59421 - DNA, 427 bp, Zea mays
  unsure (1)..(427): unsure at all n locations
gtgaacaactaaaggagagattgatgtctccaccggtgtttgttatgccagatctacataaaggatttgacatttattgtgatgcatgtggccaacgattgggatgtgtgcttatgcaagaaggtcatgtgattgcctatgcatctcgtcagttgtggaaacatgaattgaactaccccactcatgatttagagctggcagcagttgtgcatgcacttaagatttggagacactacattatgggaactaagtgccaagtatatacggatcataagagtttgaagtatatattcactcagaaggatctcaaccttangcaacgccgttggttggagctcattaaggattatgatttggagattcactatcactcgggcaaggcgaatttggttgcagatgccttgagtcggaaggagcatgttcactc

SEQ ID NO: 59422 - DNA, 440 bp, Zea mays
  unsure (1)..(440): unsure at all n locations
agcttagaanaagcaacttctacaaacaagattttattaaattaaaaatgcatcaaatttgcgcactaaaatttacactctgatcccattacctgaacttgactaatacaatagtcggaaaagaaatcgacaggattgtgaattatttgcaccaaaaacaacacgacagcaacatgatgcagaagtgccacaagtgggtgagcattcgatcttttcgttttggtctatttggggttttgaaattttgggtttcaaaaaaataagaattcaagttttcaaaaacaatattaagaaccaaaccaaaatgaaacaaatattttggttcaatctgttgggtctatcgaatagattaaataatagagagactagtgtcttttgttaaaatatatgcgataaataattaaatagaagtagtattataacagtgagtgactataaaa

SEQ ID NO: 59423 - DNA, 432 bp, Zea mays
  unsure (1)..(432): unsure at all n locations
agcttcataactcccagnggtacttattggtaccttctgatgcctgaggggctcaagaatgatggaggaagcttcagcagaatgacagccaaggtccttcactctcaaataagcaggaatgtgttgacttatgttgatgacatcatagtaaaaagcacgaagcaagagaatcatattgctgacttacaagagacatttgccaatttcaggcaagctagtcttaaataaaatccacaaaattgtgtttttggggtaaagaagggcaagttccttggctgtctggtatcaatgaagggaatcaaagctaacccaaataagatcgaagctatccttcgaatggagccaccaaattcaaagaagggggctcaacgaatagctggaagactggcatcgctaaatagatntatatcaagattagcagaaaggaatcta

SEQ ID NO: 59424 - DNA, 435 bp, Zea mays
  unsure (1)..(435): unsure at all n locations
agctngatgtagcaacctcatgtgatgatttgtttcattaagagcaaactagtctacatgctgaattgactgaaaaagttgaagtcctgactttagacaaccaaaaattgaagaattacttgactgatgcaactactagaggaaaagttgttattgagaacaatgatttcaacaatgagttggcagtggataatcaaaggcttaagaatgaggtcaagaaactaaaaagtgaaaatgaacatcttgcaacaagtgtgcaaaagttcaacaagggtcaatacctccaaaatgagctgcttatgaacactgttatgaaaaataacaagagtggtattggatacaacgctnttgtgcaaaagaaagctatcactcaatacaagccaaagcagactcacaagcctatcatatgctttgagtgtggaaatgaaggtcatt

SEQ ID NO: 59425 - DNA, 439 bp, Zea mays
agcttcctattcagggtcctatttgcaaaacattaatacaatacaacttgtttgaaatttttgcctagtggatgcacgctaggtgtgtcaaacatatgcaatgccaatgcttatgatgccatgctcaagttttatttgtagtaacaccaggggtgttacacattcctccactttcgcccagaccagcgggtgaaagggtggacagccatgcggtcggcatgcaaccgcgccaagtgggtgcgccccttcgactccaacgcgcccagcatggaggcctatgcccagacgtcatgcaaccggcacgccgattgctacgtgcgagcaactgcaccgccactcgtaccactaccgcgccttctcgactacggaaccagtaccgcgactcgaggcaaccctgcgtatgacccaacagtgccagccgggcacgacggtcaatacc

SEQ ID NO: 59426 - DNA, 413 bp, Zea mays
  unsure (1)..(413): unsure at all n locations
agcttncgcattattctcagtcctaccatattatttttcttctcccaacctctcaaggacatcgttagaatcatagaagcctccggagggtctggcaagtggactgcatatttgaatgaattcaccattgactttgattatagatcttcgattcaatctcaagcattatcagacttcattgccgattggatgccatcggttcaaaaataaagccacctaatagattgtggcagaacctccccaggttttaggcccacatgcacctgctctggtctaaagacctcatacgactatgcctgtgcaccagataacttaacaggatccgtccgagtgtcccaaggaccccggattaaccactttcaactcagaacgccatattagtaaacacaattcacacaccaacgttttgctgc

SEQ ID NO: 59427 - DNA, 343 bp, Zea mays
aattaagtgtgcgactatatactagattgtgaagatactgtcacaacattcacctgggggggatgcaatatgagatgataattactgtcactctacgttattaaactcgaccttctagtgatataaagcatgattggattacaagaacatgatctctcggcgaactaacgactggccttatcatatataagtgcatacggcataaagtgttttaagactcgctaaacagttaaaaaattcacaatgtcaacagtctggttcagagcagcaaagtattctctcgtcaatggagactctctacctggatctttagaggaatggaattcgatagaacatgtagtta

SEQ ID NO: 59428 - DNA, 437 bp, Zea mays
  unsure (1)..(437): unsure at all n locations
catgcaagcttcttgcatcatttatatctttttttatttgcaacaagactctgaaaaagattttccaaatgaatttgcaataacataacaagtggtgcacgcgtggtccaaaatgttaaataaaagaaagcaatccatgcatatctagtgaaatcattaattggnttaattccaagtaacctatgcacctaccttatacaaactagatcaattctgcacttatgtatttgctttggtttgtgttggcatcaatcaccaaaaaaggggagattgaaagggaaatttggtttaacctttttctataaataattttggtgggtgaatgcccaacacanataattggactaactagtttggtctaaattatatattttacaggtgcataaaggctcaacacccaccaataaaagattgaagaaagggttcaatttcatgga

SEQ ID NO: 59429 - DNA, 426 bp, Zea mays
agcttcagttccaatgaacctactcctctttgatgatgccacgaaggctgggtctttatcaaccctcttcctttctcaatcgatcactcagaccaattaagtgcttcttcttaatctcaaggatcacaaagaccccacaaggatcaccacacacttaggtgtctcttgctagatttacaagtcactacagagtttaaaaggagataaagaaagcacgattaaaagccaagcaacaagagcaacaaataaaacatgaatcacgctctctcaagtcactaatcgctaatgatcacttgtcttgattgtggcacttggagagattggaagctttgaatgtgtcttggaatggattgctagctcttgtattgaatgtgtgtgagtagaatgcttgggtgtattgaatggacgtggttggggttgtattta

SEQ ID NO: 59430 - DNA, 152 bp, Zea mays
atgttacagttatgctttctaacacaactgcggtaaaactaagttatgtgtacatcggagcaatctatctcagttgttggcatattgtattacatgatgtcactgaacgatattgatgcctccagactacttgaggtggtccctaactactt

SEQ ID NO: 59431 - DNA, 430 bp, Zea mays
  unsure (1)..(430): unsure at all n locations
agctntagaaggcaactntgntccatctctgtatccattgggtgtagcccccgagctttgaattgatttgagcatcaatcagntcaaaggtcttcaaaaccacttttgagtttagctttgcctcatctttgtaggtgcacctagtgggtgtagcccccgagctttgcattgatttaagcatcaattagttcaaagatcttcatgatctgcttttgagttcagggtttgctttgtctttgtatccattggatgtaaccctcgagctttgaattgatttgagcatcaatcagttcaaaggtcttcatgatccgcttttgagttcagngtttgctttgtctttgtatccattggatgcactatagggtgtatcccccaagctttgaattgatttcacaatcaatcagatcaaaggtcttcacaatctttgttt

SEQ ID NO: 59432 - DNA, 429 bp, Zea mays
agcttaccctgtcccatatgcagagcatgtgtctatttaagatagtccttgatctatcaggcctacatacgcatccaatccttaattgacctggacggaacatcacctgttcctagcccaagtcccgatttaagtacttccacccttaggattgtttcgtgttcctaaggatgaaaagagcattatagggaactttgcagtaagatcccaccatgctcccaaggaaaatattcttgcaggtagaagccacccttcctcaggataaccctgagcgaggcataagtgcaaaggacaaactctacctgcctataagcagggctaagcattttttgtaaatcatattttgatacttcactaaaagtatctataaaggtatggatatcaacgaacgcaatgcatcaaagggttccaaaccacttctataaacct

SEQ ID NO: 59433 - DNA, 434 bp, Zea mays
tagcttgagtcagttcttctacagagaattattgatgcccaaagaaccgaccagggtgtgaaacacattcatgagaaaatagaagccgactaagcttattgcttcagaaaagatgaccaacgaatactatggttcaataatcgtatagttgtgcctaaagatactgaggtccgccaacaaattttggatgaagctcatcttagtcgatattccattcatcctggaagtactaagatgtatcatgacttgtagcaacattattggtggacaaaaatgaaaattgagattgcacgctatgtggcaagttgtgacacttgcagatgtgtcaaggcagtgcacatgaaaaccgctggaccactgcaatctttacccatcccaaccttgaaatgggaggacattatcatggacttcattgtgggattacccaggacagc

SEQ ID NO: 59434 - DNA, 399 bp, Zea mays
  unsure (1)..(399): unsure at all n locations
tgcaagcttggaggcgcctatcgggtttttctttgtgtacactcctccttctattcttccggtgccttgaatgcaacgggttgagcttcggatgtgtcaccaagctcgttgattttcctcgagccttctatcatgcactcgaaacttacaaaatgcccgataacttcctcgggggtcattttagtgtatctaggattaccacgaatcaattgaacttgagtgggatttagaaaaatgagagatcttaaaataacatttaccacttcgtgggcggcccacttcttgctcccgaggttgcgcactttggtcaccaaaatattgaaccggtcgtacatgtgttgtggctccttccctgtgngaaagccgaaccgaccgaacttccactctatcgtgttccgc

SEQ ID NO: 59435 - DNA, 413 bp, Zea mays
agcttatcatgagtggagatattgtctctacattcaaaagacttggggagtggtatccacaagtgataaaggtatactctacaatcttgtggttgatttaatttaccatcacactgttatttccagggaaaaaatatgacagatgttatctctcagataattttcctagcttgtgttacagttaatgcgttcgtcatacattcagtcctgttttcctgaagaacttcgttataatctccgtgttctaagaaaaatttctttcctttgcaggatgagaaatcgggtatttgcttactactccattctcaaagattcatagaatatatcagggtaattctctgaatattcaaaatttagtttctgtgtttcacgggtcgcactacttctctgaatatatcaaggtgattctacac

SEQ ID NO: 59436 - DNA, 437 bp, Zea mays
agcttatgaagattcttcatcccaacgtgggctatgtcttcgatgccagagccaacccatgttagtcttagcaattaagcatgtgtcgagttcagctctatcaaaatctaccaagtatagctgaccctctaacacacccttaaatgctattgaatcatcacttcttctaaagacagtgacacctacatcagtaaagagacagttgtagcccatttgacataattgagatacggaaagcaaattgtaatctaaagagtctacaagaaaaacattggaaatggtatggtcaggtgatatagcaattttacccaatcctttgaccaaaccttgatttccatccccgaatgtgatagctcgttggggatcttggtttttctcatatgaggagaacatctttttctcccctgtcatatggtttgtgcacccgctgtcgagta

SEQ ID NO: 59437 - DNA, 377 bp, Zea mays
acgatgatctgagcggacagtgagcatatcccagactatgcacgctgcgtgctatcctgattatcgccatgttctaattcgcggagaaatgctgtatggggatatctctactggatttttcagaaactaaccaatactaaggtcttgacactaatattcgctagtagaataaacaacgacggtagacttaattagctctagagagctaactatctctcctacccacaatgtatggagaatcacttgacagaactctgtatcaaccgcgttgccacgcacccttccaacgtttttcatctaaatttactcacgaacacttattaattgacacgttttaagaacaattcactagtttgtataccgtggtcatcgatatt

SEQ ID NO: 59438 - DNA, 441 bp, Zea mays
  unsure (1)..(441): unsure at all n locations
agctntatccttgctntgctntgctttgtttgatattttctgacttatatggaaaaggcaaaagacattctgttactttggaccatattgtttgaaattgttttttagcacaattcaattttcttcaccacattggcacattatggatagccacatgagtaaccatggactagaggtgccacaaatggatttttcacttcctattgacaattggcatcatattgctctagccataaaaaatggagttgatgtacatcaatggtcactttgtatctaatggaagatacattgattgccatatggatctctggcagaggactcttccatgcaccagaaggtccacaatgtgtcaggaaagcttaatcatatgaataggacatatcagattttgtgcttaagctacatgttagcacaccatacttccaccccccctgtttggac

SEQ ID NO: 59439 - DNA, 162 bp, Zea mays
tctgactgtggtcacgcatccttacaataactgtcaaattgttctcaacaagccttacgatactatatgagtctacgctatacacaagcactgtcttgttgatttaaatccataactaccatatcactggctatccagtcataaatggatggagacttgtat

SEQ ID NO: 59440 - DNA, 252 bp, Zea mays
  unsure (1)..(252): unsure at all n locations
agcttgagtaagcttacggcctcccaggattcatcngtttgcatggatcgaacggaggaggacgagaaaggggctggccacggtggttgctctcgggcggcactggcgggtcgcggggaggtcgccggagctaaagactggctcggggaagtcaggcgaggtacggaggaggcaacggggaaggcagccgagcactagggcgggctttatagccgtggcgcgggcgtggtcacgggcggccacgggcgcgcg

SEQ ID NO: 59441 - DNA, 419 bp, Zea mays
  unsure (1)..(419): unsure at all n locations
agctnnttggataaacaggccaagcgcggaccgttctggtccctgcggcggaccgtccgtgacagaagaatgaccctcggacagaaccaatgcaaaaacacaagtttacactacagactgtccggaggaaaagcgaagaccgtccgagccctcgcgcggaccgtccggcctcaggcgcggaccgtccggtcggtaagaaaccgaaaaacccgaaggtgacgggttcggagaaatgaattatagggggcctcgcggaccgtccggggtgcacgaccggaccgtccgcgactggctctgtctgacatctgacgacgcattaaatgcaatatagccgttgatatagccgttactgctgaccgttgcattntcagccgttgatctacaggggcggaccgtctcctccaggagggcggaccgtg

SEQ ID NO: 59442 - DNA, 99 bp, Zea mays
gtttcccgtcacgagcctcgctgtgctcatactcttacgctcttcaacataaagtggtatcctagtggactctcttgacacttctgtaacatttctatg

SEQ ID NO: 59443 - DNA, 434 bp, Zea mays
cgcttgttctcttggctttaatctgtaccggcttctattgtttaaacagtggtgtctctatgaattgcagctgcagcagtctgaacaattggctttaatccgaagcgaacaaccattttaaactatactctgtaaataggacagtttacagtgttttgcatggccatatgcacgatttgctggccatagccttaggccttataactatcgttgggctggcctcacctagcgctacatatatgtagataataattgcactgtattgtctactaacgtcgggtgttagtcctatacactgtatataatcaacacatgaagctcaatgcaatacaatctaattgtttgtggcaatacctcatctaacatggtatcatgagtctaatctcgcttttgctccttccctggacgccacccctctaggactgtcgcctctc

SEQ ID NO: 59444 - DNA, 402 bp, Zea mays
  unsure (1)..(402): unsure at all n locations
agcttgttaatgcttagctntgctctattaattatataaagttttgtttttacaaaagatgttgtggcaaaagtgggtgggatgttttcaaaaataaaacttgatggtggatccatcatggccgtgatggattcaacatcggaaaagatgtacctctgccaggtaccaagttttgggttaaatgcttaagctgagaccaggcgggtgacttgcacgagaagagagtctcggtgtagtgtctccgtctgagtcgattaaggaccttgtcgatgtaggcctgctgaccgaggaccctntaactggtcacatgcctcgtcatgggtaagccttgcctcgggtagactaaggccggaataagataacacgaaatgggcgtggagcggtggcgaaagtatcgtgtac

SEQ ID NO: 59445 - DNA, 420 bp, Zea mays
  unsure (1)..(420): unsure at all n locations
agctnttgcgcttccaaatgaagctccaactgttttagtcccttggggctataaaagtgacccctatgcgcattctactggtaaccaagcacctcaagagctccacaacatttcgatacactgcgaccatgcctcctattgattctagagagatttgagcgttgtttttgagttgtaactctgtcactgtgttcttgcgctcatgtctttgcatctcttgcgtttgttgctataatttgctcttgtgtgtgtgttatttcttcctcccttactcctttttttattctgaccatcttgtaaggttgtgagagactccaatatgtggagattcctcacaaatgagattatgatatatggaaaanatngtgacactcaactttgatctatggatcacttgggatgggttgattgcaacacttg

SEQ ID NO: 59446 - DNA, 434 bp, Zea mays
caagcttggctggattggttgcggggagagtctttataatctcttcttggttatagctcaacctgacggttctgagttcagtgttgaggattgccttatattgggttagccaattcattcccaaaattacatctatatcctggcccttcagaacaatcatgttagcaggaaagttccgtccggccattgttactggcactccataggccacttctttagtataaatgtgtcccccaggtgaatgaattttaaatccctcctttgattcatggtatgcaatatgatattgttccacaaacttcttgctaataaatgtatgtgaagcaccagaatcaaaaagaattattgcagggtgactggccacagggaacgtacccatcatcaccggctctccctccggtgtggtagccacttgcgtataatatactcgccct

SEQ ID NO: 59447 - DNA, 335 bp, Zea mays
gcagtcgattacacggaactgatatctaccaaactgtgtgcactgccaatatacccccaccgatgttgcttctataacctacgcctacaccgacgcaatatcacgacgagagcgtttaaccacaataccacgcatatcgtgttgcacgggcatgaaaataggagaatatgacttttaatagtcgagtaggagcaataggcatatcaaagtgatataccgtgcctgcatatccaggacgtacaattcagtttgtgatggagcacccacacagcatcaccactggatgcatgaactcttcgattttactatgcgttgtgccgctctcatctatctga

SEQ ID NO: 59448 - DNA, 431 bp, Zea mays
taagcttgggatttgtcgcgggtcgggaccgactggatggatttcgggcccgccgaccgcgagctccttgagacccggaggcctcaccaccttgcatgacgttgccagatcctcgcccacgtttggatctggagcgtgggggagtatctccatgaatctcttggtcatcagaggagttggattcaaccacagaaggattcctccgacgcaccatccttaaaaagagaagatagaacctatgatgagcaaggatcttaacaaacacgtttgattagagacgcatatgatattgagcatgcacttcaaccgttcatgcgagcggttcaactactatgaacaatatcaaaccgcttaactctaacaatgttcgagacaaacgaagatagtctaagtgttgcaagcacctaaactaatatgtatcccacaaatga

SEQ ID NO: 59449 - DNA, 427 bp, Zea mays
agctttcaaactatgtgttcaaactccaaatgttttgtatggtttgaaacaagcacatagagcccgatatgagcgctttgaaatgttttgcttcctaagggttttaaaatgggattggttgaaaaaaatgtttttcttttcaagcaagacaatgacactttgttggtttacatttacgtggatgatatcactttttggtgattcctctcatactattgttgctaagttttaaatactatgagcagaaaatttgagatgagtatgacagaagaacttaacattttcttgggttgaccgagaagggcctcaacttctttcttgggttgaccgagaagggactgttatgcaccaagaaaatacacaaaggatatcctaaagaagtttgattatggtgagaccaagcctctttggatgcccatgtcaacca

SEQ ID NO: 59450 - DNA, 268 bp, Zea mays
tactactggctctgtcagccataagctgcaaacgtggtcttaaaattaatatcaattcacttgtacaaacgacgttgaactacacactgctctcggtgagtctccgaacgaactcttatttcaaaccattaattgctatgtaaccatctttaacaggtagttagataagctacttttcttaatttctacatatgtactacaaggacttatgtctctcaaaacatgtagatgaaggtgtgactattttctacgactcagacattgctta

SEQ ID NO: 59451 - DNA, 434 bp, Zea mays
agcttgtaaaatacataacttcagtcttattcttctcaaattagtcaaaccaattgtgctaggttctaaataatgtgaactacttaggaaaaatacaaaacccctaagtgttgcagaagattttaaagttttgaattaaatagtattctggccaaaagctaaatataagagagaaaaatagctacactgttagactacggttaagaaaaatcagagaagtatttaaccatttcctaatctgttgtaaaatagtacaccccctaagtagaccaaatttaaaaagggtttgccatttaaactcattttggaccaaagttaaagaaaatagaaaaagtagtttaaaataaaaaccagggggcaaccacatttttactagctcacttatccaacatagtttactggaagaatttgttagaccctctgttagtacaaaa

SEQ ID NO: 59452 - DNA, 290 bp, Zea mays
  unsure (1)..(290): unsure at all n locations
gatgtggcttgtgtgctcctcatctacttgagaagtataatgactactgctcgggaaactctcgaccctgtcattaagactgatgttctcctcttgcgaagatgcagtcatatctctcattttgatcacttcaagttgtgtgttctgcaagattcctgaagtctgcgaacctaatatgctcatacattattggactgtgcgctggcctaaccaaaactttgcatcgctgagtatcttgtatctggacactgatgagctgacgngacactttgctaatcttgaactgtata

SEQ ID NO: 59453 - DNA, 420 bp, Zea mays
  unsure (1)..(420): unsure at all n locations
agcttgtgatttatccaatttaaaacttttatcttctcttaacatagattttctatggataaactcagcacaagagatgacattagtagcacaagcactagtttcttatttagcagccctttatatgtggaagacaagtgtgttgctaaaatagagaaacatcataatatggactaaatttccttgaaccctcatgcacaatatattttgaacgatatggataatatgcatggttattcaatgaagtctaaagggatgacttaatccatattatggtgagtgtctaatatagaagaatcaaatccaaattaactagatagagaatacatcacataattntggattgttcaccatatgataatattcattcaacttccaattagacctttatttcataatcaacatctgatgtatatcctc

SEQ ID NO: 59454 - DNA, 230 bp, Zea mays
gtacaccctaaccaatcaccacccccagtcctgctcaccactaagtttatatagttgtgttcaaataagccgatgactggtagagctaaagtggcctcttctaggctttgcagcatgacgtactcagagattctttatgccgcgcggccgacgatgcacgatcaggtcttttgccactgatgctggcaccacctactgtcctttcatcgaggcacactgtcacggccaac

SEQ ID NO: 59455 - DNA, 426 bp, Zea mays
  unsure (1)..(426): unsure at all n locations
agtcacctgangcatgcagcttatgcaactgctgcagaaagagagtgatctttttcctctgtctgacactatcttctttggcacaccatgaagacaaacgatccgagacatatacaattctgccaatacgacactgctatagttggtcttgacaggtatgaagtgggctgacttggtcaaacggtccaccactacccaaatggaatcgtagccggctcgagtgcgaggcaatccgactatgaaatccataccaatttcatcccatttccactgagggatctgcaacggttgcaacaatccagcaggtctctggtgctctgccttaattcttcggcaactatcgcacatagccacatgctctgcgatttctctcttcattctgtaccaccagaatttcttcttcagatcctgatacatcttctcact

SEQ ID NO: 59456 - DNA, 436 bp, Zea mays
agcttatgaagattcttcattccaacatgggctagttggttgtgccagagccaacccaagttagtcttagcaaccaagcaggtgtcgagttcagctctatcaaaatctaccaagtatagctgaccttctaacactcccttaaatgatattgaatcatcacttcttctaaagacagtgacacctacatcagtgaatagacagttgtagcccatttgacataattgggaaacagaaagtaagttgtaatctaatgaatcaacaagaaaaacattggaaatggaatggtcgggtgaaatagcaattttacccaaacctttgaccaaaccttgatttccatccccgaatgtgatagctcgttggggatctttgtttttctcatatgaggagaacatattcttctcccctgtcatgtggtttgtgcacccgctgtcgagta

SEQ ID NO: 59457 - DNA, 273 bp, Zea mays
aacctcgcaatatgggcgtctctttgaccatcggcgtcttctacacaaacactcttggctagggggctcttactaattgccatatataacttgcaaatccatatttttaaaggaaaaatggaaaacaacgtttctctgtgcgggggattgccacgccaccctcgccgaggccatgcataagaaacagacgctgcgcccctatagaggtacacgccacgggggcacgctaccgaaccggttccggcgttgggacggagcgcgagaccggggata

SEQ ID NO: 59458 - DNA, 430 bp, Zea mays
  unsure (1)..(430): unsure at all n locations
agctttgngaactatgcccgtatccaatctgtttgttttgtactataagcgcttgccaggtgcccgcgttcctggtcgaccacgaccaacacccaacataagacttccctagttatttagccaagaccagagccatgatagttctcatggtagcactgttttcccgggtggtcactctatgttccaattaatatgcaataatcttgtttaaccatcgggttaacaacaataaagtaatcttaccatttggaacattaatatcataaacaggagtgactgcataaatttaaagttgtatcaatagcatagctacttgattagatcataatcaccagttaaacaaggagtaaggttggaaaggttatctaaataggtaacccggtcaattatgcatatatatccaaaagagtaaactntattaaatgtattg

SEQ ID NO: 59459 - DNA, 441 bp, Zea mays
  unsure (1)..(441): unsure at all n locations
agnncttggaccaaaagcactttntaaaaggactgcttaatggatgtctcangaaaagaaagttgttgccggagtgaagctgagcctttctgaggagaaaaatctgggcttcattgaatcaatagcaaaaacaaatgcagagaaaattactaaggaaattttggaaggcttatctgaagatactggtgaaagtgatagttatgatgcagacagcggaggtgaggattccgaagatcgaccatggcaaccaagccattcagtcttcggaaaatcaactattggacaaagtcaccttgaaaacatgaggggaagatattttcgagatatatccatcgtgagggcagatgacagagagaagactgtgccgtctcccgaagataatgaagttgtgatcttccgaagcttttttaaagctgggctacgattccctttaagcaggtt

SEQ ID NO: 59460 - DNA, 224 bp, Zea mays
atgtttgatgattgaatctatttcacttttatgtaacgcactgacgcaagccaaaactaatttacactcacattactgcactgaaaaatttctggtaaagaactccagtactaccaacaatgatgacagcataaacgctaacacaattgcaggaatgaaagaacttccaaagctcactaggaagaacttcctgcttcaaatcagatagctagcccacactagat

SEQ ID NO: 59461 - DNA, 434 bp, Zea mays
agcttgaagacagtgagtatcctaaccatgtttattgctctctaaggcgctttatgggctcaagcaagccccaagagcatggtatgaatgcctaagagatttccttattgataatggcttcaaagtcggcaaggccgatcctacactctttactaaaactcttgaaaatgacttgtttgtatgccaaatttatgttgatgatattatatttgggtctactaacgagtctacatgtgaagagtttagtaggatcatgacacagaaattcgagatgtcgatgatgggggagttgaagtattttctaggattccaagtcaagcaactccaagagggcaccttcattagccaaacgaagtacactcaagacattcttgctaagtttgggatgaaggatgccaaacccatcaagacacccatgggaactaatgggcatc

SEQ ID NO: 59462 - DNA, 337 bp, Zea mays
ctactcattactacctcctgctgctgtgtgctgcacttcgcttgatttgagaagcatttatatatcgcgctatgtcactgtcgacctctgtttggctgacaggtgagttatgacatagctgcagattgcttgaatatcccgtcacttcagttctgcgattggctagattaaatgtcaatagtagcgaaactactggcaccgacgctggctctattatgtcagttgactgcttatgtttctaaacaatcgtcctcatcttgactgacttcttaaatgggcaatgtgtcactcttgattctcatataacactgcttatgataaagctccatactattac

SEQ ID NO: 59463 - DNA, 438 bp, Zea mays
agcttaaatgagctgcttggaagctgtctattacacaaattgaggacgacctgaagccttgccgtgatcttattgagcagctgtttggaaaggagaagggttgacagatcaactggaatggagatgaagccgagcgatcaagagtcagctgcagcagcagtagcacggccttactccatcctagagttgtgcgctaggtggaggttgatgaagactttgccgcaaagatcgatgatgaatttctcgtcgttgaatcaggtggcgcaactatgaatctggaatctggaccaatcgtcatgtgactaattctgtttaaatcactttttttcttctaggagagagctcttttgtcttcatgaaagatagcctacttactttggcacaatttgctatgaaagtggacagagcatcacaactgaggaatgtatgttcataatg

SEQ ID NO: 59464 - DNA, 118 bp, Zea mays
tgcgaactaaccacgctgttatcagcgcggtgatcacttggaccgctagctgcgttcttcatgagttgtctgctggtacagaggatattcagaggctccactcagtgcagtacaggtt

SEQ ID NO: 59465 - DNA, 437 bp, Zea mays
  unsure (1)..(437): unsure at all n locations
agctntatggcttgtcaagttcttgacttcttctcttgaagccaagcccatccttaattgaggggtgtctaccaattgtgtaggcatcccttgcaaattttagtttatcaaaatcactcttgctagtcttaagttgagcattaagactagccaactcatcattaagcttggaaattgaaactaggtgttcactacaagcatcaatgtcaaaatctttacacctagtacaaattacaacatgttctacacaagaattagatttatttgctacttctaatttagcatttaaatcattgttgacaccttttaaagtagaaatggtttcatgacaagtagatagttcaaaagaaagcatttcatttctcttaatctctaatgcaagtgatttttgtgcttctacaaatttgtcatgttcttcatgcaacaaatcctcttgc

SEQ ID NO: 59466 - DNA, 425 bp, Zea mays
  unsure (1)..(425): unsure at all n locations
agctcgccgcagttgtgacagccgncgtctcgtgccggcttcttgttgccgacagcgccaccttgggcacctccacgtgcaccaccctcagcatgtactcgcgtcccggcctgggcgcctccacgcgccttgtgctgcttgccgcgtttgcggcctcatgtcgaggaggactcccccatctttttgtcaccctggcaggcctcccactgctcccgagtgagatgtagcttcccgccgatagtgataggcccagagggagcctgtggttcgtcgctgtcgaccaccttgagacgacctatcgcctcttcgatcgtcatcgtggagaggtctagcaaagactcgatcgagcgagcaatctgcttgtacttctcggggatgcaacggaagagcttctcaacagctctcttctcatcgtaggtgtcgtc

SEQ ID NO: 59467 - DNA, 292 bp, Zea mays
gctgtttgcaacgtaatctaacatggccaagtatcatctgtatcggtggaccgttagtacgcactagccaattaatcttggagcatattatcaatgttcacgtgacagtcactgactgttcaatggtcagtgttatctgcatgttaacactaaccgtgtactgttatcattgttactggtggatggcattgaacttattggaaatggaattcaatgtatctgtcgggagctgaatggcttgatttttctacatcatcgattcactagacgtatggcttgatttgtctcacta

SEQ ID NO: 59468 - DNA, 433 bp, Zea mays
  unsure (1)..(433): unsure at all n locations
agcttctaaagggagagcacactntatttcctactcttgtntcatttgagaaagacatgatttgtagcgcatgccaagcaagaaagcaagttggtgcccatcatccacacaagaacatcatgacgaccgacaggccgcttgagctactccacatggatctattcggcccgattgcttacataagcatcggcgggagtaagtattgtcttgtaatagtggatgactattctcgcttcactgggtgttctttttgcaggaaaaatctcaaacccaagaaaccttaaagggattcttgagatgggctcaaaatgagttcggcttaaggatcaagaaaataagaagcgacaacgggacgaagttcaagaactctcaaatcgaaggcttccttgaggaagagggcatcaagcatgagttctcttctccctacaccccg

SEQ ID NO: 59469 - DNA, 293 bp, Zea mays
tgcgaggggatactccgctagaagggtgcggagtatcggcaataggcccggagtttagcgcaccgcaggtggccggatacgaccgcaccccggggcacttgtcacagcaactgcgcttccattgcgggcgtatcactttctgcagcacttttctactcttggggaagattagtgaaagcgacgtgtctcacagacagtgtgagctgcactttgaaaggtacatgaggctgatatgagaacgttgagtatattatactaccgaggtggttgatgactcttgtacttcagagata

SEQ ID NO: 59470 - DNA, 378 bp, Zea mays
  unsure (1)..(378): unsure at all n locations
agctntcagctgacttaactattttattcttgacaccacattngacacaaactggaataggaggaactcagcagaaactagcacgagcacagatcaccctagtggtcccttcgaagccgaagccgcgagttcttccacccgttggcgcattttgtattgcagcattgccggagcacagtccaaaggagtttcccctgcccaacgtattgatgatgttagcaattccaggcactgaaataactatccctacttcaatttcaaaaatgggtgagtaactaaatatatgacgatgataactctcaacagaaccaaatngagcatggaactcaagccacttttncctttgtcatactctctcctctttggctctacatttga

SEQ ID NO: 59471 - DNA, 244 bp, Zea mays
taagtcttgcgacagtatttagctcatatgaaaccaagcgtgaaacctgttgcagaattccttacccatactggaacgatatagaggtttggtggatgcaaccaagtaagatgacagagtgataacagtaatcctcatattgcggggaaataggtccaacatctcgaaacatagaagtaactaatccgtgaagcacaatctctaccagattccaggtcactagaatcgctgcagaacgtcgcgt

SEQ ID NO: 59472 - DNA, 168 bp, Zea mays
atactgatgctttacttatgtttatttggactcaactattatgtttgatcgactgactactctccccgagccttggcataccgaccaagcaaaaggataaatacaaatgcgagcttatgtgactggatactctgacaactgcaagtgttaagaaatactgtatgaaac

SEQ ID NO: 59473 - DNA, 373 bp, Zea mays
  unsure (1)..(373): unsure at all n locations
agctnntgagtaattggttcttcatcaaatttcatgtttgtcacagtctccaggaaaagtttgaatggagttgggcaaaaacagcataatagatctggagaggtagccattttcttcttgcaaacaagaaaactcttgttctcgccctgcaaattaaagcaatatttaaacattacttcaatctagagccattggcaattttgccactatcatttgtgggcttcgccagtatgccatcggacccacaaatcatagacacagatggtcccaccagtcatagacacgggatggcataataacaggcagccaaattttagaagggccaaatagcaaaattcctctctcatctatatgtgaattccgacataaaaaa

SEQ ID NO: 59474 - DNA, 253 bp, Zea mays
ttatctctaagcatgatatcttttaaacggacctctatgaaacgtgaccattgtatgatcgagcatgtttagactcaaacttgatgaggcaaaatatttacaacttgcactgttctctgagaactttggatgttttcagagaacattttctgtggtggacgtgagacattgccgtgtacacacattttgttgccacgttgcttgtaaaactgtcaccttgactgtcccaatgatctcgtgttacttaccagta

SEQ ID NO: 59475 - DNA, 441 bp, Zea mays
  unsure (1)..(441): unsure at all n locations
agctntgaaatagaacagacaaggccaagaatttatattatctaggaaaaaaacaccaggttgctaagtttttgactaagcaaatggtgataactgcttggcaagagcgaaacaagacttattcccatctgggactagttttaaacaatagatagtacttctctcatacaaagaagttgtcgggactagggagaatataataggtctccacaagatcttcatatttctgtcacaaattaccatcactaaccatctagtggtcaagacttacggctcttccggcaccaaggaccaatgatatattaatgcccaaattagcttcaagctctgtggtgatgtgggatttcatggctattnttctactcttcttactgctggtaggtcagatgtagattacngtaagcataccaaggggcggaatccaatgtagttctgctacat

SEQ ID NO: 59476 - DNA, 153 bp, Zea mays
acgatgttacgctgccccgtgttgaccttgtcgggcaggggaaacttgtattagagtcatcaacaatttttgaaaactggtgcggatagagactacaactggaacagtaggggcgtaaaacaaatgctaaacagcaccgctttacatcaacta

SEQ ID NO: 59477 - DNA, 385 bp, Zea mays
  unsure (1)..(385): unsure at all n locations
agcttggtgccgatggagaaacaaanatccttgaaatcttggctgtcgaactgcttgccgctgtcaactgttagctcggacggtactccgaagcggcaaacgatgttctgccacaagaatttttgggcagtctttgatgtgattgtggaaacagccctcgcttcaatccatttggtgaagtattcgacggctacgaaggcgaacttaaggttcccctgagcggtgggcaggggcccgacgatgtccaggccccatcgctggagaggccatgtatgggcaatcagctctgtatattgcgaggggctgcctgaccgaggagagaacttctggcatgctttacaagacctcgtgacccgatttgcggcgcaaatcattgtgggccagt

SEQ ID NO: 59478 - DNA, 424 bp, Zea mays
  unsure (1)..(424): unsure at all n locations
agcttaccacatttgaagcatgagcgtttcccctttgtcttgggtttgcttggttgccccttgcggccttttagtaccgtcttgaatctcttgatgatgagagccatctcttcatcattaagtccggccgcctcaatttgtgccaccttgctaggtagcgtttccttgcttcttgttgctttgagagcaagaggttgaggctcatgaattggaccgttcaacgcgtcgtccacgtatcttgcctccttgatcatcattcgcccgcttacgaattttccaaggatatcttcgggcgacattntggtgtacctgagattctcacgaatattattcaccaaatgaggatcaagaatggtaaaggaccttattagtagtcggacgacgtcatgatccgtccatcgtgtgcttccatagctccttattt

SEQ ID NO: 59479 - DNA, 265 bp, Zea mays
actacctcctgttgctgtgtgcctgactaccatttatttttatgagcattttatagtgtgctattgcctatggacctctgttgtgctaacaggtggtctatgacatagattcatctgcttaatatcgcctacatcagacttgcaattggactgattcaatatacaagaaacgtagctacttcgtagctgtgctcggtcactctatgtaagctagcggattgcgtccccttatgacgcatgctacatattggaagacctccttaaa

SEQ ID NO: 59480 - DNA, 441 bp, Zea mays
agcttcactattatcggagtataaaaactaagtccttcgcttgtaaggagtattgctttcaaataatgcggaattgataaatcaatactactaataagtctatgagaataaatcaagaaggcttagataagaagagcaataacacaagttctttcttgcaatgtgttgcttcactaaatgagagtttaacttaaagcaacaccaaatagtattagcaaagtatagtgcaagaaaaacttagaaagaacaaacaaatcacaagcaataagcacacgagacacgggtgatttgttttaccgaggttcggccctcgaaggcctagtccccgttgaggagtccactaaggacgggtctctttcaaccctttccctctctcaaccgatccccaagatcggcgagctcttcttcttctcaaggatcacttaagaccccgcaaggatc

SEQ ID NO: 59481 - DNA, 51 bp, Zea mays
gacatgtcctcccaacttaacgctgccggtttctgtatcgcaactacatac

SEQ ID NO: 59482 - DNA, 434 bp, Zea mays
  unsure (1)..(434): unsure at all n locations
agcttcggaaatcccatacttttagctatcttccagcaaacagatatttctttgttgtccgggagacagtataggaaatcatcttcgttagtgccattgaacactaaagccccctttggatatatttagtttctaggcatagcgtctggcttccaggatttcctattcggataattttttccctgaagcatgtcgaaaaatgtaatcaacatcttcgactgaagcttcggggcaggggattttgctttttctaccataccctgccctgctgccatgctggtatctgaagtttgttgatcagctntgtcttcagccccgacagccttcgtctcaataagcactacgggcccagctntagcttcggcctggactttggcaacttcagcaattttcaaaatatgagtaggggtcaaggccttcgtggtcttcataac

SEQ ID NO: 59483 - DNA, 243 bp, Zea mays
  unsure (1)..(243): unsure at all n locations
tacactatgcttgcacacgtgctgccggtgaatgattctattctatcctaatactcagccatctcttgctatattagtctactgataaatgactcaactntatgactgattatatgcaatattccagcgatatgcgcctatntaggcatgacccacagtatctagtctatggatatgtctatctgccactgcttacattcttactcgctctgatagacctcgagcatgctgtctacatcacat

SEQ ID NO: 59484 - DNA, 435 bp, Zea mays
agcttctaaagggagaacacgtgataggtctaaccaatgttcatttcgaaaaagatagaccttgtgcagcttgtcaagcagggaaacaggtgggaggctctcatcacaccaaaaatgtgatgacaacatcaagacccctggagctgctacatatggacctcttcggacccgtcgcctatctgagcataggaggaagtaagtatggtctagttatcgttgatgacttttcccgcttcacttgggtgttctttttgcaggataagtctgaaacccaagggaccctcaagcgcttcctaaggagagctcaaaatgagtttgagctcaaggtgaagaagataaggagcgacaacgggtccgaattcaagaaccttcaagtggaggagtttcttgaggaggaggggatcaagcacgagttctccgctccctacacacctc

SEQ ID NO: 59485 - DNA, 211 bp, Zea mays
tgacaaccaaaaaagatgtgcctagaaacacatgcacagatcacaagaatatcccccgaaaacacgtgcgccaaatcagaattcagagaaaacccagagaaacaaccccaacatagcgggaattgaaaaacgcgattttgctgatattttatcagacattttatgatagtaaactacatgataaataacatcatatgttggctgatcaatt

SEQ ID NO: 59486 - DNA, 423 bp, Zea mays
agcttaaagccatggtaagtagcataggcaagttatatgcgaattgactcaagcctagctacgggtgcataggtttcaccaaaatccaaaccttcgacttgtgagtatcccttggccacaagtcgggctttgttccttgtcaccacaccatgctcgtcttgcttgttgcagaacacccacttggttcctacaacattttgattaggacgtggaaccaaatgccatacctcgttcctcgtaaaattgttgagctcctcttgcatcgccaccacccaatccaaatcttgtagtgcttcctctacctgtgtggctcaatagaggaaacaaacgagtaatgctcacaaaagtgtgcaacacgagatctagtggttacccccttatgaatgtcgcctaagatggtgtcgacggggtgatctcgttgga

SEQ ID NO: 59487 - DNA, 189 bp, Zea mays
gatgactatgtcatgtgtttatgagtcttaagactcttatgtatatattataagaagattaataatctttgtaatgaatggcatatatacgtcttcttctaagatatttcttcctataagaatgtgcattatttttatatataaactctgctgaactttaagttacctattaagaaaatacaagagtcc

SEQ ID NO: 59488 - DNA, 423 bp, Zea mays
  unsure (1)..(423): unsure at all n locations
agcnttctaaagggaatatggtgccactaagcacaactaaagcaaagaagattttgtgtcctattgagttgaagtatgaaaaaatacatgtttgccccaatgattgcattatatattggggaaagcataagaacaacatatcatgtccaacatgtgacacatcacactacaagaagattgatagcctagaggaattgagctccaatgagaagaaaaaaattcctgcaaaagttttctggtacttccctatgatacctcgattagaaagactttntgctaattcagcaagtgcaaaacataacaaaagccaagagaaagagcaaaaaaattctcaacagaaaaacatagaagatgatggtcttgatcccctttggactcccccctttcatcaacgatctccaccaccaattccaaataatatac

SEQ ID NO: 59489 - DNA, 74 bp, Zea mays
tgatctatattatcacataatcatctgactcgtgagttcgcagccacttcatcttcatacttttgtctatatat

SEQ ID NO: 59490 - DNA, 423 bp, Zea mays
agcttcacataggtgaacgagtttttttatttgttgaatggaattacggttcaagtgagtcaggttgatgtgataaaaatcaaggaggccacggaaaaaaggagatatgggaaggccgatgccgcgaataatgaaaggagtgtaaaccactgactcgtgggtatcttcggttgggacggtagtcccgtggcaagcccgccaagaacagagttcccgtggagggagaaccccgatggagacaaggcggagaagctcagcttcagaaattacagacatatggttacctgcgaagggtaactgactgttggggtcgatggcggggatcactgcggcagacgagttcgcagtcttcctcttgggcgccatcttacttctcgctggcgaaacggagtacgaggcgagtggaagagaagaatcagatgc

SEQ ID NO: 59491 - DNA, 145 bp, Zea mays
gatgctacacgcttaaatatgtgttaaacatatctcgtactcagcaactgtagatgataatacatcagtaacaagttccattcactcctttatatggcaatatactgccaacatcctattcgcacaatagtgccaaccatgcact

SEQ ID NO: 59492 - DNA, 297 bp, Zea mays
tgcgtagtctacttcatcatcactagactcatcatcacttgaagaagcatacgtaatagtacttcgagtacttaccttcttctcctttgccatgaggcaagtgtgatgctccgtggggaacagagacgatttgttgaacgctgtggcggcgagtccttctgtctcggagtcggacgatgaacaatccgagtcccattcttttccaaggtgtgcctcgcccttagccttcttgaaaccttcttgttctctctcttaccattctttccttgtcctggtcactatcattattcggacagt

SEQ ID NO: 59493 - DNA, 412 bp, Zea mays
agcttatgaagattcttcattccaacatgggctagtctgcgatgccatagccaacccatattagtcttagcaactaagcaagtgtcgagttcagctctatcaaaatctaccaagtatagctgaccctctagcactcccttaaacactattgaatcatcacttcttctaaagacagtaacaccaacatcagtaaaaagacagttgtagcccatttgacataattgggatacggaaagcaaattgtaatctaaagaatctacaagaaaaacatttgaaatggaatggtcaggggatatagcaaatttacccaaacctttgaccaaaccttgatttccatccccgaatgtgatagctcgttggggatcttggtttttctcataagaggagaacatccttttctcccctgtcatat

SEQ ID NO: 59494 - DNA, 350 bp, Zea mays
  unsure (1)..(350): unsure at all n locations
agcttgtgaacgaccctgtacgcggacatgtgctatgttgttgatgcaccgngncagcccatgcagaagcttagctatcgaacatgcatctatatcggacaccacctttgcttaagagcctacatggagatgctcgataatacgcctctctttgcagcagaacacagcattacacggaggacagacacctatacgcgcgcgaagacacaaatgacgctcacgtgagataatagtctcacatacaacttattgtgtcccataaactctgctaagagcacgggacatagtgagcgctgcttagaaaatgcaacaatgcctcacccttttagcttgccttgattgccctcacc

SEQ ID NO: 59495 - DNA, 435 bp, Zea mays
agctttctaaggcgctctatggacttaagcaagccttattagcatggtatgaatgccttagagatttcttaattgttaatgctttcaaggttggaaaagtcgatccaactctttttacaaagacatgcgatggtgatttgtttgtgtgccaaatttatgtcgatgacataatatttggttctactaaccaaaagtcttgtgaagagtttagcagggtgatgatgcagaaattctagatgtcgatgatgggcgagttgaactacttccttgggttccaagtgaagcaactcaaggacggcaccttcatctcccaaacgaagtacacgcaagatctgctaaagcggtttgggatgaaagacgccaagcccgccaagactccgatggggaccgacggacacaccgacctcacaaaggaggtaagttcgttgatcaaaa

SEQ ID NO: 59496 - DNA, 95 bp, Zea mays
caattcacatctctggtattaccagaacagaagtttgcccgttagacaacggcactatacgggtgacattccttaattgcagcatccctttttac

SEQ ID NO: 59497 - DNA, 437 bp, Zea mays
agcttaatcagcaaatgactctttaaattactcaatgatgaggggatgtggcaacaattacttaaaaataaatatctaggagagaaatccctttctcaaatatctataagacagggggattctcaattctggtcgggtctaatgaatattaaggatcagttccttagatgggggcacttccaagtgaggaatggtcaagctaccagattctggaaagacaaatgggtaaccactcgacctcttagtgagcaatttccgaatctctttaatatagtgcggaacaaattaaccttgtgtgcagatgttttttcatatacgaatcttaatttatcttttcgacgacaatcatggggattaaattaatggaatggcacaacatgctaaacttgctaattgcggtactcctgcttcgtctagagataaatttgtttgggacc

SEQ ID NO: 59498 - DNA, 314 bp, Zea mays
cacagcagatcatgatcactgtgtgcggtgccttgtgtgcactggtctactgccgcgcgctgtttatcggtcacttatgatacatatttattagtgattttaaggcgactatattgcgcaataaggccccaccattttcgtgttacacgcgcatatatgcttagatatccagtatacggaatgatgttatacgcccacatcactcgtgtgattgcccccatggtattcatcgagtgcgctgtgcccaccgcgatagctacgcacacaattcacacgcttcgcgcgctggagccgcatccgctatgcctgcccgc

SEQ ID NO: 59499 - DNA, 376 bp, Zea mays
catgcctaaggtcgcacgcatcgaccccgacatagcacgatggtattcaaggtgatcacagccatccggcagccatgaacgggcgaggccgtcatcagcgatcagtcactatgctccatagtagatggaatcgtctccctcgcccatgggagatgacttctacctaccactgggtttcaagaagcaacaataacaaaggctacacattgttaacatggccttcttgaaatccatcggtgggtccccatgggccacgagcaaagctagcgcaatccgctacactagcctatgttctggctccacagcgcacatgctgaccatcgtcgcccatcgcacaaactcatggcgtgctcagtctccaccgtcgcccagactt

SEQ ID NO: 59500 - DNA, 383 bp, Zea mays
tattctagcccttgatactttgcatgtgtgtactgaacatctatcatggtgtgcagcattgaatatcatatctaccatagtgcaacgtgctggtgctgctgtactgctttgactcccgaaatgttgtctactattactgtctaacacctattacaaccatgtacacttgagtgcgatatgctaattaagtgttatatctaaattgtgcaattttatgtctattgctacaaaccatttttatctgctaacaccactatggcttatgggatagaattatgacggtgtgtggagatgagtacagttgcatacaaattttggtagatatctataaccctgaatcgccctgcattcaacgggggcaaatgctccttctatcagtacta

SEQ ID NO: 59501 - DNA, 426 bp, Zea mays
  unsure (1)..(426): unsure at all n locations
agctttgaacatactaaacacatgtcttgttttatggtaaccagtaaacctagtacctgagtgaagccgggcgtgaactttatcccccacgggacctgagactgggtctcccatgctagctatggtgggtacaagtgcggtcactgcacggcggcagccggggtcagtggagcattgtatgccaagacggtgaggcctggacgcgaacggngaatcgatggggacggttgacatgtgtggggacggagtgcccctacatgtcatgtgtttaggtttaccttgcaaggttaaaactcaattcgaattgtctgcttctcgcagctaatgatactgcttgaccccttgtactacatcgagtaagaagtgaaatgatgttacatgagataacttgttgtgtgtactaaatgcttgctaccatgtatgctt

SEQ ID NO: 59502 - DNA, 437 bp, Zea mays
agcttatcctgctcctgctccctctccgccttctttctccaacttgtcagcgagttatattctaccaagtggtggaggagtgcccgcagaagcaacgacgacgcacactgctggcttgagcaagccagccaagcaacaatggcggacggaggaccgagggaggacgaagcggagagggtgctgcaggtggtggcagacgcgatgattctatatatctggagacgaatggatcgaggaatggggagtgggctcagctcgagcggccacgatttatgtttaatggaggcaaatcaggagataattggatttttgccactcacaatgttgtcttcttgttataattaccactgcatctacaatgttgtcttcttgttataattaccactgcatctatgaattgtgggtccagctgggtctatgaaatgtggacctgatgg

SEQ ID NO: 59503 - DNA, 348 bp, Zea mays
ttgcctagctcgtcatgaccggctgttgattcgaactgtcctgaacacatcggatccttagtagaatcctgctatgctgctctccgcctttattcctgctacaaatttgtggtactgcctagactcgaagaaccgttgcttaaccaacactcaggctgacgatggctcaatcaagaacggaacctgctggctagacagggttgtccagcaacagatggcaaagtttgcatacgcacatcggcagcaaagaggtgaacacggctgagcggtcctcagctacgccagctgtcgcagtcagatgctgctttccaggtctaccgaatcaaaggttctcgtttggagctcaaa

SEQ ID NO: 59504 - DNA, 425 bp, Zea mays
  unsure (1)..(425): unsure at all n locations
agctntgttcagagaaggcgttgtgtctagcttttacacggntatagttatttgttccgctgagaactgcagctgtccaaacaagacaacattttactcaacattccaggatctgcaagaacctacgtcttgaaacgctgcaaggataagtataaaatctgtgcaactctatatatctccccaagagcaatcaagtagtgaccacctgtaaaaccaacatagatggcaatttataattgaattctatctgtgaaggtaaatgatcccaaatgaatgataaagcttttctggtcgtgcaaaatatatgtaccttcagaaactactctgtcgcagacatttgcatgataaaacacttgccaaagttccacaccatgcttcaattcttgagcatangacagaaacataatgtaccatgcaccgacata

SEQ ID NO: 59505 - DNA, 391 bp, Zea mays
  unsure (1)..(391): unsure at all n locations
agctcggtcaactaagtactcgcttggttttttctatttgccctgctgaatgtccgttggaaggctgaactgcttgcgtccgcacgaagcanaatcctatcagatactacatcctgaattccatatgaagcaatatcttctgagcatgatattgtccatatcagatattacatcctgatatccatggtaataaacagccggtaagcatagctcaggttagccagggagaaaaaaagaacatggggttctgtgtatgtgatcgaatacaatttcagctgcaaagcttgctttgtttcgctggagacacctggtgaaagctagcctacactacgtgtggacctgcacgccagtgctaatggaaggcatgcttgcgacggatccagaaatatat

SEQ ID NO: 59506 - DNA, 120 bp, Zea mays
aaccacttctgactacgccagtgacgactggctaagcttatgcaactttgtcttctatataataaccaatttttgaaactgactgcatctcaacgctgcacatggtatacatcatcacat

SEQ ID NO: 59507 - DNA, 446 bp, Zea mays
  unsure (1)..(446): unsure at all n locations
cccggatccttaagtcacctgcggcatgcagcttccaccttcgactaacatggtgttttattcttcgcagagggccaatangaacctgacttgaagaccttccctactagtgactcggatgttgcatgtattccacactgcccagcatggacctcatccagaagtcgcttcctggtagatgagagtatgcacttcatgaggacgcctgatgcacctcttctgtataatgtctccccaatgagtgtgtactgagccgactgtctggcaatgcgctcagctgcatttttatcatctggttcctcttcattctttatatacctgatgattggccctctccagtcatcagagtctgactcgggttgatttataatattacactcttctgcttggtccattgagatgcctggctgtagtatttcttgtacaaagactccaggtgggacctg

SEQ ID NO: 59508 - DNA, 258 bp, Zea mays
tatcacggcacgatccgcgctcattacatatctgcttacgctctttgaaacactatagttgtgtatcacctaactatgacatctttaaaaaccattctggatgcatattcattgaatgatacatgcaatttcacgattatagaacataaataatgcattgaatgcactgcctagcttactgctgatccgtacatatatgaggtggatctatctgcgagatgaacattcttcttcgatatgtggctcgtgcatatcact

SEQ ID NO: 59509 - DNA, 464 bp, Zea mays
  unsure (1)..(464): unsure at all n locations
cgcgcacccgggatncttaagacacctgcggcatgaagcttatgcaactgctggaaaatgtttatgaattgngttcctcgatctgatactatcttctttggtacaccatgcaagcatacaatccgggacatatatagctctgccaacactgcactattataggtggtctttactggtataaaatgagccgcctttgttaagcgggccactactacccagatggagtcataaccggctcaagtgcgaggcaaatcgactataaagatcatcctaatctcatcccacttacattgaggaatctacaatggatgcaacaaatctgtgggtctttgatgctccaccttaattctctgacagctgtcacatatggcaacatattctgcaatctcccttttcataccataccactagaataatttcttcaggtcatggtacattttctccctaccagggtgtatggaata

SEQ ID NO: 59510 - DNA, 440 bp, Zea mays
  unsure (1)..(440): unsure at all n locations
aagcttctaagggagaacacgtgataggtctatcttatgttcatttcgaaaaagatagaccttgtgcagcatgtcaagcagggaaacaagtgggaagctctcatcacaccaaaaatgtgatgacaacatcaagacccctggagctgctacatatggacctcttcggacccgtcgcctatctgagcataggaggaagtaagtatggtctagttatcgttgatgacttttcccgcttcacttgggtgttctttttgcaggataagtctgaaacccaagggaccctcaagcgcttcctcaggagagctcaaaatgagtttgagctcaaggtgaagaagattangagcgacaacgggtccgagttcaagaaccttcaagtggaggagttccttgaggaggaagggatcaagcacgagttctccgctccctacacaccacagcaa

SEQ ID NO: 59511 - DNA, 317 bp, Zea mays
  unsure (1)..(317): unsure at all n locations
gcttagcctacataattctatttcatctaggctgcaagacatcantttcatctagcagaactacatatatcttagatggaatgatatacatcttgatcacctagcatatcacatctatctangtacatacatntgcagctactataatagttacattctattaacatacatttaactacagctttgttctatagagctctggtgcaagtatctcttgaacctatatattcacttcttgtgtgtagtgcaaagtacaatactcttataatactatctagtctattggaggtattacttctgcgcttctagatggcact

SEQ ID NO: 59512 - DNA, 416 bp, Zea mays
  unsure (1)..(416): unsure at all n locations
agcttctcaatgcttacaacggtccagcttgttanatactctttagaatagcangcaactgcggggacacacgtcgatcttctcatatgtcatcccaagaccagccaacatcttctttgtgaagtacatattctttggcaacttatgattctccgggagaacctcacccatcagttggacgatgtcgttgtaagcactgtatgaaatgttgtgctacgactttatcggcattagacttgtgagagtcccaagaactgacatttgagtgtgctcgtgcagtctctcttctcccgcggcgagtagccagaagaattcctgatcatcgcgtgggagctgccacggctcctcaacgtcatttcatctccctaccaagatatgcaacatgtcgttcacctttcatgatcatcacaagttca

SEQ ID NO: 59513 - DNA, 381 bp, Zea mays
  unsure (1)..(381): unsure at all n locations
agtcacctgaggcatgcgagcttatgaagattcttcattccaacacgagctatnctgctgtgccagagccaacccatgttagtcttagcatataagcaagtgtcgagttcaactctatcaagatctaccaagtatagctgaccctctaacactcccttaaatgctattgaatcatcacttcttctagagacagtgacacctacatcaataaatagacagttgaagcccatttgacataattgcgaaacggaaagcaaattgtaatccatagaatctacaacaaaaacattataaatggaatggtcatgagatataactattttacccaaacctttgatcacaccttggttgtcatccccgaatgtgataaccctttgggga

SEQ ID NO: 59514 - DNA, 433 bp, Zea mays
  unsure (1)..(433): unsure at all n locations
agcttctcgttcttcttctttagagagattctttcctgattcatgatggatgatatattcaatattttctttcaaagcttcgggaccaaacgcgggagttttctccggcaaactctgttctataacctcttcctctgctgctttctcttcgaattctgaaggttgttcatcatcaggctctgaaggcccagcttcggcactagcctggctcactgcagcttcaacttcgcccggttttgtttcagcttcgctttgcaatttcgaagcctcggcgattttccttgaaggagtagaccttaaagtcgtcactgtntctaacacatctagtacatttaccatcctcttttcttttcggggttaccacaagaacttcttatgcctttggcactgttacttccgccgaagggcttaaaattctagctcttttgtttct

SEQ ID NO: 59515 - DNA, 383 bp, Zea mays
agcttaatggccccaagatattgtccaactttgttaattgcaaagctcccatggctcaggataacgagggttacattttatactctgccggttatcccgagcacaaaattaagagaattcattctagaaagtctcactctggctctcatcatgcttttatgtataagagtgaggcatctagttctaggcaatccactcatgctaaattgcctaagaagaaaactcctattgcatcaaatgaacctaatatttcatttaaaacttttgatgcatcttatgttttaactaacaaattaggcaaaatagttgccaaatatgttgggggcaaacacaaggggtcaaagacttgtgtttgggtacccaaggtgcttgtttctaatgtg

SEQ ID NO: 59516 - DNA, 64 bp, Zea mays
gctcacgactctgaccggctacctgtagtgcgactccccgttgatgacagggagttctgatttg

SEQ ID NO: 59517 - DNA, 436 bp, Zea mays
  unsure (1)..(436): unsure at all n locations
agcttctaaagggagaacacatnntattatttatttatgtncattnngagaaagacaggatttgtagcgcatgccaagcagggaagcaagttggtgctcatcatccacacaagaacatcatgactagtgacaggccattggagctcctacacatggacctattcggcccgatcgcttacataagcatcggcaggagtaagtactggctagttattgtggatgattattctcgcttcacttgggtgttctttttgcaggaaaaatctcatacccaagagaccttaaagggattcttgagacgggctcaaaatgagttcgacttagggatcaagaaaattagaagcgacaacgggacggagttcaagaactctcaaattgaaggcttccttgaggaagagggcatcaagcatgagttctcttctccctacaccccaca

SEQ ID NO: 59518 - DNA, 433 bp, Zea mays
  unsure (1)..(433): unsure at all n locations
agctntaaatgtgttgttatcaatcaccaaattttttatattaaaagtgcattcatcccttttgtgagttntggtgatttggataacaacacatttaaaggtctaacaagtttgctaagtgttgaacaggaaattcagtatgatgaacatacttgaatagtgtataatgatcagtgaacaaggttcaacacaaggtcaaataaccagtgagacaatgcaaatggatataatatggtctctatattggtttgaatatatggacaagtcctgagaaatcactatgcataaatatgatcataatagaggttgaagtgattaagaggattggtcaagccaaagtgaataagatatgaggaatcgtgaattggcttgaccatattactattagtccatatatgaatatatgagaatcaaactagagcttgattgatct

SEQ ID NO: 59519 - DNA, 261 bp, Zea mays
ttgcgggtcgcggcgcactgattgacttgagcaaaacctgcgcggcctcgctcttgcctgcggcgtctgccagacacttttccggcgcgccactcctggggcgggtgcgggatatccgaaagtcctggttttttatccgggtagatgttcatacttgtatatttatatatcctgataaaattgctcattccttgagttaatgcacaatatgaagcgaccaactcaaagccctgttcttattttgtctaatcttcttatcta

SEQ ID NO: 59520 - DNA, 434 bp, Zea mays
agcttcttcctctccaacatccggaggccctttttttcatcggcggagaccttcctcacctcggcagatcttgatgcctcaactgaagacttcttcttgtcttcatgaattctctcatactcaaccagggtctgttcaaaatttgagcaccggggtaaaatttgggaatcaataaagttgaaagaagtatgctgctgaaaattggaatagaggggttacctttttctcctcctccattggataggctgtcagttgttccttgtcagccttcttcaaaagatcagtctcggacgaaccttgcttctttgctttgtctacttcattgccgccgttcgcattcttcttcttccttttcatagagccattgagcttctcctttggaagaaacgttcttggtcttgggccactttgtccgttgttacttgctgcagctc

SEQ ID NO: 59521 - DNA, 52 bp, Zea mays
tttcctcttctgatctccccgggactacgtccattgactagcttgctctctg

SEQ ID NO: 59522 - DNA, 430 bp, Zea mays
atcttaagtcacctgccgcatgcaagcttgataaggggacaaccgtagcatgcactttattccttcaaaagaataccaagctttccaagaagggcatgagcaaaattcatggtaagaaaattaatgctcatactatttgatctaacaatgtacctatgtgcttcaacaaagaaagatcaaagagaagcgatagaaggtgctatggatgcaaagagaagggtcatgaaattgattcatgccctcacatgaagaaccaagatcttgctcgatcaagaaagatgaccataaaaagggatgaaaacaaaaggcaaatgcattgttaggataagcaccacatttgctacaattgcggtgaaaaaggtcatctattcaatgtttgtccaaagggtataactcttatacctaacttgtaatacattctgatatgctt

SEQ ID NO: 59523 - DNA, 461 bp, Zea mays
  unsure (1)..(461): unsure at all n locations
ttaaagtcacctgcggcatgcaagcttaatgaaggataaaaataaaatctcttcaatttgtcactttcacgggtaaaaatggggcacactattctattttgggaggacacatggtttggcagtatgtctttaaaaaggcagtaccctagtctatccaatattgctcgtcataagcaaataacagtggccgaagtttttagctcatcaacaatcaatttatcatggcgaagggatcttgttggaaacaatctaacagcgtggaaccggttattaccacgtattgctagcattgccttgagccaagatcaggatgagtttagatggaacctccacccaaatgggcagttctctgtgaaatctcattatctggccttgattcagaatgatgtcctaaacttaaacaaaagattgtggaagcttacgacttcactaaanattaagatcttattgtggtatttacc

SEQ ID NO: 59524 - DNA, 133 bp, Zea mays
gtgaaaagtgggtgtctgtctatatatgcacaatgagtggtatttgtcaaccgtcatcccaagtctagcgatttggtcttctaagtctagaatgctatacttcctcctatcattagcaattttggtatgccca

SEQ ID NO: 59525 - DNA, 435 bp, Zea mays
  unsure (1)..(435): unsure at all n locations
ctgcagcttctaagggagaacacgtgatatgttttatttatgtgcatttcgaaaaagatagaccttgtgcagcttgtcaagcacggaaacaagtgggaggctctcatcacaccaaaaatgtgatgacaacatcaagacccctggagctgctacatatggacctcttctgacccgtcgcctatctgaacataaggggaagtaagtatggtctagttattggtgatgacttttcccgcttcacttgggtgttctttntacaggataagtctgagacccaaggaaccctcaagcgcttcctaaggagagctcaaaatgagtttgagcttcaagtgaagaagatcangagcgacaacgggtccgagttcaagaaccttcaagtggaggaagttcttgaggaggaggggatcaagcacgagttctccgcttcctacacac

SEQ ID NO: 59526 - DNA, 423 bp, Zea mays
  unsure (1)..(423): unsure at all n locations
atgaagatactgcattccaacatggtcttntcggcggggccagagccagcccatgttagtcttagcaattaagcaagtgtcgagttcagctctatcaaaatctaccaagtatagctgaccctctaacactcccttaaatgctattgaatcattacttcttctaaagacagcgacacctacatcagtgaatagacagttgtagcccatttgacataattgtgaaacggaaagcaaattgtagtctaaagaatctacaagaaaaacatcggaaatagaatggtcaggagatatagtaattttaccaagacctttgaccaaaccttgatttccatccccgaatgtgatcgctccgtggggatcttgggttttctcatatgaggagaacatcttcttctcccctgtcatgtgggttgtgcatccgct

SEQ ID NO: 59527 - DNA, 351 bp, Zea mays
  unsure (1)..(351): unsure at all n locations
atgtctgtgacatagatgattacgttgtggctaatatgactttaatgtataagtctcttgtaatgctcatattatgctcccattctaatatacgacaatcatataggatactntgataattttatatctatggatgcacatctatactttgtatttatacatcaattgtatcatacatttgcattcttattatatcatatatatacgtgttcatgttatatacatatcacatagtagattcctcatctaactacacactgttaatatttacctcatgtatgcaaaaatgtgatcaacaataaatactgctgctatgatgatcatgctttttggtgtatcagagactctcac

SEQ ID NO: 59528 - DNA, 441 bp, Zea mays
  unsure (1)..(441): unsure at all n locations
agcgttgacaacaccattgacattatacatataatttctgttatcaagaatatttagttcattcctcaacatgcaaaagcgggtcttatcaagtggcttagtgaaaatatccgctaattgatcttccgacctcactccttctaaaatgatatctcctttagcaacatgatctctaaggaagtgatgacggatatcaatgtgcttggtgcgagagtgttgtacagggttattagcaattttaacagcactctcattatcacacaacaaaggtaccttttctagaactacgccatagtctagaagagtttgtttcatacataaaatttgtgtgcaacaagcacctgcggcaatgtattccgcttgggcagttgacaaggcaacactattttgctntttggatgtccatgaaactagtgatctaccaagcagatggcatcccct

SEQ ID NO: 59529 - DNA, 289 bp, Zea mays
acataacagtgcagtacttatcaaatatagatgtgccttacctctaagcatgatatctttaaacgacctatgaactaaggggaagtactgtactaactacacactgtatgtccatatgcacgttaagctaccccatacaaattctccaatgtatgtatctgtcgcaacacttgcatcagttggtcacgacagtgacaccttagcgcaaacatgatccggtgtttttatcgtcagatccgtgacttgctcaaagtacaatcgcagtggtcatcccacaatccatccccac

SEQ ID NO: 59530 - DNA, 211 bp, Zea mays
  unsure (1)..(211): unsure at all n locations
caactttatcagaaattgattgacttattgctaacgtagcgtctgagaagaataccgaggggacgattgctcctgagacttcagtgttcaaaggaaaaagaactgaagaagcctctttagaagataaaggcttngacttacgtgacctatggggcaacaactttctgaagaggatatatctgaattaaaataatttgctgtgtcccgcggc

SEQ ID NO: 59531 - DNA, 162 bp, Zea mays
cagtgtaatctactctacctccgcttatatgaattaccagcaaagagacttcacttcttattacagctgatcactacttggacgtcgcttgaacgtcgaatgcaatcgtctgatgcaagcactctaacgcacttgtgcatttcaccaaaatagtttcacttt

SEQ ID NO: 59532 - DNA, 423 bp, Zea mays
  unsure (1)..(423): unsure at all n locations
agcttcggcttcatctatgttatggattgcctttgaatcattccaactcccttccgcctttctagcggctttctgactcccataaatagcaataggtccctgatccgaaggtatcttcatgcacagatatgctggatgaacgattgcttccaaagcattgagtgttccgcgaccaatgatagccttgctaggatacttcatgtcaacaatgtcaaacacaatttgctcagaccttgtgttggtgatgaatcccaaggttactggcatggtaatctttccaagtgctacaatctgtcgccctcctaaaccacaaagagggtgcgtagcatcatgaatcttggcttcaggctcttgcattntgtttaaggccttagcacatatgatatctgctggcctggctatataaccaaaacattattgacc

SEQ ID NO: 59533 - DNA, 408 bp, Zea mays
  unsure (1)..(408): unsure at all n locations
agctntagacctcttttcccgctctatatttttctgtgctctcattggtcgggctcgtggatcctgtcccagtaccaccaacaacaagatctatctcggcgtccaaattgacagcaacatctgcgctgctgccaaggatgaaacgacgagcatcctcggcgtcgttgtggtcctgcagccttatctccgcggcctcagcggccggatccaagtccatttccatggatgccgcccgctggacacccacaccacacctctataggtccggttcctcaacggcgtgcgcgacaccaaccaaatcagtcggtgaccttctcaattaacagaacaaaagataggattagagatgaatcgatgatgcacggcttgtggcaccaaacttaacatgtaatagaacaaaatacctac

SEQ ID NO: 59534 - DNA, 429 bp, Zea mays
  unsure (1)..(429): unsure at all n locations
ctcgtacccgngatcctcttagtcacctgccgcatgcaagcttcngctatggtcaaatttttggcagcataacagtgcaatagcaatgaatgctgtggtaacttcacacctacccgtctgtttacatagtgccgcaggtgggaaggtaaatcgtcaggacttccgcaccggacaaacagtcgcccgcacccactgaacggtgggccacagagcccgagaaggtgaatcgccaggacgcgcgcaatcactgtagagtggggccgcctcccgctcggaccgctcggattattntaatcgtttctcgacaacgagctcagggaaggtggtttttggatcttcggcatcctgaagcctaagagactttttcacggatcaagctcgttacgaaaaacgatctagcaccgcgaaggggcaactattgggggtatg

SEQ ID NO: 59535 - DNA, 293 bp, Zea mays
catagctacatacgtgggcactgtaaatatccgactctacacttgatacctgtgggattatcacttaacttgaaacattattttcgtcggagccttcccaccaactcttgttaggaaccattacttgcaacacttacgaattcagcatgtactgtgctgatgaatattgaagtctaactctttgtacacgtgctgtgtgttatagattcatctccgtgctgtcgatgagtcaatatccctccactggaagatgctattacgatatttccacgtacacttatcaactgagaatg

SEQ ID NO: 59536 - DNA, 435 bp, Zea mays
  unsure (1)..(435): unsure at all n locations
agcttctaaagggagaacacattntaggattaacaaatgttcattntgagaaagactggatttgtagcgcatgtcaagccgggaagcaagttggaactcaacatccacacaagaacatcatgacgaccgacaggccgctagaactactccacatggatcttttcggcccgattgcttacataagcatcggcgggagtaagtattgtcttgtaatagtggatgattattctcgcttcacttgggtgttctttttgcaggaaaaatctcaaacccaagagaccttaaagggattcttgagacgggctcaaaatgagttcggcttaaggatcaagaaaattagaagcgacaacgggacggagttcaagaactctcaaatagaaggcttccttgaggaggagggcatcaagcatgagttctcttctccctacaccccac

SEQ ID NO: 59537 - DNA, 387 bp, Zea mays
agcttcgggaagccgaatgtccaaaacacaccttctctgagctcgctgccgagaaacgattcatttcccgagatcgtgtcggtcccaccttgcagaggcactgtttggtctttgcgggccactgcgcagcgagtacaagttactgcccgcctggtgtaaaaaccctgccgcttcgacttcttacctgcggcactatataaacagacgagtaggtgtgaagttaccacagcatttactgctatttgcactgatttgctgccaaaatttttaaccatcaccgaagcttgtttgtcagatttgaacgaagctccatcttgaagcctgcttcggagaaaaaagcatcaaaggttcacaagttcataattaaatggccagagttcgctctac

SEQ ID NO: 59538 - DNA, 174 bp, Zea mays
ccctcacagacaggctctatgggtcacaatgctatgctgatgtcgagtcgttggagtagagactgactccgcatagtgagcagatgttctttttggtaacaaattaatagttatgttactcgtgataagatctatttaatcgcactgcttatggaagattgatgaatcttaaat

SEQ ID NO: 59539 - DNA, 417 bp, Zea mays
  unsure (1)..(417): unsure at all n locations
gcttgatgaggaacttgcttatccaaacaccttccttcgcagattcagaagctgcaatgtactcgacttctgttgataaatcagtcacagtctcctgtttggaactcttccaactaacagcaccaccatttattgtgaacacaaaacctgattgcgattntaactcgtctgggtcagtatggaagctagcatcggtgtaaccagttacaacgagctcctccttacccccatataccaggaacatatctttagtccttcttaagtacttaagaatgccttttaccgctgtccagtgatcctcacctggatcagcctggtatctactcgtagcacttatagcgtatgaaacatctgggcgtgtacttatcatggcatacatgattgaaccaattgctgaggcgtatggtaccttactca

SEQ ID NO: 59540 - DNA, 404 bp, Zea mays
agcttctaaagggagaacatgttattgtctaaccaatgttcatttcgaaaaagatagaccttgtgcagcttgtcaagcagggaaacaggtgggaggagcgcatcacagcaagaatgtgatgaccacttcaagacccctggagctgctgcatatggacctcttcggacccgtcacctatctgagcataggaggaagtaagtatggtttaattatggatgatgacttttcccgcttcacttgggtgttctttttgcaggataagtctgaaacccaagggaccctcaagcgcttcctcaggagagctcaaaatgagtttgagctcaaggtgaagaagataaggagcgacaacgggtccgagttcaagaaccttctagtggaggagtttcttgaggaggaagggatca

SEQ ID NO: 59541 - DNA, 131 bp, Zea mays
ataaatgaattactaccttactgctgatcatacgaatataactggatctattgcgagaggacttcttcccctatgtgtctcgataaacactgaccaactaactgagaatagtggatagacacatgtggcac

SEQ ID NO: 59542 - DNA, 430 bp, Zea mays
  unsure (1)..(430): unsure at all n locations
agcttctaagggagaacacattttaggtcttacttatgttcattttgagaaatacagggtttgtagcgcatgccaagcagggaatcaagttggagcccatcatccacacaagaacatcatgacgaccgacaggccactagaactctattcggcccgattgcctacataagcatcggcgggagtaagtactgtctagttgttgtggatgattattctcgcttcacttgggtattctttttacaggaaaaatctcaaacccaagagaccttaaagggattcttaagaagggctcaaaatgagttcggcttaaggatcaagaaaatcagaagcgacaacgggacagagttcaagaactctcanattgaaggtttccttgaggaggagggcatcaagcatgagttctcttctccctacacccctcaacaaaatg

SEQ ID NO: 59543 - DNA, 439 bp, Zea mays
agcttctggtagaatatatgaagccattgtacttgttatcaagaacattccggtagtatgtgagtttccagatgtatttccggaagatttgcctggactgcctcctgaaagagatgtagaattcgtaattgagctaaagcccggtacggctcccatctcccgaagatcgtaccgtatgccccctaatgagttggcggaattgaagattcaattacaagatctattgaataagggttcatccggccaagctcgtccccatggggttgccccgccatttttgttaagaagaaggatcaaaccttgcgaatgtgcgtggattatcgacccctgaatgaggtcaccatcaagaataagtaccctcttccaaggatcgacatcttatttgatcaactgactggggcgagggtattttccaaaattgatctcaggtcgggctatc

SEQ ID NO: 59544 - DNA, 184 bp, Zea mays
ctacttggtcgtctatatgctgcagattttatcgaaatgtcactaggtccacagagtgagatctgacattaacgtttgtggcacagacgtgatgcagcatcttcaccaagctggcattgaagaatcaggaaactgacataacaccgcagatacactgcactttagcgcaaattgcaaaacaaac

SEQ ID NO: 59545 - DNA, 424 bp, Zea mays
  unsure (1)..(424): unsure at all n locations
gcttctaagggagaacatgtgttaggactaacctatgtctgtnttgagaaagacaaaccttgtacaacgtgtcaagtacggaaatatgtggaaaaagtcatccaagtaagaacgtaatgatgacgtcaagactactggaggtgctacatatggatatgcttaccttaacatatggggaagtatggtctcgttattgttgatgattattcccgcttcacttgggtattcttttttgtaggataaatctaaaacccaaggcacactaaagtgtttcctaaagcacgctcaaattgagtttgaattaacgatgaaaaagataacgagtgacaacggctctgaggttaagaaccttcaagtagaggagtacattgaggaggaaggcatcaagcacgaattatccgcccctacacttcataacaaaatg

SEQ ID NO: 59546 - DNA, 427 bp, Zea mays
ctgagcatgcagctaccgattgaagcacgaacgctcccatgattttgtttgttggctgcccttgcgacctttaacgccgtttgaatctttgtgatgaggccatctcttcatcattaagtccggccgcctcaatttgtgccaccctgctaggtagcgcctccttgcttcttggtgccttgagagcaatgggctgaggctcgttgatcggtccattcaaggcgtcgtgcacgcatcttgcctccttgatcatcatccgcccgcttacgaagtttccgagtacctccttgggcgtcatcttcgtggacctgggattctcacgaatattgttcactagatgaggatcaagaacggtgaatgaccttagcattaggcggacgacgtcgtgatccgtccatcgcgtgctttcgtatctccttattttgttgat

SEQ ID NO: 59547 - DNA, 187 bp, Zea mays
tcaactcactggcggcagaagtaattgcaatatgcgactcaacaggttggtatccattgcacgtgacagctcatcgtgagcactgaaaatagtctcatgaactgcagacttaacttgagggaatgtactgtaattccgctggatttgctgacttcggacacgcgctctaattgtgcactgaaatgta

SEQ ID NO: 59548 - DNA, 422 bp, Zea mays
  unsure (1)..(422): unsure at all n locations
ggatccttaatcacctgangctgcagcttanagggtgccattttgatgctctcttgatagctattattgtacgagaactccgccaatggtaagcaatcatcccatttctgtgggaattctagaacacatgctcgcaacatatcttcaagtatctgatttactctctcattttgcccactagtttgaggatgatagaccgaactatggagcaacttattacccaaggatttgtgaagttcttcctagaatttggatacaaattgaggtccacgatccgacactattgtcttctgaacaccgtgcaaactgaggatgcgagcaatatacatctgggcataagtgatgacacggtaatatgtcttgactggcaaaaaatgagcgattttcgtaagccgatcaattataacccaaatagaatcata

SEQ ID NO: 59549 - DNA, 302 bp, Zea mays
ttggacatgccgtcatcgctgacgacatacctgcaggcctgtctgttacatataatccactagactctatattaccagacaagcagaagtctatgtgcatggttccggtgcactcatgtcaatatatgatatctgttaccatcgtacacatatgaactacattgacatatacaaacgaggctgtaagtagtgacatactactctgtagatacccggtaacagagaggtgaagtttaatagaccgcagtggcatttcaaaaactttaagatgtggacacgaatcaggaagcatgctgtatgac

SEQ ID NO: 59550 - DNA, 397 bp, Zea mays
  unsure (1)..(397): unsure at all n locations
agcttcanaataaaaagatcagtttatcttattgcacaagagctaaaaatttagtgggccgaagcagatggcaagtgtgcgtaccaaatgagtttgtggtatgatcttatttatacgcccagggcgttgaaaattgaaagaccccacttgtcagtgaaagttgctattctatcaaagggaaggtgttttttcggaccttcggctcaaggccttcgtccatttcgcaatctgaatttatcattaacaaattaatattgcgaggggctactgttgggggccttcgtcctccgaaggtcctcaaaaacatgatttgacaatgttttccaagtggattatgtgaacaggtaccttctgactcagaattaccaacatgaagtgcggtcaggacgaagcctga

SEQ ID NO: 59551 - DNA, 433 bp, Zea mays
  unsure (1)..(433): unsure at all n locations
agcttgaaggcttggtgggttctctctttgttaatcttgaagtccaccctaatgtgtatgataactataagcatcacaaattatgttattttttatatctatcaagaagatggtgatcaaagaaacgatgatgaagaggatgacattgtttataaagggacaaaccttgatgaattagtttgttaaccataaaacacgtagagttaatggacgaagaactaggtcctttgaatgcaaaatgatgaaagttgataagacttctataaaggcaacaacgacttggacaacttattaatgcacgtgtcagccaagaggattctgatgctgacgattttttattactacaatttagttatgttggtgtatgtgtactagagctcgttttacactttntataactaaaatttatgtcgtgctcttgtatatactaaaa

SEQ ID NO: 59552 - DNA, 419 bp, Zea mays
  unsure (1)..(419): unsure at all n locations
agcttatatccttagatttccatccatataaatcccaacctaatcggagttcggatgcatcctgngcatccagtgcagactggtcctagacaccgaggtggagatgaagttgagtcggacttggctttctcttgttgtgaatgtcctaacttctcctcctttacatcttggcattttctaagtccttgatggtcccgtcacacccggctttaaggaacaaagtcaggtgcatctcatacatgccaagaagacaacatatataataacagagtgtatggagataaatgtcataaaacatcagagtacttattacatagcggaagacttattacaaaataaaaggataaacataaaacgaactaatgatcgtcggcgccaatgtcaactgagaaacgccacctagatcagatcaaactcct

SEQ ID NO: 59553 - DNA, 396 bp, Zea mays
tatctctctcacacaagagaagctaatagcatcacgactctagctctatgagctgtgatcactaagattatcttgcatgaactatcttcgcaggctatgaacagaaacatccattcatacatggctctacataaggtagcacatctggattactttatactcgcctgagagttactattcacactcgctgataacattcagcttgtttggtgagagaacttacatgtatactctgtatccaaactactgcacaaacttttatacaaacttagtttctttcgcatgaccaaacttgttgtttacaactgtcgtgaatacatttcttatgtgtcactaccaatttgtgttagtgcatctgcttgatcgtctaaatgctgcagattcaaactgaatgta

SEQ ID NO: 59554 - DNA, 435 bp, Zea mays
  unsure (1)..(435): unsure at all n locations
agctntggctggattggttgcggngagagtcaatataatctcttcttggttatagctcaacctgacggttctgagttcagtgttgaggattgccttatattgggttagccaattcattcccaaaattacatctatatcctggcccttcaaaacaatcatgttagcaggaaagttccgtccggccattgttactggcactccataggccacttctttagtataaatgtgtcccccaggtgaatgaattttaaatccctcctttgattcatggtatgcaatatgatattgttccacaaacttcttgctaataaatgtatgtgaagcaccagaatcaaaaagaatttttgcagggtgactggccacagggaacgtacccatcatcaccggctcttcctccggtgtggtagccacttgcgtataatatactcgccctgt

SEQ ID NO: 59555 - DNA, 430 bp, Zea mays
  unsure (1)..(430): unsure at all n locations
agcttaaccttgtaacgaggatattctgtttttgttccaaaggtggatggtccttaagcctctntgaaatccttaagggaaaatgcttaagatttttataacatgctttcataagtgcataatctgtcatgagcatcacacctacaatgcactttactttctctatgatatagatttgttctcaataacctaatcatgtgcacttgccatttaaggccaaaatatgtattcctctcaaggcacatatttagggggagaaatctatattatatagaactatgatcatgcttaattgatatatctcttgatcatatctctttatgtctacgactaatgtgccttcaagtgatctttatgctaagtcgtaaattgaaagggaaatggagtcttctgcgaagacaagcttccactcaactctatcggtactatt

SEQ ID NO: 59556 - DNA, 413 bp, Zea mays
  unsure (1)..(413): unsure at all n locations
agcttcanctccgcgtatgtcgtgtatatctcttgagtctgtccaactccctgtggcccttctggcagcttcttgacttccatgaatggcaatgggcccttgatctgaaagtatcttcatgcacaagtatgctggatgaagtattgcttcgaacgcattaagtgttccttgatcgatgatcacagtgtacgggtattccatgtcaacaatgtcaaaaacaacttgcccagttcttgtgttgtggacctaaccgaaggtaactgacattgtgattttgcacaatgccacaatctgtcatccttctaagccacaaagggggtgtgtatcatcatgaatcttgttctctggttcttgcatctgcctgacagcctttgcaatataatgttcgctgcactgcttgtatcaaccaaaat

SEQ ID NO: 59557 - DNA, 450 bp, Zea mays
  unsure (1)..(450): unsure at all n locations
agctttttttgtcgagtgttatgagcttggctctcttanaaacaacatttgtcgagtgcctcctattccactcgacaaaggaactaaaaaatggttcattggtgtttcctttatcgagtgctagtccgacgggcactcgacaaagagggagccttttcgagtgacacctaatacccttgacaaaggaaatggcaaagggacccatggggcgcttctttgccgagtgtctgtatagtaaacactcgacaaagagtggtcctttgtcgggtatcaccgtaacactcgacacagtctccattgccgtcacctggcgccgtgactagggttgggcaaaaaacccgtaacccgaaacccgaacccggaatacccgaaaccctgaatttgttcgggaatttctggtagcaatttgcataacccgaatttagctcgggtaactcgggtatcacaatc

SEQ ID NO: 59558 - DNA, 485 bp, Zea mays
  unsure (1)..(485): unsure at all n locations
ctcctgaacaagtgctacacttaccgctgagtgcgaagctgtctcatataataacaaaggagcccctggcgttggtggagttaatgttngtaaatctatcaaatattgcttcagttcctctaaggctttttgttggcttggtccccattgaaagacttccgctgatttcagcacttcgaagaatggtaaatttctttctgctgatctggatataaatctattaagagatgccagcctccctgtcaatctttgggcccccttttttgtagtggtggctccattcgaagtatagcttccattttacttgggttagcttcaattccctttgttgaaaccaagcatccaagaaatatccccttctttactccgaagacacatttttctggattcaactgtatgccagcttgtctaatactggcgaaggtctcctacaaatcaacaatgtgattntcctggtcgtgcttttacaatgatatcatcaacat

SEQ ID NO: 59559 - DNA, 320 bp, Zea mays
aggcttgtttaacctaattgagataaccggcagcatagcgatgtgaataagccttacttggatcaaacttgactggtcttatgttgtaagcttttaacacttaagttcttacttttttatgcattgttgggtcttgaaatatgcatgaagtactgcacttagggggagtattcaaaactgaaatcactcatgacaacccctattgcaaggccaaaatgcatatttcaccatttgcctattttctctaaaatatctagcctatggcagaatattttgagattatgataaaagtatatgagggtgccaatacctgtcccaac

SEQ ID NO: 59560 - DNA, 349 bp, Zea mays
tgctagccttaacaattaagcatgcatctagaccggcctcctctcttgcaaaatcaactaaataaagtttgtcggctcgtacacccttaaaagctaatgaaccatcacttcttctaaagacagacacatctacatatgtgaataaacaagaatatctcatattgcctaattgactaacagataacgaattatatccaaacgactcaactataaacacattcaagatagagtgcttggatgaaataacaatcttttctaaccctttcaccttgaattgggtcccatcaccgaatattattgaatctctgggatccttgctcttgacgtacgaagagaacatacatttttc

SEQ ID NO: 59561 - DNA, 448 bp, Zea mays
  unsure (1)..(448): unsure at all n locations
agctntcttggacttgccggtttctaccgcacatttttcgngattntagctccattgcagcgcctgtacatgagcttacaaagaaagatgtgccgtttgcttggagtgattctcaggaggaagcgttcagcactttgaaagataaattaacccaagctccctattgcaattgcctgattttaataaagtgtttgagcttgaatgcgatgctaacggnattgggctaggtgctgttttgttacaagaaggaaaaccagttgcttattttattgaaaaattaagcggtgctagtctgaaatattctacttatgataaggagctctacgctttagtgcgcactttgcatacatggcagcactatctgtggcatcgagagttcataattcattctaatcatgaggcttgtaaacatattcgtacccaaacaaatctgaaccgacgtcatgct

SEQ ID NO: 59562 - DNA, 431 bp, Zea mays
cacgcaatgggagttgatatatggcgagagtagcgtgtaccctccgtggcaagaggctggacggcggtgtatctgtgctctcggctggcgtgaacccagtctggtcttgagaaccccggtggcgagttgccatatacaagggttaagtgctacatatgtcgtgtggttggagatccccagctgggtattaatcgatctggatcgcccgtacttatcggatatgaagaactggtcactgccctacacgtagcaatccagtaaagaaaaagggtaataaaagacggctagtgcatgccaagttcttgaactatggtagaaataactctagctacaggtaatgacttaacttgaaataaaattggaatctaacgatcactattagtaacatttctacaatagagctttgattcttgatagcctaccttgactcc

SEQ ID NO: 59563 - DNA, 420 bp, Zea mays
  unsure (1)..(420): unsure at all n locations
ttaatcacctgcagctgcagcttgacaacaggagatggcgctcatcatctatatctttcgtctaatcctncagcanaggaaagagaaagactacatgccccgttccaaaagggtgtgctacaaatgtggtaagcccggccattttattgcaaaatgtcctatgtcaagtgatagtacagacgcgacgacaagaggggaaagaggaaagaaaagaagatgtactataagaagaagggcggcgatgcccacgtatgtcgggaatgggactccgatgagagctccaccgactcctcctccgacgaggatgccgccaacatcgccgtaacaaaggtttcctctttctcaacatcggcacaagttctcatggaaaggacgacaaaggaagaaggaaaatctaagccctcactaatatacacatct

SEQ ID NO: 59564 - DNA, 436 bp, Zea mays
agcttgtgaagagtcttcatcccaacatgggctagtcggcgatgccagagccaacccatattagtcttagcacttatgcacgtatcgagggcagctttattaaaatcaactaagtatagctgaccctctaatactcccttagatgctactgaacatcacttcttctaaagacagtaacacttatattcataaaaagacagttggaacccattttacataattgagaaactgaaagcaagttataatctaaagaatctacaagaaaaacattggaaatagaatggtcaagtgatatagcaattttaccaagtcctttgaccaaaccttgattttcatccccgaatgtgatagctatctggggatcattgatattctcatatgaggagaacattctgttctcccctatcatgtggtgtgtgcacccgctatcaatgat

SEQ ID NO: 59565 - DNA, 511 bp, Zea mays
  unsure (1)..(511): unsure at all n locations
tactccaccttctaaaggataacacgtgataggtctaactaatgttcttttcttaatagacaaaccttgtgtagcttgtcaagcaagtaaacaggcgggaagctcttatctcaaccaaaatgtgatgaccacatcaagacccttggagatgcttcatatggatctcttcggacccgtcgcctatctaaacataggaggaagtaagtatggtcttgttatagatgatgatatatcccgcttcactcgcgtatttcttttgcacgataaatctgatacccaagggaccctcaagcgcttcctcatgagagcgcaaaatgaatttgagctccacgtgaagaagataaagagcgacaaccggtccgaattcatgaaccttcaagtggatgagttccttgaggaggaacgaatcaagcacgaattcttcgctctctacacaccacaacanaatggtgtggtagagaggaagaacaggacgctcatcgatatggcgaggactatgctctgagagttc

SEQ ID NO: 59566 - DNA, 382 bp, Zea mays
catcatcctcaaagaatagcatgctttctgtttggacacacgtcgatcttctcatatgtcattccaagaccagccaacatcttctttgcgaagtacatattctttggcaacttatgattctccgggagaacctcacccataagttggcgatgtcgttgtaagcactgtttgaaatggtgagcttcgactttatcgccattagtcttgtgagagtcccaaaaactgacatctgagtgtgctcgtgcagtctctcttctgccgcggcgagtagccggaagaattctttgacatcgtgtggaaactgccccggcttctcagcgttcatttcaaccttcctaccaagatcatgccacatatcgttcatcctatcatgatcgtcatt

SEQ ID NO: 59567 - DNA, 396 bp, Zea mays
  unsure (1)..(396): unsure at all n locations
ctgtgagctcggacggtgctccgaatcggcatacaatgttttgtcagaagcatttctgggcagtcttcgatgttatcgtggatactgcccttgcctcgatccacttggtaaaatactcgacggcgacgaaggtgaacttgaggttcccttgggccatgggtagtggcccgacaatgtccatgccccagcgctgaatgggccacgtgtgggcgattaactttgtgaattgcgacaggctttccgagcgtggagaaaacttctggcaggcttcgcatgactntgtgacccgatctgcggcgtagatcatggcgggccagtagaagccttgacggatcacctttgcagctagggccctaggccctgcgtgagagccgcaagttccgatgtggacttcgc

SEQ ID NO: 59568 - DNA, 501 bp, Zea mays
cgacccggatcttaagtcactgggctgcagcttgacatgaggagatggcgctcttcatctagagcttccgccaaatcctcaagcaaaggagagggaaagactacaagtcccgctccaagaaagtttgctacaagtgtggtaagcccggtcactttattgcaaaatgtccattatcaagtgacatgacagggataacgacaagaagggcaagaggagagaaaagaagaggtactacaaaagaaagggcggcgatgcccatgtttgtcgggaatgggattccgacgaaagctcaagcgactcctccaacgacgaggacgccgccaacatcgccgtcaccaaaggacttctcttccccaacgtcggccacaagtgcctcatggcaaaggacggcaaaaagaaggttaaatctaaatcctccactaaatatgaatcctctagtgatgacaatgctagtgatgaggaagaataattgcgttctctttttgccaaccttaacatagc

SEQ ID NO: 59569 - DNA, 413 bp, Zea mays
gcctagtctacgatatttcataacacataatcagcacaagcgtttcacgtgtgcaagttctcgatcactgaaaggtgaaacgtgttatctaagtcacactggaaggaaaaggtagaatgtgcattacctcagctgcaacgagaccctcgagtgacctctgcagagacattatgcacggatgcatgtctaaagatataagcttccttttgtgaagtatctgtccatttacaggagaactatccaaaaccctttgcaagggatattctgtcagtgatacaccgtgtaactccagatctttcaagtagtcgagttcaataggttgcataaagaggagagccttccgcttctcaccaattctggcagttcttccaaccctacgtagtgaagtggacaggcaattatatcagaactag

SEQ ID NO: 59570 - DNA, 365 bp, Zea mays
agacgcgaactgagcgcctctatctagatactatcctcttctgaacaccatgccagcgcacaatccgagacatgtttagaataggcaacaccgcactgtgcacgtggtcatgactggtatgaaatggggcgcctttgccagactgcccacttctacccatatggagtcataaccagtacgaatgcgaggcaaaccgactatgaaagtcatcccgatctcatcccatttccactgagggatctgcaacggctgcaacaaacctgtatgcctctgatgttctgcttttatcctctcacaactgtcacatacaaccacataccgtaccaccagaatcgtttcttgatgtcttaggacatcttctcgct

SEQ ID NO: 59571 - DNA, 335 bp, Zea mays
tgctacaaatgtggtaagcccggccattttattgcttaatgtcctatatctagtgacggagaccgccgctacgacgagaaagggagaagaaaggagaagaagatgtacttcccgaagaagggctgcgatgccccatgtttgccgggaatgggatttcgacgagagctcaagcgactcctccgacgacgaggacgccgacaacatcgccgtcaccaagggacttctcttcccaaacgtcggtcacaagtgcctcatggcaaatgacggtacaaagaatgtttaatctaaatcctccactcgatatgaatcctctcctgatgacaatgctagtgatg

SEQ ID NO: 59572 - DNA, 290 bp, Zea mays
cgaaaagcggtagctgtgcctcgagaagctaccagggcgcagaagtctgcatgctcaccaataactttgtcagagcgtcacctcgccttcatatgtagcaaggtgctgggcaggttttcggctgaatgtgaaaatatttcataactggcttcggatgaattgaatacgatcttcagccgctgcacgcatcggctgggaaatttagcatactcttggaatacttcatgattttgcaatttgaattttctcgactcggcttggaattgttcaagctttcctttcttgtcata

SEQ ID NO: 59573 - DNA, 343 bp, Zea mays
  unsure (1)..(343): unsure at all n locations
gaatgcactctacgtgctgtgaacatatgcaatgcccatgcttatgatgccatgctcaagctttagttatagtaacaaaccggtgatacatacttccctccataaaagaagctcagcccgagattaaaatttctatggttagtcatggaaaaggaaacgcgacatactgttatttccttatttctgaccaatgcaggggcggcttgcgaatttacttctttattacatctatacaggctctacaaaatacaagacgctaagaagcatgggacattcttatgtaanaagtcttgagtttcccatcgagcctcatcttcacaatgtttgttgcactgtatcttat

SEQ ID NO: 59574 - DNA, 329 bp, Zea mays
atgtccgcctgactgccgttgtcgaccaccactatgtgtagatgccagcctactaccctgtagttgatcaccatggcgtctgcgtgtggagcgctgctcacgtcgacatccctagcgacaaaggtgagcgcgacatgggaccactttgtgtgcccactacgccagtgagagcgacatggatgacacttcgatagtggtccattttctgccgctttgtgtcgaagtccacggaggatcccgcagtgatcatgtggatgactcactgatatggtggctcagcgaagtcttcatgctagggtgcttgcggaggatggttgtggtgtggaaga

SEQ ID NO: 59575 - DNA, 379 bp, Zea mays
  unsure (1)..(379): unsure at all n locations
gagtgctccggcctatccactgctatatatgtcaatctaagggcacataaagcttcacggggttctaatgagtcgacccgtgcaaggaatcgaagaataactcaccgtggagctcagtccacgttcgccggcggttgggtgaatccggtgaccttgatcgggtttctccgacgaggcagagctcaattcctcgctctgggtgcttcaccgaggcacgtagagtctattccgagggttggacggngctgggaacggctctgctggccggtctacggtggcgggtgctcgggcggccactggcacgccgtgtgcagggcaaactccggtgatctcgcgctccactgaggtcgagagcgcatggtggcgtacgactgaagct

SEQ ID NO: 59576 - DNA, 434 bp, Zea mays
  unsure (1)..(434): unsure at all n locations
gctatctgaaggcttggatcgaacggatgaggacnggaaaggggctggccacgatggttgctctctggcggctctggcgggtcgcggggaggtcgccggagctaagcgcgggctcggggaagttaggcgtggtacggaggaggcaacatggaaggcagccgagcactgggacgggctntataaccgtggcgcgggcgtggtcacangcggccgtgggtgcgcggtggttctcgcacgggcgtgctctgagcgcgcccccgggtgtcagcccgcgtcgaacacgtgggagctcgcttctgccatggttcaacggcagatttgagcaccatagcgtgtgtatcttggcanagtcactgtgtacggtctcttccctgctccatatcctacctttttgctatgagttccacgtcaagatatggtcggtgtatggagat

SEQ ID NO: 59577 - DNA, 457 bp, Zea mays
agcttagtgcaagcgtgtggaatggaaagacttcgtttctttggtgtatgtatggcttgagtgaagggcaaggtggaacggatggaaaacgggaggaggcgcgcggcgactgtcggcaaggctgttcggtcttgcgtctgggctgaaaacgaggtgttgccatggcgcacgggccgaaaacggaggctcgggcacgaactctaaaataagctaagttcaagcatgtggaaagacaccgaacatacagtgtatgtctttggtgaagggcacagtggaacggagggaaaacgacacggaggcacgcggcgacgggcggcatggctgttcggccttgcgtttgggctgaaaacgaggcgttcgccatgtcgcgcgggccgaaaacaacggatcggtcacggcctcgaaaataagctaagttcatgcgcgtagaaagacacccaatctaatgtgtaagtct

SEQ ID NO: 59578 - DNA, 386 bp, Zea mays
  unsure (1)..(386): unsure at all n locations
gtgcgccatgggcgaacccctcattntcggcccagacgcaaggccgaacagccatgccgcccgtcgccttgcgcctccgtgccgttttccctccgttccgccatgcccttcacccaagacatacatattaccttcggtgtctttccacacgcttggacttagcttatttccggggccatgcncgaacctcggttttccgcccctgcgccatgggcgaacccctcgttttcggcccaaacgcaaggccgaacagccatgccgccccgtcgccatcctgcccttcacccaaggcatacgtcgcagcttcggtgtccttgcacacgcttggacttggctttnttttggtcgtgcacgaacccacggcggtcttcggccacgctgcgcct

SEQ ID NO: 59579 - DNA, 334 bp, Zea mays
acgttgaaggttcagtgcctataactaagcaatctctatctagagcctactacccctctagcctgggtgttgtgtccaattcaacaatggaattcgggttcaatgtttatagctaacgaatcccatatagaatcgagtgattttattgcataatggcgatagtgcctactccccctctattgtgagcttacgggaagcttctgaattacgctgattagtagtgcaaaataacatctttgctcgtcctgctgttgctggtcaaagatagctgatttcatatataattgaagattatctgaaggctgatattccgagcgccttctcttgctgggga

SEQ ID NO: 59580 - DNA, 409 bp, Zea mays
ctaatgtacttttcaaaagatagaccttgtgcagcttgtcaagcatggaaacaggtgggaagctctcatcatgccaaaaatgtgatgacaacatcaagacccctggagttacttcacatggacctcttcggacccgttgcctatctaagtatatgaggaagtaagtatggtcttgttctaattgatgatttttcccgcttcacttgggtatttcttttgcacgataaatctgaaacccaagggaccctcaagcactttctaaagagagctcaaaatgagtttgagcttaaggtgaagaaaataaagagcgacaatgggtccgagttcaagaaccttcaagtagaggaatatcttgaggaggaaggaatcaagcacgagttctccgctccctacacaccacaacaaaatg

SEQ ID NO: 59581 - DNA, 494 bp, Zea mays
tcccggatcttaagtcacctgaggctgcagcttctaagggagaacacgtgataggtctttcttatttactttcgaaaaagatagaccttgtgcagcttgtcaagcagggaaacaggtgcgaagctctcatcatgccaaaaatgtgatgacaacatcaagacccctggagttacttcatatggacctttcggacccgtcgcctatctgagcatatgaggaagtaagtatggtcttgttataattgatgatttttcccgcttcacttgggtattctttttgcaggataaatctgaaacccaagggaccctcaagcgcttcctaaggagagctcataacgagtttgagctcaaggtgaagaagataaagagcgacaatgggtccgaattcaagaaccttcaagtggaggagtatcttgaggaggaatgaatcaagcacgagttctcctgctcctacacaccacaatcaaaatggtgtggtagagaggaagaacagga

SEQ ID NO: 59582 - DNA, 404 bp, Zea mays
gagctttgccgtgcctttaccgagcaattggtccgttgatatggtgcgggaacattctcctgcacatgaacctccttcttcgcttcttccttctgtatgctcctctgagtatacacagcataagtgcgtcacatgggggaaaatacaaagggtgcaactgcaacttatcagatgcaaagcagcaatgccacaaaatgcatgggcttcgaggttagacagagctgacccgcagctaaatacaacgcggaagggttcgaaaagccataaattcacgcaagcatcaatagcgtagcagcgtatatgatttcagccgccgctggttcgtgctggtactgcaaaacgaatccgctattgaaagaggtaggacagagagaacacccacaaggatggcttcgatgtcgtgc

SEQ ID NO: 59583 - DNA, 355 bp, Zea mays
ctgcatttcaggattcacattgatagaggtcacaatacaacaaaacagatggctgatgacatgcaagaaccacccatccggtacttaaagctacagcactgttgatgtttatggagaaaatcacattctcagcctcgtatggcctctaagcatgacaactagctcagcatgcaactccagtctgctaccgactgaaatcgccttagcacccaagaaagctatcgacaaaaccagaggaacaattacttgacaccaaaacataaataactctaccgccaaactaaaatgcgtctatgcgatcttcatgggctgattgcaaccacgaaacttcactaataaaaatgaacaccgatca

SEQ ID NO: 59584 - DNA, 410 bp, Zea mays
aaaactcaacatgagagatggcattaatagcaccagcgctatttatttatttagcaaccctattatatgtgggaggcaagcgaggttcttatataacaaacatcataatatggactaaatttccttgaacacttatgcacaatatgttttgaatgacatggatgatatgcatggttattcaatgaagcctaaagggttgactaaatccatgttatggtgagtgtctaataaagaagaatcaaatgcaaactgactagatagagaatacgtcacataagttatggattggccaccatatgagaataatcattcatcgttcaactaaaccattattgatagtcaacaactgatggatatcctcaagtgcttcttatttcttattggctacacaagtcacaaaagagataaga

SEQ ID NO: 59585 - DNA, 388 bp, Zea mays
  unsure (1)..(388): unsure at all n locations
tcacacccctggacttactccgatgcattggtcttcctctgttggcaatagaatcctgacctcacaaccttttcgactagtgtactggatgctgcatgaattccacattgtcctgcatgaacctcctccagaagatgcttcccagtggacgggagaacgcacttcatgaggatgcctgatgcgcctcttctgtacaattcctccacaatgagtgtatagagagttgattgcctggcaatgcgctntgctgagatcttgtcatctggatcttcttcattctttatatacttaataatcggccgtcttcatcatcatagtctgactctgggtgatctatgacgttgcactcttctgtgtgatccattgagatactcggctgaagaatttc

SEQ ID NO: 59586 - DNA, 490 bp, Zea mays
  unsure (1)..(490): unsure at all n locations
atcttaagtcacctgctgcatgcaagcttctgtgagccgataggtccaaaatcatcttctctgagctcgttgccgagaaacgatttaatttcccagcacgtagcggtcccaccttgcagagtttactgtttgtccctgcggtccactgcgcagcgggcgcaagcgggtgtgcgcctgggtaaaaactctggcgcttcgccttcttacctgcagcactatataaactgacgagtaggtgtgaagttaccacagcattcattgctatttgcactgttttcctgccaaaattcttaaccatcaccgaagcttgtctgttagaaccgaacgaagctccagtttgaaacctgcttcggaggaagaaaattttaaagtttcacaagttcataattgaatggccagagtccgctctaccgccagngttgagcgcgagggagaagaaactgaagcttcggagactcttcccatctccgaagccatgccacgatcgggt

SEQ ID NO: 59587 - DNA, 253 bp, Zea mays
  unsure (1)..(253): unsure at all n locations
atatttgtcaatagatgggtgttgactctggcatagtgctgttgactgtgcgagctttcgactgttctctgaagtccctttggtgtggagcatattggctcccttctggctgctggccttgttgcnacggtggtggaggccgacgctgttgccaagaagcttgaggttgactcgccgaagcaacagaaactgcacggtgattgcctacatactttgtgatgtaaggcgaatgatacgaaacagtgtgcatgaa

SEQ ID NO: 59588 - DNA, 398 bp, Zea mays
ggacattgactttctccatgcacccccaagtgcgcaagtatgaaagtgatggttctctcccaacccacttctcataagggggtctctcttctttgcccataggaattctattcacaacatgacatgaagtcagactgccttcccccaccatgccttatataaaccacaagtgtctaacatgacattcaccaggtcagtcaacgtacagtttttcctttcagcaatcccgtttgactcgggtgaatacggaggagtcctctcatgaataatgccatgttctgcacagaaatcatcaaagactgtgggagagaactcgccaccacgatctgatctaagacggttgatctttctctctagttggttttcaagctcagccttatagattctaaagtagtcta

SEQ ID NO: 59589 - DNA, 485 bp, Zea mays
  unsure (1)..(485): unsure at all n locations
ttgcactgtgccggatagatatacatacatagttattatgactctacgaggccacagatcanaccggcagaggctaaaggacagagctcttctataaaaaatttgggcctgcgccccgggccgtggtccatgcggccatgggcctgggtacgccccattcactggcctatgaattatgtgataaactaggttcgattgatgtgattcacacacgcacacacacatatagtgacccccatgtgtatatctcagagtttagtatgtatgtggtcaaacaaagtgtatgtgatcatacaaaccatacaagttggtatatttgttaagtatacatagattgtgtggctgtacttaatttgtatactactacaacaatatatctaaaaatataggttccttcaaagtttgcaagctctaaaattagagtgtcataaacgagtattaaacatctcaactgataatagtatgtttactgataatactgatta

SEQ ID NO: 59590 - DNA, 377 bp, Zea mays
  unsure (1)..(377): unsure at all n locations
tagcttatgaagattcttcatcccaacatgggctantccgtgatgccagagtcaacccatgttaatcttagcaattaagcatgtatcgagttcagctctattaaaaccaactaaggatagctgaccctctaatactgccttaaatgctactgaatatcacttcttctaaagacagtgacacatatattgcgtaaaagacagtcgtgacccattttgcataattgagatatagaaagcaaattggtttctgcagaatctactagagaaacattggacctagaatggccaggagatagtaacaatttaccaagtccttcgaccagaccttgatatccatgcccgaatgtgatagctctttgaggatcttcatttgtctc

SEQ ID NO: 59591 - DNA, 229 bp, Zea mays
  unsure (1)..(229): unsure at all n locations
aactcagctntgtgtggaatcgggagaagattgatcacttgcgtgtgtctagaattgaatgctacaagctcttgtgagtagatgaagtgggaaaacttggatgacttgaatgtggggtggttgggggtatttataaccccgaccacctaactagacgantggtggacgctgctgtcgaacggcgcaccggacaattcggtgacccaccacacagtgtacgtggcaccag

SEQ ID NO: 59592 - DNA, 416 bp, Zea mays
  unsure (1)..(416): unsure at all n locations
ttttattgttattgacgtaactagcatgaatggatgttgagaacaaatgtccgtttcacagcaattcatacattcaaacatgaacgtttatattttctgtacgcaaaagcgagaccgggagagctcatcgtttgcaagtgtaaataagaccaacattgacacggatgctatgagcttgaaggctgagctctcccagagattgcgcttctcgcctgagccactacaagtgggctgctgcacggccatctgatttcttagctgcacaaagaanaatgcagttggaagacccttctataatacagtgtgacagtgctaaccttgcattgcagcagtgaacatgataaatntgacaagtttgtagaaatggcacatgtatgtttgaaggtttcaacggtgaacattgctgcaggatgtca

SEQ ID NO: 59593 - DNA, 189 bp, Zea mays
ctacgtagtgataccctgctgggccacctaggtagtggtcaatggggagtagctctctccgggcagaaagggagtcacggcttgtgggtaaagtgcacaacctctgtagaagtgtataaaactgatatatcaaccatgctcgtggttatgagcggccaagggagcttcagtgattagtggtacttgatc

SEQ ID NO: 59594 - DNA, 347 bp, Zea mays
aagcttaacttgagctctaacttgaccagtcctagacctataagctctgttgggactcaaaattcattaaatatacagcgttgcgccttgaaatatgcatgtggttctgcacttatgacggagtatacaaaactcagtgcgttcttgaaacctctagtgcaaaaccgagatgcccatcccaccatttgactattttgctaaaaactatctaacctatggagatatattatcaataatatgagagaatatgtgaaggtatcaacactctgtcccaacatgcgttcttttgtgtgcttataacgtggatatgatttggtcaaaaattctataagattcaaaattctatt

SEQ ID NO: 59595 - DNA, 448 bp, Zea mays
gcttatgtcattgctcaaatgatttaaaaacaagcatattcggcaaatcgtaaataaaacatgagtgactgcatattaattggtcttgtatgtaaagggtgctatatcaagaatgatgacatggtgttcatatctagaaggaaggaattgatcaatgtcactcatttcaaaaaaggaagaaatttgaactgatcaccacgcttatatcaaaagaatctaagcaaaacttacaatattgaataaatattttccaatgtgtgctcaaagatggctcaaatcattatgtggcttgagatggcttcaaaggtgatgatagcaaggaaagagctctgaagaactaagcataagtgaagggcatacgacaacttggacaccgatggcccaatgctatggctaataatggagtacccacgttgcgtcctgcacaagttaagatattaaaagttat

SEQ ID NO: 59596 - DNA, 463 bp, Zea mays
tgctgccggtcttcgggttgtgttatttatctgtatcatcggcgccctgggatgggcggagggcaacaccagctggtcggaggtgccatgttggacatgcgccgtgggcggaagaccgagtatcttgagattcccctcaaagatagcattataggttggcgtctggagtggtttataattgataattatggaaattctttccccttccggtcacgaagacaggcagatgttcgtactccgagttggactgagtcgtccacatatcatgaggtggccgaggcaggcgtgttgcttactgaagtcggattactgaaagagagaggtctgactaccgaagcggtggtcactggactatgtttcaagatcattctaccactgaaagacatggcctacccggcatatctgtatcgatggctggccgactcaactcaggttatcaatatgagaatccttctgttgactt

SEQ ID NO: 59597 - DNA, 377 bp, Zea mays
aaatattccgggagtatgtgaggtttcagatgtatttcccgaagaattggccggactggcccctgaaatatatgtaaaattccgaattgagctaaaacccggtacggctcccatctccgaagatcgtaccgcatgccccctaatgagttggcgggactgaagattcaattacaagatctactgaataagggatttatccggcccaactcgtccccttggggtttgcccgccatttcttgtaagaagaaggatcaaaccttgagaatgtgcgtggattatcgacccctaaatgaggtcactatctagaataagtaccctttttcaagatcgacatcttatttgatcaactgactggggcgaggatattttccaaattg

SEQ ID NO: 59598 - DNA, 481 bp, Zea mays
  unsure (1)..(481): unsure at all n locations
agctatctgagggcttggttctaacgtacgaggaccggagaggggctggccacnatggttgctctccggcggcactggcgggtctcggagaggtcgccggagctaatggctggctcgggcaagtccggcgaggtactgaggaggtaactgngaatgcagccaaacactggtgctggctctatatccgtggcgcgggcgtggtcactggcggacgcgggcgcgcggaggttcgcgcacaggcgtgctctgagcgcgcccccggatgtcagctcgcgtcgaacacgtggaagcttgcttctaccatggttcaacggccgattagagcgccatagcgtgcgtatcttggcaaagtcactgtgtacggtcgcttctctgctccaaatcctatcttttcgctgtgagttccaagtccagatatggtcggtgtanggagatagagaggggagaagattcctgtgtcaactagctcgaaccgagacaa

SEQ ID NO: 59599 - DNA, 466 bp, Zea mays
  unsure (1)..(466): unsure at all n locations
tgcagcttaccnttgtttgagaacctactccttgtttattatgccacgcagggcgggtctctttcaaccctttccctctctcaaggggtcacttaaatcgggtgagtgcttctccttaatctcgaggatcacttaatccccacaaggatcgccacacaataggtgtctcttgctagctttgttagtcactaagagttttgaaggagaggaagaaagcacaatcaataaagccaagcttccagagcaacaagaaaaacacaagatcacactctctctatactgtccaaggaactaatcactaatgatcactagtcacaattatggcacttggaggagcttggaagctctgaatatgtcttggagtgatgtgcttgctcttgtattggatgtanatgaatggaatgcttggatgtatataatataggtggttgtggttgacttatagccccaaccaatcctagtgttc

SEQ ID NO: 59600 - DNA, 370 bp, Zea mays
  unsure (1)..(370): unsure at all n locations
attcttccgaagatcgatattgtgtccccttcttgtgccatatgcagcatgatgtatgatgcttatgctatgcgaaatgatgtgatgatggtatgctatgtaaaatggtatttattccgaagatacacgcacatccctgccataaaacacataatcggtgtaaatcagcgttgacttttcgctgtaagccatccttatgagcttgttcgccttttacttcaccggaatcagcatttattnttcgttgtaagccgtccttatgagcttcttcgcctcttactttcggcggtattcgcgttgacttttcgcgcttcgccttttacttaggcggtatcagcgtttatttttcgctgtaagctatgcattccct

SEQ ID NO: 59601 - DNA, 416 bp, Zea mays
  unsure (1)..(416): unsure at all n locations
ctgcagctgcaacttcgccttcgagccgaagttgaaatatattatctgtcaataatgcccagggccttctgacagtctgttctttcattggaacgagagacttantacaagagcatattgtcttcacggtatggccgctcgcggagaaatgggaaatgcccacgaaacctgtaaagaggccgacgaaggtggacttatcaagatgaagtacactttttaatttggagatagattcgctgagccagatgatgactggctaataagcattgaaaacttaagtgatgaactgcttggggcttattcgaatgccgaagacactgtaatgtcaacattctattgagtgccgaaaaagaagaggctgaatcgagtatttgatgcaatcgggtgaggataccctgactattgctatcccattc

SEQ ID NO: 59602 - DNA, 431 bp, Zea mays
  unsure (1)..(431): unsure at all n locations
actggagaaagaaaagagagaaccggcgaagaaaaatacaccactgcatcccttgatcgcgcgatgggcgtgggggattaagaagatcgggataagaaaccacgaccgtatgatggttagcgggtggagttaattaaatcttgcgtaccccttcgtaccacggaattctggcggttagattgtgatcgtgcggcccagatctgggcgggattacataaagcagggatctaatcttgaccatagatcttgaatcggacagccagtatagatccataccccttcgctgggcatttcttctaaagagaccccaaggagagcaataatctacccgcagtccacctgatgagtttcctgagtctaggaaattattcgcgcaccctcctgacctttcngttattatgcgcccagtgcacagatcatgaaaaatcaaa

SEQ ID NO: 59603 - DNA, 463 bp, Zea mays
cttctaaatggagaacacatattacgactttcttatgttcattttgagaaagacacggtttgttgcgcatgtcaagcagggaagcaagttggtgtccaccattcacacaagaacatcatgacgaccgacaggccgcttgagctactccacatggatcattcgacccgatcgcttacataagcatctgggggagtaagtactgtcttgtaattgtggatgactattctcgcttcacttgggtgttctttttgcaggataaatctcaaacccaagagaccttaaaaggattcttgagatgggctcaaaatgagttcggcttgaagatcaaaaagattataagcgacaatgggacggagttcaagaactctcatatagaaggctttcttgaggacgagggcatctagcatgagttctctttccctatacgcccaacaaaatggtgtgtgggaggaagaatgaactc

SEQ ID NO: 59604 - DNA, 402 bp, Zea mays
  unsure (1)..(402): unsure at all n locations
tatgaccagaaataactcgagaatctggtntaacgactgcacttcttattcccattgcttttaactttccaagccccacaagtaaagcttcgcattcaggaatattatttgtacagctgaagtcaacgccttgttgcatagcatattctgaccttggaaggtgcaactatgacaacagtcgcacctgcaccgaaggttccccacgaaccattgcagaacattgtccaagcttcggcatctttatttgcttcttcatcctgagcccctggcgtccaatcagcaatgaagtctgctaacgcctgtgactgaattgaggatctatgcacatagtcaatactgaattcgttaagctccgcaacccactttcctattcttccagtagcttctctgttcctcataata

SEQ ID NO: 59605 - DNA, 415 bp, Zea mays
  unsure (1)..(415): unsure at all n locations
agctntccaaanagtcttggatcactctntttggtgatctgaatattaagttatggatgtttaaagtctgaagactgaatctgtccaattctggacagcaaagccttctattatcttttgtccttagttaaatattgaatcaccttgatatgtttataatgatatgtagacaattttattacctttccagatagtctaggatcgctttgtttggatgtctgaacctgtagttgtgaatttttaagttgcaagtctgaatctgcccaaatctggatagatctgttgtgttagcacttttaaccttgttaagtgtctagtcaccttgtgatgacaatactaaagttgtagagccctttctaagctttccagacagtcataggttgatattcttggactaataattgaagagttatga

SEQ ID NO: 59606 - DNA, 344 bp, Zea mays
aagcagcttcagctttccatctcgattcctatgctcttatgcgaggacataccatagcacaaagtgctgttacgctctcaattatccgaagagcaggagaaaaccttgataaggtttttgctcaataacaaagatgtttttgcatggtcagccaatgatctctgcggagttaatagagatgttattgagcactcgctcaatgtcgatccatccttcagacccacaaagcataggcttcggaaaatgtcagatgacaaggccgaacgtgctcgcaacgaagtcaaaagactcctcagtgcatgagttatcatagaagagaagtacccagaatggctagctaacac

SEQ ID NO: 59607 - DNA, 305 bp, Zea mays
  unsure (1)..(305): unsure at all n locations
cacgtgggaggacgcgcatcacancaagaaatgtgatgaccacttcaagacccctgtagctgctgcatatgacctcttcggacccgacgcctatctaatcatatggggaagtaagnatggtttaactatagctgatgatatttgccgcttcacttgcgagttctttttgcaagataagtccgacacccaatggacccataaacgcttcctcatgagagactagaatgagtttgagctccatgtgagaaagataataaacgacaacgggtccgagttcaagaaccttctagtggaggagttccttg

SEQ ID NO: 59608 - DNA, 378 bp, Zea mays
  unsure (1)..(378): unsure at all n locations
tcacatgatagctcttcttccttcatggcagaaccacacatgcctgatagtccacggcatggtgatcatggctttggtacacattcttttttggacaacacacaatctagttcttctnggcacagcacattgtacgtgaaagaagagaccattctgtggtgaagagtgtatcttctaaacaggaataggctaatgcattcccgcccaacattggtctttatagtagcaacgtcatacctgatgatgttgagatccataaatttgctgatgcgccgatcacatcaagggtctgatccatgtcatcaagaagatcggcatgcttccgacactgatatacgagtcatctgctactgacccctctgcctgcatgtatatttc

SEQ ID NO: 59609 - DNA, 442 bp, Zea mays
  unsure (1)..(442): unsure at all n locations
agcttcagctccatatatattatggattgcttttgaatctgttcagtttccttcggcctttctggcagcttcttgacttccatgaatagcaataggcccttgatccgaaggtatcttcatgcaaagatatgctgggtgaagaattgcttcaaaacattgagtgtaccacgaccaatgattgcgttgtaagggtattccatgtcaacgatatcaaacacaacttgttcagtccttgtattattgataaatctgaaggtcactggcatcatgatcttgccgagcgctacaatctgccttcctctgaagccacaaaggggatgtgtagcatcatggatcttatcttcnggctcttgcatctgactgaaggccttatcaaatataatatccgctgcactgcctgtgtcaaccagaacattgtggaccagaaatcctttgataacac

SEQ ID NO: 59610 - DNA, 470 bp, Zea mays
  unsure (1)..(470): unsure at all n locations
atctttgtacgcccttcattggtgatactttaatatacacgtagtctccgacttgaaacgtaagcaatcttcattttttatcagcataactcttctggcgataccgtgtggcttccatattctggcaaataactcgaactttctcttcagcttcagcaattaagtcattcccatagaatttttgctctccagcttctgcccaatntagcggtgtcctgcatcgtcttccatattgtaaggaaaatggaccccggtccatttggctaaataggttttggtgttcgatgatccacataacctgtggactaatgtgtttgctagtgtttgtctttgtagttcacaggatgctagagttacttggaccaaggcattgagaaaagcaacacctcanaagaagacattatgaagaccaagtgaagtccaagaaacaaaggaagtgtngcctgcatactatctagtctagagcaccg

SEQ ID NO: 59611 - DNA, 471 bp, Zea mays
  unsure (1)..(471): unsure at all n locations
agctngtgaagattcttcatcccaacatgtgtctttctgcgatgccagagccagcccatgttagtcttagcaattaagcatgtgtcgagttcagctctatcaaaatctactaagtatagctgaccctttaacactcccttaaatgctattgaatatcacttcttctaaagacagtgacacctacatcagtaaagagacagttgtagcccattttgcataattgagatacagaaagcaaattgtaatctagagaatctacaagaaaaacattggaaatagaatggtcaggagatatagctattttaccaagacctttgaccaaaccttgatttccatccccgaatgtgatagctcgttggggatcttggttnttctcgtaggaggagaacatcntcttctcccctgtcatgtggttggtgcacccgctggcgaatatccaacttgagcccccggatgcataaacctacaaaa

SEQ ID NO: 59612 - DNA, 300 bp, Zea mays
cctgatcgcaccaagcgatcatggtggaatccctctcattcatttacgcttgtgtcttctcatattgaagcatatttatggtgagaagcactagttattgtactattcatagagtatgatcgacggttgcattatatgtacacattgtctgtcgatagcgagagtgtagccgtactcgtgcgtatctccaagcaccagggcggagcctcatcctgattcatataggacatctgatattgcatgggtacgcctcatgtgtcgaggatctacctaacattcgcataattaggcactacacac

SEQ ID NO: 59613 - DNA, 468 bp, Zea mays
  unsure (1)..(468): unsure at all n locations
agtcacctgcggcatgcaagcttgggaactatgcccgtatcaaatctttctattcctgaatataagtgcttggcagatgcccccgttctggtcgaccaagaccagcacccaacataagacttccctagttatttagccaagggcgtgccataccaccctcatggtaacgctgtttcctgggtggtcactccatgttccaattaaatcacatgatcttgcttaatcatcgggttaaccacaataaagtaaacttaccatttggaacattaatatcataaacatgagtgaatgcgtaaagttaaagttgtagcaatagcatagctactaaagtaaagtacaatacccaggtttgatcaaggaataaggttggaaaggttaggtgtatttgaaaggttacccatcacagtatgcacatatcacanagtaaactctattatatgtattgtttgggatcaaacagagtatgca

SEQ ID NO: 59614 - DNA, 433 bp, Zea mays
tgtgtgccatcgtgaggggcacgatcttctttggtgcgaccgagaggacagccagcgagagggcgctgacttgtggttgaagacgaacaaagaggagtggagcttgagcgtcatgggagcttggagctcggctgggagatatttctgtgccatgtacatggaagaagagagctgtgcgtgtggtggagaggaggaacaatgctatggcggctggaaatatttgaggggtgggagtgcaaaaatgcctccacttgcaaggagagggctcctatttatagaatgggcactatggttatggttttctcatgggccaaaagggctgggttgggctggcccatacactaaaccaggccgcgataatgtatttccattgtattttatggcatttggattaaacacggattatcagatcgctaattattttccggaatac

SEQ ID NO: 59615 - DNA, 392 bp, Zea mays
  unsure (1)..(392): unsure at all n locations
ctctatacttcttggcatactacagatcctgctactgattggtgggattcatacactgcttcccacaatgctgctgatactatcacatgggtgaaanttctactcatttcagaaactaccatatttcccactggactgatgaagattaataagaaggaatttctgtcgcttgagcacgggagcatgtcagtaagcgagtatcgcgataaggtcattcagccctccagatatgcaccagatgatgttgctgaatatgagaggaagcatgagcactttatttaaggacttagtggacctctacagtatgctctagnggctcatacatttgcatcattccagaagctgctcgacaaggccctagctattgaacaacagcgtgtccagaagatatt

SEQ ID NO: 59616 - DNA, 358 bp, Zea mays
agaagactgctgctgatacgaagctgacctcgaccaacagaaaaattggggcttcttataacgaggtctaagaccaacaccgaaaaaatcaccattgagattctggaaggcttgtctgacgatactggtgacagcgacagctatgatgtggacagtggtggcgaagactcctaagaacgtccctggcgaccaagccactcaatgtatggtgaatcaactatcaaagatagtcatcttgtccatatgacaggaaggatttcctggatttgtccattgtgagggcggatgaatgggaaaaaacttgtccacctcccgaagagaatgaagtcgtgtgtactgaacttttttaagcttgact

SEQ ID NO: 59617 - DNA, 251 bp, Zea mays
tgggcctttacaccctgcaggataaccttttggaccgcatgcatatacaatacagaaccattattttggaataaactgacaccgacatgcccgaagcacctgccatcatgctgattacatagtactacatgcttgtgggaagaaggtatctgaaagataaactcatgaatgcattccttgtgcgcaagaactgtaatattcgaagggggcaccactattcaatggaactaatgaacatgacttgttatact

SEQ ID NO: 59618 - DNA, 278 bp, Zea mays
gacggtatcgtgtttatcgtaaccactctgaactgtgccataagatggcatagggacgccagccctatacacgacataaccatggactttgcctccaatttgggcggggagacacaccacatttcctatctgcagatatctgcaactagtacgtctaattctatgacccccacacatcaatggtaccttgtacgcgggagaaaaggttttgtgcactgaccaacgctagagcacgctcggatgagcgaccacacgcgccacaacttgggcagaacgca

SEQ ID NO: 59619 - DNA, 363 bp, Zea mays
gtctaaaacccttaaagctaggaaccctacatcttctatagacagacacatctacatttgtaaacaaacaagtatatcccatattgcataattgactaacagatagcaaatgatatccaagagactctactaaaaacacattacagatagagtgctcattcgagattgcaatgttacctaacccttttaccttgccttgattcccatcaccgaatattattgaatctcgggaatctttattcttgacgtaggaggtgaacatcttcttctcccccgtcatatggattgtgcatacgctgtcgataatccagctagaacccgcggatgcataaacctgcagagcaaattaagcttggacttgtt

SEQ ID NO: 59620 - DNA, 470 bp, Zea mays
  unsure (1)..(470): unsure at all n locations
gcttctactgaagcttcggctcaacaagctaaagctgaagctgggccttcaaagccctgcaaggagcaaccttttgaagccgaagcaataaaaattccagaaccagtattagttgaagaaactgacaccgccatccccgaagcacctgccagcatgctgattacataatacgacatgcttcggggaagaagctatctgaagaagaaactcatgaagccatccattatgcaaaggaactaaaatatccgaagggggcagtaatattcaatggaacgaatgaagatgacttcttatactgcctgcctgacaacaaagagctatctgtctgccgagaaatggccagaagtattggtttcccgaagcttgaatctggattaagcgccatgacgaaagaagatctcgcagacagtcttgcgtacaacagcctgaagggatagggaataaacacttgaaaaatccncttattttac

SEQ ID NO: 59621 - DNA, 478 bp, Zea mays
  unsure (1)..(478): unsure at all n locations
gtcgagcttggaggcgtatattggttgtctacttggngtagactcctccttcttctcctccgttgccttaaaggccactggttgcgcctcggaggtggaaggctcgtcaagctcgttgatcttcttggagcccttaatcatgcattcaaaactcacaaaattcccgataacttcctcggnggtcattagtggatatcttggattaccacgaattaattgtacttgagtggggttaaggaaaataagagctcttagaataaccttaaccacttcgtggtcatcccattttgtgctcccgaggttgcgcacttggttcaccaaggtcttgagccggttgtacatgtcttgtggctcctccccttggcgaagacggaagcgaccgagctccccctcgatcgtttcccgctcggtgatcttggtgaagtcatcaccctcgtgcgccgtctgagtagatccaaatctcttggcgtcttcaatc

SEQ ID NO: 59622 - DNA, 490 bp, Zea mays
ggatcttaagtcacctgcggcatgcaagcttagttggcggacaattcattactgacatctgttataatggcggccgaggaatggcacacgagataataaaaaagagtgaaaaagatactcacgatgcaagagaaacaacgaaggcagctgaaaaagctgcggaactcaaaaggcggataggtatccttaatagcttttagtttgatttttaattttgtgacttcgaacttatttacgttttctatcgcagctgaactatctcctcccccagagcccttcgagtcattggacaacccagaagcaaagaaggaagatgaaattactagcatggccgaagctattatggacgaagctgttactcgactgctaaacaaagctgcggaatcagttttaaaagaagaatatgctgtattgtaaaaacatttggaatattaatgtaatatttgctgaacaaaatatgtaatattttatagtctctgaatgtaatata

SEQ ID NO: 59623 - DNA, 441 bp, Zea mays
atcatggcctcaatgataatctcattgggcactgtaagcgcttgtgccctcaatcgcaagaaccttcgtacatatgcctgaaggtattcttcgtaatcttgtgtgcattggaacacagcctgacttgtgaccggcttcgtttgaaagccttggaagctagtaaccaacatgtccttaagcttctgccacgacatgatagtccctggccgaagagaagaataccatgtttgggctacattccggactgccatgacgaaggacttcgccatgactacagtattgcccccatacgaagatataattgcttcgtagctcatcaggaactgctttggatctgagtggagttatttgaatttgaacattctcgtcgcgcggcttcggcactttattactccacagccgtgctttgccagtatggtattatggaggagacacccgtgc

SEQ ID NO: 59624 - DNA, 421 bp, Zea mays
agtatgaaaacttcctctccttcatttgctctaataatctatcctttatgggatgtaccatagtataggttaaaatccttgccatataaaatgttcaatagtgcatatactttgacatcaactatatgtgtgcactaatttaaaggaatttagtctatccttttgggtttcaataatgatgattcattcgtcatccacatataaggatcatcatttgtgaaaccctctcttgtgtttctaatgctctcttttctacgtgtttcaacaaggtcctcccaagttctttgaagatgaattccaaatctacaaatataagagtcttggttctttcaatcattgagcttcattgggtctcatatcaagtatgatcgaaccaagcatagatgaataaagttcaaggtcacttggttggatacatcat

SEQ ID NO: 59625 - DNA, 385 bp, Zea mays
  unsure (1)..(385): unsure at all n locations
tacaaaatggaatccattaccatcatgaacagtctgtttgtccatctttacatagnttccaccaatgctcttgttcctggacagccagcagatccatatgaacccaagtacggctaccaaggcgagagcccaagttgacatcgagccgatcacgacgccattgagaaagtgtgacgtcttgttgttatttgatggagaaacacctatttggattagaagcaaaataactccaccggtcaggcgtacgcatgccactataagcctggaatgcggcctgcaatcgatcgagtgaagatggaaggctcgccagcccantagagcggatcggaatgtggtcacacaacatgaaagccgaggggtccacggcaagctttctggatggaca

SEQ ID NO: 59626 - DNA, 411 bp, Zea mays
tgcagctgcgcatgttctcatagcctagtgtctctggaaaacatgccggaaatgcttctcattctgatggttccaagagtcaagtatggctgcccaaattgaacatttactatatgtatggtcactaatttgttgcccggtatttgggtgtagtgatcttttttttcgtttttgcaggtcggcatgatcgagttcattggaatattgaatgtcaaggtgattggaggcaccaacctacccatcagggatatgtcaagcagtgacccttatgtcgtcctgacacttgggcaacaggtaattatggtcgctttgttagaatcacaacaaaataaacatatactgtgttatcaaattacagcgccctcttgttgattgcagaaagcacaaacttcagtaatcaatggcaacctg

SEQ ID NO: 59627 - DNA, 415 bp, Zea mays
  unsure (1)..(415): unsure at all n locations
agaatcttcagttgctttattaagccctaccttattaatttgatcattcaccatcatagcttaagtgttaaatggcatatcataccatgcatatatcttactcattgcattcattagattgcaatctcgctgacggagagtacgtgctcatccctgagcaaggagttgtccacgaggaagaccaggagcaagctcccgagactgccatcgatgacctccccgtagccccagcaattgaaggcaagccccggtttatgcataaccgtatatatatgctactttattgcacttaatgtttgtacgcttgtcatgtgcacttaagtgtaggagttgcttganacctttagttgcatgaacttaggattcctctttgagatgaatactatgatgctatgtcgagtagctgctatgctaa

SEQ ID NO: 59628 - DNA, 448 bp, Zea mays
  unsure (1)..(448): unsure at all n locations
anngcttggaaatgtagaanactgtanatatatcataacattgtgagaccaattttcctaggcttgttattntccatagtatttaataagaatagttttatgatttttagtttgaatagggaattttaggatatttaaaacagcctaaaccaatgttctggatttttagagaataaataataagcccaaaatttcccaaactttttatgtgagcttatcacattatttagaagccatgggtagagtttggtttgatttggaccttgtttgatcactaaacccaaaaccaccccccctgctccatgaactcctttactgactccggaaaccctatgttctcggagtaccgtgaaggaaagttgtactcaaaacatagataataaatttatattatctttgcatcctcatgagcataccatggcattcattcttatatatatacctatat

SEQ ID NO: 59629 - DNA, 367 bp, Zea mays
ccatagcgtgcgcatctatggcagaaccacccgaattattccagcttaagtgcctaagtcacgcctcatgggccgtaacacacttaaatcggaataacccgtcagtccttcagatctagtctgatagagccacttaaccaggatcaaattccacaatctcactcgaaggtgagtcacagaagaaatacaataaaacaggaaacctcaaattaagtactgagttattacataaatcggagttttgagtagcaaatagagttcacacattaagctgcagcggataatcgatgtcgtcggtaatgaggaaatgggcaaggcctatcccactactcctcatgctcctctcctgccggagcaacataccact

SEQ ID NO: 59630 - DNA, 444 bp, Zea mays
  unsure (1)..(444): unsure at all n locations
attatcaccgcagaagatattgcaatttatgaatcaaacattactctgtaaatttgtccataccttgtaatatatttctacctttacatccgtgtatgaattgcttttatgtggacaaaacttgtatcttttgagctgaaggcgaaaaacaccttcccttcttttcgacacaacgaagcgtatctntgcttctttatgctcatcgaagcattgtcatcaaagctgaagtaactatctgtgctttatgttatgatgatgatgatgaacctatgaatgtttagatgaatgtttatgaatgcaatgaatgatgtaatgtaacgtgcaaatgaatgtccatacacacctgaagccacacccagactctgcatccccttatgaacgtcttttgagtcttaagctctgcatccncttangaacgtcttttgagcttctcaccttctattt

SEQ ID NO: 59631 - DNA, 432 bp, Zea mays
agcttgtgccacgacgtgatagtccctgtccgtatagaagaataccatgtttgggctacattccggactgccatgacgaaggacttcgccataactgcagtattgcctccatacgaagatatagttgcttcgtatctcatcagaaactgctttgatctgaatgcccgtcatacatgggaagctgaggtgacttgtatgacgggggccatggtgtagcctgcagttcttctaccaaggaagaagcatcatcaaaagtaaagatatcatgattaaaatcatcataccatccatcttcattgaacaagcattcttgacgaagctctctatgttggggccttcgatcttgttcatcttgagcaagatgatgcacttcttcagtagcgttcgcgatcttccttagaagatcagccagtcgcgccatcttctccttct

SEQ ID NO: 59632 - DNA, 330 bp, Zea mays
  unsure (1)..(330): unsure at all n locations
ccaagtgaggcttagcaattaagcaagtgtcgagttcagctctataaaactactaagttagctgaccctctncactcccttaatgcaggaacatcacttctttaagacgaacactatttcgtaaagacagtgagcccatttacagaattgcgaaactgaaaacaagttataatcttacaagaaaaacattggaaatggaatggtcaggtgatatagcaattttacccaatcctntgaccaaaccttgattgccatccccgaatgtgatcgctctttggggatcttggatnttctcgtaggaggagaacatcttattctcccctgtcatat

SEQ ID NO: 59633 - DNA, 412 bp, Zea mays
  unsure (1)..(412): unsure at all n locations
agcttgtctggtgacaaagctctgtttattttgtttatgctgaaagcaaatgattatctgcattcttaaggaccttcagaagagaaaggccctcaatagaaaccacggagtgaccgaattccaacgtctcctagcctacgatgcgctgaacgcagatccactcgccacgatgtcatctcaacatgggctctggactcgacgacgagggagaggaaggcgacgatacgtaccagcattgacgatgagttgtatgcttgatctatgctagaaggatcgtcaccggcaaagcgcagaataaagacgcagcaagaagagagcggcgaggcaaataacagggcggtgcgcggaaaaagagcaaccatgcaccggctcacgcttntataatgcccagcactacaacagctacagtcat

SEQ ID NO: 59634 - DNA, 355 bp, Zea mays
ctgtcatcaaggatctacgtgcttccaaggaacagtcgttcggagcttaaactgctggctggctgcaaagctgctgaaacacttccgctactttgaagtcccagcgtgacaatgctatggacaaagccattctcgtggggcgaatcttgatgtggagacccaaagtgattgttcctgacgacatatttgcagatgtcaatgctgctcctgattcttcgagacacccttcttcatcggtcgctcctgagaaaaacattaccaagtagaaacactgaatgcattgtgtatgtggttagtgtgcttgaatattctgtcacacagtggtatcagtgctgaatgccaatattattttcct

SEQ ID NO: 59635 - DNA, 454 bp, Zea mays
  unsure (1)..(454): unsure at all n locations
agctntaccctgtagtctggactataattttgttacggtaggtgtgccttatgcagtttgaccatttccagcatttgcgtaatgaggactctagggagaagcctcgtagtgagaccctggccattcacctcggaagtgaatacgggtctagctacccgggctagaagggaatcgcgactcatgggtaaagatgcgccacctctgcagagtgtaaaactgatatatcagccgtgctcacggttatgagcagcctggactcctcacatgataattgaacttgaagatggaaataaatcgagatccgatgatctgccaatggtttgcttaagtggtttcacttaagtgtttttttatatatactcttgtacctttggttaatgggaatacttgtgaatcacgcttattagtaagacaggtggttgtaataaaatgttgaccaactaaaatgcttact

SEQ ID NO: 59636 - DNA, 406 bp, Zea mays
  unsure (1)..(406): unsure at all n locations
ctatattgcatatgaccagtgactctctcaatttatgactttgccacccagatttgtctaggtctactcttgtttggtggacctatgaatgtaactntgacctttccatttgcaacctttcttagaacataatgagcattgaaagcaaatggtcctgagtgcttacgcaagggagttggtggattggctttgcagttgtgggcacaatgaccttcatttccacactcaaagcatttgataagcttgtgagtctgctttggcttgtattgagtggtagctttcttttgcacaaaagcattgtatccaataccactcttgttgtttttcatgacagtgatcataagcagctcattatggaggtattgacccttgctaaacttttgcacacttgttgcaagatgttcat

SEQ ID NO: 59637 - DNA, 449 bp, Zea mays
  unsure (1)..(449): unsure at all n locations
agcttcctcccttctntggcggaaatcgttgtcagcccggatgtactcatccatcttctgaagcagcttctccagagtttgtgggggcttcctcgcaaagtactgagccatatgtcctggccgaaggcccttaatcatggcctcaatgacaatttattgggcactgtgggcgcttgtgccctcaatcgcaagaaccttcggacatacgcctggaggtattcctcatggtcttgcgtgcattggaacaaggcctgagctgtaactggcttcgtctgaaatccttggaaactggtcatcggcatgttcttgagcttctgccacgacgtaattgtccttggccgaagggaagaatactatgtctgggccacgttccagactgtcatgacgaaagattagccatgacagctgcattgccttcgtatgaagagtattgtgcctcataactcatc

SEQ ID NO: 59638 - DNA, 478 bp, Zea mays
  unsure (1)..(478): unsure at all n locations
ttgctcgcctgcagaatcaatcaaaaagctcgctagctcagatcccaaggaagcctgacccagcaatccctgacttctgatgaaccaggctgtacaatactcagccaggcaaccaaatgtacccacaataacaatattgctgtctaattcctcttctggtgttcggattaataatttgtacaaattcagaagaaaacagcaatcgaattatcaattatgcaagtacagtatgcataataactgtttaactttgcataatttgttggatagcgaggttatctggtttgcatccatgaaaaaaaatgtaaatgctcgacctgcaagggttaagacagtccccgagtgctgtattaagaagaccttctcacgagcacaggtaaaaaaacccaaaccccttgccccccaattcacagcggcacttgagcccatgtaatatgtacatacagcangatggattgngagtgaatatatgtggaat

SEQ ID NO: 59639 - DNA, 404 bp, Zea mays
agctttgattgcacctctcaactgtataaccttatcgttccaaatttcaatactctgctcaacaaagctatcagccttgagagtaagatgaaggagttgattgaccataagaggaagtcctagtatcaaggccagtctagcaggaatgttgttacttgtagagcatccggagctctcattctcgcttcgtaggtcagagtgggagctatcaaaaccagattaaacgctcaggccagtagacctagaagtacaaccggcaatggcagaggactggtggaagtcatcataatcgtcaaggaattgccacgaacaccccaacaaagactagcaacctagtttccctagtgcaccccaatggactgttaagtgtagagagggtgggcactatgcctatgcctatgcct

SEQ ID NO: 59640 - DNA, 432 bp, Zea mays
tgagaaaccttccggctttgaagatattgtgtaccctaaccatgtttataaactctctaacgcgctctatgggctcaagcaagccccactaccatggtatgaatgcctaagagattttcttatcgctaatggcttcaaagtcagaaaagcagatcctactctattcactaaaaatattgcaaatgatttcgttgtatgccacatttatgctgatgatatcatatttgggtctactaacaaatctacttgtgaagaatttattaggatcatgattcataaatttgagatgtctatgatgggggagttgaagtattttctatgatctcaagtcaagcaactccaagagggcaccttgattatccaaacaaagtacattcaagacatactcactcaagttgtgatgaaggatgccaagcccatcaagactcccat

SEQ ID NO: 59641 - DNA, 399 bp, Zea mays
  unsure (1)..(399): unsure at all n locations
agctntgacctgaatagcgcccatcaatctctgcagcttgtgatgatggtggttaccagccatgtttatgagtgttgggggtacccctaattatggtacccgacagtagcccccgagcctcaaagggagtgttggtactcgcttggagctttgccgcacttttgttttgcaaggggaccggcctttcttggttacactttgttccggtgggtgcgcgcgagcgcacccgccgagtgtaacccccgaggcctcngaggagtggtttgactcctctgaggtcttaatgcctttcgtgatgcctctgccggtctggttttttcctcatgcgatctgattgtagcccgggtgcatggtcaggttcctagttttcaggtaggtttggtgacgctgtcaatgatt

SEQ ID NO: 59642 - DNA, 434 bp, Zea mays
  unsure (1)..(434): unsure at all n locations
gcgcatgtcaagcatggaagcaagttagtgttcatcatccacacaagaacatcatgacgaccgacaggccgcttgagctactccacatggacctattcggcccgatcgcttacataagcatcgacgggagtaagtattgtcttgtaattgtggatgattattctcgcttcacttgngtgttctttttgcaggagaaatcacaaacccaagagacattaaagggattcgtgggacgggctcaaaatgagttcggcttaaggatcaaaaagattagaagcgacaacgggacggagttcaagaactcacaaatcgaaagctttcttgagaagganggcatcaatcatgagttctcttctgcctacacgccacaacaaaatggtgtagtggagaagaagaatagaactctattggacatggcaaggaccatgcttgat

SEQ ID NO: 59643 - DNA, 477 bp, Zea mays
  unsure (1)..(477): unsure at all n locations
cattccaacttangaggcaagagtggcaacctattcatgcttatattgctctgtggtcttaacttctatagccttttcttcaatctccgcaagctttttctcagagggctctgaatgcccaacatcagtactagcttggattactgcaacatcaatttcggctggtttgtttcagcttcggtttgcgctttccaggcttcggcagttttccttgaaggagaagagttcaaagtttttaccatctctaacacatctagtatattagccatccttctcctattgggagatgcggcanaacttttttgtaccttcggcgctgttatttctgatgaagggcttanaatttctaacacttttgtttctccaatatttgactctttacacttatccgtatcagtcttcgactcagctagatcaaccgaaggtgccttcgacattatagctggctctacaggcttctgcgaagaaggaatgggt

SEQ ID NO: 59644 - DNA, 401 bp, Zea mays
  unsure (1)..(401): unsure at all n locations
tatgtgttgggtcgtttatgtaattattatgcactaacatttgagcaaataatttgttaatttggttaccgtcgcaacgcacggacactcacctagttataacaagaagacaacattgggagtggcaaaaatccaattatctcttgtccgcccggcctcttccgtctcggagcgagaaatcagcggcattcgcgcgcgcatccgaagcgcacacgacaatgcanggcggatccagcggcatcgtctatggtggcctcaagtaccaggcaagcaagcaagcaccagcagcgccttctggaaccttctttgaaccatctgccttaaccactntgtcctctctctctgctcttgcaggcacggtgtatcgccgacgtgcgcgcggacgccagctcgaccacctt

SEQ ID NO: 59645 - DNA, 435 bp, Zea mays
  unsure (1)..(435): unsure at all n locations
cttttacaaataacaaacgaaaaaaacgagtgaccaacaatagtagtccccgagctagtggttggggctgtgtcagaggttggttctggcagtgcatcacatatggttgacaagatcattgtatcttgatggttcgtgtggaacacgacgcgacagaataattatataattcaaggccgccggaagatgtgtcctatgtacaatggagattatattgcatgagctcaagattacaattgtgtgctgctagcttgaggtttagctacgagatgggatctactctcctagattagatgaattgtaggggcccctaacacgccttatatatgctgatnggattanggttacaatggaatttctctctaatacaatcctataatctctgaagtctggttctgagtcacgccatgagtctgtgtgccatacctaacggaa

SEQ ID NO: 59646 - DNA, 500 bp, Zea mays
  unsure (1)..(500): unsure at all n locations
gcccgtatccaatctgcttgagccggaactattattatcttgtctgatgcccncgttcctgtcgaccacgaccagcacccaacataagacttccctagttatttagccaagaccagagccatgatagttctcatggtagcactggtttcccgggtggtcactccatgttccaattaatatgcaataatcttgtttaaccatcgggttacaacaataatgtaaacttaccatttggaacattaatatcataagcgggagtgactgcataaagttaagttgtagcaatagcatagctacgaaggtaaagtataattcccacgtttgatcaacgaatatggttggaaaggttatctaaataggtaacccgtctaattatgcacatatatccaaaatagttaactttattatatgtattgtttcggatcaaacagagtatgcagagggagaagtccacttgccttgcttattgaaaactagaggttctttctcgtataggaata

SEQ ID NO: 59647 - DNA, 474 bp, Zea mays
  unsure (1)..(474): unsure at all n locations
agcttctanagggagaacatgtgatacgtctatcttatgttactttcnaanaagatagaccttgtgcagcttgtcaagtatggaaacaggtgggaagctctcatcataccaaaaatgtgatgacaacatcaagacccctggagttacttcatatggacctcttcggacccgtcgcctatctaagtataggaggaagtaagtatggtcttgttatagttgatgatttttcccgcttcacttgggtattctttttgcaggataaatctgaaacccaagggaccctcaagcgctttctaaggagagcccaaaatgagtttgagctcaaggtgaagaagataatgagcgacaacgggtccgagttcaagaaccttctagtggaggagtatcttgaggaggaaggaatcaagcacgagttctccgctccatacacaccatatcanaatggtgtgctatagaagaagaacatgacgctta

SEQ ID NO: 59648 - DNA, 367 bp, Zea mays
  unsure (1)..(367): unsure at all n locations
agcttctaaagggagaaacataatangtcttacttattgttctttctaaaaaaataaaccttgtgcagcttgtcaagcaggttaacaagtgggaagcactcatcatgcctaaaatgtgatgacgacatcaagacccctggagttacttcatatggactcttcgggcccctcggctatctaagcatacgagcaagatagaatggtcatgttatagctgatgaaattttccgcttcacttgggtattctttttgcaggataaatctgaaaccccagggaccctctagcgctttctaaggagagcccaaaacgagtttgagctcaagtgaaaaagaaaaaaacgacaatgggtccgagttcaaaaccttc

SEQ ID NO: 59649 - DNA, 418 bp, Zea mays
  unsure (1)..(418): unsure at all n locations
atctatggaacaagaggaagaataagaagaactatttgaaggcatagggcgaggcgcatctatgcaaggagtgggattcggattgctcctcttccgactcccacaatgaaggactcgccgccaccgccttcaacaagtcattcctctttctcaacgagcgtcacacatgccttatggcnagagagaagaangtatgtactcgaaactctacttatgcttcttcaagtgaggacgaatctagtgatgaggatgaaatagattattcatgtttatttaatggcctacatagaaccaaggtagatcaaattaatgaattgattgatgccttgaatgctaagaatangcttctattaaagcaagacgatttgttgtatgaagaacatgacaaacttgtataagcacagaaatctcatgctct

SEQ ID NO: 59650 - DNA, 505 bp, Zea mays
  unsure (1)..(505): unsure at all n locations
tcgacccggatccttaagtcacctgcggcatgcaagcttctaaagggagaacgacatttgtgactatcatatgttncatttgagaaagacaggatttgtagcgcatgtcaggcagggaagcaagttggagtacaccatccacacaagaacattatgacgactgacagaccactcgagctcctacacatgacctattcgacccgattgcttatataagcatcggcgggagtaagtactgtctagttattgtggatgattattctcgcttcacttgggtattctttttacatgaaaaatctcatacccaagagaccttaaagggattcttgagacgggctcaaaatgagtccggcttaaggatcaagaaaattagaagcgacaacgggacggagttcaagaactctcanattgaaggcttccttgacgaggagggcatcaagcatgagttctcttctccctacacgccacaacaaaatggtgtagtggagaggaagaatcaaactct

SEQ ID NO: 59651 - DNA, 472 bp, Zea mays
  unsure (1)..(472): unsure at all n locations
agcttctaccctcagataaagctccgatgccttactgtttcactgacgcttctataaagtctgttgaaccataatcaaatttgatatcatggttgcagtttcggtcatttggagtagaaagtttggtaattttggaaagctcaatactgctttttctccttgatcccaaagaaggaagaggttgtccattaaagcattttcgtccaataagcctggtacatagtttcggaaaatggattaccaaaattttagccaacagattggccagcaaacttgacaagatggtttctccaaatcaaagtgtcttcattaaaggacgttttattcaagataacttcatgttggtgcaggagacatctatgctccttcatcatcagaaaaagacttgtttgcttcttaaacttatatcactaaagcttttgattcagtatcgtgaccctctcttatngaagtcatgaagcaacttggtttt

SEQ ID NO: 59652 - DNA, 404 bp, Zea mays
  unsure (1)..(404): unsure at all n locations
atagagcatgcttatagcaaatatgaatttttcattttctatctcatgctcattgaatttagcaagaaaatgagctatgtgatcattctgttgtttaattaaagctaggtgatcatggatagcatcaacattaacatctctacatctagtgcaaatagaaatatgttcaacagtagaagtagagggtttgtaagatcttaattcctctatcttagtatataaagtagcattctcattcttaagataggaaatagaatcattgcaaacattcaaatccttagccttagcaattaatttatcattctcaatcttaacgctagaaattgattcatttaatttgtcaatcttagcaattaaactagcatanttttgagattggcaattgaatcatcacaaacatttct

SEQ ID NO: 59653 - DNA, 326 bp, Zea mays
taagccttgattttatattgttcataatctgtagccccttttcttcaacactacttgaagagctcaattaggctcggtgttatggtttcaacatattctcctttgaaaatcctacatttgttggaacatgaatctttagatatagacttagtagatcttttattctcacggtaatttgatgctcctgctcaatttgagtcacataaaatgatggttctcgtgttatcacttgagagaaaccctaagtgacattggggtgtcacacgcggagtgcggtgagacatgcgtgttcaaggaatcgctacctgcacctacggaagtaccca

SEQ ID NO: 59654 - DNA, 354 bp, Zea mays
aagcttcggagaagaagctatttagttctcaagaaatctttctcagaaattcagaattaaatggccagagcgcgctctaccgctagagttgagcgtgagggaggcgaatcccaaagaacggagactgttcctatcatcgaagcaatgccacgatcccggactgtggacctctgagggaaggcccactgccgagacagatacagactgttgccgatacagaccaagttgctgccgaagcagaggaaggagatattgaggaacctgcttccaatgatgaataccatattcgcgtaccaagctagcccagccttttagacttcggaaagtcgactgtctccaaggcttgatttcttc

SEQ ID NO: 59655 - DNA, 417 bp, Zea mays
  unsure (1)..(417): unsure at all n locations
agcttgtggaggttcttcatccncacatgtgctaagcggcgatgccacaaccagcccatgcaagtcttagccattaagcatgcatctagaccggcctcttcttttgcaaaatcaactaagtaaagtttgccgtctagtacacccttaaaagctaggaaccatcacatcttctaaagacagacacatctacatttgtaaataaacaattatatcccatattacataattgactaacagatagtaaattatatccaagagactccactaaaaacacattatagatagagtgctcattggagattgcaattttacctagcccttttaccttgccttgagtcccatcaccgaatattattgaatcttgggaatctttgtttgtgacgtaagaggtgaacatcttcttcttccccatcatat

SEQ ID NO: 59656 - DNA, 384 bp, Zea mays
  unsure (1)..(384): unsure at all n locations
agcttgaaggccaagttaagaggcaggcccctattatatttgtatccgagggtcttagtttatcaaagaaaaattatacagaattggagaaggtgctgtatgctgtcttgatggcctccacgaagcttcggcactattttcaagcttacaacaaattgttccttcttcacaacctctgaaggatattatgtgaaaccgagaagctactggaaggattggaaaatgggctgcagagctaaatgaatgttgtattaattatgttcatagatcttcgattcagtcccaggcgttagtagacttcattgctgactggacgccangggctcacgaggaagaaacaaataaagatgctgaagcatggacagtggtttgcgatgggtcttg

SEQ ID NO: 59657 - DNA, 461 bp, Zea mays
  unsure (1)..(461): unsure at all n locations
tccgcatagtgacatgtctcaagacgaaagagtgaactctctctatagatgaaatgaccaattatcccatgatagtttgtgtcatgattgtaatcgattatgaagggcataaatgtaatttcacacacgctgcgccctgtgcctataaatagatgaacaatacccctgtactgttcacgctatcttgtaatcgctcgcgcgcaacacttgggtttttgccttctgtcaagccgaaggtataaatgtaattaaatatcgtatttaaatatccaagtttgtataatgataatatatgaatgatatttatgtgtggttatctttcatgttgtatatgtttcatctttcattatcttataaccatgatgacgaaggtacgtccttcatgaccttcatccanagatctttatattctaaggganataatgctttgaacgacgaaggacattaacatntaatacttt

SEQ ID NO: 59658 - DNA, 222 bp, Zea mays
gtgctgatcctcatgattgtactcattagagagaactcgatcccctgatcatctttgctcgcctcaagaagacgatcaatgagcagtcatatcgacgctctacaagacctagatgcctacacacccgatcatgtctctatgattcacatatacagattcgtggttccaaagatatgttcttctaacactcattgctcgcaaagaatcatgacaggaacgctc

SEQ ID NO: 59659 - DNA, 288 bp, Zea mays
gctctatcatgccaaaatgtgatgaccacagcaacagccccggagttacttcatatggacctcttcggacccgtcgcctatctgagcataagaggaactaagtatggtgttactataattgatgattacttccgcttcacttgggtattcatattgcaagatacatctgaaacctcatggaccctcatgcgctctcctaacgagagctcacaacgagtttgaactatacgtgacgatgatgatacgcgacaatggatcctatttcatgaaccttctataggaggagta

SEQ ID NO: 59660 - DNA, 343 bp, Zea mays
tcaccttccgcggtggtactatcgtgaatgatgctgcaaagagatcgcgaatatgtgcaaagcacaataacatgtgtagcgtttgccaatgactttgtatgcgagcctgacgatggcttatgtgactgtaatctattattgagcgatactaaataccattcgatatctatgtgcttatgcagatataaattggtgagtcgcgatgctgttgtatatataacacgtcggtggtgctacttaatggcatattatcattattaacggctattggttcgggcaacctctcagtgcgtgcctaacgcataagatgacgacttacgattggttgccaagactatacaac

SEQ ID NO: 59661 - DNA, 443 bp, Zea mays
tgcaagcttgccaatacttgtcatagcaacaacatctgtctatacagcaactgcagaccataccagtaacttggcccttcgcgtgctggggactggatatgattggacctttcaagaaagctcaaggaggatacactcatgtactagtagcaatcgacaaattactaaatggatagagttcaaacccattgcttctttaacctctgctaaggccgtggaattcatacaagacataatattcagattcgggataccaaacagcatcataactgacttaggatccaacttcacaagttcagagttcttcgacttctgcgagcaaaagagcattcagatcaagtatgcatctgtagcacatccaagagccaacgggcaggttgagcgagccaacgggatgatattggaggcactcacgaaaaaggtcttcgataagaatgaaaaat

SEQ ID NO: 59662 - DNA, 506 bp, Zea mays
  unsure (1)..(506): unsure at all n locations
ctcagcttctaagggagaacacgtgatatgtctaaccaatgttactttctaataagatataccttgtgcagcttgtcaagcagttaaacaagtgggaggagcgcatcacagcaagaatgtgatgaccacatcaagacctttggagctgctacatatggatctctttggacccgtcgcctatctaagcatagggggaagtaagtatggactagttattgttgatgactnttcccgcttcacttgggtattctttttgcgggataaatctgaaacccaagggaccctcacgctttctaaggagagctcanaacgagtttgagctcaatgtgaagaagataaggagcgacaatgggtccgagttcaagaaccttcaagtggaggagtaccttgaggaggaagggatcaagcacgagttctccgctccatacacaccacatcanaatggtgtggtagagaggaagaacaggacacttatatacatggcgaggacgatgcttggagagttc

SEQ ID NO: 59663 - DNA, 449 bp, Zea mays
  unsure (1)..(449): unsure at all n locations
gcttgtaatttactttccgcctattcaccccctctctaggcgactntcaattggtatcagagctcggtacttcattaagagtctaaccactcgaagtgatgtcaggaggatccgccgagagggagatggaaacggccacaagccacgggaaggctcatcaagggagtccggtgccaaaggaagggaggaatctcctccccgcgtcaagtcgcactagagtggcgacaagaagaagaagatgaagaaagtggtctactacgagaccgactcttcgtcgccctccacctctggctctgacgctccgtccgtcacttctaagcaccatgagcgcaagaagtttagtaagatccccttacgctatcctcacattaacaaacgcactcctttactttctatcccattaggcaaaccaccggtttttatggtgaagattattgtatgtggagtga

SEQ ID NO: 59664 - DNA, 351 bp, Zea mays
  unsure (1)..(351): unsure at all n locations
ctttagcgccgtcttgaatctcttgatgatgagggccatctcttcatcattaaatccggccgcctcaatttgtgctaccttgctaggtagcgcctccttgcttcttgttgccttgagagcaagaggttgaggctcgttgattggaccattcaatgcgtcgtccacgtacctcgcctccttgatcatcattcgcccgcttacgaattttccaaggacttcttcgggcgacattttggtgtacctgtgattctcacgaatattattcaccaaatgaggatcaagaatggtaaaggaccttatcatcagtcggacgacgtcgtggtccgtccatcgcatgcttncatagctact

SEQ ID NO: 59665 - DNA, 397 bp, Zea mays
  unsure (1)..(397): unsure at all n locations
tgcagcttcgcttgggtaataccggcgcaaactttcatttcaatgaaggatggggtgacttcacacctactcgtctgtttatatagtgctgcacgtaagaacgtgaatcgttaagtcttctacaccggacgaacagacgctcgcacccactgacggtgggccacaaaacccgagaaggtgaatccgcatggtgggaccactccgcgctcggaaatattatcgtttcccggcaacgagctaaggggaggtgtttttcggaccttcggcttcccgaagcctaagagactttntcacggatcanactcgttacgaaaaactatctaacaccgtgaaggggctactgttggggtcatgcttcatcgccgaaggtctggaggaagaaacaccttcggcaaat

SEQ ID NO: 59666 - DNA, 458 bp, Zea mays
  unsure (1)..(458): unsure at all n locations
aattccaaaagagtatgtttaggcctctattaatgctaaataattcatggttgggactaaaaatactggaactactcttattaaatactacggaaatttaggagtctattagaattggtcccatgattctatcattgttctagaattccctataaatttcctaagcctggctgaaaaagaaatgggaaaagaatgaacagtgatgggctcaaaccaacccaagccatcccacgaacggtgaaaacgcgctcacgcgcgcacccatgctggcaactttgcatagaggacctcgactatttgaataactggataacaatacttgaacgctattcatctatgtctctaacgtttgcactaatgccctcggagttctatttctttaccacgtcaagtccacgactgtgaacggngacgagcattctccggcgaacccatacccgccggaatacgctatgact

SEQ ID NO: 59667 - DNA, 390 bp, Zea mays
atgttgatcgcccacatattctggtatgcaaggagagtggcaccacacactatgtaagacctgcttccactgactctgtccggcttctgcctcgggcatctctatttgcttctgaatgggatctgacacgttcttgtagtgtggtccttgtcttcaccacataataagcaatagatgttcctgggctaatccccatatctttcttcgaagcccctgtcgcctcggacccttggagctggtggcctgaaggagctttgctgctgtcccgaagactgtgagctgagttgtgggctctgaaactggcctcctttgacatcgctctgactggagctgtggattgatctgacatgccgacggtgaattcgttctccgaagcccctaatcatctca

SEQ ID NO: 59668 - DNA, 449 bp, Zea mays
  unsure (1)..(449): unsure at all n locations
atgatccctcccctgcaactgctagcagtgacacgaagactaccagaaagaatacatgatcacattgtcagcccataaattatgttgttaacaaacaaagcaaacatgtaaaaaaatataagttgccaaagtgatgttaagcactccatacttgaccggcgtttggaagtttcctcctaaaccttgtcaatcacctaaagaatgaaatgaaccattcaaataagacaacatactggatgacagaataatgataagttaaattagtgtacagaaagaatacacaaagatttaatcaacatatgcttacagaacaagcaccaagcaaataggaagttctttgaaaatcactaatagatacaacttacacggaaaatcaaggtatttatcataacacattagtaaataaacggatgttgnaattagctcttatgcaagctattattatattc

SEQ ID NO: 59669 - DNA, 365 bp, Zea mays
catgagctcaaccgaaggggcttttattgcttcaaacaatactttggagggtaagggagcccctgagccgctgatttgggtagcgaataacgatgctcattttcaactcctggaataatttggacagagaacccttcgaaggaagcttccggccttcggacagcatccagatatttttctagcttctgatcttgggccctactactcttgtccacatggccaacaatcacttgagaatcagtctttacgatatccctctttattcccattgcccttaattctctaagtccctatagaagtgcatcgcactcaacaatattatgtgtgcacttgaagtcaggttgatgcaaacatgtttgactttt

SEQ ID NO: 59670 - DNA, 265 bp, Zea mays
taaccttctacagagcgccaacaatggctgaagcaccaataactgatatgcctatggcatatggtagatttagggatatccataaccaacatcgcacaatattcccagtaacagtactggtattaagacattatgccacatgcgcccagactgatctaccaatatggcaagaccttatcttttcagatccagatgctcttggtttgtttcggtacatgttctcgattttttcttgcgctacttttatcgaatgccattgcttcag

SEQ ID NO: 59671 - DNA, 468 bp, Zea mays
  unsure (1)..(468): unsure at all n locations
agctntagacaggaacaactgtggcatgcactatatcccttgataaaaatgtcaaggacttgaggattgtcaataggaaggaacaccacaagaaaatcaatacctcttccataagcctcaaccacgcctccataaaaggtaacatccaaagtaatatcaagtcacacttcacactaagagaagtaagaaatgtagtgaatgctttgagaaggggcactctattgggtcatgtccctatattaaaaatgacttgattattaacaaggatgataaactttgttttaaatgctccaagaagggacacttgtttatgtcttgtccccatttaaaacaaaaaggcatagtgttagaaaagaatatattcactaaccatgtagcaagaaagacacaaggaaagaagaaatcttcaagacttgatgatcgcctatgctacatatgccgaaagaagggacatcaatgcaaggattg

SEQ ID NO: 59672 - DNA, 431 bp, Zea mays
  unsure (1)..(431): unsure at all n locations
agcttgaaacagtaacaaccgtggcatgctctatntcccttgaagaaaatgtcaaggatttgaggatcgccattaagaggaaacaaaagatggaattcaacacctcctccaaaagcctcaaccacgcctccacaaaaggtaacatccaaggtatgatcaagccacacgtcacattaaaaggtgtagtgaatgctttatagaggggcacttgattaggacatgtccctacatcaaaaatggcttgattattaacaaggatgatagactttgttttaaatgctctaagaagggacacttgcttagatcttgttctcatataaaacaaaaaggcatagggttagaatagaaaagttttactataccatgtatcatggaacaagcaatgaaagaagaaaacttcaaaacttgaaaaacgcctatgctacacatgc

SEQ ID NO: 59673 - DNA, 412 bp, Zea mays
  unsure (1)..(412): unsure at all n locations
gcttctaggccgacggttattatccactaggcacaagaacataacagcgcagcagctgccaactagtgcttcgtggcctcgtgggagcactgtatatataacgaattactcggcaggtgccaagcangcaagagctgttgccttttcgatggaaacacgggctcggggcagggacagggcagctcttgcatacagcaagttgcatgcacaacgggccaagaacacgcgcctccggaatgtttctttcacacacgacacgagaggatcggaggcagcgaggaagcagtgaagcacgcggcagcagcagtaccaaggccctggttcccaagaacacggaccatacaggagcccttgcttcttccaggagattgaggcacctgcaccggcggacaggctcgcgacgagatcacac

SEQ ID NO: 59674 - DNA, 436 bp, Zea mays
  unsure (1)..(436): unsure at all n locations
tccctcttagaaaattcttatgaatattgtattatctctagaaataaatctagagagggagaatcctgaaagaaaagcccatttgtaccttcactacgggcacatgatccatactaatctcctatcaatgtcattcaattcccctaagtcaacgattccaatctctaaccttgctaacggtctcngtgaaattatctcgtcccgtttggatgttgatattggagcgcatggaattgaattgggttcagtaccaaatcaatcatggtattgaaatgagatataattctaattgtttggatgtcactgaattggagttcgtacttgtgcggtcgaattccacgcaatatagagggatgacgctacgtactgngagagggagtntctagttatagtccaattccaggaaattggattctaattcaaatctcaattcatg

SEQ ID NO: 59675 - DNA, 381 bp, Zea mays
  unsure (1)..(381): unsure at all n locations
gcttaacttcatctatattatggattgccttggaatcaatccancttccttcggcccttctggcagcgttctgactcccatgaatagcaataggcccttggtccgaaggtatcttcatgcagagataagctgggtgaagaattgttcataagcatttatggtaccacgaccaatgatggcgttgtaggggtattccatgtcaacaatatcaaacacaatttgctcagtccttgtgttattaacaaatccgaaggttaccggcatggtaatctttccgagtgccacaatctgccgccctccgaagccacaaagagggtgcgtagcatcatgaatcttgtcttcaggctcttgcatctgtctgaaggcttttgcaaatataat

SEQ ID NO: 59676 - DNA, 431 bp, Zea mays
  unsure (1)..(431): unsure at all n locations
gatcttaagcgactgcgcatgcactgtgaagtcttcatccacatgtgttctttggttatgccacanccagcccatgctagtcttagcaattaagcatacatctagaccgacctcctctttggcaaaatcaactaaataaaggttgccgtctagtacacccttaaaagctaatgaacgtcacttcttctaaagacagacacatctacatttgtgaataaacagttatatcccatattacacagttgactcacagacagcaagtgatatctaagcgactcaactaagaacacattcgaaatatagtgctcggatgaaataagcaattttcctaaccctttcaccttgccttgggtcccatcaacgaatatgattgaatcttgtggatccttgttcttgacgtaggaagagaacatactcttttcccccgtcat

SEQ ID NO: 59677 - DNA, 450 bp, Zea mays
  unsure (1)..(450): unsure at all n locations
cctttatcctaagtgaatacatgtttcttcttgaacnaccacacancgcctgtagagctcctgacacactgccctcgccgaagcggaattacccttctcgtcgccctcgaccaccacagacgccagccacctcgttttccccttcgagtgcacctagacttctcccccctacaacaccagtggccgcccataacccctgtgcacccaaacgtcccatgctgttctaccacccctagtagacccacgtgccttctttctggcccccgctacctcggtgacactgctctggaccgtgactcctccaaccttgccctcaatacggtaacctgctcgattctctcgtagggcatgacttcttcacagcatgcggatcttgtgcatgcatataaacaaagtgcacggtggtgcccaccctctctcttctgttaagccgatggagaccacactcct

SEQ ID NO: 59678 - DNA, 409 bp, Zea mays
  unsure (1)..(409): unsure at all n locations
acaactgtngcttctacattattgagcaaactaacgttgagttgttccatttcccaacacaattcttgtgacatctaatgagtagtgatagtgttcacttgacccttacggctcagagcatcagctactacatttgctttatcgcgtgatattgtattatcatgtcatagtccttaatcaactcaagccatcttctctgtcttaagttgagttctttctgagcgaatatgtatttcaagctcttgtgatccgtgaagatattgcacttgtgtccaatcatatagtgcctccacatcatcaaagcatgcactactgcagctaggtccaaatcatgcgtaggataatatctctcatgattcctcaactgccttgaagcataagctatcactttttcttcttgcttagcaca

SEQ ID NO: 59679 - DNA, 326 bp, Zea mays
tgacactgcttccactttggaggggtccacttctattccttcggcagttaaaatatgcacaaggaatgctatcttttccaaccagaattcacatttactgagtttggcatacagctatgtgctctgagttttccaacgacgatcccaaagtgacgcttatggtcttcgcggatcttggagtaaataatgatgtcctcgatgaatactacaacaaacttatctagctcttccataaacactttattcatgaggttcatgaacaaggcgggtgcgtttgttagatcgaacgacattactgtgaaatcatattgcccgtaccgggtgac

SEQ ID NO: 59680 - DNA, 452 bp, Zea mays
  unsure (1)..(452): unsure at all n locations
ttttcttgaggactcccttgtgtttcattcactactaaatagggggttgcctattggtagggagaaaaattctttgcatctgggatgtaaagaatctcttntacagacgctcacatacaccagctgctggttcatataaatagaagaaaaaataaattactganagattatttagtaaactttgatctgtctttgtgggccttttaatggtggatgtgagggctgtcaaagatggtgttcacatgcggtatgtatagaattnttttaccggtggtatgcctggtgcgatggcgttggttacaaaaaaactgtagaatgcacactctatttagtttaatgccgacaattctaatcgagactgcaatgggcgctacaatattattgttgcaaaacaagaaatgcgtgctgcatcatagctacgatatatcatacatgttgtggacattagcact

SEQ ID NO: 59681 - DNA, 412 bp, Zea mays
  unsure (1)..(412): unsure at all n locations
ttcacatcttttctcgcttcttcaccttgagcctctancatccaatcaacaatgaagtctgctaacgcctgagattgaattgaggatctgtgcacataatcaatggtgaattcgttaagttccgcgtcccattttctgatccttcctgtagctctctgttcctcattatgtcttttaagggttgcgatgaatgcactattatatgatatgtttggaagtagtgccgaaactttctggaggccatcaatacaacatacagnaccttctccaattctgtgtaattcttctttgatgggttgagtacttcggagacgaaatataccggcgcttgctttttatttggcatcttgttctcctgacaagtgccgcctaaccgagcatggaagcaccacatctgaatacggagttctga

SEQ ID NO: 59682 - DNA, 369 bp, Zea mays
  unsure (1)..(369): unsure at all n locations
acagcattttgttaccataccagtgactnggcccttcgcgtgctgtggactggatatgattggacctttcaagaaagctcaaggaggatacactcatgtactggtagcaatcgacaaattcactaaatagatagagttcaaacccattgcttctttaacctcagctaaggccgtggaattcatacaagacataatatgcagatttgggataccaaacagcatcataactgacctaggatccaacttcacaagttcagagttcttcgacttctgcgagccaaaaagcattcagatcaagtatgcttctgtagcacatccaagagccaacgggcatgttgagcgagccaacgggatgatactggaggcact

SEQ ID NO: 59683 - DNA, 304 bp, Zea mays
  unsure (1)..(304): unsure at all n locations
cgcgaccaaaagagcgaaccggcgactgcgacccaaaacggacacaacggccgacagtcacgtggcggcctaagcgtatacgcgccacgaaggcgggcttacccagtccacaaaaaccacggtgaagagatgcacgccgagcacccatncagaactctgcgcgagacacggtgccaatcaacaccggcggagggatgcagagcatatgacactgaactgggtataacactattcacactgaatgactcattcacatgactgacagcccaacatcgagggtgtatactccaggatgtaacagcac

SEQ ID NO: 59684 - DNA, 425 bp, Zea mays
cactaccaaggctaccaattgtaaaatcatcactgtcatagctccatgatatttaaagataagcatctatgatcaccaactattatagagcacgagcaacctttaaatacgtattactcacaactttagataccaattactcgacttgtggaggtacccaagtcctgatcgctccatttcttgctcatcttcccttttccaccttgagactatataggatcactcaaaaaacagttagtctcaaaagacacaagttatgtgtgctccccctaaaggtgtgcatcaagtatttgaatgacttgcaccttgcacattctagcatccttagaagtaaaggggaaacataccttggtctatgcataatatatcaattacatcacacaaagataccgattgaatagatgagataatacaacttatgacta

SEQ ID NO: 59685 - DNA, 413 bp, Zea mays
tctagagatatcctgggcttgcatgcgggattgtcataacactggtgtccacgctgaagtgagcgtgacgggtgctgagttcccaccggagcggtggaaacaccatcctaataacgacgtttcgcgcgctcagcccgcagtaaggcgaactcagcacgagccctactcaactcgtctaatgcatggtccagcttcgtgttagcacagcggtaggttgactgtgctgctttacctaggattgccctcaccgacaggtgagacaatcacgcctcctgtgctgccatatggacggcgggggtaatacttcatgtcaagaccgtatgctgccccaccgataaccgagcactagtgcgatagcgcacgccgtgcagcatcttgcatggctgcctcagctgagtgccgctcatagatat

SEQ ID NO: 59686 - DNA, 456 bp, Zea mays
  unsure (1)..(456): unsure at all n locations
agctttatcaaatggacgtgaagagtgcctttctcaatggaccaatcaaagaagaggtctatgttgagcaacctcccggctttgaagataatgagtaccctaaccatgtctataggctctctaaggcgctttatgggctcaagcaagccccaaagcatggtatgaatgccttagagatttccttattgctaatggcttcaaagtcggcaaggccgatcctactttattcactaaaactcttgacaatgatttgtttgtatgccaaatctatgttgatgatatcatatttgggtctactaacgaatctacttgtgtagaatttagtaggatcatgacacacaaattcgagatgtctatgatggnggagttgaagtattttctatgatttcaagtcaagcaactccaagatggcaccttcatttgtcatacgaagtacactcaagacattctcaccaa

SEQ ID NO: 59687 - DNA, 383 bp, Zea mays
  unsure (1)..(383): unsure at all n locations
catgttcatctgaagatatatttctgcacatggaaaagaatgctgcaatgccatgggccanacgagcacccattccacgaccacgacctcgaccacgaccacgaccacgtggtgtgggagatccgcgaccatgagatggacgcgagggtccggcagcagcatgtccacgagagctggagagcgctttcctcagacgccctgctggattgtttggatcaatccacaagggggtgtaagatagatgtcttgtgcctttctcatagcgaaattgagtcaccacttcaatcattttcatgatgaatggggcgtggagacatcccttaagagggaagtaggcagcatgaataacttcttgccaaatcatgtcaaaaatgttgatgctt

SEQ ID NO: 59688 - DNA, 442 bp, Zea mays
agcttctaaaggcagaacacattttaggacttgttgaagtttcttgcgacattgggtttgatgagacttatggctcccaagtggagcaagttgatcttgatgaactatatgatgaagacgcttcgtgcgtcgtgctaatgaacatgtccattgtgacgtttgtccaaaagaatccgatgagcccacattagcacaagatcaacaatcttcttccatgcaagcatctccaccaactcaagatgaggacgaggttcatggagaagatgatgaagatcaatactatgagccacctcaagaggaggatatctatcaaggtggagatgatgattatcttgacaaggaatatgaacaagagattctgtgtcaaagaacgccacaccaaagagtccacctagctattcatagagatcaccccatcaactccattcttggtgatatacac

SEQ ID NO: 59689 - DNA, 363 bp, Zea mays
tgatgactattggatataacatacagagagcacttatttgccctaaatttcaaatggcagataatgaatttagagatgaattactacagcgagtgactattctctgtaacaaaacggcgggaatatacatgagtttaacctacctcgaaagtacatgtgacacagcagcacgaattcaatcgttgaattgaagacgaaacttcttatgatcgcgaaaatcttcacaatgaatgccaaagactctactcacagcttaatgctgaccaattaagtgcactcgatacaattgatgaatgtgccgttctggtcacctcgataactatgttctggatatggggactggaaaacatctatggatgcatt

SEQ ID NO: 59690 - DNA, 385 bp, Zea mays
gtcaatacaatttttttaactcaagctatcaatcttcaatgaactatataccccagattgacacaaagatattttgaattgttatgtctaaaactcaatcatctcgaggaagaattttatgttgtacgaaataaagaaatattatgtgccaagacctactacatggaggaaagccaatggatggtaacaattatgcttttaagcgcaaggatcttaaattatcatttcttatgagtcttgtgtagtcacatagaaaaagagagcactctatgtttttatattatgtcaccattctttgaaaaattcctctcatatggtagatagcatagtcatcaattctattttatggcgaactacattgcttaaataatcggaagcacctcat

SEQ ID NO: 59691 - DNA, 415 bp, Zea mays
  unsure (1)..(415): unsure at all n locations
tcaagctcagtttagcctctcattctcttctttgagcttgtgatatgaatcatcgattgctcctgccaattctagctcaaaggaagatttgcttgtctacggacaacaagcattagcacatggtaatgtagcttcaagttgaatacatgtgcatgagtgaggttgctgggatctgacgatttctatcataacctcatgagcaatattttatatgatatgatcattcataagattctcatgagaacagagaagcatatcatattcttcttgaaaagctagaatttcatcttttagctcttatacttggtccttaagcaaggcattcctatgtactaattgagcgatacaatgtanagcgctatcttgctcaattgagatggtttcatacctttggaccaaatcaacatgatagcac

SEQ ID NO: 59692 - DNA, 344 bp, Zea mays
tcttttgcaagaatcaactataataagagaattgtcgtcataatacacgccttaaacgctgaatgaagccatcacattcttcgtaaagacaagacacattctacattctcgtgaatatgacaaatgtatatccccacttgtgcattaatgtgactataccgataacaaagctattatctcaagagacttcaactataaaacacctgtagatatagacgtgctcggatgaaataacaaatttacctaacccttttaccttgccttgattcatatcaccgaatattattgaatcttgggatccttgtttttgactatgacgtgacatcttcttctccccgtcatat

SEQ ID NO: 59693 - DNA, 416 bp, Zea mays
gatagcttaaaatgattccaacatgctttcataagtgcataagtctgtcataaacatcaccctgtctatgacgcattacacttcacagtttctatagcgacgatatgttctcattatgggcacttggcattataggccacaatctgtactcctctcaatgcacatatataaggggagcaatctacattatatagaactgtttaagcttaattgacatattctttcaaccatgtatctgtcctttaggacatttgcatatttactatctctattgagccatcgctcagactaatatgtatgcatgagcatctcatttattaagtcttagattgaaagggaaatggagcatttcacaaagacatcggttccactctacatcttcggcattatccttccttgccggagttccgctactc

SEQ ID NO: 59694 - DNA, 429 bp, Zea mays
  unsure (1)..(429): unsure at all n locations
agcttgtgaacagtacaaattcttaatggatatatcancttcagcagatcaggcgaagcctatgctattatgtgaggacatagcatatcagaaagtgctgttaggctcttaattatctgaagagcaggaaaaaaccttgataaggttttgttcaataacaaagatgtttttgcatggtcagccaatgatctatgcagagttaatagggatgttattgagcactcgctcaatgtctatccatccttccgacccagaaagcaaaggcttcggataatgtcagatgataacgccgaaggtgctcgcaacgaagtcaaaagactcctcagtgcacgagttattatagaagtgaagtacccataatggctggctaacacttgtatggtaaaaaacgccaatggcaagtggcgaatgtgcatcgattnttcatat

SEQ ID NO: 59695 - DNA, 481 bp, Zea mays
  unsure (1)..(481): unsure at all n locations
atgcaagcttctataaggaatcataacaggtcaacacaattaaagtgtgaaagtcgcctagagggggggtgaatagggcgaatctgaaatttataaacttaagcacaactactagccgggttagcgttagaaatgtaaacgagtctgagagagatggcacaaaaaaatcgtgagcaaataaagagcgagacatgatgatttgttttaccgaggttcggttcttgcaaacctactccccgttgaggtggtcacgaagaccgggtctctntcaactctttccctctctcaaacggtcacttagaccgagtgagcttctcttctcgatcaaatggaacacaaagttcccgcaaggaccaccacacaattggtgtctcttgccttgattacaattgagtttgatcacaagaagaatgagaaagaaaagaagcaatccaagcgcaagagctcanatgaacacatatgtcgctctctctagtcacta

SEQ ID NO: 59696 - DNA, 391 bp, Zea mays
  unsure (1)..(391): unsure at all n locations
atagaccttatgcagcntgtcaagcaggtaaacaggtgggaagctctcatcatgccaaaaatgtgatgacaacatcaagacccctggagttacttcatatggacctcttcggacccgtcgcctatctaagcataagaggaagtaagtatggtcttggtatagttgatgatttatcccgcttcacttgggtattcattttgcaggataaatctaaaacccaagggaccctcaagtgcttcctaaggagagcccaaaatgagtttgagctcacagtgaagaagataaggagcgacaaacgaagtacacgcaagacttgatcaagcggtttgtgatgaaggacgccaagcccgcaaagactccaatgggaaccgactgacacaccgacctcaac

SEQ ID NO: 59697 - DNA, 374 bp, Zea mays
  unsure (1)..(374): unsure at all n locations
tgatttgctaactaagtcagcagcacatgggctgcccttaccttcggatgtgttcttcgaaacaataaaggcaccttcagtggaactccttgaaagagcagtcctcaatatatctcctatttatagcgaagaatggagaactgagatcatctcttaccttcaaggtagattcctttcagatgacgaaacttataacaggaggatagaggcaagagctcgtccatatgtcatgatagaaggggagttgtacaagcatggagtttgtgctccgctactcaagtgtttatctagaaccgaaggcatagagttgatgaaagaaatacatgcaggcctgtgtggatctcacattggatctangccgttacttggaaaag

SEQ ID NO: 59698 - DNA, 398 bp, Zea mays
  unsure (1)..(398): unsure at all n locations
gaccancccaaacccatgctcttatgtgaggatatttcagagcacaaggtgctattgtgatctcaattgtccgaagagcacgagaaaacctttgatagggttttgttcaacaaaaaggatgtgtatgcttggtccgctaatgaactttgcggagttaacagggatgttattgagcactcgctcaatgttgatccatccttcagacccacgaagcataggcttttgaagatgtctgatgacaatgccgaacgtgctcggaatgaattgaaaagactcctcactgcccgagttattagagaggttaaatacctagaatggttggctaacacctgtatggtgaacaatgccaatggtaatggagaatgtgatcgatttactgacctcataaggctgtccaa

SEQ ID NO: 59699 - DNA, 371 bp, Zea mays
tacccttcgtggcaagggctagacaacggtgtatctgtgctctcggttggcgtgaacctgatctagtcttaagaaccccgcgggcgagttgagatatgcaagggtgaagtgctacatatgttgtgtgattggagatccttatctgagaattaatcgattcggatcgccgttacttctcggacatgaagacttggtcactgccctacacatagcaatccagtgaacaagacaggttgatatgaagatggctagtatatgtcaagtgcttgaactatggtagatagaactctagaactcacgtaatgacttaacttgctaataaactgaactttaaggatccactattagtaagcatttctgcaaacagagtc

SEQ ID NO: 59700 - DNA, 360 bp, Zea mays
  unsure (1)..(360): unsure at all n locations
catagtcctctggctttgacccacatcccgttatctatgtcgattcgacggtgaggtgagtacgacttacaatggtcaccatatgtgtttgcgtcggcgatggggctctggatacagtgtgcttggcccaattggatgaggaagggggtaggatgctcatcctttaaaccctgngcgaagtacggatggcgggatgatggccagattgggcccgagacacccggcgtggttgggggatatctgttgtcacgagctcacggagaaggtcctgaccatatgggtccacaagcagtgatccaacgaaccacgcgagtggttgaaagtcttgcatgtggggcccactacgtcaacgagagaata

SEQ ID NO: 59701 - DNA, 323 bp, Zea mays
tttggaaaaaaggttattaatttccaaaaaaaaaatcaagaaatttataatccaatggccagagtacgctccactgccacggttgagcgtgatggatgtgagaccgaagccactgaaactgttccaattttcgaagcaatgaggcgttctgggctggtttcatcagaggacacacctgctgccgaagcaacacaagctgatgttgaagaagttggttccaaagacgagtacagctgcggggtaccaagtaaacctagtcatctggactttggaaagtcaccatctctgaagctgatcttcctaaaatgatgaagctaggttat

SEQ ID NO: 59702 - DNA, 381 bp, Zea mays
  unsure (1)..(381): unsure at all n locations
agcttgagaagatatttccacccttgcttttctatccaatgcagcatttgattcttcatctcccctatgaagcacgaatggggggcccgtgcatggacgttggtgctatccaatcgagagatgtctaaagactattctaaagaaagtagaaataaatgcaaaatcgaggctttcattgcaaaggccaactctgaagcgcaagtggctcgaccaccaagaccctgaatcatgaagagtggcgacatatcatgctatacgtattgaccaaccttgaagaggtgacgccatacatggaacaatttcttcatgaattctggcgtcgatcaagggaccccactccacangaatatgacgctcttcttataaagggtgcgagaaatg

SEQ ID NO: 59703 - DNA, 438 bp, Zea mays
  unsure (1)..(438): unsure at all n locations
tcggcggtgttctgaccaacccacgttagtcttagcaattaagcacgtgtcgagttcagctctatcaaaatctaccaagtatagctgaccctctaacactcccttaaatgctattgaatcatcacttcttctaaagacagtgacacctacatcagtgaatagacagttgtagcccatttgacataattgagaaacggaaagcaaattataatctaatgaattaacaagaaaaacattggaaatggaatggtcaggtgaaatagcaattttacccaaacctttgaccaaaccttgatttccatccccgaatgtgatcgctctttggggatcttggttnttctcatatgaggagaacatcttcttttcccctgtcatggtggttgtgcacccgctgtcgagtatccaacttgagccctcggatgcatanatcctacaaac

SEQ ID NO: 59704 - DNA, 477 bp, Zea mays
  unsure (1)..(477): unsure at all n locations
catgaagcttataaatattacttgtcatactaaatatataatatgatactatgctcaacaggaggaattggacatcaataagacaatccacataaccaaactaccttgattaacctcacatacaacaaaacctactattactgcacttgaacaatttgacctcgtgatatcacaggatgcattcaaagtagtagacatacatgatctatcaaaccatcattcatataagaaaaatctcaatccgatgaaacaaccccatcattaaagagatagatgactaacaaacataagctactcccagttaagcattgacttctgttaagataaatcggtccaaataatgattcaacaagcatgcatagagaaactgctcatagaaaaaatcanactaccatacaatgttggcaaataaaaaaaataagacgggttgtcaatatcgcccacatgactagcctgcaacaactaaaaattatgcat

SEQ ID NO: 59705 - DNA, 345 bp, Zea mays
cagctcatagacaacgatacctcgattggggtaatgtgcttaactattttcgtaatgggtaggggctcatattaagtatggcgttgaagtcatagaaggatatcgaagcaagccttgcccacatagcaataaacaatctctgtgtcaaatcattgagcttcaacataagaatgaataaaaggaagatatgttatacactctaaccagtgacctaattgaaagtcaattcaggcttcacaatgtcactgaggagaaagacaagacactaaaagatgccatatccataaatgacaagattgctatgctcgaagagaaaactttcaatattctcatttgagtatgaac

SEQ ID NO: 59706 - DNA, 409 bp, Zea mays
atgcaagcttatgaagattcttcattccaacatgggctattctgctgggccagagccaacccatgttagtcttatcaactaagcaagtgtcgagttcagctctatcaaaatctaccaagtatagctgaccctctaacactcccttaaatgctattgaatatcacttcttctatagacagtgacacctacatcagtaaaaagacagttgtagcccatttgacataattgagatacagaaatcaaattgtaatctagagagtctataagaaaaacattggaaatggaatggtcaggtgatatagcaattttacccaatcctttgaccaaaccttgatttccatccccgaatgtaatagctcgttggggatcttggttttctcaaggaggagaacacctcttctcccagcat

SEQ ID NO: 59707 - DNA, 398 bp, Zea mays
  unsure (1)..(398): unsure at all n locations
gaggattcaagtggatatggtggaagcggtgtaacaaaaatggaccccgagtcatttgtctcaataggttttagtgtttgatgatcaacataacctgtggactaatgtgtttgttagtatttattattgtagttcacaggatgctaaagtgacttggactatatcattgaggaaagtaacgcctcataaaaaggcattatgaagatcacaatgaagatcaacaagtatcaaccaaagtctaagaaacgaagaataatgtngccacgacggactgtctggctgagagcaccggactgtccggtggcacacgctggactgtccagtgcaccatggaacaatatcccaacggctagttccacgtggcactggtggagagaaccaccggnactgtcgtgtga

SEQ ID NO: 59708 - DNA, 409 bp, Zea mays
ctacacgacgcatgaaatgacaacaactctcacacaagcgtgacatactaggcgtattatatgatcaggaatcgtattcctacacaaaaaaaccataagtactcatttttgcacataggccgttaacgtgagatcgcgaggatgacactaattcaaataaatagtgttaaaacgggcatctttctacacgtgatctcattggaccgaattataggactctgtttgagactgggagaatatagatgacacgaactttgctttagatctagaaaggattgagaatactctattatatatggaacctatggaactctatcgagggaacatccatatacttacatagacatacggcggatggcaccggtccgagtgtacgccttctctgcttgatacacagcacatacagaaa

SEQ ID NO: 59709 - DNA, 347 bp, Zea mays
  unsure (1)..(347): unsure at all n locations
tagccaagcggggcaacaagatggacgaccgcttcacatttagaatgtgatgaccacatctagatccttggagctgctacatatggaccacttaggacccgtcacctatctatacttatgaggaagtgagtatggcctacttattgttgatgactatatccgcttcacttgggcgntctttttgcatgataaaatctgatacccaatggaaccttaacctgcttctaacgagagcgcaacatgagattgagctctaagtaaagaacataatgagcgactacgggttcgagatcaagaaccttcatgtggacgagattcttgaggaagaaaggatacaacgccagttc

SEQ ID NO: 59710 - DNA, 391 bp, Zea mays
cgatctctgccctttccagcaatctacttccttaccatctaaatcccaaatgcaaaaggtttgatcagctagaccagacaatatttgctttccatctcgaaaccaagcacatgatctcaaaccaatgccaggatgttcataaacatgaagacatttgccagatttaacatcccagcgtctgatggcttcctcctgcccacatgtgaggagctggcaatcatctgaactccatgcaaccatcatcactgacttttgatgaccactcaatgtatgcctcagtaatagctctccatcttcattaacctaagaaatgaagagattaattcacgaatagacaaatgacagagtgagaaagtaaagcgcatagcatggtcaataacagaacagaagt

SEQ ID NO: 59711 - DNA, 356 bp, Zea mays
gtcacctgcagcatgcagcttgggaaaacccaattcgtttgtcttctctacctctctccaaaatgagtgtgcacggtgaatcgtatcactttgcgaccatatagacctaacctcatctcccaatttcactcgagttcgtcaccgcgacgtttttcccttctcagtcaccggcaaccgctagttctttgtgctccatgggtggaccattccggtatggatctgtgttcttctggtattgatttattagctctgcatacccaagaagcttatcgtgacacccatttgaccaattcgggcatgattgattgggaacgcgggttccgccgtgtgcgtgggtagaacattctctgcgtatg

SEQ ID NO: 59712 - DNA, 448 bp, Zea mays
  unsure (1)..(448): unsure at all n locations
caggtcactatcttttgttatatattgaatattacgaatggatttcaccgacgctattaatgaaatctgaaaatgattgatcttatctgttggttacaaaaatgggtactggaaaataaatgactcctttagtataattctatataaatccagcgccagatcaactttttactgacaatttcagattctgttaccattattatctttctgaatctctgcatttgctaggcagctaataataagtaatttttattattatttctgttccaaatctttagagctgattcttagtcagcaaataagttgttacctggtgttacttgggttgtagcagctaccttctaatagatatnttgatatgtataactaacaattagctgggacattattatctacacataaacacctgcagataattttttctagaactatagtttatatgttggac

SEQ ID NO: 59713 - DNA, 462 bp, Zea mays
  unsure (1)..(462): unsure at all n locations
agcttcacatgtctcgtatgattcataatcaattgaagctaaaagcccatcagaatgaagcttcttcatgcgattctcacttatatgacccaaacgacagtgccacatgtaggtaggacttaaatcattaagccgaggccttttagcataatattacagataggtgcatcatcaagatttaaaatgaataacccattcataatggatgcaaaagccacaaacatgccattcttagagatcacacaaccattgttttcactcgcaaatgaataaccatccttcatcaaacatgaaggagacataatgtttcgactcatactaggaactagataacaattatttaactccaaaataaatcctgatgggaggtggagttgcatcgtcccgacggtcaacgtagcaactcttgcattattgcctacccagaaatcaacttctnctctnttcacgcttctacttctt

SEQ ID NO: 59714 - DNA, 420 bp, Zea mays
  unsure (1)..(420): unsure at all n locations
gccgccatgtaggcttagcagtaagcaagtgtcgagttcanctctatcaaaatctactaagtatagctgaccctctaacactcccttaaatgctactgaatcatcacttcttctagagacaggaacacctatatccgtaaaaagacacgtgtcacccattttacataattgtgaaactgaaagcaagttgtcatctaaagaatctacaagaaaaacatttgaaatggaatggtcaggtgatatagcaatattacccaatacttggaccaaaccttgatttccatccgcgaatgtgatagctctgtggggagctctggttttctcgtacgaggagaacatcttcttctcccctatcatgtggtttgtgcacccgctatcgatgattcaatttgagccctctgatgcataaacctactaaac

SEQ ID NO: 59715 - DNA, 485 bp, Zea mays
  unsure (1)..(485): unsure at all n locations
ctgacccggatcttaagtcacctgggctgcagcttaagcaaattcttctctttgtttaaatctccaaaaaggatacaaagaatataaagggtagaaattattattaagcaaggtgtgaacacactatcatgaaaaaggtccttagatgacacgaaagtaatgtagaagtgaatgaagtgatgtacctttgtgttttaccttttcaagggggtgttccaaacttgtgttggatttagaattcatttgcaagctcttgttggtatagttgtgacataggtccaagatattaaatgaagattgtcatactaaattgaaggtgaaacttgatacctagagtctagatgtcacctatcattttcttatcacaacaagaggcaacatgaaaattgcacaagtatggattatgcaactagtgatcatgtatgaaaaatatcaattgaaaaacaccaattgatacaattngatagataatcagatcactaata

SEQ ID NO: 59716 - DNA, 464 bp, Zea mays
ttaacttttgtttttttgagaaagacatgatttgcagcgcatgccgagcacgatagcaagctggtgctcattatccacacaagaatatcatgatgactgacaggccgctggagctcctacacatggacctattcagcccgattgcctacataagcatcggcgggagtaagtactgtctagttattgcggatgattattctcgcttcacttgggtattctgtttgcacgacaaatctcatacccaataaaccctatagggattcttgagacgggctcaaaatgagttcgacttaacgatctataaaattagaagcgacaacgggacggagttcacaaactctcaaattgaaggcttccttgatgaggagggcatcaagcatgaattctcttcttcctacaccccacaacaaaatggtgtagtggagaagaagaatagaactctattggacatggcaaaaccatgc

SEQ ID NO: 59717 - DNA, 472 bp, Zea mays
  unsure (1)..(472): unsure at all n locations
tactaagcttctaagggagaacacattntaggaataacaaatgttcattttgagaaagacaggatttgtagcgcatgccaagcagggaagaaagttggaacccatcatccacacaagaacatcatgacgaccgacaggccactggagctcctacacatggatctattcggcccgatagcttacataagcatcggcgggagtaagtactgtctagttattgtggatgattattctcgcttcacttgggtgttctttttgcaggaaaaatctcacacccaagagaccttanagggattcttgagacgggctcaaaacgagtttggcttaaggatcaagaaaattagaagcgacaacgggacggagttcaagaactctcannatgaaggcttcttgagganganggcatnagcatgagttctcttctcctacacccacaacaaatggtgagtggagagaagaccgactcttttga

SEQ ID NO: 59718 - DNA, 436 bp, Zea mays
agaagagttatgcagacgaatggcgaatgcccttatatttccttgatggagactatgtctacctaaaggcttcaccaatgaaagccgtatcgcgtttcgaggtttaaggaaagcttgcaccatgatatattggaccttttcttattctggaaagatatgggccagcggcataccgacttcagttacccgaaaccttggctgctgagcataatgtgtaccacgtgtcacaattgaagaagtgacttcggattcccgatcgaaccattgaagtgacagatgttgtccttgaaccggacttgacatattccgagcatcccattcgagtcttggatcataacgacaggattacccggagaaaaactctcaagttttacaagatacagtagaaccaacattccgaagatgatgctacgtgggacactcaagactctttaga

SEQ ID NO: 59719 - DNA, 457 bp, Zea mays
  unsure (1)..(457): unsure at all n locations
tcgggtgacaattctatcagatcttccctagaaggggtttccttctttacaaagcatgaaacaaagggaaggtgttttttcagcgaaggctcaaaaagcggtatgtgtgtatgtttcatgcatcgcaaagaaataaattacaacagcttacatattcggttcaatattacatacatcaaatgttacatagttttgttacaataaaagcctaatcttccttcaattgttccttacatcaagcatttcaaaacattattacaacaaaatctattcttctctaaggactntntctgtgacttcgttcaaaagtttatcgacgacttcatcgataatggagttcgccatgcttataatatccagtgtttccttcatctctagatcagctaggggattgtacggcttcggtggcggggatagttcagttgtagtaagtaaactgttagttcgaagctacata

SEQ ID NO: 59720 - DNA, 378 bp, Zea mays
ttgatcaatactagttccttccaagtggcattctttcaattggtaataatatattctatggaaagaaatgtcaatatgaaggttaaattccttttggcttacatttgtaaattaatgcatatcgtgaattcactgctccatgtgcattaccttacaaggaatttaatgtatgcctttacgcctcataaatgatgatgtgtttgccattcatatatacatatcatcattcattaaatacttccttgtactactaatacctctttttaaagtgttttatcaactagttcttaaaggaaaagagataacaaagaatgaagtcttcacaaatgatgataagaagaatactaaggtgacaccaccacagatagtaagatctat

SEQ ID NO: 59721 - DNA, 469 bp, Zea mays
  unsure (1)..(469): unsure at all n locations
tagcagacagacaggatgggcaaaggggagccccagaactcaactntatagcccagtcagaaggaacggagtccgcgcagaggccgagcttcccaccgattttggtggtctgttggcgcacgctacggctcggggatgacgaaggggatggaccttataggcgggccccagccaccagtgacacaaatacgcggtgcggngagaaaagaanagtgagagggaaaagtgggctcatcggngaggaaagaggggggagatgggctgggagcaatangactcgacccaggtaagggcttcactntttcctttnttctttatttttggtttctattttattttctatttgtttaaatccaaattgggttttgagttatacactcaagttcaaatgcacacatagaaatccagtatgatatgcaaaagcagaaaatttatttagtactttcctataaatntcaaatatataatt

SEQ ID NO: 59722 - DNA, 470 bp, Zea mays
tcaggtttaaagataatctgtcataagagtgagttttttgttttggcctatcagaggaggaagagaatagttatctctctttgtttggatgtagagaaggtagctaccccttcaaatatcttagaatccacatgcattttctgagattaagtaataacgatgggaaggtaattgaaactaaaaatgaaaataagttgagcagctggaagggtaagcttatgtatgtaggtggtcgcctagttttaatcaatttttttctcacctgtctagtgatgtttatgctatctttttttgaggtacctaagggcatatttgaaaaatagactattatcgattgagattcttatgggatattctgtgccaatctaagatcacggaggtctaggtattcagaatataaaagtacaaaattaatgtctgcttagtaaatggttgtttaaattgttaaatgacgatggtttatggcaaaa

SEQ ID NO: 59723 - DNA, 469 bp, Zea mays
  unsure (1)..(469): unsure at all n locations
ngaagccatgataagtagcataggcaagtaatatacgaattgactcaagcctagctacgggtgcataggtttcaccgaaatccaaaccttcgacttgtgaatatcccttggccacaagtcgggctttgttccttgtcaccacaccatgctcatcttgcttgttgcggaatactcatttggtacctacaacattttgattaggacgtggaactaaataccatacctcattcctcatgaagttgttgagctcctcttgcattgccaacacccaatccaaatctcttaatgcatcttccactctgtatggctcaatagaagacacaaaagagtaatattcacaaaaatgtgcgactcgagatcgagttgttacccccttatgaatatcgccgaggatggagttcacggggtgatctncttgaatcgcttgatggactcttgngtgtggcagtctntgaccctgttcttcttg

SEQ ID NO: 59724 - DNA, 471 bp, Zea mays
  unsure (1)..(471): unsure at all n locations
tatgaagattcttcattccaacgtgggctagtcggcgatgccagagccatcccatgttagtcttagcaattaagcaagtgtcgagttcagctctattaaaatcaactaagtatagctgaccctctaacactcccttaaaagctactgaatcatcacttcttctaaagacagtaacacctacatccgtaaaaagacaattgtagcccattttgcataattgagagacagaaagcanattgtaatctaatgaatctacaacaaaaacattggaaatagaatggtcaggtgatatagcaattttacccaattctttaaccaaaccttgatttccatccccgaatgtgatagctcgttggggatcttggtttttctcataggaggagaacatccttttctccccagtcatgtggtttgtgcacccgctgtcaatgatccaacttgagcccncggatggcataaacctacaaacaa

SEQ ID NO: 59725 - DNA, 410 bp, Zea mays
  unsure (1)..(410): unsure at all n locations
tagtgtgatgattaaagaccttgcgtgaagcttataatgaattggacattgtttggtcccaaacccaacaaactagcctcctagggtttaaatgcctaatagtgatagactactaacttangaaaccctagtgattagtgtgtaccgtgaaggaaagttgtattcaagatacaacttagtatgtttctattatgtaactgcatattcataacatcacatgagcattcatgtaaatgtactgtcgtgtatagaaaacatggaagagactgtggttgaagaagttgtcactccagctgagaatcctccagccgagaataacttctacttcgacatttgtggagtagacccaaaacctcctacaacacaaggcaagccccggtgatttacccctttccttggtgtntaaactc

SEQ ID NO: 59726 - DNA, 484 bp, Zea mays
  unsure (1)..(484): unsure at all n locations
tactcagctnttgtatgtgcctggtggccaaccctagaagcccacatttgtagcctagctccaaaagcccatctataaagacacgtctaatgtggttgccctagttcaaatcgaacaactagtcgtgactaatcgttgactagttttctggtcgaactaatcacatcggtgggtctggttaatctcgattagtcggatgacttaaacatcgctccccccaagagaaccaactgcccctagaatggtgcgggtggaaacttagtgttcaaaacagtgtattcctcccatgaagccataacagttggtaaagccgagctacttcacaagattttggaccacaacaaaatcaccctttntgaccaatcgatgctcgagtatctcttcgggtattgccactacatcttcagttattgtagaagttggcaactcagtgaaaacaggtgtataagctggcacacatgactntagttgagaaacatggaat

SEQ ID NO: 59727 - DNA, 475 bp, Zea mays
  unsure (1)..(475): unsure at all n locations
tagcanatcttagtgcacaagagctaaanaatgagtgagtggtagcagttggccagagagcgtatcaaatgagtttgcggtatggccgtatttatacgccaagtgcgttgaanattgaaagaccccgcttgttagtgaatgttgctattctagcaaagggaaggtgttttttcggaccttcggcgtaaagccttcgtccatgtcgcaatctagatttattattttaaacaaattaatattgcgaggggctactgttggggaccttcggcatccgaaggtcctcaaaaacaggatttaacagtatttctggagtataatgtgtgaacaggtatcttcggattcaagtcagcatcacagtagaccagagtaatacgaaggttgatacagagccgaaggtgtgagcaagaaagcttctgcgcggtagcaaaaagtgaaaccgacttatagatgaanaggctatttaaacctcgacaga

SEQ ID NO: 59728 - DNA, 481 bp, Zea mays
  unsure (1)..(481): unsure at all n locations
ctaggcttataatcgtgcgttatggcgctcactgagccccagatatgcatgggctaatgacagacagatgtgaagaagctcatgctttatgtgagagcaccatgcctaatactaatactacatggtcggacagtgccggaaagcgacnacaaaatggacgcatgcaaactgcacgctttcatggaggatggtaagtcgacgatggtcctgcatcccggcttagaccttgttcggataatcctcgtaccaatggactggatgtgattggaaaaatttaagaagtttgactagcttgcgatgtaaacccatccaatttcactcaatccatgtggattgagagctaaccgaacaagctattaaacggcgcaccagtatgtgccatccacagagtaacttgcttcagctgggtaaattctatgcctccctttgacttgcatttgatctggaagatatatacggaacaacacatntggattcttcc

SEQ ID NO: 59729 - DNA, 478 bp, Zea mays
  unsure (1)..(478): unsure at all n locations
gggtcattntattgctaactgtcccgaanatgatagtgaccatgagcatgaaaaaaatgggaagagagagaacaaaaaggtttacaagaaggccaaaggcgaagcacaccttggaaaagagtgggattcggattgctcttcgtccgactccgacgacgaaggactcgccgccactgccttcaacaaatcggctctcttccccaacgagcatcacacttgcctcatggcaagggaaaagaaggtaatcactcgtaatgctaatacttatgattcttctagtgatgatgaatctagtgaagatgaaattgattactctagtttattcaagggattggatagaactaagatagctaagattaatgagttgattgatgccttaaatgaaaaggatagaatcttagagaaacaagaagaccttntatatgaagaacatgantaaattgttagtgcacaaaattcacttgctctagaagttaaa

SEQ ID NO: 59730 - DNA, 469 bp, Zea mays
  unsure (1)..(469): unsure at all n locations
aagctcgtataatactcanagtagacatatataatgctacatgagcttgtacgtcataattggtcatattagacaatgcaggtttgcacaagttgatgcacacataaaacataaaatattctcctcacatatctctactagaaatatgagaccacttctagaacatcgaagtactattcaacaaaatgtaaacaatcaaaacatagttttataaaatgtggcttgtctgtgtagaataaccaaacaccaagtaacatttctaggcaccccatttattacttgtgaagtgaaatgaacaaaagcaaattgacataagattaacgaagaaaacaaagtacatgtaatgtttgttgcttttgatatactcatataagtttacaacaaactatgcacacagtacaattcaatgcttgaggaagncaaatttgtgcttctaatcattattttatatgtgatactataaataaat

SEQ ID NO: 59731 - DNA, 470 bp, Zea mays
  unsure (1)..(470): unsure at all n locations
tgttgccaatggagaagcaaatatccttgaagtcttggctgtcttactgcttgccgntgtcaactgttagttcagacggtactccgaagcggcaaacgatattttgccaaaagaatatctggccagtttttgacgttattgtggaaacagcccttgcctcgatccatttggtgaagtactcgacagcgacgaaggcgaacttaaggttcccctgagcggtggccatgggcccgacaatgtccaggccctagcgctggagaggccatgtgtgggcgatcagctntatatactgcgaggggctgcctgaccgaggagaaaacttctggcaggcttcgcaggaccttgtgacccgatttgcggcgcagatcattgcgggccagtaaaaaccttggcggatcaccttatcagctagggcccttggccctgcgtgtgagccgcacgtgccactgtggactttccgtaggatctgg

SEQ ID NO: 59732 - DNA, 474 bp, Zea mays
  unsure (1)..(474): unsure at all n locations
gcttataagggagagcacattntaggactaacaaatgttcattttgagaaagacagaatttgtagcgcatgccaagcaggaaagcaagttggtgtccatcatccacacaagaacatcatgacgaccgacaggccgcttgagctactccacatggatctattcggcctgattgcttacataagcatcggcgggagtaagtattgccttgtaatagtggatgattagtctcgcttcacttgggtgttctttntgcaagaaaaatctcaaacccaagaaaccttaaagggattcttgagacgagctcaaaatgagtttggcttaaggatcaagaaaatcagaagcgacaacgggacggagttcaagaactctcaaattgaaggctttcttgaggaggagggcatcaagcatgagttctcttctccctacacgccacaacaaaatggtgtagtggagaggaagaatcgaactctattg

SEQ ID NO: 59733 - DNA, 456 bp, Zea mays
  unsure (1)..(456): unsure at all n locations
tgtgattttactaatntaaagagcacaatatctacttatgaatttcatgaaatagcttaaaagagatggcattagtaacacaagcaatagtttcctatttagcaacctctagtatatgaatgacaagaaggttactaaaataaggaaacctcatgatatgaactaaattacccttacaagcatcatgcataacatcaattgaaaaaagatgaaagtagcatgattatttaattaagtttatagggcaactctaattcataacatggtgagtgattaatgtagaagactcaaaaccaatttaaacaagaatgaatacatcacatagtattggtttgatcttctttgaatgttgaatggcacactccatttgggaaacacattntcatgttgtgagactacataaacacttagatagaaacattagtctcacaactctagtcatatagagaattcccc

SEQ ID NO: 59734 - DNA, 472 bp, Zea mays
  unsure (1)..(472): unsure at all n locations
ngagaaaggaaaaactgcagcaagtgttaagctctataatattaatgttcccaaagctataaatgaagaaatcaacatgaacgaggaaaaaggtaaaaattcaattagtcatgttgtttgtactaatcatctctccatgtccttcaagcacaaaaagggaagaggaaaaaggaggtgtttcaaatgcaaggagataggccacctcatcgcatcctgtccgtacaaagacaaggatgaagggataagaagttgctttggatgcaacaataaggaccactttatcacttcatgtccggtcatgaagaatcaaggttgtgcatcctccaagatgaccctctccaaggaaaatgacaaacagcaagcgtcatgtcaggttgagcgacgcttctgctacaagtgtggtgagcacggtcatatatcanaggtatgttataaaggtaagattcctaaagaagtgaatgtgtgtcaatct

SEQ ID NO: 59735 - DNA, 469 bp, Zea mays
  unsure (1)..(469): unsure at all n locations
tcggacaaaatgttatgccactgtttaggattatcatatatcttctttntatcaggctaatcaatgtcctattactagactcggcctgcccattggcctgagcataatacggagatgaatcgagtaacttaattctatataattcagcaaactcatgtacctcctttgacataaaagaagctccttggtctatagtcaaagtctggggaatgccgaatctatgaataatatgctcagttatgaactcaattacctccctatgtgtcatgttctttagagcaacgacttcagtccatttagtaaagtagttagtggcaactaacacgaaccgatacccttttgatgatggaggatgaatctctcctataaagtccaatccccatcctctaaaaggccaaggcttgatgataggatgtaattcggctgtanggaccaactgtaagtcaccgaatntttgacatacttggca

SEQ ID NO: 59736 - DNA, 460 bp, Zea mays
ggcaaccgcgcatcgtaatccaatctagtgctgaagactcttaattcgggaaggagaacagctagatgcagtaccaacttaaacatgcctctaggataaaatgtaaaagccagaggctacttaaacaaccactaattgaacaaacacttacaagcgcaatctcgatgaaaagcttagctttgctcaatctcagatctgcaaaacagcaaaaaaacattgacatcaaacacgaacaggtgaacaacagaaatcaagaaaatcacacttgtaattagagaaaacacatactccatccattatattctcattaggtattagagatacaactttgaccactttcatgtcatatttaattataaagataatatttatgggattatgaacttacttttcaaccccacatggctcttctatttgcagactaaacaatatcttataaactgatgggtggagtttaaaa

SEQ ID NO: 59737 - DNA, 464 bp, Zea mays
  unsure (1)..(464): unsure at all n locations
tatgaagattcttcatcccaacatgggctagtcggcggtgccagagccaacccatgttagtcttagcaattaagcaagtgtcgagttcagctctatcaaaatctactaagtatagctgaccctctaacactcccttaaatgctactgaatcatcacttcttctaaagacagtgacacctacatcagtaaatagacagttgtaacccgtttgacataattgagacacggaaagcacattgtaatctaaggaatctacaagaaaaacattggaaattgaatggtcgggagatataacaattttacccaatcctttgaccaaaccttggtttccatccccaaatgtgatngctctnctgggatcttggtttttctcatacgaggagaacattttctctctccctgtcatgtggtttgtgcacncgctatcgatgatccaacttgagcccncggatgcataaacctac

SEQ ID NO: 59738 - DNA, 449 bp, Zea mays
  unsure (1)..(449): unsure at all n locations
ctgtaccttctctatcggtgtcctaccactctaggtctatcccttgatctaggtttctatggtctgaagatttgtgattntctccgcacttgtgttgctatccccgtgtcgtaataatacgagatgttttaagcggttgaacattacggtggtgtaatcagagtaatctgttgctgttaaggtgcattggtgtatgaatggtctctacccgagtagaagaatcagaccattcgggattctatgatcatagtacattntttgcttgaaaagatgagcaacgccgagtactttnttatacagaccgatcatatgatagggttggacaaaacatttgtggatcttgagctcgctcggcaattttgtcacaagctgagctagattnttagggcaatttgtcacaagctgacctagattttaactcgttagctcanacgagcaattatttgtca

SEQ ID NO: 59739 - DNA, 480 bp, Zea mays
  unsure (1)..(480): unsure at all n locations
cagcttcgatggtatagcgtatctgaagatgaaggatcgaaccgacttaaagatataatgaccttttagtccatgagggtctgagtcatttgtttaaacctttataaggggtatgattgtaattccttacaggctgtgtcctgtgcctataaatagtgaacagtattcctctactgttcacacaatccggtaattgcaaacacattgctctggaattattgttttctgccaaggcanaggtataaatatgcctaaaacattatgttttgatatttaaattcatataataaaatatgtgaataatgttatctatctatgggatatcactctctaatacttcatattntatattttatttcatattggtttataagtctgatcacgaaggtatgaccttcgtgatattntgttcatggtcttcgtccgaagttcattaaatccttggggagataatgcttcagcggacgaagggcattaaca

SEQ ID NO: 59740 - DNA, 475 bp, Zea mays
  unsure (1)..(475): unsure at all n locations
tgccttcgcctcagtataccacccgcagtccaacggagttgtggaacgcgcaaatggcaanaatttcacagctgtcaagaagatgctcctcgacaataaaaagggaaagtgggccgatttgttacctgaagtggtctgggcactaaacacgactgagtgcacggcgactgggttcacccctttccgccttctatatggatcggaggccatgaccccgcaagaaataaaacatgggtccccactgacagtctcgtcagctgtccccgacgtggacgagcccacttcgaaggatctcatcgatggagaccgcgtcttcgccctacaggctctaaataaatactaagcccaaacaaaagcatggcgtgaccacgcagtcatcccgagggaattcagcgaatgagacctcatactcgtccggacagctcggacagagtcccggngcaagctggagcccaagtgggagggcccttttatc

SEQ ID NO: 59741 - DNA, 482 bp, Zea mays
tatcagcagtacaagaacaaaagagagaaggctgcttcagcggatcagccgaagcctatgctcctgtgtgaagatatagcagaccaaaaaggtactgctgggatctcagttatctcgtgaacaagaaaagactctgctaagatttttgttcaacaacaaagatgtcttcgcttggacagctaacaatctctgtggtgttaatagagatgtcattgagcattcactcaatgtggatccatctttcaggccaagaaagcaaagacttcagaaaatgtctgaggataaagccaaaggtgctcggaatgaagtaaagagacttctcagtgctggtgtcatcaaagaagtaacatatccagagtggctagctaacagtgttatggtgaagaatgctaatgggaaatggagaatgtgtattgatttcacagacctcaacacgacatgtccgaaggatgagttccctttaccaagaatagactcccatg

SEQ ID NO: 59742 - DNA, 475 bp, Zea mays
  unsure (1)..(475): unsure at all n locations
tgctgagctngcttgatgtgcaagggttggaatctgccaccacgcagggtctgattcgcttctgacagcactgtccttcaagaagcttaaagaggcatacttcaacgggttaactgagaaatatgctggtgtgttgtatgggcttggctttgagggtgtagagaccacctctgctcactgagtaatggataattaaataaaagatgaactatttatgaaaatggagaaatctgtttggtgtctttgtctgacaatttcctgttgcttgcgctggtgaaggtattattttccctctcagttntgatttcccctgcaagttaccttcagctaagctgttctatgatctagattgtggcttgatggaatgtgttgttgaagtttctttgaggcctgtattgatacactgatcaccaagtcaccaactgaagactcaaacattatcgaactctgtaatgctatggtaatcaagtactct

SEQ ID NO: 59743 - DNA, 469 bp, Zea mays
  unsure (1)..(469): unsure at all n locations
tctanagggagaacacattntaggattaacaaatgttcattttgataaagacaggatntgtagcgcatgtcaagccgggaagcaagttggaacccaacatccacacaagaacatcatgacaactgacaggccacttgagctactccacatggatctattcggcccgattgcttacataagcatcggcgggagtaagtattgtcttgtaatagtggatgattattctcgcttcacttgggtattctttntacaggaaaaatctcaaacccaagagaccttaaagggattcttgagacgggctcaaaatgagttcggcttaaggatcaagaaaataagaagcgacaacgggacggagttcaagaactctcaaattgaaagctctcttgaggaagagggcatcaagcatgagttctcttctccctacactncacaacanaatggtgtagtagagaggaagaatcgaactcta

SEQ ID NO: 59744 - DNA, 464 bp, Zea mays
  unsure (1)..(464): unsure at all n locations
tgaccccaanacatgggcaataacgcaatgtagtcaagcactaaccaactagttgtcaataagagacaaaaatggcttaacaccactagctaacgattagagcataaactaagtatcagagcaactcaactagagtctaaacaactcaaaaagcacctagtccaactagaggaggcaaagactcaaaataactagcacaacacttcaatgcaaacttgccttgaacatgtgctctctcccaaatgtatgtatgttcaactctatatgtgtagctattctctcccttgttggcacatgcacacatcatagagccaaaagctgcaactcatctcaaaatatgttatgaaatgcataaggatgcaaaaaatgcacgagcttcaggagtagatcatttagaatgaagagatactctgagtgataatatcacatgagtatagaaataaatctatgtgctagcanacatg

SEQ ID NO: 59745 - DNA, 467 bp, Zea mays
  unsure (1)..(467): unsure at all n locations
tcttcaccatgtgatcacgggtatctngagaaggttgagcgatgcatttccctttaagttgggtcaagctcatctttagcctctcattttcttctttgagcttttgatatgtatcatcatttggtcctgccaattttagctcaaaggaagatttgcttggtgacaaacaacaagcattagcacatggtaatatagtatcaatttgaatacatgtgcacgaatgagattgttgggattntaagttctctattacaatctcatgagcaatgtttaatatgatatgattatccataagattttcatgagagcatagaagcatatcatatttatcttgaaaagctagattttcaacttttagcttttctacttggtccttgagcaaggtattcctatttactaattgagcgatacaatgtgaagcgttatcttgctcaattgaaatagtttcatacctttggaccaaatca

SEQ ID NO: 59746 - DNA, 446 bp, Zea mays
  unsure (1)..(446): unsure at all n locations
tcaccgtcaacaagtattccatcagtagcacgaagtataatgtcataggcactagcgagtatcaccaaggtttcagggctgtcatggttcctcatgagctccgctataagcttcactatacgttggttgactctccacatcttctggccttgttcgtcgtctctagcaatccaaggctgcaagtccttctcggcctgcgaaaattctagaaacgtgaataggaaacgggtgcatattcacataggcattgtagttaaaacgtgtttcgaaagagatctgtcagaaacaaaaaaaactaaactaagaatgtttgctttgaaataaattaaccagaaaagggtaaaaagaatttacttgaaataattcaaacaaaactcanaccaaaattagttatgaccaaacgtacgaatatagcaatatcttgacctggagaacgatagcagctg

SEQ ID NO: 59747 - DNA, 424 bp, Zea mays
  unsure (1)..(424): unsure at all n locations
tattntcggggtcgtgcccgggcctcagttntcggcccgtgctccatgggcgaacccctcattttcggcccagacgcaaggccgaacagccatgccgcccgtcgccttgcgcctccgtgccgttttccctccgttccgccatgcccttcacccaagacatacatattaccttcggtgtctttccacacgcttggacttagcttatttccggggccatgcccgaacctcggttttccgcccctgcgccatgggcgaacccctcgttttcggcccaaacgcaaggccgaacagccatgccgccccgtcgccatcctgcccttcacccaaggcatacgtcgcagcttcggtgtccttgcacacgcttggacttggcttttttttggtcgtgcacgaacccacggcggtcttcggccacgctgcgcct

SEQ ID NO: 59748 - DNA, 413 bp, Zea mays
  unsure (1)..(413): unsure at all n locations
nttccttgtcgtcatcaaccttgacatagaaccactctgatttccagcctgctgcccacttgcttcggtagctaattacagggaacttggtagttttccgataggcaaagttatagcaaccaaaattatcgtgcaatccatcttttctagcctttgtttgataatgcagctcgtgaacccggcagaagctgtccgcaaatggttccactgcttggcttcggagcgcccagatataaacaataagtctaacgatagcgttaggggtcagctgatgaaaatagataccgaacctcttcagcacctctccaatgatcccatgtagggggaatcttaatccagcctttaaaaagctcttgagaataacaatttcatctttctccggttntggggtagtctcttctcccccgaagcgc

SEQ ID NO: 59749 - DNA, 381 bp, Zea mays
  unsure (1)..(381): unsure at all n locations
tcggactgctctctgaagaccctttgatgtggagcatactggtctccttctggctgctggccttgctgtaacggaggtggaggctgatggctgtgccaataagcttgaggttgactcgccgaagcaacagaaactgcagggtggttgcccacatactctgggatgtagggcgagtgatacgaaactgtatgcatgacctgcttcagctgagcttgttgtgctgcggcttcggctatttccttttgcttctggatggtaacatgacacatcctggtggtatggcccttgttctcaccgcagaataagcaaaagattcttctctgttgatcgccanatctccctccgaagcccctggcacctctgcctcttggagctggtggt

SEQ ID NO: 59750 - DNA, 448 bp, Zea mays
  unsure (1)..(448): unsure at all n locations
ccttgaaactcagcttgataatctacttcatcatcactagaatcctcatcactagaagtagaatacttangggtttctcgaacacttacctttttctcttttgccatgaggcaagtgtggcgttcgttggggaagagagaagatttgttgaaggccgaggctgtcagtcctttatcattggagtcggatgacgagcagtcggagtcccattccttgccaagatgcgcctcgcctttagccttcctatagctnttcttctttctcttcttcccatgtctttcttccccctggtcattttcattatcgggacattgagcaataaaatgacctgtcttaccacatttgaagcaggagcgcttttcccttgctttattcttggtggggtactccttatgtccttttaatgcgggcttgaagcgcttgatgataagcgccatctcatcttcat

SEQ ID NO: 59751 - DNA, 453 bp, Zea mays
tatatacgatagatataaaaactctttgtgacatggcaatatttttattgatataataaaagagaagcgtgcaagattcctctaattctaattggagccccacacaaaaaatgctcatgtgaaggacaatctcttggtcaagtaattcagtggatagctctgggccttcttcacttgaaagtgatgcttcggttatggactcttccaaatgtttgtcatcctctccaatatcgagtttatggtcaaaatgttgtggactttgttcccttcggaatgtatcaaccacaccacaacataattggtgtgatctcacaagtcttacaactcttcctggtataactatcacaacggtgtgcgcaagcactaaggggtagaggtgtctattcctcactattaatcattagacaaaatatagagcagactttaataaaaaggtctaactaacctaaacac

SEQ ID NO: 59752 - DNA, 431 bp, Zea mays
tgctgcgtgcatgtaaaatcggcgccgcatctgtgaacctgtgaactgctgtgtgagcctctgttgcttgtgccactcctgagctgagaacatgcatggatgaacagttctccctgcactttggtgaggcgtgtacagtcatagagtaggagattaagactagctcgtgcgaggtccaaaatggccaaactgaagagagaatgtccgacgagcgagagagagagaagcacggacattgacttggagaggagaatctaatgaacaatcggcaggatttgcgcagagagaaataaaccagagaaggatggaaaaaaaacgcctacgcatcaatcatcatcagacggcacatggaatttagcgtggaacgaaggggatgaaactgaacaaacctcgtcttggccgccgcctgcatggcgatacccctatgttta

SEQ ID NO: 59753 - DNA, 471 bp, Zea mays
  unsure (1)..(471): unsure at all n locations
tcggcatctttatttatctcttcttcctgagcccctggcgttcaatcagcgatgaagtctgctaacgcctgtgactgaattgaagatctatgcacataatcaatggtgaatacattaagctctgcagcccattttccaattcttccagtagcctctctgttcctcatgatgtcctttaaaggttgtgacgaaagaacaattatgtggtatgcttgaaaataatgccgaagctttctggaggccattaacacaacatataataccttctccaattttgtgtaattnttctttgatagacttagaacttcagagacgaagtatattggagcttgctttttagtctaaccatctagcttctcctgtaccagtgtcgcacttactgcagaatgcgaagcttgcacatataagagcaatggagcccctggcgcgggtggagttaatggtngtaaatcaatcaaatattggttcaac

SEQ ID NO: 59754 - DNA, 449 bp, Zea mays
  unsure (1)..(449): unsure at all n locations
acatgtgctaagcggcgatgccacagacagcccatgcttgtcttagctattaagcatgcgtctagaccggcctcttcttttgcaaaatcaactaaataaagtttgccgtctaatacacccttaaaagctagtgaaccatcacttcttctaaagacagacacatctacatttgtaaatagacagctatatcccatatgacataattgactaacagatagcagattatatccaagactctctactaaaaatacattagagatagaatgctcattagaaattgcaattntacctaacccttttaccttgccttgattcccatcaccgaatacaattgaatcttgggaatctttattcttgacgtacgaggtgaacatcttcttctaccccgtcatatggtttgtgcatncgctgtcgataatacagctggaacccccggatgcataaacatg

SEQ ID NO: 59755 - DNA, 465 bp, Zea mays
  unsure (1)..(465): unsure at all n locations
ctgagctcgggccttgngctacgtggtcgctggtgtggtgctctggcgcgatcgggtcgcgaggtgttctggtgcggtgcaaggtcctggcagtgtcctagtcgctcctggtgggcggtcggcgttggatcctgccgtgggggtcgcgctgggcgggtgtggcggctcggccacagggcgggtcgctgggcgcggtcgggcttggcaagggtttgcgtctggtctcgacggctgcgcaacacggtctcctgtgtgcggccagcgcgtggcgggtcgcggggcaggggcggtcgggttcatggcgtccgcgcatgggagaaagggagaggaggagaggtggggccgggtgggagcatgcggcgacgaccagagggaggagccaggggcggtgatcggtgtatgtcatggaagggcgacgactggattatgtcaggggagggtgcgcgcgataatgggcccctggtg

SEQ ID NO: 59756 - DNA, 465 bp, Zea mays
tcataggtactacatcgcaatccgcataatcagaatacataccaatggagaaatgcactcgtaccatgtgtgttaccttaaccttgcctgaatcattgatccactcaatgtggtatggatgtggccgtggacgtgtggtcaagccaagcttcttgaccaaatctgaactcaccaaattattgcagcttccaccatcaataataacacgtgcacaccgattctcgatggagaagaaagtctggaacaaattattgtgttgctacttctctgatgattcaggctgagaactaagaacacgctgcaccatgatgcttcgaaggttcaccgtagcatcagcaccaagcatggcatcatcattagcagcaacatcactggagtcatcatcgtcaccctcaccgtcagaagcactaatgtagccatcatccgtagcaatgtatgttcgctctcgggcaatccttcttcatg

SEQ ID NO: 59757 - DNA, 463 bp, Zea mays
  unsure (1)..(463): unsure at all n locations
ttatttacttcctacatgctnttaatgtcttccttttctgtggttgatgccaaagggggagaagtttatggaccaaagcaatgaaaactttatcaaacaccaaacaccaccaatttaaaattttatatctacaaatggcttttcaagtggttttggttatttggtccaaaaataggaagtaagtgaattatggagttagggggaggcttaagtccataatatcacattgtggggacaatcatgcatcttagcaagtagattgcacattntaattcaaatacttgtattatttgcttgctttggttgtgttgtcatcaatcaccaaaaagggggagattgtaggaaaatggaccccgggccatttggctaattgagttttggtgtttgatgattaacacaacttgtggactaatatgttngctagtggttataattatagttcacaggatgcgaagagaattga

SEQ ID NO: 59758 - DNA, 471 bp, Zea mays
  unsure (1)..(471): unsure at all n locations
tttgcatgcaactntagccgnntttacctctgcatgcgcgtttagtctgcatgcttttagtgttacgcattaactgcactcagctgcaagcgggtgggtgatttctcagcatgcatgcacaatttaaaatgctcgcaacatgtggaagaggttgacaagtatatgggatatggaacagcctatggaggtcccaagaaatgtggtttattaaaagatgctgaagatcatttttaaagtttttttaaacctcactacacgcatattatagttctaattcatatttttgaagattaaggagagagagcccctactaagatcttattagaaatgagaaaagaaaatgttacaactaagcctagttacagatcgtaatccaaaagatctaattatgcagtttacaagcaaagaagcaagaagaacaactcttatgtctgccacgacctcagccaatttgggatagaaatgtcaaaa

SEQ ID NO: 59759 - DNA, 460 bp, Zea mays
  unsure (1)..(460): unsure at all n locations
tgcggtcagagacctctttcattggtggccgccccaacttactgcgcagatgattagaagatagaatcaagtttcatatgcaaagctatgatcccccaatgccaccaaaacatgacaattaagtacctctcgttcttttcagatccaggtcttccaccttttattggctttcttgtttctgcagtgaccagtttttcttttggcattagagaacaccccttgacatgcatagcaccccttccactcctcccttgacgacgaacaccaccatcttcgagctcttctttcaaaggaatcctatttttatttgacaaaaatattaatcccattgcattatgggctgtatttgcaccctcgttccccacttcaccactatgcatggntttctccttggacttgctttcagccacagccgatccctcactttctgacaacccagcaggagatgggatgctatcca

SEQ ID NO: 59760 - DNA, 433 bp, Zea mays
  unsure (1)..(433): unsure at all n locations
tcggccttcggaggccgaaggttgaaatgaatgaagctgctctttaatgccagagggccttcggcgttatctgttcttttattggaacgagagacttagtacaagagcatattgccttcagggtatggccgctcgcggagaaatgggaaatgccacaagaaaccgtaaaagaggccgacgaaggtggacttatcaggttgaagtacacttttaaatttggagataaattcgttgagccagatgatgactggctgaaaagcattgaaaatttaagtgatgaactgcttggggcttactcgaaagccgaagacactgcaatgtcagcagccttcggaggccgaaaaaagaagaggctgaatcgggtatttgatgcaatcgggtttgtctaccctgactattgctatcccattcgaaggcagaagaganaaaacac

SEQ ID NO: 59761 - DNA, 420 bp, Zea mays
  unsure (1)..(420): unsure at all n locations
catggatggatctattacctcaactatgtatattccaccattgcctgatcatgnntctagatatcgcggttcactgaaaaactgctgaaagatctggcccaagcacattatgaataataaatgacataactcatatgggttccaaaaaatctatcacactctcattaatatgggagtctatggaagctattactataaatagctagacttatgttccttctacttacatatctccacggctacacggataattgattaacaacttagatggactaataagtatttatgttgagatacacaggtgattaatccacaagcacactactgtgagctatttgggccatggtggtgatgacggttcgtgatattgatatgctcatctaatgtgatgaactacctattgcatatgaatacatggct

SEQ ID NO: 59762 - DNA, 469 bp, Zea mays
  unsure (1)..(469): unsure at all n locations
ctcggntgcgttgttagaggccgggaatagcagctggatagcattcttgaggtgctcgcctccaggggcagtgaagagaattcttgctcctgctccttgcagtttcagcgagccatcaaaatacattcgccatacttctgcggtttctgggttatccggtacttgctgttctgtccactctgatacgaaatcaaccagtgcttgagttttgatggctgtgcgaggtcggaactcgatatcatgggatcccaactcgcaagcccacttggctattcggccaatggcttccttgttgtgaagaatgtcccttattggaaaaccagtaactactatgactctgtggctgtcaaagtagtggcgtagcttgcgggcagttagaagtactgcatataatagcttctgaacttgaggatactttntcttcgatggacccagaacctcactgatgaagtagacaggatgttgtacc

SEQ ID NO: 59763 - DNA, 479 bp, Zea mays
actaagcttgacatgatgaaatggcgctcgtcatcaagagcttccgccaaatcctatttataggagagggaaagactacaagtctcgctccaagaaagtttgctacaagtgtggtaagcccggtcactttattgcaaaatgtccattatcaagtgacagtgacaggggcgacgacaagaaggggagaagaaaggagaagaggtactacaagaagaagggcggcgatgcccatgtttgtcgggagtgggattccgacgaaagctcaagcgactcctccgacgacgagaacgccgccaacatcgccgtcaccaaagggcttctcttccccaacgtcggccacaagtgcctcatggcaaaggacggcaaacggaaaaaggttaaatctaactcctccactaaatatgaatcttctagtgatgataatgctagtgatgaggaggataacttgcgttccctttttgccaatcttaacatggaac

SEQ ID NO: 59764 - DNA, 474 bp, Zea mays
  unsure (1)..(474): unsure at all n locations
tgnganaccaatactcttcgacagagtactgataaccttcgtttcaattcggtctctgaggcatcctaagcttttgtcgtcaacaccaccgaagagcaatgctcctggttgatagccgcacgatattgcgtaatccctcagctcttccttctcagccttagacagcttttgaccaattatgttttgaaaattaaaatccttttcctccgaagtatcttcggcaatctccttctctttcccgggcactgtggccagggtatcctcggcagctgtagcagcttcttccgcagccatgttcaaaagcatcttatcaatatcgganaaagtgccctccagatttgtatcttcgatcgatttagctntggcagttgcagcttcgacgggggcatcttcggtagctgcagcgtcttcggtagctggtggttttgacgccgaggccggcggtggtgtttcttcaatggctttcataacagt

SEQ ID NO: 59765 - DNA, 470 bp, Zea mays
  unsure (1)..(470): unsure at all n locations
acactatgaaactaagctngactgaccacagggggctggccacaacgaagtgttcactgtggcgcggataacggatttgggggaaatgcgaaattgggaggctttggtggatgatcaggggtgcgagttggtgcgccggtgcgtaataacctagcggagctcattggggtagcaatttatagacttcaccggcggtggcatccaatttgaagaaagcgcgctggcggccggagagagggaaagttactggcgcgagtgttatcgtggctttcatcatggcaaagctttcggcgatggatggactcactactatggttcactgcgacgtgttaaagctcctaggcaagtggcgcataggcggcaagcggccaacgccggcgaggatcatctcggtcggccgcaaaccaagtgggtacggtgaactatccagtgaccgggtccgaccttatcttgggcgctagatcttttag

SEQ ID NO: 59766 - DNA, 474 bp, Zea mays
ctaagcttctacatattcatgataaatcttaatcataagcaggataactttctatgaacaactatggataaccatgatgtacatagccttctagaattccctacactaatcatgataagtcaaaaagcctagatatttttagaccccctagaactatggtgacacgcgcatggtgaggtgttcccccatgtaaggtggaggtgacacatgcatggtgcggtgtccccaattaatgtggaggtgacacatgcatggtgaggtgccccccattaaggtagaggtgacacatgcatggtgaggtgtccccccatgtaatgtggaggtggcacatgcatggtgaggtgtccccctattaaggtggaggtgacacatgcatggtgaggtgtccccccatgtaaggtggaggtgacacatgcatggtgaggtgtcactcatccatagcttctaagtgcctatataaggatgtgccccctc

SEQ ID NO: 59767 - DNA, 460 bp, Zea mays
  unsure (1)..(460): unsure at all n locations
attaattggtacattgactntcaccatgcactcccaagtgcgcaagtatgaaagtgatgttttctcgcaacccacttctcataaggggttttatcttctttgcccatagggattctattcagaacatgacatgaagtcaggactgcctcccccaccatgccttagataaaccacaagtgtctaacatggcattcaccaggtcagtcaacgtacggtttttcctttcagcaatcctgtttgattcgggtgaatacggaggcgtcctctcatgaataatgccatgttctgcacagaaatcatcaaagactttgggaaagaattcgccaccacgatctgatctaagacgtttgatctttctctctagttggttttcaacttcagccttatagattttaaagtagtctaaagcctcatctttagttnttagcaagtatacatagcanaatctagacgcatcatc

SEQ ID NO: 59768 - DNA, 453 bp, Zea mays
  unsure (1)..(453): unsure at all n locations
tatccaananannttggttattttggagtcattaaataatttctataattccagaggtataggtttaagctcttttaaatactaattaattccttgtttggactaaaaatcctagaactgtttttattaaatactagaaaaatctagaagtccaacaaaattagtctcatatttttaccatttttctataattttctatggatttcctaagtctggtagaaaaaagaaaaagagaaagcataaacagtaatgggctgaaactaccccaagtcggcccatgcacagtgaaaagcgcgcccgcgcgcacctgcggcgtcagatttgcagagaagaccctaacgatttgaaaaacccttaaagagtctgcaacgctatttctctgtgtcactgacaatcgcaaacagaccctccccttttctatttcttcacaagtcgagacccccgaccatggac

SEQ ID NO: 59769 - DNA, 409 bp, Zea mays
  unsure (1)..(409): unsure at all n locations
tanacatgtttaaatctctaaggttctccttntatttattttattaaataaataaatctacatctacattagttcctacttaaccacaaaaattagaatgtgcagacagtaaatgagactattttatttaaacagagaataatcctatgaacattttgcaatttgaatcactaaatttggagttcatatgcaaaagttatgaaataaacaagtttggagattcacaatatgaaattaggtctaattctttgaatatttaaaagtccagggttaaatctgcaagattacaggggcctgcgcgcgaaaaccagggacggtgggttgatttccaataaactgagggtctctttaataaaactaccgtgcgaaggggtatcgggtgaatctaaccgtcagatcttaaaccaac

SEQ ID NO: 59770 - DNA, 393 bp, Zea mays
  unsure (1)..(393): unsure at all n locations
ntgataccaattganagtagcctagaggggggtgaataggctacacctgatatttttcactaaaaacttcgagataggttaaattaaagttgcactggtgcaaaccggttcagttgattttgattacaactgaacaagtttgaacctgctcaacttagattagataatctgttaaacaaatatgaagtagtgaagaattttgctaaagacttgccctacacaaaatctactcgaatagataatatgaaccaaccaacgaatttaaagcgcttaacaagaacacacaagaacacgcaatataacccgaggttcggcaaccaccacaaaggtgtcctactcctcgttgaggagcccacaaagggctgggtctttttgcaaccctaattcttcaca

SEQ ID NO: 59771 - DNA, 460 bp, Zea mays
tcaagaatttccccccgccacgcggtcgaattccgctaggttcgttgagattgtcgcgccatccgcggggagggtgaacctagccacccgatcacacgcacaagcgaggagggagatcagtcaagcggggtccacagccaacgcgcaacggcccctggtggccggaccgattttggtgcgatgtcttcgccggctccctcgtaacaaacaggacgagcttgatttggggtaggagatgggactgacgagatggccctacgtgtaagcgacagcgcatcagcaagcgtgttaccagggatggggcggctgacgcgccgggcccgctggcaagtgacacagtgaaaaagaaaaagaaaagggggcgcaagtgggccggcggggtgcttttcagcccagcatgcacagtgaaggcgcggaaaggggaagatgggccataaacagatatttcagcccaagtgac

SEQ ID NO: 59772 - DNA, 467 bp, Zea mays
  unsure (1)..(467): unsure at all n locations
ntaattgtgttgccatcaatcaccaaaaaggggagattgatagctctcttgtgggttntggtgtttggatgacaactcaattaaaggactaacaagtgtgctaagtgttgaacaggtgcttaatgtaaaactaacagggttcaacataagtaaagaagtgtgatggtccaagaactagattatggatacatgatggacatcacaagaaagatggacattgcataaagtaatactcgggtgcgtagctcggagacaactgatcaagccaaggacggaggcaagaagagcttcgaggtaccaagtgcacgggagaaggtcaaggaggctgaggaacccaaagccaagggtgaagaagaaggcttgcanagtcaagggtgatcgagttgagaacagctacngcacatcaaggatcactacataaggacgtgacttacaaccaatgaggtaacaactacagttatgtggtg

SEQ ID NO: 59773 - DNA, 465 bp, Zea mays
  unsure (1)..(465): unsure at all n locations
ggccaagccctcggacccggccggacttcaccggaggcccgttatcgacctcaccggacttcggtcttccgccgccgcgtgtggaccgagctatccagtgagtctccgaccaattccttgcgctcatgtcttctctggcatcccgtggacctccctgacccatcttattgaactatctcgccgtgaccaggccggtctcctcgccgccgacgagcatccccgcctgcgcgcgtggaccgaccgactccggccatctccgacggcgtcccgcacaccgttgtgatcgccgagacctcccctacgtccttgaccacttcaccggagcaatctcgccaccggtaagcccctccgccctttcttccaccgcggttactgtttaaggtagaagaaggacctcgtgttaggatntgtagaacccgaggggttttctgtaacgtcagtgactcatgtgaatagtagcttaag

SEQ ID NO: 59774 - DNA, 474 bp, Zea mays
  unsure (1)..(474): unsure at all n locations
ntangtattagaagcgaccttcatcctattgaactagaagcttatcaattttatttgcctcctgcaccctactcaatgagctctgttgagaagaaattgttttgtcaagtattaaaaggggtcaagtttcctgatggatatgccgctgatatacgacataatgttcttgtcaatgaaaaaaagatagttaatcttaatactcatggcaaccacattcttctacaagatttactgccacttgctgtccggagagttctccctcaagaagttagtgttgtgctgattcgtttaagcacgttctttagaaaattgtactctcctgttattcgaataagtgacacgcaaaggttagaatctgagatagctgaaatcttgagccttttagagattattttccctccatcattntttaccattaatgtacatttgatggtacatcttcctacccaagcaagagtggcaggcccaatccat

SEQ ID NO: 59775 - DNA, 482 bp, Zea mays
  unsure (1)..(482): unsure at all n locations
actaagctggttaactntgatcattcatattctacttaatctatatttttgacttatcgtgctgtagggtctcctcttgcttgatttactcttgtatgatttactgaagcatttggagctgcattttctagaacaacattttttcttccgatcagtgaggtcagncatcctctattggtatatattattacatgtggtttattaatccgtcataattaaatatatttgactagattattctgctaataaagaattaacatgccttgttatgtcatgaattcatatcacatcacaatttgacatatgcttcgatgtcatataccgaatgtacatacttcaagtgtaatatgttgctacttaaaaactccctcaaactgtcatttaggacttctatcatttaagcttggttaactttggtcattcatattctacttatctatattnntttgacttatcgtgctggaggttctcctcttgcttga

SEQ ID NO: 59776 - DNA, 477 bp, Zea mays
  unsure (1)..(477): unsure at all n locations
tgccagtacttgtcaaagcaacaacatctaccagcacagcaactgtagaccataccagtaacttggtcgtttgcatgctgggggctggatatgatcggacctttcaagaaagctcaaggaggatacactcatgtactggtagcaatcgacaaattcactaaatggatagagttcaaacccattgcttctttaacctcagctaaggtcgtggaattcatacaagacataatattcagattcggaataccaaacagtatcataactgacctaggatccaacttcacgagttcagagttcttcgatttctgcgaacaaaagagcattcagatcaagtattcttcggtggcacacccaagagccaacgggcaggttgaacaagctaacgggatgatattataagcactcanganaaagtcttcgataaaaatgaaaagttcgcaggaaagtggatatgggagttgccctaccgtcgttgga

SEQ ID NO: 59777 - DNA, 401 bp, Zea mays
  unsure (1)..(401): unsure at all n locations
tctctcgctgccggcgtcaaactcccctaccaggtccgccgcaggcccctgcccggctggccctgccctgccgcgcgcctcccttcttcgtcggttccgtcgctgccgcggccttcccggccagatccacgttgttgcgaccttctcggctcgatccgtcgtccctttgacctgatcgcgtcttcccgaccggatccgtcgctgccttggccatnccggccggatccgtcggttcccttctattctgccgcgggcgcggacaccatgaccggcgcagacgcgtgtgctgccgtcngcctccctggtggggctcctcgacgtccgaacgatcgaagaagcaagaaggtcggcatgctgatgctcttttgtcgtgtagccgatcgttgacgctcgaacattca

SEQ ID NO: 59778 - DNA, 462 bp, Zea mays
tcgcaaaatgtccgacgagaagacagaggccgccaaggcggatgtgcaccgcctcctggaagccaaatttatcgagcccgtggcttatcctacgtggctctccaatgttgtaatggtacagaaaaaaagcgggaagtggcgaatgtgcatcgacttcaccagtctcaacaaggcctgcccaaaggacaatttcccgttgccgcggatcgacaaaatagtcgatagcgcggccggatgcgaggtcatgtctctcctcgactgcttctccggttaccaccagatatacatgaaagaggaagacaaggctagcaccagctttataacgcccttcggcacatattgcttcatcataatgccggagggactcaagaacgtcgggtccaccttctccaggcttaccaaaacagtgctcgaagggcaagttggcagaaatatattcacatatgtggacgacattgtcgt

SEQ ID NO: 59779 - DNA, 465 bp, Zea mays
  unsure (1)..(465): unsure at all n locations
ggggttcgccccttggggaggagtgcggtgcatttatgatatctaactggcggctacaaccctgnggaatctttgtaaaggctacatagtgatgccctgctggaccacctangtagtggtcaatggggagtagctctctccgggcagaaagggaatcacgacttgtgggtaaagtgcacaacctctgcagagtgtttgaaaactgatatatcagtcgtgctcacggttatgagcggccaagggagctccagtgattagtggtacttgatcagagatgttcggtttgcacgtggcaatgagattgatggttcttggttttgactctagtaatggtaagtggtactctttccgtttggaaaggagtacgtttgggttaataatgtgggttaattttaaaacttggctctctctactagtaataataatctggccaactaaaagcanatgcttgacttacccccacat

SEQ ID NO: 59780 - DNA, 452 bp, Zea mays
tagagtatcgtcgggttgagtcgggttgatgttgaagatgtttctcctcaagctcagagttccgccgggccatatttgacaaaaagcagtcgaagaaggatacacggttaaaaacaaattaatcaattagccaaggaagaaacaaagataccaaccagcatttgacactttcaaatcagctatctgtttctgaagcagtaagggattccactgcgttagagatagagctccttttgggattgtggcatcatgtgatctcaattgagcagacatcctgtcaaccaaagcctgttattaaaaacaaatgagtacaaagaaagtgatttaccaggaggaatgacagaacgaaaagagctaagttacctgaagattagaaaagaatgagggcaatcccaagtcatgagaagctgtgttgagctcgaaaaggaagacaactggacaatctgaaagca

SEQ ID NO: 59781 - DNA, 468 bp, Zea mays
  unsure (1)..(468): unsure at all n locations
tctgaacgagacgtgcgcctacgtcaagagcctgcaccgggtggtggacgacctctcagagcggctgtcggtgctcatggagaccatggacaacgacagcccccaggccgagatcatccggagcctgctccggtgactccaggtccaggttccagccatgcatgccgcttggccgcccggtcgtccggcgcgcgcggccgacctcttctgctgcctgccatctagctagctgccgcanccancgcacgtgcactggagattggagaaggagaagacgacgacgcacggacgagcttgtttgttcgctcgtttatttgttacggcgacgaccttaattgtgttcctttggttgtaatatgttctcctgctcctgctcctcctcattcgggagcgtgtntggttccgtgttgaattagttcaagagcaagagcccttgctcagaagaaggcgaccaagtgctctactcga

SEQ ID NO: 59782 - DNA, 473 bp, Zea mays
  unsure (1)..(473): unsure at all n locations
ctcaagcttaatgcccctaagagaatgtccaattntgttaagggcaaggctcccatggtatatgataacgagggttatattttatatcctgctggttatcctcagcacaaaattaggaaaattcattctagtaagtctcattcgggttctaatcaagcttttatatatataagaatgagacatctagctctaggcattctacccatgttaaaatgcctaaaaagaaatctcctattgcatcanatgaacttaatgtttcattcaagacttttgatgcttcctatgttttagctaacaaatcaggcaaagtagttgccaaatatgttgggggcaaacacaagggctccaagacttgtgtttgggtacccaaggtgcttatttctaatgtgaaaggacccangaccgtttgggtacctaagaacaagggcctaaacttgttttaggtttatgcatccggggagctcaagtggata

SEQ ID NO: 59783 - DNA, 451 bp, Zea mays
tagagcaatggtgggcaataaggcaagagttgaaggatgtattgcggaacattttaaactaaaggaggtagcacacttcacaagttgttactttgcagaagaacataatgtatttgctcgaaagaaaaggtaccatgatgatgaacgagagatgcctccgtgtagtgatctttcgatttttcagacaaacggcaaagccgttggtccacccaaggcatatcacctaagtatggaagaacggaagtctgctttactgtacatgttcacgaatatgcctgaggtggagaaatactttgtgtaagacttgttttcttaaactgttcatatgtgaattagtttatgttatcaaatatctcatgtcatacaataatatttgacagcgagtttgatgaacaaaacatgaggtgtctcggtaggccaacagcgagagacagacaaattgcgacgcgat

SEQ ID NO: 59784 - DNA, 438 bp, Zea mays
  unsure (1)..(438): unsure at all n locations
tcttagggagaacacgtgataggtttgactaacgtgcaattctaataagatagaccttgtgcagcttgtcaagcaggtaaacaagtgggaggagcacatcacagcaagaatgtgatgaccacttcaagacctctagagctactgcatatggacctcttcggacccgtcgcctatctgagcataggaggaagtaagtatggtctagttattgttgatgacttttcccgcttcacttgngtgttctttttgcaggataagtctgaaacccaagagaccctcaagcgcttcctcaggagagctcaaaatgagtttgagctcaaggtgaagaagataagaagcgacaacgggtctgaattcaagaatcttcaagtggaggagttccttgaggaggaggggatcaagcacgagttctctgctccctacacacctcagaaaaat

SEQ ID NO: 59785 - DNA, 475 bp, Zea mays
  unsure (1)..(475): unsure at all n locations
ggggattccaggctctcggagcctgtttgaggccatacaaggccttgttcaacttgaacactntctttacagtgtccgagccggtgaaacctgatggctggtttacatacacttcctctctttatccatttagaaaagtagatttcacatcaatatggtgtatctctgtcacacccggatttaagagcaaatccaggcgcgattcacatgtgtgctacaatcaagtctcacacatatgatgactcatggtacaaaaatgaatgtcaaatctttactatataataggagttctgtacaaaataactaaataattgcatcatatgaagacaacgatccaacaaccatagttgactgggagacggcggcctagacgtctcacgaactcatcgcgacattcttcatgctccttatcttgtcgtatctattcttgacctangggatgtgagtacaataagggtgagctcacatacgttca

SEQ ID NO: 59786 - DNA, 446 bp, Zea mays
  unsure (1)..(446): unsure at all n locations
ttatcaaatggacgtaaaaagtgccttcctcaatggaccaatttatgtttatgtatatgttgagcaacctcccggctttgaagatagtgagtatcctaaccacgtttataaactctctaaggcgctttatgggctcaagcaagccccaagagcatggtatgaatgcctaagagatttccttatcactaatggcttcaaagtcggaaaggcctgaaagggaaatgtgccattgggccatttctaagtattttggtgattaagtgccaacgcaagtgcttttgtgttgatttatgcaatgtggtggacaaagtgcaaatcatgtcaaaaggtatgtttccagacttagtacattgttttatggactaatgtattgtgtctaagtgctggaaacaggaaagattgaatnggaaatgagatggctctattcagccaaagtcagctcggtc

SEQ ID NO: 59787 - DNA, 409 bp, Zea mays
  unsure (1)..(409): unsure at all n locations
aagcggctattggggttgctcttcatactttccttgatgttattatacctttatctgtcgtctgcgnntggatgatctgatcgtccagtgagcaacgaactataatgttgagtagcactgtcgggtgtaacaagttaaatccattctctacgagtggttgaagactgtgacaatctgacttctgtctcaaagcgtcagccacaacattagctttccccggatgatagtgcacttgtaagttgtagtccttgatcaactcgaggcatctgtgttgcctcatgttaagcttggttgggtgaagatgtactttagacttttgtgatctgtgaagatattacacacattcccaagtaggtagtgcctccaaattttcaatgcatggactaccgcgggcagttccaaatcatgt

SEQ ID NO: 59788 - DNA, 463 bp, Zea mays
  unsure (1)..(463): unsure at all n locations
ngatgctaccattgagcaaggacattggttggaagtctaccatttttgtatagtgatccatttttggaatccattaatactccttgcacatatattcccatcatacaatctcagacatatatcatagaaatcattctttagggcaggccaatatgtcttcatgaattcattgttaaagtcatgtagtcacatgatgatttatcagttggctaggtcaggatgacattatcaatttccttcttagtgaagggtggtttaaggcattcaagattgttgtgattatgtacaagagaatgtaaatcaaataggatggtcttaaactcggaggtgccaaacatgttttgaaataattccaaatacatagagctttggcattatggtcatggtgggtggaacctaaatcatcctctagtgacatccttgcccacagttgtgtgaagaccagagcatatcgaggtcattc

SEQ ID NO: 59789 - DNA, 481 bp, Zea mays
  unsure (1)..(481): unsure at all n locations
taagcttcatgagcggaatgaatacaaactctcttggccataagtagtgctgtcatgtttcaagcgctcggaccaacgcatacaattctttgtcatacacagaataatttaattgtgcacctcccaatttttcactaaaatatgctataggttttccttgttgcattaaaactcctcctatcccaatcccactagcatcacattctacttcaaaagttttagtgaaatcaggaagaataagtacaggtgcttcagtcaaacgtttcttcaattcttgaaaagcatcttcttgtgagtttaccccatttaaattcaacacctttctttgtcaattcatttgaaggggaagcgatggaactgaaatctcgcataaatcttctataaaaaccagcaagaccatgaaaacttcttacttgacttacattcgttggagctggccaatccttgatngctttcaccttggattcatccacctctattc

SEQ ID NO: 59790 - DNA, 471 bp, Zea mays
  unsure (1)..(471): unsure at all n locations
tctanagggagagcacattntgngactaacaaatgttcattttgataatacaggatttgtagcgcatgtcaagcatgaaagcaagttggtgttcatcatccacacaagaacatcatgacgaccgacaggccgcttgagctactccacatggacctattcggcccgatagcttacataagcatcggtgggagtaagtattgtcttgtaattgtggatgattattctcgcttcacttgggtgttctttntgcaggagaaatcacaaacccaagagaccttaaagggattcttgagatgggctcaaaatgagttccgcttaaggatcaaaaagataagaagcgacaatgggacggagttcaagaactctcaaattgaaggctttcttgaggaggagggcatcaagcatgagttctcttctccctacacaccacaacanaatggtgtagtggagaggaagaatagaactcgactt

SEQ ID NO: 59791 - DNA, 445 bp, Zea mays
  unsure (1)..(445): unsure at all n locations
tgcttacattgcattnttgtttatgtagaagatttattctttttatgattagataagtggactctcatataagagccagctgctacacgcggctgcacgggcttcaagacgaaatggtgaataagaaagagacaagacaataatctaagagccaatttttaatcaacattattattatgaatgttgttattgttggttctagatggcaggacaataatttagaattcactgtagcctttattattaaactttctctgacatctggaacaaaccgttggcgtcgattcaacctctcagttggctgcacattgaattttcgtgggtggcaaaaggcaaaagacattggcgcaaagaaaaataggttacaatagtcacaaggctgtagcttgcaatggtgcanaaaatccctactccaacttgagtgcgcacaagaatactgaacctg

SEQ ID NO: 59792 - DNA, 463 bp, Zea mays
  unsure (1)..(463): unsure at all n locations
ttatcaaatggacgtgaagagtgccttcctcaacggtccattcaaggaagaggtctatgttgagcaacctcccggctntgaagatagtgagtatcctaaccatgtctataggctctctaaggcgctttatgggctcaagcaagccccaagagcatggtatgaatgcctaagagatttccttattgctaatggcttcaaagtcggaaaggccgatcctactttatttactaaaactctngcaaatgatttgttcgtatgccaaatttatgttgatgatattatatttgggtctactaacgaatctacatgtgaggaatttagtaggatcatgacacagaaattcgagatgtcaatgatgggggagttgaagtattttctaggattccaagtcaagcaactccaagaaggcaccttcatttgccaaacgaagtatattcaagacattctaaacaagtttgggatg

SEQ ID NO: 59793 - DNA, 465 bp, Zea mays
  unsure (1)..(465): unsure at all n locations
tctatagggagaacacgtgataggtctaactaatgttctattcttaanagatagaccttgtgcagcttgtcaagcagggaaacaggtgggaggctctcatcacaccaaaaatgtgatgacgacatcaagacccttggagatgctgcatatggacctttntggacccgtcgcctatctgagcataggaggaagtaagtatggtttagttattgttgatgacttttaccgcttcacttgcgtgttctttttgcaggaaaagtccgaaacccaagggaccctcaaacgcttcctcaggagatctcaaaatgagtttgagctcacagtgaagaagataaggagcgacaacgggtccgagttcaagaatcttcaagtggaggaattccttgaagaagaanggatcaagcatgagtnctccgctccctacacaccacagcacaatggtgtggtagagaggaagaacacgac

SEQ ID NO: 59794 - DNA, 395 bp, Zea mays
  unsure (1)..(395): unsure at all n locations
tctnctggacaagtgctgcacttaccgctgagtgcgaagctgccacatataacaacaaaggagcccctgacattggtggagttaatgttgttaaatctatcaaatattgcttcagttccttgaaggctntttgttggcttggtccccattgaaagacttcggctgatttcagcacttcgaagaatggtaaatttctctctgctgatctggatatgaatctattgagagatgccagcctccctgtcaatctttgggcccccttttttgtagttggtggctccatccgaagtatagcttcaattttacttggattagcttcaattccctttgttgaaaccaagcatccaagaaattntcccttctttactccgaagacacatttttctggattcaac

SEQ ID NO: 59795 - DNA, 422 bp, Zea mays
  unsure (1)..(422): unsure at all n locations
tatcatgtgtttcttgacaagctagattatcaatatctagcttttctaacgngctcttgagcatagcatntttattttctaattgagcaatatatgatgaatgattaatagctttaatttgctcaattgaaatgtcttcatacctttggaccaaatcatcatgagagcactttagattctcattctctttggtcaacttctccaagtctttgattttctcgatgacgatatcttcttgcttatgaagcattatcttgtgttcttccgctcttttcatgagtttgagcaagctcatccggttcttcttgcttagttgagcgaacaatttttgaagatcttcctcatattcactatcactgtcttgctcctcctcatcctcactttcgctttcactgtcactcccattagcaataaagcacata

SEQ ID NO: 59796 - DNA, 335 bp, Zea mays
tgtctacataagaaaaaaaacatcttcctatatctaatatctagcaattaattgcaagttgcaacttacatttgcactacagttacaactgaacgcatcacgatgctagctcatgaccagaacaattgtacaaaaagcattgtcacacatacctacaccagttcaggcattcctctctgcaccttcagtataccacaccaccaagaccatatgaactctgactctttggcacataattactatgcacaatcaaacccaatccattcatctggtggaggatccgctttctttctttatatcagatactgagctgagagtattcccatgttgataca

SEQ ID NO: 59797 - DNA, 448 bp, Zea mays
  unsure (1)..(448): unsure at all n locations
actaagcnttgaaatagtgacagtctcaaagctaccaacttatagagtgactcacccctaatatgtgcatagaagtttggaatacttgtaggagacatgcaatagagcttttaagatcaaaatgtcactggaaggataatatcgcatgaatgtgatcaatacttgtaggtaggtatgaatgtccaattgacgtcgccgaccgagacttgttccaatgcaggtttgtatctaccatcgactttatcgtaatacccaaaaagtgtaaaagagaatatagttgtttacatgtatatgtttgcctccatttattataacatgtgaacaaatcattaattaactgatgacatctaaaataatttgtgcatcatgctgtggttattgtttgtgcattcactcatgaatataatgataaaaggaatatactaaagttgagatgggcatttaacct

SEQ ID NO: 59798 - DNA, 467 bp, Zea mays
  unsure (1)..(467): unsure at all n locations
ctcaagctntaccttgggcagactaataccagaataagataacacgcaatttgtgtgtttatatggcgagagtagcgtgtaccctccgtggcaagaggctggacggtggtgtatctgtgctctcggttggcgtgaacctaatctggtcttaagaaccccggtggcgagttgacatatgcaagggttaagtgctacatatgtcgtgtgatcagagatcctcagctgagtataatcgattccgatcgctgtaacttcatggatatgaagacttggtcactgccctacacgtagcgatccagtaaagatgaagggttgataagaaattagctagtataggtcaagtgattgaactagggtagaaacaactctagcttcaggtaactccacttaaccggacaagtaaaattngatttttaaggatccactgttagtaagcatttctgcaaacagagtctctaataattgat

SEQ ID NO: 59799 - DNA, 475 bp, Zea mays
  unsure (1)..(475): unsure at all n locations
actcagctgaggcttgttagattaccgccctcatgcgngactattaaactagtattcttcgcctcgntttgatgttcttttcgatccattggtcggagccaaagtattttccaaaataaaccttcgctctggctatcatcagatcaagataccagcaagtgatattccgaagactgccttcttaaccagatatgtgctatatgaatatttggtgatgtcgtttgggctgacgaatgcgccagcatacttcatgtatctgatgaattctgtcttcatgcttgaactggacaagttcgtggtggttttcatcgaagatatattggtgtactcaaagaatgaagaagagcatgtcggtcatctgcatgtagtgctccaacgtctacgagagcaccgtctntatgccaaactgtcaaaatgtgatttttggctgaaataaatcaaattcttgtgtcacactatctctcaagctggcata

SEQ ID NO: 59800 - DNA, 471 bp, Zea mays
  unsure (1)..(471): unsure at all n locations
tatcctttntccctacaaatccctgatattntgatgcaatttttgaatacttctggattacaggacagggagtatttaagttattttgataagttgcctctaatgtttccttcaatctggaaccctttttttctgtatcattggtatctgctcacagtgatattcatatctctacatatttttcttattaggatgagatccatgagctgaggcaaaaaaatccacttcatacttctcatgggtntgcactttctcaagcatgttcagcgaacttatctggtgtcattntgacgtatgaactatccactttgaagtttgaactacctctcttatctaattatgttatgaacttacaactcgctatattgctcatatcatatttatanccaccatgtttttttatctaattttaatcttggtataggccacttgacctttgcgatggaccttcgaactcggatgcactntcta

SEQ ID NO: 59801 - DNA, 459 bp, Zea mays
  unsure (1)..(459): unsure at all n locations
taatggttttacggaatatggatgttcttcacgaagcatgatatgtaaggaaggtgtttnttcgccgaaggctcaaaaacagtatgtacataaagtttcatgcatcataaagaattgaagtacaaacagcttatatattacattcaaaactacaaaatattacacactctgttcagcaaatattacattattattccaaatgtttttacaataatagatattcttcttttaaaactgcttccgcagcttcgtttagtagtcgagtaacagcttcgtccataatagcttaggccatcttagtaatttcatcttccttttttgcttcggggtcggccagtgactcgaagggccctgggggaggagatagttcggctgcgatataaaacataaataagtccgaagtcacaaaaataaaacataaagtcaaaagcaattaggcaatacctatccgcctttcaa

SEQ ID NO: 59802 - DNA, 469 bp, Zea mays
  unsure (1)..(469): unsure at all n locations
tagcccttgcgtattccggtcggtataggctcatcgaanagtatgttcgtcatcgntcgtcgtcatggacctgggtctgcgaagaaacagaagtgtangggcctctgagcaaatgtcagagacacagatgaatagtacgcggggttcttcaccggttatttgaaagaccgagggcctttttgcaaagctgacatcgcaggcgcgcgcgcgggcgcgtttccccgttcgtaggccggttcgggctggtttcagcccatcacagttcctccgttttccttttctttttactactagacttggaaaattgtaggaaattctagaaaaaagataaaaatatgagaccaattttactagacttctaaaatcccctagtatttaataaaaatagttccaagaattttagccccaaccatgaattatntagcatttaagaaggcataaacctagtctnttcaaatttaaaaaatta

SEQ ID NO: 59803 - DNA, 447 bp, Zea mays
  unsure (1)..(447): unsure at all n locations
ntagtgactagtgagagagaattccttgggttctttcgagctcttgcacttggattgctttcttctttcttgattccttattgcgatcaaactcacttgtaattgaggcaagagacaccaatcttgtggtggtccttgtaggaactttgtgttccaagtgattgagaagagaaagctcactcggtctgagggaccgtttgagagagggaagggttgaaagagacccggcctttgtggcctcctcaacggngagtaggtttgcgagaaccgagcctcggtaaaacaaatccgcgtgtcacacctcttatttgcttgcgatttgttttgcaccctctctcgcggactcgattatatttctaacgttaacccggcttgtagttgtgattatttntgagaatttcagtttcgccctattcacccccctctaggcgactatcaacgatgatg

SEQ ID NO: 59804 - DNA, 467 bp, Zea mays
  unsure (1)..(467): unsure at all n locations
tcacgggctactggcggagctagccgaagcacatgttgtgctggatggcggctggagtgggctggccacngtggccgtagctctggcggcaatggcgggcggaaatacgctcgccggagctaaggaacggtggctggccggtgagggtgagtgcggcgcgaatagaggtgcgctcggtgaggctttatatgcgcgggcgggcaccgnccanggcgtgggcgcgcggcggacttgaccggacgccggggcgagcgcgcgcgcgggttgggcgagctctggcgtgccgaccagggtcgaacacgtgtgcccgtgcgttctgcccaagctctggcgcgtgtggtcgctcatccgagcctgctctcgccttggtcagtgcacgaaacctcttctcctccctancagctaccattcttgtgtggaggtcataggattntgcctactggttgcagagatatggagccaggaaa

SEQ ID NO: 59805 - DNA, 459 bp, Zea mays
tcgtcatccgaaagacaattaccttggaggaaggatatgatttcagtcctccaatcttcactatgtactggagaaataacaagcactgctctctccaagagttcaaccgaaggtgcctttattgtttcaaaaaatacttccgaaggtagagggagcccctgagccgctgatttagctagcagatctgcatgctcattttcacctcttggaatattcttgacagaaaaaccttcgaaagaagcctccaaccttcgaactgtatccagatatttttcaagcttcgggtctcttgccttgctacttttgtctacatggccagaaatgacttgagaatcagtttttatgatggcccttcttattcccattgccttagcttttgaagccccaataggagtgcttcgtattcagcaatattatttgtacaactaaagtcaagcttggctgcgtaacatgttctga

SEQ ID NO: 59806 - DNA, 461 bp, Zea mays
  unsure (1)..(461): unsure at all n locations
tcgtgaagatattttccgaagctacacttccggagatcaatagtgtatctccttgtgacttatgcgaaaagggtattcactttccgatgattttcccctttttcaaaacattcttctgaagatcgatattgtgtccccttcttgtgtcatatgcagcatgatgtatgatgcttatgccatgcgaaatgatgtgatgatgttatgctatgtgagatggtatttatttcgaagatacacgcacatccctgtaataaaacacataatctttttatatcagtgttgacttttcgctgtaagcctcccttatgagcttcttcgccttttacttcagcggaattagcatttatttttcgctgtaagcctcccttangagcttcttcgccttttactttcagcggtattcgcgttgacttttcgcgcttcgccttttacttangcggtatcagcgtttaattttcgct

SEQ ID NO: 59807 - DNA, 200 bp, Zea mays
  unsure (1)..(200): unsure at all n locations
tcaattgattaagggtccatgttgattattccangtttttcttctccatttcttgacataatgtggtgtccggaatctgttggggccttcatctttcgaaggtgctcaaaacatgattaacaatgtttccaagtgtcatatatgaaactgtaccttcgaactcnggttaaaacaatacacgatgaccaagcatggtcgag

SEQ ID NO: 59808 - DNA, 376 bp, Zea mays
  unsure (1)..(376): unsure at all n locations
tcagccttcgcttcggagggtgccgaagacaacagtcattatctgatcttntttctataggttccaagagattcattgcacatagtttctatcaattctaaccattcagtgcatgggtctttaaatctcttctgaaacttgaaacggtatggcagaccgacaagctcatatttcttcccttcttctttcttcttcggtattctccagccactacaagttgggaatgtcctgtttgccagatattcttgtaccaaatctcttgtgctgatatgctcagccacgaccctaaattccatttcagctagctagcaaggagaacccagctgcatgtggcacacgggccgagtcatgtcgaagttcagtccgagtggactca

SEQ ID NO: 59809 - DNA, 438 bp, Zea mays
  unsure (1)..(438): unsure at all n locations
agcttacttctccctgggaagggcgcgtcattatcttcaatattttgtagcccanaacatacaagctggccaacgatcaaggcgaggtctacagcaacgcttggaacatccaacaactacgtcgcttctacccttaagaagtttcaagacgttcatatacctcgtttttctttacatacacaaataaagtctaactgtcaaggaagggtcagccttgcctcggcaaagcccgaccctccctcgaaggctagaagggggaaccccctctgcgccaaaaatttcctccaaaaagtcttttgccagaacaactatcgtaccattacgactgcttcgatagcgggggtcataaaaccgacaaaaaatgctgtagcggcaaggacgaccgagccgagagacatctactcctttgagatacgaataccttactcatcaccttct

SEQ ID NO: 59810 - DNA, 265 bp, Zea mays
caaaagaatttctaaacaaaatttttctctcctagctggaaaatggctaagggctggaaatacgcatgaacttgtataagaaaaacccacttcctttgtgggacccaagaaagaaccgatggcttggctaatgcggctgggctcgacgggattgtctgccatttagattgcactctcattatcacatagcaaagggactttgggtaatttgtaacccgaattccgcaaggttcgcctcatccaaagcaatagcgcgcaacaatgt

SEQ ID NO: 59811 - DNA, 414 bp, Zea mays
acctttcttaagcttgcggagttctatcgtttatttgtgaaatatttcaccaccatcgctgggccattgcacgagattactaagaagggtgctccattttcttggggcaaggcgcaagaggttgcattcgaaacattgaaggataggttaactcatacaccccttctccaattacctgatttcaataagatttttgaataggaatgtgatgctagtggtattggtttgggaggtgtcttgttgcaagaagggaagcatgttgcttatattaatgagaaactgaatggacctattctgaactattccccttatgaataagagatatatgccttactaccaactctggaaacatggccacactacttatggcctaaagaatatgtgtacattcttgacatgaatctttaaagcatc

SEQ ID NO: 59812 - DNA, 416 bp, Zea mays
cgactgaggcatgcaagcctgcattcccacatctcaaatcacttattatatgataagcgaacagaaaatcattcctcacacactacttgattaactaagcttgcattcccatatctcaaatcacttagcataaagaaagcagaacaaaaaatcatttcacaaacactcacatcgatgcagcccttataaagatgctccctccagaaccaacctcacccttctcattgctatccccaccgttggcgagaactgtgccattcatgaccaggtcctctacaaacagccacacgatgccaccaccggcaccaccatagtccttctcaacgctgggcgagccccctttgcttccgtagcttcaaggggggtcgaggtcagaccatgcataggcatcgccggcccatgaattcctctgcgtc

SEQ ID NO: 59813 - DNA, 261 bp, Zea mays
ggttgcacctctggttgtgaggaggcccctctgctccaagttgacaacattgtctggaggctttgatcattaatccatatctcaccgacttgtcaatttccttcctcgggggacatctattagtatctaggatctccaccaatatattgaactcgattaggattaccaaaaatgagatctttcataaccttgaccatttcatggtcatcccatctggtgctcccgacgctctcacttgttgaccattgtctgaccggttgt

SEQ ID NO: 59814 - DNA, 354 bp, Zea mays
  unsure (1)..(354): unsure at all n locations
agcttatgaagattcttcatcccaacatgggctaatcggcggggccagagccaacccatgttagtcttagcaattaagcaagtgtcgagttcagctctttcnaaatctaccaagtatagctgaccctctaacactcccttaaatgctattgaatcatcacttcttctaaagacagtgacacctacatcagtaaaaagacaggtgtagcccattggacataatngagaaacggaaacaaattgtaatctaaagaatcaacaagaaaaacattgtaaatggaatggtcaggagatatagctattntaccaagacctttgacaaaccttgatttcatccccgaatgtgaaactcggt

SEQ ID NO: 59815 - DNA, 388 bp, Zea mays
agcttagctgcagctgaagaagctcaacttatctgaagtcaagttcagctggaaagctcagctgcagttgaagaagttcagctgcttttcagcaagaacactctatgtttctcaaccctaaccacggtcaaccatagaatgttaaagagatttttgattttcaaaaatagctcttgaatagagaagttcgagctttggcaaacaccaaccttcttttttgatccccctttatagtacgacgattcctatactcaagttaaataaaatataatgaagtaaactccttgagtcattggtgtctcatgtgtgatttctccatggcattgcttaataaggatcacacacatctttgtctcaccttttaaagcaactcaaatcaaccctgtga

SEQ ID NO: 59816 - DNA, 363 bp, Zea mays
agcttgacattgcctccctgttggaaaccaatgccatccttaatgtcagggtgtctcccactataaagcatgctacgagcaaatttaaaattttcattttctagttcatgctcggcaattttagcatctagtttagctatatgatcattttgttggttaatcatagcaatgtgatcatgaatagcatcaacggtaatgtctctacatatagtgcaaatagtaacatgctcaacggtagatgtagaggatttgcaagtatttaatttaacaatcttagcatgtaaaatagcattctcatctctaagattggaaatagaagcatttgcaacatttaaatctttaaccttaacaattaaattttca

SEQ ID NO: 59817 - DNA, 354 bp, Zea mays
  unsure (1)..(354): unsure at all n locations
agcttcaacacttttcaggatacttcggatattgttgtgataaatggtaattcttcttcacgaagcatgaaaagaagggaaggtgttttttcgccaaagactcaaaaacggtacgtacgtaaagtttcatgcatcgtaaagaatcgaaccataaagaaaaataaaacaaatatattacaggattacaagatattacacatgttacatttaaaatgtttntaaagtagcatttagtcttccctaagtaccacttctgcagctttgttcaacaatcgatcgacaacttcatccataatagcttcagccatctttttaatttcatcatcacccctaggccgagcaccccgggatact

SEQ ID NO: 59818 - DNA, 333 bp, Zea mays
gcatgctcgcttataacaggagaatccagagttaagcttcttgtataatgaaagccgcaatcctggataatagcgatacttctttaccacataggattgagttgtactagactacttcatgagaaacctattctcatacttgagactacataagactactaagagaaagtgttagtctcaacataatcaagatatagaaatgggctcccccaaaaatgtgcatcaagaataagaatgacttcggtagatgcactctcctttaaagacaaatatgggaaagcattgtacatcttgatcaaagcataataaaattgcaaaaacaacctaagcatg

SEQ ID NO: 59819 - DNA, 372 bp, Zea mays
  unsure (1)..(372): unsure at all n locations
tgcaactttacgaatccaataattcgacctttggcttgacataacgcaanaaaccgagtgtgacatgccaatgaatataaatcagcgtgaacaatacggtgctactgtacatctatttataggcacaagacgcacgctatgtaaaattacatccatgcccttgacatatactatagactaagggttatctatttgaggactagacaaccctctcctctttatgtcaggttcattattcaccgctaagccgaagcttctccatttacaacttctgaactgggtcatcctttttccagaccaacccctttatgtcgtgcacaccttatcttaaagcagaagttcctgtacaataaatatacttggaaacatgta

SEQ ID NO: 59820 - DNA, 365 bp, Zea mays
agcttattggcatcttcatgtggccacttattacatattgtcagcaagaccttttcaatcatgaaacatcgcatgacatcctttgtgattaattcaatgggctgcatctctattgtccctgctggccaattcccactcgatctcttggcaggttcaaaagtgacaaaggcccagcaaccaattatgccatcaaaggtgcaattttcaccactatcaaacctcagcctaccgagagctgttaaaatctggatatttggaatataattctagttcttcgttgtgcgagtaggctctacttcaccaggagttgaataatatcgctcaaacttttgagtgacaaaaacatttctcgctatcacacccaa

SEQ ID NO: 59821 - DNA, 296 bp, Zea mays
  unsure (1)..(296): unsure at all n locations
agcttgagcacattaacctacacactactgtatattccaaatgtgcttacaacggngataggcggtcttggcattcagaatgatatctataacagatatcacgaatctgtgatagaatcgaaaacttcagatcattaacgaccattagtgatgaatcggctttccaactaaaatggtcggagcacgaatctcgcatgctcccggctagtgattaaccgccctacttcatgctcaagacccctatgggttttaatacgcgggaatacgcgaaagatgcccccagcctacctagggta

SEQ ID NO: 59822 - DNA, 197 bp, Zea mays
cgcgccaacgacaagatttatattgccatctaaaaatgcatgtcaacgacaaaagaggtgaaagggccgacctcacaccccgaagcagtctaggcgctgaacacgatcgagttacgggcgacagggatcgctctccttagcctactatacagaatagaggccatgacccccgaggaaatagaacatggggcaccccg

SEQ ID NO: 59823 - DNA, 350 bp, Zea mays
aacactgagctcatctgggaaacaatcaaggattttttcttccaagaggaacctctccttctataacccaaggaagggtaccacaaaaaacatgaataaggggcttactacaaaccactcttgcaccctcaccttcgctcgaattacattctcatttaacccctgacccacaacatattaaaagccctccctatctccattaaaaccacttcatcttttctcattagcaacactagttgaaggaaatatcttgcgaatataaaagagcatccccctcttccaagcaataaaatagtgatatgaaccccgaccaagaaagggcaatggtattatttgaagagatgacaaac

SEQ ID NO: 59824 - DNA, 287 bp, Zea mays
gccagctctatgatctctgaggcgcgagtatttccttattttgcctggaaaacatatgcatagctctagaatatgatagacatttctattactccacaaaagcctatgcgtccatacttgagacacaaaactctcgctcggagcttcttgaaaataaaaattacttgctgcactgaatgggtagccgttgctccagtcttgcaaccgcaatgaggttgcacttaaattaacctaatgaactatatctgattattaaataatatatacggggatatatcgagtactgc

SEQ ID NO: 59825 - DNA, 361 bp, Zea mays
  unsure (1)..(361): unsure at all n locations
agcttannccgtgcgagtactggatcatcttattttattattggatcatattataaaccgagatggactagctgtggatccaaagaaggtatcagtgattttggactgtaaagcaccaaaagatgtctgaaaaatcaagagtttcattgaaatggctgggtactatcgacatttcattgaaggtgtcttcaagattgccaggccaatgacagccttgcaagccaagaaggttgagttcaagtggaccccatcgtgcctagaatcatatgaaatgttgaagcagatgttgaccacaacaccggtattggttttgccaggtgttcactagccatactcaatatactgtgatcctttgtacacc

SEQ ID NO: 59826 - DNA, 316 bp, Zea mays
  unsure (1)..(316): unsure at all n locations
agcttgcatttgaaataaatgtatgtttatgttaattgcttccgcatttctttatctccgatgttctgtaatgtctgcaagacgggtgagacgttcctggtgaggtaaggaaagataccgaacttgtcaagtagttcaggggcacctacaaggttgtctgatgtccgttggacaaggacaactgtangtgggcctaattacttgggaggttccgtacagcgagcatgtcacaccgtcttaagtcattgccgacttaagccgattgctccgttcgtagggcatagtggtcaccctgtgttaactaagcgtgagcatg

SEQ ID NO: 59827 - DNA, 375 bp, Zea mays
acttaagacactgagcatgcactttattgacaaatgggagtcttttgagcctgcccaagatggatccatattgagtcccctcaagtctttatatagtttgaaggcaagtaagttctatttttttgccattgcctgtttaagatcatatggtgttttatttggttgtgcaggaaaagattcttgagatgcttaaaactggctatagaggagcattcaagttacagtgtttaccgatggtgaacgtattttgggggttgtagataatggatgccacgtatggtagcaatcttgttctaagtgtattgaggattgatgacaagcatactcccaggtttatattgaataagaatacatctatttatggagtggggattt

SEQ ID NO: 59828 - DNA, 297 bp, Zea mays
gcatgcaagcctatattaggagaacacaatccgggctttctttgttcattctgagaaagacagggtatgtagtgaatgtcaagcacggaatcaacgttggtacccatcatccacactagaacatcttgaccaccgataggccgcttgaactacatcacgtggatttatttggcccaatcgcttacataagcatcaacgggaataagtactggctagttattgtggataaatatccccgcttcacttggggtattcatttttgcaggaaaatcacaaaccctagagactataacgggg

SEQ ID NO: 59829 - DNA, 157 bp, Zea mays
cacctgcagcatgcaacttacttgggcccacagagctgatatttttttgatgtcccgtcggtgcagtgttactacagaatggcgaaattattgcctcgcggtcgtaatctgtaagttatatcatattatatagctaggcataaactttttaagggct

SEQ ID NO: 59830 - DNA, 361 bp, Zea mays
acctgtaagcatgcaagcttgtgaagattactcattccaacatgtgctatttgtgtatgcctcagccagcccatgttagtcttagcaattaagcaagtatcgaattcagctctgtcaaaatctactaaatatagctgaccctctaacactcccttaaatgctactgaatcatcactgtttgtaaagacagtaacacctatatccgtaaaaagacagttgtaacccattttacataattgcgaaactgaaagcaagttgtaatctaaataaactacaaaaaatacattggaaatggaatggtcaagtgaaataactatcttacccaaatccttgaccaaaccttgattccatccccgaatga

SEQ ID NO: 59831 - DNA, 166 bp, Zea mays
agctctctggctggtatgttgacactgtcaacagtttggcctaagccgggtttgcgagagcagtccccgagccttctcacatggcgagaggacgaacaaggacaagactcgagtttttttcatacccccctacttcgtcttttcgcaaggaggagggggggagaga

SEQ ID NO: 59832 - DNA, 317 bp, Zea mays
cctatgttcaccatcatcttgggcatcacaaagaccatgaagaccataaaaccaacccttaacctcatggggctctttaaaagtgacacgaaggagaaccgctccctaaccctgaaaaggctgaataggcaaacattcaacgaggctgctttttaatacttatcataagcactaagagaagaaacacaacatccttaacgaagccttttagcccacagcataacccaatttgggtcaaacctcaacatgaactaccagtgagaagtgaggaaacaagtatacaataaggtatatacctcctacctcctatcactgct

SEQ ID NO: 59833 - DNA, 397 bp, Zea mays
ggaccttaagtcacctgcggcatgcagcttggcaaaaagtaaaaaaactctttctagcctctcaagagggatttcattagggaattctgaaattcagaattctgaatttcagatcttgagccatagatcaagcgtgttcaccttgatccctaactcaaatcctaatggccccattgacaaaaacgtgcataactaacctctctgtcttgtgccagaagatggcatcgggacgcgtcaaaccagagatcttctccctgtgtgtggcagtgagacaaaccagatttctcccctctctatctcttaatccagtgagccaaacctgctagcctccacacacaaacgacaaaggaacctgagaggaagagatctctcaacgggatcatgtgcataatctcaa

SEQ ID NO: 59834 - DNA, 435 bp, Zea mays
  unsure (1)..(435): unsure at all n locations
agctggcacgctgtatgtatttccatttttgcgatagnctcctaatgtcgaagtgagaccatatgggacgttggataatccccttgatgtcttctctttcaaccagatcattcttcacataaaagcatccaggcccctggccatctcttgcaaaatgttggaactggattgcatacttcagaacgggttacgaagccataacaaccaaagttgttacgaagtcataagtcaattcatgcatattgcagaagcattttgcatttggttctagtccttggctcctcatggcccaaatatagattcccatcttgatgatggctttaggggtaagctgatcaatgtatatctcgaaggttttccgcacttcgaccagcatcttatacagaggaaaccgaagccctactctcataaagcttctataaatgactgtggagt

SEQ ID NO: 59835 - DNA, 367 bp, Zea mays
cagcatatgaagatactttatttcaacatgtgctactcggcggggctagagccaacccatgttagtcttagcacataagcaagtgtcgagatcatttttatcaaaatctactaagtatatgtgaccctctaacactaccttaaatgctactgaatcatcacttcttctaaagacagttacaccaatatctgtgaaagacagttgtaacccattttacataattgtgaaactgaaagcaagttataatctaaagaatctacaagaaaaacattggaaaaagaatggtcatgtgatatatcaattttacccaatcctgtgaccaaaccttggtttccatccccgaatgtgatagctctttggggatctt

SEQ ID NO: 59836 - DNA, 428 bp, Zea mays
cacctccgaactaactcgactgcatcacttttcgcttgtggccaatagaatcccgacctgaagactttcccgactagtgtcttggacgctgcgtgtattccatattgtccagcatggacctcgtctagaagtcgcttcccagtagatgagagaatgcactttatgaagacgtctgatgcgccccttttgtatagcgtctccccaatgagtgtgtagtgagctgactgtctagcgatgcgctcagctgcatttttatccgctgggttctcttcattctttatatatctgataatcggccttctccagtcatcagagcctgactctggttgaatcacgatattacactcttctgcttgatccattgagatgctgggctgtggtatttctttgacaaagacttcgggtgggacttgagttcgactggatcc

SEQ ID NO: 59837 - DNA, 340 bp, Zea mays
cagctgcatgccatatgcactataaactttgttctacatccataatctgacatggaactgcatctttcatgatatgactacaaagtttgcaaacatgctaaactattgatgcgcctgcttgtactcttttgatcagcaaataagattttaaaataatgtctaatgacagaagtaccagtagatattagaaaaacagtgctgggcttttcatgtgtcagcttcaagtttgataagccattttactggatggcttgctttaataattgtgtagtgtgaaattttttagaaaggtattcattcttctgcgacttccctgctattaacggggggttacaaacta

SEQ ID NO: 59838 - DNA, 438 bp, Zea mays
  unsure (1)..(438): unsure at all n locations
agcttctactgaaagattggaatttatagtgctgttctctgcagggaaaaactatcacgagtgcagattgccgaagctatgcaatatgccaaggatttaaagtatcccccaagatcctcggtgtttaatggcactgatgaaagcgactntctatactgtcttccggacaataaacaaatatctgtttgtcgggagatagcaaaaaatatacgattcctgaagctagagggtggcctatctgcnatgtcaaaggatgaacttgcagacagccttgcttataataacttgaaggtatatatatttttgtgtgaaaataaattatgtttataaattttctttttagcgtnttgttctcatatatatctatcattataggtttgaaaacgcctataggggggtgaataaggccgaattgatgtttataaacttaaacacaac

SEQ ID NO: 59839 - DNA, 413 bp, Zea mays
  unsure (1)..(413): unsure at all n locations
agcttatgaagattcttcatcccaacatgtgtctttctgcgatgccagagccaacccatgttggtcttagcaattaagcaagtgtcgagttcagctctatcaaaatctactaagtatagctgaccttctaacactcccttaaatgctactgaatcatcacttcttctaaagacagtgacacctacatcagttaatagacagttgtagcccattngacataattgagaaacggaaagcatattgtaatctaaagaatctacaagaaaaacattggaaatagaatggtcaggagatatagcaattttacccaatcctttgaccaaaccttgatttccatccccgaatgtgatagctcgntggggatcttggttcttctcataagaggagaacatctttttctcccctgtcatgtg

SEQ ID NO: 59840 - DNA, 367 bp, Zea mays
cacttgaacatgtacgtgacagctttcactcttactactgctacgtacgtggcttctcaacaagtatgcaggggtgcagcggcatccggccctgcggtgggtgagtcatgagtggtggccgtgcttttccaatcaacaccgccggcgcagcatgcatgtgctactactgctggtggagccactgcggcggtaccgaggagagagagatcccggccgccgacgactaagacacgtgaggtggccgaggatactggttactggatagggctgtgcatgtgctttccctgtcgtctggcctgcttggcgcacagtggatttgggtcgtctgctcgtcaactgatactgaccgtcgacgtcatgtgcttgc

SEQ ID NO: 59841 - DNA, 436 bp, Zea mays
  unsure (1)..(436): unsure at all n locations
agcttggggggactccacaatgtgaggaaagtttccttttcatcatagagaagcttacaaccgcgcccgttttgacactaccacatatacaccacgaatctgtcatcttctgtgatgcttcaaggcaaggctcatggtgtgtcttaatgcaaaacgagaaagttattgcctatgcatcccgcttactcaagccacatgagcataactacctcacccacgactgggagttggcagccatagtgcacgccctataaatatggaggcactatctgattgggaacaaattccacgtcttcactgatcacaagagtctgaggtacatcttcactcatccagacttctacctccatcaaagaaatggctngaattgacaaggattatgacccgaaaccattacccccccggaagcctacatggaacggacaccctatccgaa

SEQ ID NO: 59842 - DNA, 437 bp, Zea mays
catgcaagcttatatctatctactataccatgtattatatgtttacccctctgtccactccatttaagttaattctaccctttattctaaaatatgcttaaggataacgaaaatataaaatgccacttaattaatgaaccaaagagtacttctatttttggtaagctacctattcaatatagttcactggaaaaatgtatcatacccttggttaatacaaattaacgaggatatcttttattttaataaaacaaggataacttaaaaaaaacctaccaaaatgacccccaggtgaaaacacccccacccttgtgaatactattgttttatctcagagaacttacgaaaaataagaaatttgcgtttgacactttctaataataatgaagtaaaagtgccttttgacattaacttgaaaaatcataactaataccccc

SEQ ID NO: 59843 - DNA, 96 bp, Zea mays
  unsure (1)..(96): unsure at all n locations
gaccctaaagaccgcgcagcaacctacggccaggggactacctattcttttaacnacggggcggagcggtgacaagaaccgaaccagcgcaatggc

SEQ ID NO: 59844 - DNA, 98 bp, Zea mays
cactccttggaagaaaaacccctgcttcctctaactcgtcttttatttggtactcgaacctgttacggggatggggagttgcccgctacctcggaact

SEQ ID NO: 59845 - DNA, 386 bp, Zea mays
agcttcggcgaccaaatgacctatctcttttatttctacgagattgaagaccatgagcacctgtttggtgaaagcaagtgtcctctgacccattatgtcctatctacttataattcactgtcccgcatacaatgatcaacctaaggattgactagctttctatttacttatccttgtttacccttttgggttatcatggttagctttatgctattgctttactttaatcaatgaacatgatgtgaatattatgatatgatgatgttatcccaatgatgatatcgtgatactctagggggctcgggccttttccctgagtacctctccgtaaggacctgttcgtggagtgaccaccccggataacagtgcaaccattggggtgaaat

SEQ ID NO: 59846 - DNA, 300 bp, Zea mays
  unsure (1)..(300): unsure at all n locations
agcttaagcaaagtactacaattctcctattattactaagagctaatgctaagtttaacttgggcaaacaaggttattttcgaaatcagtacagaatctggacagattctgaaactggactttgaaaaatcataactcctaaactactagacatatgaccataataatttagcacaagtaagatgaagaggttatctacaactcgtttatataacatatcttcatanaacaaaggttacttcaattaactacctgcatactaaaaatggacacagtccaacaacaaacattcattttact

SEQ ID NO: 59847 - DNA, 462 bp, Zea mays
  unsure (1)..(462): unsure at all n locations
tctacaacgacctgcagcatgcaagcttctaaagggagaacacgcgagaaggctaactaatgctactttcgaaaaagatagaccttgcgcagcttgtcaagcaggtaaacaggtgggaagctctcatcataccaaaaatgtgatgaccacatcaagacctttggagttgcttcatatggacctcttcggacccatcgtctatctaagcatatgaggaagtaagtatggtcttgttatagttgatgatttttctcgcttcacttgggtattctttttgcaggataaatctgaaacccaagggaccctcaagcgcttcctaagaagagctcaaaatgagtgtgagctcaaggtgaacaagataangagcgacaacatgtccgagatcaagaaccttcaagtggaggagtatcttgaggaggaangggataagcacgagtnttctgcttcctacacaccacagca

SEQ ID NO: 59848 - DNA, 402 bp, Zea mays
  unsure (1)..(402): unsure at all n locations
cttaagagactgcagcatgcnagcttaaggaatacaaaaaattatactctctatgttcataatgataaggtatttagcatttctagaaacatcgcttctactatttatatagacataatatgtatctaagtctataaaaaactaaatcatttccaaaggaacaaccagttttagttagaaaggagggactaatatacatatatacctcggtcgtttcataataattgactctctagcattctacacatgtctcaaattaattcttattatcactcgtgaatatgcagcatgctcttctctaagaacatctctacctctctctatatatattcttgcgcattacacattttatcctcctccgtaatttattngcctagaactaaatggtcatttacgtacgct

SEQ ID NO: 59849 - DNA, 214 bp, Zea mays
cagcatgcaagcttaaagacatggtaagaagcataggctaatattatttctaatgactcaagcctagctacgggtgcataggttacacccaaatccaaaccttcaacttgggagtatcccttggccacaagtcgagctttgttccttgtcaccacaccatgctcatatagcttgttgcagaaagacccattttggttcctaacaacatatttga

SEQ ID NO: 59850 - DNA, 344 bp, Zea mays
tactaaagcctgggagaacatatgcattaaaacgcgacatgattcaagcctatctacgggtgcgtaggtataccaaaatccataccctcgacttgtgaatatcctttggctacaagtctggctttgtactttgtcaccacaccatgctcatcttgctctgtgcggaagacctacttggttcccacaacatattgggtaggacatggaactaaatgtcataccttattccttgtgaagttgttgagctcctcttgtattgccaacacccaatccaaattttgaagtagcttctctaccctgtgtggctcaatataggaaacaaacaagttatgttcaccaaaatg

SEQ ID NO: 59851 - DNA, 363 bp, Zea mays
agctttatcaaatggacgagaagagtggcttccttattgtgacccatcaaggaagagatctatgttgagcaacctcccggctttgaagatagagagtaccctaaccatgtgtataagctctcaaaggcgctttatgggctcaagcaagccccaagagcatgggatgaatgtctgcaacatattcttatcactaatggcttcaaagtcggtaaagccgaccctactctcttactaaaactggtgtaaaggacttgtttattatccaaatttatggtgatgatattatatttgggtctacaacaagtctacttgtgaagagtttattaggatcatgatttaaaattcgagatgtctatatagggg

SEQ ID NO: 59852 - DNA, 365 bp, Zea mays
agcttatgaagattcttcatcccaacatggtctattcggcggcgccatagccaacccatgttagtcctagcaattaagcaagtgtcgagttcaactctatcaaaatctactaagtatagctgaccctctaacactcccttaaatgctactgaatcatcacttcttctaaagacagtaacacctatatctgtaaaaagacagttgtagcccattttacataattgagaaacagaaagcaaattgtaatctaaagaatctcaagaaaaacattggaaatagaatggtcaggagatatagcaattttacccaatccttcgaccaaaccttgatttccatcctcgaatatgatagctctttggggatca

SEQ ID NO: 59853 - DNA, 340 bp, Zea mays
gactgcagcatgcaacttgcactgcaacgagctagagcatatatgattaatttttcagcgcccacacatgcgcccatgaagataccgaacgacactaagcatgtgactatattgaacctgggtgggaagctgggagctgaaacataccgacttaggatacaggccaccagtgaggaagttccaaagtcgcataccaacaccggacattgtcaagatgataacggcacttaataaagaagtcgaagatgagcccatagcaacagtcgacggagagagtgcaaaataagcatcaagcgatccgttgagctaaagcaaacgaaccgaatataaagatgggatc

SEQ ID NO: 59854 - DNA, 187 bp, Zea mays
gctgatcaacaatggatgcgtttacctagctatctgcaacctctactgccggagcggtactgagggaggggctagggtctataatatctaatactcttactatcctacctctcttacgagtagtggcagaaatcttttctgccttcagcgctgctgcttctgttgaatgacttaaaaacctctggaa

SEQ ID NO: 59855 - DNA, 435 bp, Zea mays
actgcagcatgccagcttctcctcctcaacctgtacatcatatactcctacttgttttatccctccatcacgaaggacttgcacctcaccttgagttgggggaccctcctatgtcaaggaagaaagttgatcttgcctttgtggttcctggtgacacacatcacctaataccatttttcgcatttgcggtcgttggaacctcctcctcatttatatcatcaagatcaacttgccctcttacagagccattcttttcatcaaatacaacgctcgctagagacttcaactaatcctgatgacttgttgaagaccctatctccctttggttttgagtcatcactcaattataaatcctcctacagctcatggagcaacctttgatgcctacctttcttaccacgaagatacatttgtttccaaaacacaaaaataaga

SEQ ID NO: 59856 - DNA, 264 bp, Zea mays
tttgctaagccacagtcagcccatgctaggcttagctattaagcatgcatatagaccgggctctctcttttgctaaatcacactgaataaacggttgccgtctaagacaccttgataagctaatgaaccatcaacttcttctaaagacagacatatctatatgttgtaatagacatatatattccatattacataattgactaacagatagcaaattatattcaagagactcaactaaaaacaccttagagatagagtgctcat

SEQ ID NO: 59857 - DNA, 250 bp, Zea mays
cgctatgatatcttacttccatcagcctcatattaacgggcagtgctctgttaatattggagtaatcattgtagaggaacatggtggacctatcgactaacataaagagcgtatttctgatgttgcatacatataatgcccggtgattatttagcaccaccaagccattcatgttcatttatatctatgactcctgatagcaatgaggaagaagactcttagaagccacgttggtgttgcttttcacaac

SEQ ID NO: 59858 - DNA, 249 bp, Zea mays
cttaatgaccgcagctgcatcccataagggagccactttagtttaaaagctcatctagaagacagacttgttcccagcccaccggaaacactcggctcctcatctcaccaatacattctactcccgcggcccttgacacttacaagaatatccgccgatgcttactaacttgcggggagtagtatggctgaaagtgaaattatctcccaactgggtggttttgccgaaaatctaccccaaagacctaag

SEQ ID NO: 59859 - DNA, 286 bp, Zea mays
gagctcacgcctaaggctgagacaagaatgggcattctgtggcttggtcaatatatccacttatggatctataatattaatgagcgaaatctcgagatcccccttttgttggtgatccctatgaaaatgatacccaatggatctgggcttactgctgctatgctcaaccggattgtaggccattataatagcactctcattatcacataacaaggagaccttggctagtacgtaccgcatctcgcacgggtgcctattcaacacataggcgctcaatgtctgctca

SEQ ID NO: 59860 - DNA, 354 bp, Zea mays
agcttctaaagggagaacacgtgtattgtctaactaatgttactttcgaaaaagatagaccttgtgcagcttgtcaagcagggaaacaggtgggaagctctcatcatgccaaaaatgtgatgacaacatcaagacccctggagttacttcatatggacctcttcggacccgtcgcctatctgagcataagaggaagtaagtatggtcttgttatagttgatgatttttcccgcttcacttgggtattctttttgcaggataaatctgaaacccaagggaccctcaagcgcttcctaaagagagctcaaaacgagtttgagctcaaggtgaagaagataagaagcgacaatgggt

SEQ ID NO: 59861 - DNA, 357 bp, Zea mays
  unsure (1)..(357): unsure at all n locations
agcttcaattgagtcaatgttccttgttgttctatacctagatntaacttttccatctcttgacataaagtggtgtcagatgctcttactgtgagacaatgaccagaggctttacgacttaaagcatctgccaccacattagtctttcctgggtgataatgaatttccaaggcataattcttgattagctcgagccactttctttgtctcatgtttagctctgactgggtgaagatatacttcaaactcttatggttcgtatataagtgacatatattccccaacagataatgattgcaaatttttaaggcataactactgcgcccgttccaaatatgtgtaggaaatgttcttatg

SEQ ID NO: 59862 - DNA, 246 bp, Zea mays
cacttcaactagacacatgtgcagcgaacgttagagtctagtcaccaacctctgcttggaaaaggcttctagcgctaagcgaccagaatgaagaaactgcatgcttgtgttctaagaaagaaagagaatagactgcgatgccccctatcatttgtaaaccatgtgtgtcaactctgtgggcattgctataatatcatgtgaatattgtacaaccttctctatataataaggtgaacaactgtccat

SEQ ID NO: 59863 - DNA, 348 bp, Zea mays
aacttgctggaggtgcctatgccgcacatatcttctcttagaatgagaaaatacttgtttagtttctgggcgtagtccactataaacatttgttcatctcatattataaacaatgaaagatgttctgcaattttgtctagcggacccgtcgatcctttctgtgtgcatgcaaaactaggcgtagccattaactacaagaccatttgtttgatcttttataagctcgtaaaattcaaataactttactatcaaaaagggaaaggtggaccttctttaaacaatgccttctaatcaaatagtaggtacataaatatcccattcattttagaaaaagaaaggtatttcatg

SEQ ID NO: 59864 - DNA, 371 bp, Zea mays
agctagtgaaggggcttcatgcccacatgtgtctagcggcgatgccacaaccagcccatgctagtcttagcgattaagcatgcatctaaaccggcctcctcttttgcaaaatcaactaaatagaggttgtcgtctaatacacccttaaaagctaatgaaccatcacttcttctaaagacagacacatctacattagtgaataaacacgtatatcccatattacaaagttgactcacagacaacaagttatatccaagcgactcaactaagaacacattataaatagagtgctcggatgaaatagcattttttcctaaccctttcaccttgccttggttccatcaccgatatgatgaatcttggggatcttg

SEQ ID NO: 59865 - DNA, 103 bp, Zea mays
  unsure (1)..(103): unsure at all n locations
tccgaccttggncgattagcggattaaatctctagaggaaatttatgaacttgccccaaccaaaaacgggactagcaaacggaagaaagtttttaactgaacc

SEQ ID NO: 59866 - DNA, 287 bp, Zea mays
  unsure (1)..(287): unsure at all n locations
tagcttggaccaagatacgtattgatcctttttatatggcagnggcggacgaagcggcaatgctgggttactcaagcgacgaagcacacgaaagcccgtggtgcgtgagagcaagcgaacgagcgtgggggatgccgaccggtccaaaacgttggctgtcagccggagcctcacttgcaacccgctttctgcgattttccttcgctctcggctattctcgcgcgggagaatactctctctctccacgcttgcttcctgcatgcgtgtggaggcgatttcggaaaaag

SEQ ID NO: 59867 - DNA, 373 bp, Zea mays
tttgagaaagacagagtatgtaacgcatgccaagcaagaaagcaagttggtgcccatcattcacacaagaacatcatgacgaccgacaggccgcttgagctactccacatggatttatttggcacgattgcttacataaacatcggcgggagtaagtattgtcctggaataagggaagattactctcgcttcacttgggtattcttattgcaggaaaaatcttaaacccaagagaccttaaagggaattttgagacgggcctaaaaagagttcgtcttaaagatcaagaaaattataagcgacaacaggaccgagttcaaaattctatcatgaaggcttcttaggaagaggcatcaagatgattctctttcct

SEQ ID NO: 59868 - DNA, 434 bp, Zea mays
aagcttgatcaattaaaggaaagaatgatgtctcttccgatgtttgttatgacagatctacataaaggatttgacatttattgtgatgcatgtggccaacgattgggatgtgttcttatgcaagaaggacatgtgatcgcctatgcgtctcgtcagttgcggaaacatgaattgaactaccccactcatgacttggaactggcagcggttgtacacgcacttaagatatggagacattacattatgggaactaagtgtcaagtatacacggatcataagaagttgaagtatatattcactcagaaggatctcaaccttaggcaacgctgttggttggagctcattaaggattatgatttggagaatcactatcatccgggcatagcgaatttggttgcagatgcctcgagtcagaaagagcatgttcactccgc

SEQ ID NO: 59869 - DNA, 421 bp, Zea mays
tgcaagctggcgagcttgcccattctagtgcaaacaacaacatctactttcgcttcaactgcagaccataccagtaacttggtctttcacatgctggggactggatatgatcggacctttcaagaaagctcaaggaggatacactcatgtattggaagcaatccgacaaattctctaaatggatagaggtcaagcccattgcctctttgacctcaggtaaggccgcggaattcatacaacgcataatattcagattcgggataccaaacaagatcgtcactgacctaggatccaactttacaagttcacagatcttcgacttctgcgagcaaaagagcactcatatcaataatgcgtctgtagcacactcgatagccaacaggcatgttgagcagccaactggatgatactggagcactca

SEQ ID NO: 59870 - DNA, 359 bp, Zea mays
agctttacacgtgccataggttctcaacaaacctatataaagaccaagaaagggttctaataaaaagagcacaagaccaccgaagggtgccctggtctggcgcaccggactgttcggtgtgccaccggacagtgtccggtgcaccaaggaaccaaactctgaacttgcaccttctggaatactatgagccactttcctatatttatccgactgtcccgtgtagcaccggactgtccggtgtttcatcggagcaacggctacttcgcgccaacggtcgtctgcaaaagcagttaatgctctacagtgcgcgcacaagtcatatcataaccacaaggcgcacccgacagtgaacaatgact

SEQ ID NO: 59871 - DNA, 405 bp, Zea mays
gagcttatgtctctgtagaggagttcacacaataatgtgtttctttgaaccctctcctcactcaagcgatcaccaagattgagcttgagtcctttctttctcaattcttgagagtaatcctctcacaaggatccccataccaagttaggggctattgattgctttacaactttgggagcaacaactccacacactgtggtcacacaaacattcctaattttgcactaaactctactcaacacaagggctccagcaactcttttgctttctagctctcaaatgatgtctattctaagcacactactcaatttggatggctaggagatgatcattacttgtatatatcggttcttaactcataatcagacttgtggccactggggtggaatgtatatgtaacacctc

SEQ ID NO: 59872 - DNA, 196 bp, Zea mays
aggaaggtttttacttcttcaacttggttccgacactgtcataaacacaccccgaaggtctttggttttttgcaagccaagaacactcgaaaaccaagtgcaacatttactcgtacccaacaaattctaaacacatgctaacgactatactccaccacacaaagaaagataaactaagtggtgtgtacaagtcagg

SEQ ID NO: 59873 - DNA, 384 bp, Zea mays
  unsure (1)..(384): unsure at all n locations
agctntgaatgtgtcttgtgaagaattgttttctcttgtattgaatgagaatgaatgagatgcttggatgaagtgaatggaggtagttggagttgtatttatagtcaccaaccacttcctaactgttgcccactttttgccaaccgcggacggtccacgcttctaacccgaacggtccgccctacacatcaacgactaaaatcacaacggttagcagtaacgactatatcaatggctataagtgcattaaatgtgtcgtaagatgttagataaaacagttggggacggtctatccatgcacccaggacagtccgcggtgatgcttaaaatgaattgttccgaacccatcaccttcgggttctctatgtttaatggatggacagt

SEQ ID NO: 59874 - DNA, 433 bp, Zea mays
agcttgtggaggaccagatcaccgaagcttataagtttctggatgagaagtggtcacccaagttccgttaatgaagcaccagaagactaatcaaggaaggaatccatgtggataagttcgcaagaagaaggtttgtgtgttggcatcgatgcttcttcaataagctagctgccaagcgaaagccagaagcctaaagatgatctttgagtagctagaatcagcgtttgcaatcggcaaccagatgctcctcataggtcggattttgttgaagctctatctcctctaagagtctgcaaagtgaagatatgtagctgaagtaaagctatacccataacctttctaagccgaatctcgaggacgagatttcatttaagtggggtagatttgtagcattccacaaattcaaatcttggaatttctcaaactgctctaa

SEQ ID NO: 59875 - DNA, 420 bp, Zea mays
  unsure (1)..(420): unsure at all n locations
agcttgtgaaggttcttcatccccacatgtgctaagcggcgatgccacagtcagcccatgctagtcttatcaattaagcatgcatctagaccggcctcctcttttgcaaaatcaactcaataaagtttgtcgtctaatacacccttaaaagctaatgaaccatcacttcttctaaagacagacacatctatatttgtaaatagacaattatatcccatattacataattgactaacagatagtaaattatatccaagagactcaactaanaacacattagagatagagtgttcatttgatattgcaatcttgcctaagcctttcaccttgccttggttcccatcaccgaatatgattgaatcttgggaatccttattcttgacgtaggaagtgaacatcttcttctnccccgtcatatgg

SEQ ID NO: 59876 - DNA, 390 bp, Zea mays
  unsure (1)..(390): unsure at all n locations
gagctcatgcctaagtctggtaaaagattgctcatcaagtggtttggtaatatatcggctaattgatctttagtattaatgtaagaaatctcgatatcccccttttgttgtggatccctatgaaaatgataccgaatggctatgtgcttagagcgggtatgctctacgggattggtagccatcttaattgcactctcattatcacataacagagggactttggttagtttggaacccgaatcctgcacggcttgtctcatccanagtaatatgccgcaacaatgtcctgcggcatgtactccgtttggcggcggaataacgaccaattttgtttctttgatgccaatcaccaagatttttcatgaactggagttcctagtgttttctttt

SEQ ID NO: 59877 - DNA, 371 bp, Zea mays
  unsure (1)..(371): unsure at all n locations
agcttcgtcaccatccctggagaagcttgttctttccatctatggggctccagctttgaacctaacaacataaaagcaaaagatagaggcccaaagaagggtgcagcatgtaggcgtccaaggaccctccatcaagtccaagtagtctcatatccccattaccttctcaagaagatcttcgtctcaaggattatccacatagggatgccatggttatctcttgtgtcatcaaaggattcatagtacacaatattctggtcaacacaggcaacacaacatatattttnatttgccaggctcttaagcaaatgcaagagcccgaagataagattcacgaaccaacttttccctctgtattcggggacacaagt

SEQ ID NO: 59878 - DNA, 371 bp, Zea mays
  unsure (1)..(371): unsure at all n locations
agctcttgttcaaatggtcatagaggatgaactcccttttatgtttggtgagaagtcaggatttataaaatttgtgaaggtagctgccccgcgttggactccaccatctcgaaggacatgcacaagggacatagttaaaactttttttgaagagaaagcaaagttgaaactattcttcaagtcaaattgtgagagagtttgtctaaccatagattgttggacttctcaacaacaagacagctacatgacagtaactgcacacttcattgacaaggattgacaactccataaaaaggtcattaacttctttaaggtgaaggggcataaaggatatgatattgngaagaacctacagagatgtttggctgaat

SEQ ID NO: 59879 - DNA, 373 bp, Zea mays
  unsure (1)..(373): unsure at all n locations
tgcatgtgcaccaaccaggcgcgagcggtgttgganaagaacatggtgacgttgctgatgattatgatgtcatcgcccgctccacccacttggcaggccagacggaaattcgcgagccacagatccggactcgacttctcccgaaacttagtgaaactaatttgcggtcggaaccgggtccgaaacggcgcccgtaaaaggcccggatgaagacctgccgaccgagtggatcgggcgagggactacgatacaccccagcagcggagacgtctccacgcatggagtggagcctcagcgcacctctttcgacgagagctcacagcacagtgaggtctcgttccaacgactcgggcgatgcgcgtgttgcctgccc

SEQ ID NO: 59880 - DNA, 433 bp, Zea mays
  unsure (1)..(433): unsure at all n locations
taaaactcagcttgacacatagctcatttgaatacctgtgatcatatctcttctatatgctatgactaatgtgttttcaagtctacttcaaaccaagtcatacgtatattgaaagggaattggagtcttcggcgaagaaaaatgcttccactcagtaactcatacttcgccatcactccgagcaactctctattccttggggagaaataagcatcatagaaaaggacttcatccttcgaggagagagtaaaagctcanaagcaaaaggaccggatttcgcctttggtataatcctaactcatttacttatgaccaaaggggaggaacttacttcaagggctctaatgattacgtttttggcgattcatgccaaaaagggggagaaatgagcccacagcaaaatgaccgcaccaccaccacctaattcaaaaac

SEQ ID NO: 59881 - DNA, 432 bp, Zea mays
  unsure (1)..(432): unsure at all n locations
tatcaaatgccaattctggattattgaagtcctatacttgtgtcatattatcaactgacacggattggctgttcatctgataaaagtagcacctctcttgtactggaaagcaccaaatgatgtctgatgaatcacaccgtttccattgaagggttctcactagatcgccacggccaattgacagctcttgttagcatnagaacggttggagttctaagtggacccccagcatgccataagttctttgagacattgaaggagaagttgacaacggcaccagtactgattctgcaagatgttcacaagccatactcagtgtattgcgatgcctcatacaccggactaagatgtgtgtcgatgcaagaacggagaatattggcatactcgtccgacagttgagattcatatataaatatcctactcatgatctga

SEQ ID NO: 59882 - DNA, 345 bp, Zea mays
  unsure (1)..(345): unsure at all n locations
atgcaccactctctagaaggcatctctttccttatttttttccgnactacagtagccacgatatgcgaagctaaacacgctataacatcacgctacgcgctctcccttaaatgtcaagtcgtcaacacctctgttcttacatactaaataagtctaaccgcaagatgacacccttcctcgcaaactcgaccttctctgtgctaaagggggacccccttgctaaaatttcctcaaaatttctccaagaaagtattccaaacatttcacattgtttcagacctaaacacataggaccttacgaaggcgacagcaggatctacctctatataaatatataattaaaaa

SEQ ID NO: 59883 - DNA, 420 bp, Zea mays
  unsure (1)..(420): unsure at all n locations
agatggcactcatcatcaagagtttccgttttattctcaagcaaagtatggggaaggattacaagccccgctccaagaaagtgtgctacaaatgtggtaagcccagtcatttcattgctaaatgtctgttatctagtgatagtgacaggggcgacgacaagaatggaaagaggagagaatagaagaggtaccacataaagaggggtggcgatgcccatgtgtgcctcgagtgggactccgaggagagctcctctaactcctcctccgacgaggacgccgncaacatcgccgtcaccaagggcctnctcttcccaaacgtcagccacaagtgcctcatggcaaaggacggcaaaaggaaaaagtaaaatcaaaatcctcactaaatataaaacctctagtgatgaggaanatgttagtgat

SEQ ID NO: 59884 - DNA, 438 bp, Zea mays
agcttatagtgtacgaacgttaaattcttgcttacagaattctgcttcgccctcttaaaaagaaaaatcacgcctgcatgtcttcctgagaaacaaactactgatgaactctgccctgaagccggaaactctgataaagagtacagagtttagaacacctccggtttctttcttactttgcaaactttccgaagcaacaatagacgttttagagcaactgctccccgatcatgaatgaaaattacacaaagaaaaggacgatccggccaagaatacgacgatggcatgcatgcatgcaaactctcagaatgctccagggcgattcttgggagcaacacggatcaagaaggaaataaataaataaaagcgaggcgaacaagagcatctcctctgcctcacgagctcccacagctgattcctctgtcgaagatgttggga

SEQ ID NO: 59885 - DNA, 500 bp, Zea mays
  unsure (1)..(500): unsure at all n locations
taagcaaagcacagggtactcataatcagtataacttacatagcttaagttctccatcacaaacatggcggacttaaatagcagagttctgaagggaacatctaaatgacagtaattaaaattgtggcatcgcctctactacactgtccaagagatggcattcagatagcccgcccagctgacttcagcggtactgcaacaaaaacatagacaatgcattagttaatcagtgatagcaagtccaacctaactggagaaatttcaaaacattgccattggcaaccaaataattgtcagcattttaagcatcataacaagaaaacatataaccacaattcattctttaattaaaaaaagaatagcagcagtataggtcaaatntcaacaaaatacaatggatgcgcttgcatgaaagtaacatatcgtcaaagaaaactgtctaatataaatagatgtaccagagtgcanaatgtcctcaacgaagctggcagaactaactc

SEQ ID NO: 59886 - DNA, 408 bp, Zea mays
  unsure (1)..(408): unsure at all n locations
actctttgttgtccgggaggcagataagaagtcatcttcatctgtgccattgaatactaaggcccacttcggatacttcaattctcgggcatagtgattagcctcaaaaatctcttcttcagataatctttttcccgaagcatgtcgtataatataatcgagggctttggaggatgcttcggggacagcagcgtcagtctcttcaatcaaaattggctctgtcgtttttgtttcttcggtttccaagggttttctcttggcgggctctgagggcccagcttcagtttcagattgttgcttcgaagcttcagcaacaaaggctntttcttcggaagtctcaacaagttccttcggagttatgctcgaagaatttattgtctccataacatcgaacacgttaaccattct

SEQ ID NO: 59887 - DNA, 460 bp, Zea mays
  unsure (1)..(460): unsure at all n locations
tctggtagcggcgggacgggggcgctcgcacgtcgcacctagtgtaaaagtacagtagggacgattntctaaacaaaagacaactaanaaactttattatacacggactgatttgttgaccagagattacgggagattgaaggagaaaattagtttattttccccacagtaattctttatcaccaaagtgtttataaatagtctctattacttattaagactgcaatagtagtcggccattctgcgttctgcatattccgtgttctgccattccgattccctcctccccgcccattctcattcccccgtacagccgcgcctagctaaaattaaaaaaatacacatggccccaaggggatttgaacccacaacctcttctcaagcaaatgctagcatcagctaccactacaccacatatgtggttatgtctacatctataacagaaaacatatctactaca

SEQ ID NO: 59888 - DNA, 346 bp, Zea mays
aaccagcgagccgatatgttttaactgccacgccttcgcattctacatgaatctttatacgtatactttctggctctaaaaacacttgtatttactctactgacaatcaccccccccaccattatcatgaagctatccaccctgatgcttattaaaactataaaatgccgaaaaaccgggacaactgcaacaactgtgaagagctgcgaaaattcttaaaaactgatcttgaccttaacatgaaatttagaaagcatttccacttattaacaagcaatcagtgttataagaaatattcttgcagctgaaattcgtctacattttgacttcgcaaaaacccttcctt

SEQ ID NO: 59889 - DNA, 479 bp, Zea mays
gcttcttactgagcttcaagcaacgacacctttttattatcatgctcttctcatcgtatatgcttttattctgagtccgaaggtacctgttcataagccatgcttggaagacattgttaaattacgtttttgaggaccttcggaggacgaaggcccccaacatcgcgcattttaaataattaattatatctttttgttaactaacgttaattaattagacttttcaattaaactaatttatagtagttaacttacactttataaatctatgtcgacataattaatagtaactcaaatattttgctctaatatttgtttaatataaatgcgacgactatttagtttttatcgctgtttgcgcgcgtcgttcgcgtgtgtagcgcgtgctgctcgctcgcttcatcgtcgctcggctaatcgttatttgacgctctaaaacatcacttccaatatcgtcatggtgatacttgataattgtt

SEQ ID NO: 59890 - DNA, 200 bp, Zea mays
aactttttttttttgtggaacgggccgttgataaatagcagccctcccgagaacggcatggtaatacagtaccccacggaaaggataccgcaaaaaaccgccggtagaccacgggacaacctcaccagggacatatccccaatcaaatattcctcgtccaacccgaataaagatccgggacggccgtccagatctgggca

SEQ ID NO: 59891 - DNA, 378 bp, Zea mays
tttgtttaacatggtggggttaaccttatctttaaggatgctgccctagaactcagtctgacttcaaaaccatagcttctggagccccgagagaaaaattgtattcaagacctatgatagtatactcttattatctttgcattttcataagcattacatgagcattcacgggtatatatgtgatatatataaacacgaagaatatagttgaagtttgaagaagcaagagctacaccaccaccctgagacccaccggcttggaactgctattatattgacatttgtggagcagagcccgactcccttataacacaaggcaagccccggtgctttgccacctccttgctgttgtaaaatcttatcaccttgtttgatgca

SEQ ID NO: 59892 - DNA, 456 bp, Zea mays
  unsure (1)..(456): unsure at all n locations
agctntgtatgagaaagagatgatattgattatctggtgtgcttgagagagttcattcaattcttatcaactcaagctatcaatcttcaatgatctatatacatgattgacccacggttatttttcaaattgctgtgtcttaaactcatatcatctcgaggaagatattatatgttgtatgaagtgaacagatatcatacgcgaaaaatcaaggcctacagcatggaggaaagccaaaggatggtaacacttatcttttaagtgcaaggatttaaaatatcatttcttatgtgtcttgtgtagtcacatataaaaattgaagcacttcaaatgtctttaaattgatattaccattccntgaagaatttcctctcatatnggaggtcgcacattcatcatttccatactatggcaatctacatgctntaatatattgctagtatgtcatggcatatc

SEQ ID NO: 59893 - DNA, 492 bp, Zea mays
  unsure (1)..(492): unsure at all n locations
tccactatgggtatgccctatgctcctcgctcttctgacttgcctctccattctcctcccncggagatcaatgagtggcaccagcaggcctacagggtgccatttatgtcagcagacgacgaagaagaagaaaaagcctattttgatgattgcgagcagtttgccccgccttcctatcacagggatccgggtcaatcattctctcacccttcgccccaggatccttctggcagtgctcctcccctggatcagtctggggaagaacactttgcctctcacctggcgcaccacttctttgctcctcatcaacctcctcctaactagtgatctatggattagcggctctctctcttattggttcttggtgccaaaaaaggggagaaggtttcttaccttgcagtaccttctatttatgtaacgaaccatcggttgtaataattatnggtctatcgtatgatgcatgcatgggctctgtgccatcatatgatgcat

SEQ ID NO: 59894 - DNA, 335 bp, Zea mays
gcatgcaagctagaaaccacgggaagtatcatattcttataatatgccaatggacgcaagcctagccgcaggagcatatggttcaccacaatccaaaccttccacttgtgaatacaccctggcacgagtgagctttgtccttgtcccacacctgctcctttgcttgtgcggaaaccactggtcctacacattgtaggacgggaacaatgccaacccgccctacgagagtaagctctttgatcgcatacccaatcgaatcttggagcgcttgctctaccctgtgtggctcaatagaggaaacaaaagagtaatgctcacaaaaatgtgcacacgag

SEQ ID NO: 59895 - DNA, 371 bp, Zea mays
  unsure (1)..(371): unsure at all n locations
tctacagggagaacacattttaggactaaccaatggtcatttngagaaagacaggatttgtagtgcatgccaagacgggaagcaagttggcactcatcatccacataagaacatcttaacgaccgacaggccacttgagctcctccacatggacctattcgacccgatcgcttacataagcatcggtgggagtaagtactgtcttgttattgtggatgactattctcgcttcacttgggtgttctttttacaggaaaaatctcanacccaagagaccttaaagggattcttgagacgagctcaaaatgagttcggcttgaggatcaagaaaataagaagcgataatgggacggagttcaagaattcacaaa

SEQ ID NO: 59896 - DNA, 453 bp, Zea mays
  unsure (1)..(453): unsure at all n locations
gtgacctgggaaacttcctactaatcatcatttgttcgccgctcaatctatttcctctcactgagcccaccttccatgccaaactcttctgcgaacgcctctatgtcatgtgacatctcatagcagcccttccgggcgacaaaatgcgggggctcggtgccacatctctccaaccccatagcactgccgatctggctgtgcaagtcttcaaagtcctctgcggccaccgcttgcctttttatgcacatctcaaggaccacgctcgtcttgggtgggcttagaacccgtcccatactgagggatgacgcgaaggtcgaagaatcggccttaactttngctctgaaatcgtgttttgagctgggtatccttgaaaacaagacgtcgatgaaattctgacccactccaaagctgtaaggatttggtctccggtcatagcgggatctgaagttctca

SEQ ID NO: 59897 - DNA, 488 bp, Zea mays
  unsure (1)..(488): unsure at all n locations
atgcaagcttgacagggatttggtgagcactgagtgggaacgaatatttcctttatcggngggtgaggccctatcgagagatatttcagatcacacacctttattgtttcaaagtgaaaatgcctcctatagaggaaataaccaaatgttcagatttgagctctcctagttgtacatggaaggttttcatgaattggtagcaaaggtgtggaacaaggaaaataggggaagctcttccctagttagatggcaaaataaacttagagctcggcggcgttacctgagaggttggtcaaaaaatgtgcttgggaatactaaaaaaagaaagcggntcttgcttacttcgttagaatctttggataaaaaagggaggaggggattctcttcccacaagagcaggaacataagtattgtctttctgctgaataacaaagttcagagaggaagaatatactggattaacgatcganacaactacgttataaaag

SEQ ID NO: 59898 - DNA, 451 bp, Zea mays
  unsure (1)..(451): unsure at all n locations
atatacccaaaaagggggtgaagatttctttgatacctactcaccagtggctcgattgactacaattcgcacattaatagctatggcagcctcttatggtcttatcattcatcagatggatgttaagacaactttcctaaatggagagttggatgaggagatctacatggatcagccagaagggttcattgcggatggtcaacagaacaaggtgtgcaggttgataaaatcattgtatggcctanaacaagcacctaagcaatggcatganaaagttgataatactcttnaccgctgctggtttgctgtaaatgaatctgacacgtgtgtatattatcggtatggtggcggtgagtctgttatgctgtgcctttatgttgatgacatnctgatctttggatcaatctcaatggattgagaagtaaaaatcttctatcgagcaattcaaatg

SEQ ID NO: 59899 - DNA, 404 bp, Zea mays
  unsure (1)..(404): unsure at all n locations
cgcaagctggcatacatctgacaatctcgtagcctctaaagtacttacctcaaatgctcctcatgttcctgctcattctgggaatatataagaatgtcatcaatgaacactactatgaacttgtcgaggtagtccatgaacacactattcatcatgtacatgaagtaggctggcgcattcgtcaaaccgaatgacataaccgtgaactcatatagtccgtacttggtgatgaatgttgtcttcttgatatctgacgcgcggattctgagctgatggtagcctgacatcagatctatctttgagaacacactggcttctctcaactgatcgaataagtcttcaattctgggcagggggtacttgttctngatagtaacctcattcanagctcgataatcgatgca

SEQ ID NO: 59900 - DNA, 444 bp, Zea mays
  unsure (1)..(444): unsure at all n locations
tttcgagcttcgggttaaagacgtgctttcaccatgtctggtgaaaatgactgaggaanagaagatgactgaggaaaaaaggatgactgcggagacgaagctgactgaggagacgaagctgttcaaagaaaagaaagctgtgaatccttttatcgccgggtttattgagtctatgtgaaaaacaaacacagagaagattactaaagagatacttgaaggtttatctaaagatacttatgacagtgatagttatgatgcagaaagtggagatgaagattctgaagatcggccctggcgaccaagccattctgtcttcggaaaatcgactattaaatagagtcatcttgacaacatgagaggaagatactttcgcgatatgtctatcatgagagttggcggagacaacatcgtccctgcccctgaggaaaatgaagttgttatcta

SEQ ID NO: 59901 - DNA, 450 bp, Zea mays
  unsure (1)..(450): unsure at all n locations
agcttgtgaagccaatcacaagtttattgaagaatgacattaaagtttaattggtcttctaagtgtaacgaagcctttgagcaactgaagacattattgaccactgctccggtattggctcaaccggacatcactaagccttttgatgtatattgtgatgcatctggcagtgggctcggctgtgtactgatgcaagcgggccgagtaattgcgtatgcttcaaggcagttgcgccgacatgaggagcattatccaactcatgatctggagctagctgctgtggttcatgccctaaagagttggcgtcactatctgctgggaaatatctgtcacatatatacagatcataaaagtttgaagtacatcttcacccagtcagagttaaatatgaggcanagacgatggcttgagctcatcaaagactatgaactggagatccattatcaccca

SEQ ID NO: 59902 - DNA, 494 bp, Zea mays
  unsure (1)..(494): unsure at all n locations
tatgaagattcttcatcccaacatgggctagtcggcggtgccagagtcaacccatgttagtcttagcaattaagcaagtgttgagttcagctttatcaaaatctaccaagtatagctgaccctctaacactcccttaaatgctattgaatcatcacttcttctaaagacatttgacacctacatcagtaaaaagacagttgtagcccatttgacataatngagatacggaaagtgttggggacttgttctcaaatgctatgaatcaagaacaaggcaacataaaatgttaactatcaaagcccttcgtccttcggatcattacttcccttcggatataatgaatctaggacgaaggtcatgaaggacataccttcacgatcatgataaaaaatggagaacattcatacaaagtacagaaagtaacantaattttggaaacatttatattaatctatttccatttatattacttgtgtaagcaatagtaaaatac

SEQ ID NO: 59903 - DNA, 472 bp, Zea mays
  unsure (1)..(472): unsure at all n locations
agcttgaggtgccgaagcatacaaatttacgctgatttgaatgacctttctattaccaaaaatttgatctaacgggcacagtacaaattgttcgatacagtacaaagtcgttcctaagggagcgcagtgtaagttttctaaacctacagcgaaaaataaaacgctgattccgctgaaagtaaaaggcgaagaagctcctaagggagtcttacagcgaanaataaacgctgattccgctaaaagtaaaaggcgaagaagctcctaagggaggcttacagcgaaaaataaacgctgattctgctgaaagtaaaaggcgaagaagctcctaagggaggcttacagcgaaaagtcagcgctgatataaaaagtgtgtgtgctttattacagggatatgtatctgcggcacanatatcatcttgcataacataacatcatcacattcattttgcataacataagcatcacacagcat

SEQ ID NO: 59904 - DNA, 502 bp, Zea mays
  unsure (1)..(502): unsure at all n locations
tattattactggtagatgccaacaaaataacccttaggacagaacctactcctagttaagaagtgtaatacaaagtggccttttacacaacttttgttatttttgtctaaagcatagcctttttatttntgaacctcaacttcctagaatgggctatagtgaccaatggcaacccactgtaatttttacaaaatttttggaaaaagttaaaccactgttgtagttcaaacctccactagaattcataaatagaaaataaagaaaggaaaatgaataatggaaattagtgtcatcctaaaaccctttgtaaattgtccactgaaatatataaaggaaataccaatccactatgcctatctctaacaaaacctaaacctagagtgataagcataaaccactaaaagccacgtatgaccaagaaaccctaagttactcattaacttagttnttctttctttagcataatggtattaaatcctgcataatcatgacatacatattc

SEQ ID NO: 59905 - DNA, 445 bp, Zea mays
  unsure (1)..(445): unsure at all n locations
ctgacataacctttttgagattaagtaatgtttctgagatcaataatatttagctcatttctcaacatacaaaagtgggttntatctaaaggttttgtgaaaatatccgctaattgttctttcgatctcactccctcaaaagtaatatcttctttatcaacatgatctctaaagaagtgatgacggatatcgatgtgcttggagtgaaagtgttgtgcacgattattagcaatcttaacagcactctcattgtcacacaacaaaggtacactttctaaaactacaccatagtctagaagagtntgtttcatataaagaattcgtgtgcaacaagcgcccattggaatgtattccacttttgcgggtgaaaggcaacatgctggggacttgttctcaaatgctataagaacaagacaacacacatgttaattattaaagaccttca

SEQ ID NO: 59906 - DNA, 466 bp, Zea mays
  unsure (1)..(466): unsure at all n locations
catgtgctagncggcgatgccagagccagcccatgatagtcttagcaantaagcaaggggcgagnncatctctattaaaaacaactaactatagctaaccctctaacactcccttaaatgctactgaatcatcacttcttctaaagacagtaacacctatatctgtaaaaagacnagtgtaacccaatttacataattgagaaatagaaagcaaattgtaatctaaagaatctacaaggaaaacattggaaatagaatggtcatgtgatatagcaattttacccaatcctttgaccaaaccttgattttcatccccgaatgtgatagctctntggggatcttggttnttcttgtaggaggagaacatccttttctcctcagtcatgtggtntgtgcaccctctatcgatgatccaacttgagcccccggatgcataaacctacanaacaatnttaggcccttgtct

SEQ ID NO: 59907 - DNA, 447 bp, Zea mays
agcttgctcggtgtaccacctagtgtctaatattaccaatggatgcaaatgcactatgaacactcaatctctcactagaatgcaatctcaagcaaggagtgtgagagaatgagttggaggatcacaaatgagctcaatgtgtgcaatgaatggctaagagagccctcacacacgagctccccttctatttatagcacacaactcatatccaaccgttatgtgcaatttgcacattttctgcgcacacgcggacggtccgtgccctatggctggacggtccgccgtacacataacgactatttttcccgtttgaaatctgtcagagctgtcaaaaaagtgaggtccagacagtccgccaaccttgaccagaccgtccgtgacctggcaacttgaagcaccagagctctgaccaagatgagttagcacacgcggatggtccgccctaca

SEQ ID NO: 59908 - DNA, 501 bp, Zea mays
  unsure (1)..(501): unsure at all n locations
tagtatattgactactccaaatgcatcatcgaggtataactctatcttgctcggntnttgccccactgtacatgcaaatagcggtgtcttcagaacaacaatgtttcttttcatgatatcatcaatattttcaaacatgtcctcatctgacctgtcatcaccgatgcataatacaaaatctgcttgccgccatttctccatcatcaacgtgagtatcttctcagctacaagacctttgctaacaccctaccgccaaggaagacaatttaagaagttaatagctatgcaaaaatgcatgtcagaatgaaaaatcaggagaaggtagtatcatataaaaacatgtatgtttgtttttctgttgaaggcaaaaaaaatctgacaaatcattagtaaaataacaaggacccttggaagaactggaagtggaaatactaaacctgagggtcactttgacaatgaactgtccactcttaattgcgaaccggtcatttgctagtacac

SEQ ID NO: 59909 - DNA, 435 bp, Zea mays
  unsure (1)..(435): unsure at all n locations
agctttgggccagcaaccttcggaatgtgctgtggactattaaccttcggcacccccatcctgcagacaaacgatggtataaggtaaaagtgatgataaaaatcaaggtagacaacaggtaaaagtttcttactgatttaagtagattccgagctttgtctccagccaactctcatccgcctttagcccaaatttgagtgatgaatctatttccgatacttcaggcctcaccaggaatattcatcangactgatggcgacagactgaaggttggtttgtttactgtcttcgcatgcgtgcatccgaccttcaagaatgcatcagttgtgccgcgagaagctagcaaagcacagaagtcaccatgcccagctatcacttcatcgagtgcatcaacttcattttcaatatgctngaaagtatctgacatatcttcag

SEQ ID NO: 59910 - DNA, 459 bp, Zea mays
  unsure (1)..(459): unsure at all n locations
tatcacgtgacctataaaactcagcttcaaagggagaacatgtgttatgtctaacaaatgtaaatttcgaaaaagatagaccttgtgcagcttggcaagcaggtaagcaagtgggaagctctcatcatatcaaaaatgtgatgaccacgtcaagacctttggagttacttcatatggatctcttcggacccgtcgcctaccttagcataggaggaagtaagtatggtcttgttatagttgatgatttttcccgcttcacttgggtattctttntgcaggataaatctgaaacccaagggaccctcaagtgtttcctaaggagagctcanaatgagtttgagctcaaggtgaataagataaagagcgacaacgggtccgagttcaagaaccttcaagtggaagagtatcttgaggaggaaggaatcaagcatgagttctncgctccatacacaccacagc

SEQ ID NO: 59911 - DNA, 322 bp, Zea mays
tctcatgtacttcatgcctggaatttcatcggtcttcttaggtgccagggtttttcttatcctataataaaagcgaaaagggtgtatatgtcatgaaaacatgctatatttctgctagctggtcttctattacaaattttgtgcaaaaaatctatttcgttctctcattacattactctcaaaactccattgctaacaaggtttcattaacaacaactattggatttggatgaggcagttgaaaccaagagttggtgtctctcctgtcggtgttttgggtccgaccgcgcactcagtgttgcccccgaggtgcttttggagt

SEQ ID NO: 59912 - DNA, 495 bp, Zea mays
  unsure (1)..(495): unsure at all n locations
ntagctcgacagtggaaaatgaaaccgacttanaagagaatatgttgtctagtcctcgatagattatccctaggtcaatagtaaatgtcaagtgcatgaatgtaatttcatacagactgtgtcctgtgcctataaatagatgaacagtgacatcgtactgttcatgctgacttgtattcactcgcgcgtcacacttggactttngccttttgtcaagccgaaggtacaaatataatttgatattgttcatgttcattcgtgatgatataataaagatatattaataatgtcatatgattattcatgttatttcttatgtttcatatgtttcttctttcattaatatatattgcgatgatgaaggtacgtccttcacgaccttcgtccgaagattattatatcctaagggagatcatgcttcgaaagacgaagggccttaaccatcaacattntgtggttccttgtctcaatcatagcagagagacaagtcctaac

SEQ ID NO: 59913 - DNA, 327 bp, Zea mays
ggaaccaaagagagaagaataaacacttcaagaagggcaagggcgaagcacataatggaaaggagtgggattcggattgcttctcctccgactccgaccatgaaggactctccgccacccgcttcaacaaaatggccctttttctccaccagcgtcacacgtgtgtcatggcttacgagaagaaagtaagtacttgaaactctacttatgcctcttctagtgatgatgaatctagtgacgatgatgaaatagactattctagtttatttaaaggactagatagaattacaattgggcaaattaatgaattaattgatgcattgaatg

SEQ ID NO: 59914 - DNA, 283 bp, Zea mays
tattcgctggtcatattatgtaagttgagatcaatagagttaaacattgctaatcgtgtattcacccctttatacgacatcaatgttcttaaatgccgtaactttaatcatatggctattttgaccacatgaattactactctgcgtgccacttgtaagtgtgggatatgaataatggatcaacatccgacgactcatgtgcatacatcactatggtgatgattagctacggagatgagcatacactggttgtctggcggaccaatggaggaagtatgatagt

SEQ ID NO: 59915 - DNA, 404 bp, Zea mays
agcttgccctggaattaaatcaattatgctcttatatgcctcgcacatgtgctaatcctaggggtatctcagagggaaacacatccatatactcctacaaaagggtatcaacagtcgttggtaaagaaatggacgtatcatcaatggaatatgaagcatttttttgcatactaaggcatagcaaagtgcaatagaggcatgtaactcattaaaatcacatttactagctagcaaagcaggagtatttaacttaatagggtgctgtttttagagttcaaaacacctttttacttaccattagtctttttctcatgcccaaagaggacaatttcattgggggtcatacgaagcaacatgatactctttcacttatgcatccgagtatacatattgtatctactact

SEQ ID NO: 59916 - DNA, 394 bp, Zea mays
  unsure (1)..(394): unsure at all n locations
tgaagctgactcgccgaagcaacagaaactgcaggatgattgcccacatattctgggatgtanggcgaatgatacgaagctgtatgcatgacctgcttcggctgagctcgttgcgctgcagcttcggctatttccttttgcttctgaatagtaacatggcacatcctggtggtatggcctttgttctcaccgcagaataagcataagattcttctcggttgatcgccaaatcttcctccgaagcccctggcacctctgcctcttggagctggtggtcggaatgagctatgttgttgccccgaagcctgtgaggaacattgtggcctttgctgttggcttcctctatcatcattttgtgtagagttatgaattgatctcacgtgcttcgggtaaa

SEQ ID NO: 59917 - DNA, 314 bp, Zea mays
  unsure (1)..(314): unsure at all n locations
agctcgcttacttggtaagatgaccaatgcgctcttcacngggtaccggagaggacgttcgatatattggaacccacacacactgatgtgtgcggaccaatgagaacgacagctaggggaggattccaatacttcataaccttcactgatgattttagtacatatggggatgtctacctaatgaaacacaagtcagaatccttagataagttcaaagagattcagaatgaagtacaaaatcagtgtggcaagaaaaataaagcactacgaacggatcgtggaggtgaatatatgagtcatgagtataacaatca

SEQ ID NO: 59918 - DNA, 332 bp, Zea mays
  unsure (1)..(332): unsure at all n locations
gatatttgtcaataatgtgcttccactctggcacaggtgctatttgactgtgcgagccttcggacctgttcttctgaagtccctttggtgttgagcatattggcccccttctggctgctggccttgttgcagcgtttgtggaggcggaagctgttgccaggaagcttgatggtgactcgccgaagcaacagaaactgcanggtgattgcctacatattctgggatataacgcgaatgatacgaagcaatgtgcatgatctgcttcgctgaccctgttgtgtgcagcttctgctatctccttttgttctggatggaacatggcacatcctggt

SEQ ID NO: 59919 - DNA, 440 bp, Zea mays
  unsure (1)..(440): unsure at all n locations
agcttctaaagggagaacacgtgatangtctttcctttgttnattncgaaaaagatagaccctgtgcagcttgtcaagcatggaaacacgtgggaagctctcatcacaccaagaatgtgatgacaacatcaagacccctggagctgctacatatggacctcttcggacccgtcgcctatctgagcataggaggaagtaagtatggtctagatattcgtgatgacttttaccgcttcacttgagtgttctttctgcaggataagtctgaaacccaagggactctcaagcgcttcctaaagagagctcacaatgaagttgagctcaagggtgaaaagataatgagcgacaacgggtccgaattcaagaaccttcaagtggaggagttncttgaggaggaggggatcaagcacgagttcttcgctccctcacacctcacaaaa

SEQ ID NO: 59920 - DNA, 475 bp, Zea mays
  unsure (1)..(475): unsure at all n locations
ntccctcacgcatttgatgccgcatgttggttctcaatgggtacaatcgagtccgtcgcgaagaggttcccgaagctgggtagatccaccggcggagcaatcgccacgggcggcgatgtgtggtggtgcggatctacgccatgaacgaaacactcaaccatgggcacagcgctgcaactttgggagcaatgacattctccatctccngcaccttgatgacagccttgatcccccacgctctcttccaccaccttgctgctacacaacacgaccagcagctatgggagcaccagcaggtcaccgctccaggaatcaaagcaacgcaaggagagggaagggtgattttttactaggagagagaaggggattttntacggcacatcatgcaggaccgataaaaaagaaaggctacgaagatctgaaaatgacatanttattaatatatgtttaaaatgatntgctatatggacaatat

SEQ ID NO: 59921 - DNA, 485 bp, Zea mays
  unsure (1)..(485): unsure at all n locations
acctgcggcatgcaagcttcggcatcaaatgcttcaatatgcacttctgaagtttctacaattttcttcggagttgtgctttaagactntattgtctccaaaacatccagcacattaaccatcctttntcttctgggggtcactgctggacccttctggctttttgctgcttcaatttttgctgaaggacttaaaattgttgatgtctttgtttcttcaaccctcggntcttctattttttctgtcgccggcacttcagccagcccttcaatattcggcaggggagttggttctttagcctcggtgaccgaagaggtctcaccgacaaactcaggcactgtggccggttcaatataacgtggccggtgtgtgagaacttttacccttttcctcttcggcgccggctcgctatgagcggctaaagcaacttcctttgcagaagatgtattctttcttttttgaccccgcgttcgataacggtagtc

SEQ ID NO: 59922 - DNA, 515 bp, Zea mays
  unsure (1)..(515): unsure at all n locations
tggagcatagaagaatgggcgtagctagtgccccaggctgtatctctggcgaactggccgctctcgagttttctcagagccactctactaaaattcatcggactgttcggtgtgccaacggagcaacggtcaacttcgccaacggtcgactgcgctgatggaggaacagtgaacagtgcataagtcagaagtcagaactgcaaagtcagaacgcaccagattgtccggtgtgccaacagactgtccggtgccacatgaggacaaaggacttcaatggtcaacagctccaaatcccaacggttggctgacgtggcactcaccggacagtgaacaatgccatgcccggagcaccaccggactgtccggtgtgcccgttgacagcaaagtcagccaacggctaggaagtggttggaggctataaatacccncaaccaccttcattcgaggatccaagcctcttacacttcttatttcatacaagagcacagaatacactccaaagacacaatcaaagc

SEQ ID NO: 59923 - DNA, 452 bp, Zea mays
  unsure (1)..(452): unsure at all n locations
gatccttaagtcacctgcggcatgcaagctntntaatacactagtggaacctcaccctttcctatattctacctgtaacgggtntacttgcaccgcgttatgtctttaactcctagctatttggcgacatatattggtttcagtagaaagcagagcgattcttttacttttctatatgaaaataaaaagattccaatcccagaaatgccactgcaaaatcgaagtccttttatgcgcccattggtttcagtgaacggttgtctnttcttagtgaaacggtacgctagcactcgcatctgtcatgtttgaccaaaatatgtcaacggaactaggttctttggaacgaacctcacgagaacaaatcactgtgttcacttgcattgatcttcgcttgatttgtttgccctttttcctctctctaaagattccttgctgatattgatttgagattg

SEQ ID NO: 59924 - DNA, 429 bp, Zea mays
  unsure (1)..(429): unsure at all n locations
ctaagcttcccgtatcttcttgggaaagcacttttctcttgagatgtgtttataggagaatggaagcataaggtgaggattagagctaatttgtgatctatgtttttaaagaaaacctttcttaataaaagaaaacacataagctcagcaatgataagcacaaacaaatcaaatgttttgaataagggaagaatagagtttttccaagcacgaactactcagattcggnggctaagcataactactattgctcagctcctgcattgaggactatgctaaccaggacttatgagcactaacgttaaagcatcacatatgcactcaaaagaggagaaaacatcaagcgaaattcattntgaaatgccctangggcccacacaattagaagtttgcaaaacacgagtctacacgattacctttcatacatgc

SEQ ID NO: 59925 - DNA, 452 bp, Zea mays
  unsure (1)..(452): unsure at all n locations
cggcatgcaagcttctanagggagaacacgtgatacgcctatctaatgtttatttctaaaaagatagacctcgtgcagcttgtcaagcatgtaaacaagtgggaggagcacatcacagcaagaatgtgatgaccacgtcaagacctctggagctgctgcatatggacctctttagacccgtcgcctatctaagcataggaagaagtaagtatggtctaattattgttgatgacttttcccgcttcacttgcgtgttctttttgcaggataagtctgaaacccaagggaccctcaagcgcttcctcaggagagctcaaaatgagtttgagctcaaggtgaagaagataaggagcgacaacgggtccgagttcaagaactttcacgtggaggagtttcttgaggaggaagggatcaagcacgagttcttcgcttcctacacacctcaccaaaat

SEQ ID NO: 59926 - DNA, 471 bp, Zea mays
  unsure (1)..(471): unsure at all n locations
actcaagcttggaactatgcccgtatccaatctgcctaagccggaatatttctctngccaggtgtccccgtttgggtcgaccacgaccagcacccaacataagacttccctagttatttagccaagaccagagccatgatagttctcatggtagcacttgttttctggatggtcactccatgttctaattaatatgcaataatcttatntaaccatcgggttaaccacaataatgtaaacttaaccattggaacattaatatcatanacgggagtgactgcataaagttaagttgtagcaatagcatagcttcgaaggtaatgtataatacccaagtttgatcaaggaatacggtagaaaaggttaggtgtatccgaataggtaacccgtcaaattatgcatatatccaagaataaactttattaaatgtattgttngggatcaaacagagtatgtagagggagaagtcca

SEQ ID NO: 59927 - DNA, 459 bp, Zea mays
  unsure (1)..(459): unsure at all n locations
ctatgtgcagccactgacaggcaaaataactaatttgtgacccaaataagaaaatggtaaagcgagttcccttttcgaatcatgtgaacatctttctaagcggcaaataatgacaaaccactaaaactgggtttctcttattcaagcagaatggttagcacctacgcgaccaatgacaacaattttgtattatcaggtgcagtcatttgtgcctgtagtgttgttgttgcccaatcatgcagggaagcaagcagaggtatgacaagctttctatgttgcagccacagataggcaagttaaatcaaaattgtgttataagtcgatctgcacaatggttntgaaattgattattcttcagtgattcacaaaagggttcttatctaanaccaacaatgtaaagcataataagttatgacctacattaagcaagttaaatcaaacagcatggaataccttaac

SEQ ID NO: 59928 - DNA, 381 bp, Zea mays
  unsure (1)..(381): unsure at all n locations
atgatgaagcaggtgcctagattgtatggagctacaatctgtccgatcttgaaataagatgcatcgatcgcactttccacatgagtgacaactcatgtggagacaagtgagtgatgcaacaaactttaacaagtactgcttggctcacatgatgaggcagacgatcagacatcgaagtctatggactagtcatgatttatacagaacactatgcacattgatgcaacacaatttgtgtggccatgatatcaacccatactttagcggatatgaagtactcatgattataacagaacgagaggcanatgttntaacatagatctaaacgcatctgtaaatcaacaagaatgtagatcttgcaaacacagaataatctgtcag

SEQ ID NO: 59929 - DNA, 385 bp, Zea mays
  unsure (1)..(385): unsure at all n locations
atcctaagcacgcagctgcagcttctccttcttgtaggagacattatctatccggatgtactcatccattttctgaagcagcttctccagagtctgggggggttcctaacgaagtattgggccgtaagccctgtacgaagacccttgatcatggcctcaatgacgatttcattgggcaccatgggcgcttgtgctctcagacgcaagaaccttttgacatacgcctgaaggaattcctcatggtcttgggtgcactggaacaaggcctgagctgtgactggcttctgttgaaagcctctaaaactggtgaccagcatgttcttgagtntctaccatgacgtgattgttcctggcccgagagaagaataccatgtctgggccacac

SEQ ID NO: 59930 - DNA, 520 bp, Zea mays
  unsure (1)..(520): unsure at all n locations
gaccttagaaactcagctngaagccatggtaagtagcatatgccaataatatacgaattgactctttcctagctacgggtgcataggtttcaccgaaatccaaaccttcgacttgagagtatcctttggccacaagtcgagatttgttccttgtcaccacaccatgctcatcttgcttgttgcggaacacccatttggttcctacaacantttggttaggacgtggaactaaatgccatacctcattcctagtgaagttgttgagctcctcttgcattgccaccacccaatccaaatcttgaagggcttcctctaccctatgtggctcaatagaggaaacaaacgagtaatgttcacaaaaatgtgcaacacgagatctagtggttacccccgtatgaatgttgccgaggatggtgtcgacggggtgatctcgttggattgcttggtggactcttgggtgtggcggtctttgttcttcatcctcctttgcttgatcatttgcatctcccccttgatcatt

SEQ ID NO: 59931 - DNA, 469 bp, Zea mays
  unsure (1)..(469): unsure at all n locations
ggtgaagattcttcattccaacgtgggctagtctgcggtgccagagccaacccatgttagtcttagcaattaagcaagtatcgagttcagctctattaaaatcaactaagtatagctgaccctctaatactcccttaaatgctactgaatcatcacttcttctaaagacagtaccacctatatccgtaaaaagacagttgtaacccattttgcataattgagaaacagaaagcaaattgtaatctaaagaatctacaagaaaaacattggaaatagaatggtcaggagatatagcaattttaccaagtcctttgaccaaaccttgaattccatccccggatgtgatagctcattggggatcttgattnttctcgtaggaggagaacatccttttctccccagtcatgtggtttgtgcacccgctatcaattatccaacttgagccaccggatgcataaacctacataac

SEQ ID NO: 59932 - DNA, 435 bp, Zea mays
  unsure (1)..(435): unsure at all n locations
agcttgnggaaagacacacgaacctattgtgcatgtcttaagtgaagggcaaggtggaacggagggaaaacgggaggaggcgcgcggctacaggcggcaaggctgttcggccttgcgtttgggctgaaaacgaagggttcgccatggcgcacgggccgaaaactgaggctggggcacgaccccgaaaataagctaagtccaaacatgtggaaagacaccgaacctaaagtgcatgtcttgagtgaagggcacggtggaacggagggaaaacgggaggaggcgcgctgccacgggcggcagggctgttcggccttgcgtatgggctgaatacgaagtgttcgccatggcgcgcggtccgaaaactgatgctcgggcacgacctctaaaataagctaagtccaagcatgtggaaagacaccatacctatattgcatg

SEQ ID NO: 59933 - DNA, 417 bp, Zea mays
  unsure (1)..(417): unsure at all n locations
ggtgacttagctaatttggaggtcgtgcccgagcctccgttttctgcccgtgcgccatggcgaacccctcgttttcagcccatacgcaaggccgaacagccctgccgcccgtcgccgcgtgcctccgtgtcgttntccctccgttccactgtgcccttcaccaaagacatccactttaggttcggtgtgtttccacatgcttggacttagtttattttcgggttcgtgccacagccaccatttccggcctgcgcgccatggcgaaccacctgtttttagcccagacgcatggccgaacagccctgccgcccgtcgccgcgggcctccgtgtcgttttccctccgttccaccgtgcccttcacccaagacatacacattagcttcggtgtctntccacatgcttggacttagcttatt

SEQ ID NO: 59934 - DNA, 327 bp, Zea mays
gatgccacagccagcccatgctaggcttagcaattaagcatgcatctagaccgacctcctcttttgcaaaatcaactaaataaaagttgccgtctagtacacccttaaaagctaatgaaccatcacttcttctaaagacagacacatttacatttgtgaataagcaattatattccatgttacaaagttgactcatagacaacaagttatatccaagcgactcaactaagaatacattaaaaatagagtgctcggatgagatagcaatttttcctagtccttttaccttgccttggttcccatcaccaaatatgattgaatcttggg

SEQ ID NO: 59935 - DNA, 501 bp, Zea mays
  unsure (1)..(501): unsure at all n locations
tgtgagaaatacaagttcagaagggagaaagctgtttcttctgatcagccgaagcccatgctcttatgtgaggacatagcagagcagaacgtgctattgggatctcaactatccgaagaacaagagaaaaccttgataaggttcttgttcaacaacaaagatgtttttgcttggtcagctaatgatctttgcggagttaacagagatgttattgagcactcgctcaatgttgatccatccttcagaccaagaaagcaaaggcttcggaagatgtctgatgacaaggccaaaggtgctcggaacgaagtgaaaagactcctcagtagggatgtaatatggttcggaaaatatccgtccgaatccggattcgaagatggtgaacgctggttcggatggaattatcggatatccggactntntttcggataacggatactgatacggatattctgntcggatatcggattcgntacaatatgtcaatatccgccgatatcgata

SEQ ID NO: 59936 - DNA, 260 bp, Zea mays
  unsure (1)..(260): unsure at all n locations
tgagcttgtgccgttctctggcgttctgttgcattctaagcaccatgtcgtccacctggaggtttttggacccgacccctttggcgtggtaacgtcgcaggactgtgtgtcccgcccgagtgtataaggtcatgttccgagctctcttcaacttggtcaacgagacttctcgactaacttggatgctttggacgggatacgccctttttctctgggaaacctaatctgaagtctggggcaagatggcctcngtcccatag

SEQ ID NO: 59937 - DNA, 480 bp, Zea mays
  unsure (1)..(480): unsure at all n locations
tctcagctggtgccatggagaacaaaaatccttgaagtcttggctgtcatactgcttggccgtgtcaactgttagttcggacgatactccgaagcggcaaacaatgttttgccagaagaattcttgggcagttnttgatgctattgtggaaacagccctcgcctcgatccatttggtgaagtacttgagagcacctagagggggggtgaataggtgatcctgtaaaacttcaaaacttaagccacaaaaacttgttaagggttagcacaagtatggccaagtggctagagaggagtcaaaacacaatatccacaagaaagcaatcatagagttgacacggtggttatcccgtggttcggccaagtacaaaacttgtctactccacggtgtggcgtcccaacggacgagagtngcactcaactcctctcaagtgatccaatgatcaacttgaataccacggtggttttctttcctttgatc

SEQ ID NO: 59938 - DNA, 376 bp, Zea mays
  unsure (1)..(376): unsure at all n locations
tgcaagcttgtgatgagcagtggcagctgttttttgttattaagcacacccganaacacggaggtggtcatagcgcggaggggtaccgaagagcgcctggtgaagagtatgggctaggcacgcaatggaaaggagacagttgatgaggtatgtataggtgtggaggccctctgcccaaaatcgtgccgaaaggtgcgccctggaggagaacagtgcggatggtgtctttggtcgtgcggatcatgcgctcagccttgccgttctgggaggaggtatacgggcaagacatccacaattgcattccatgggagagaaagaacggcatgaggtatagntatcgaacttccgaccatttgtacactggacgggcttaatg

SEQ ID NO: 59939 - DNA, 411 bp, Zea mays
  unsure (1)..(411): unsure at all n locations
ntagtactntacctgcagttagcgtgagcgaggtcgatgttttgttgagctgttcaagaagatcagcagtgctgtgattgatgatgggctgatcaacaaggtttgtgggtgattgctgctgctttctttctttcttttcttctcttaggaaaatgaatacaactttcttgctttatgtatgtacacaatacacatgatcgtgatgagtaatctgggctgtggtgctcttgtcctggcatcctgcaggaggagtttcagttggcgctgttcaagactaataagaaggaaagtttgtttgctgatcgggtaaggctactttgcatactgtttctgttatgctctttgtactttgtagttgtgcaatgaanaatattgtagaactactagtagtatttagtcatgatcaggtat

SEQ ID NO: 59940 - DNA, 471 bp, Zea mays
  unsure (1)..(471): unsure at all n locations
agcttgggaactatgctcgtatctaatctgtctaagccggaactataagcacttgccagatacccccgttccggtcgaccatgatcagcacccaacataagacttccttagttattttgccaagaccagagacatgatagttctcatggtagcactgttttcccggatgatcactccatgttccaattaatatgcaataatctggtttaaccatcgggttaacaacaataaagtaaacttaccattnggaacattaatattataaacaggagtgactgcataaatttaaagttgtagcaatagcatagctacttgattagatcataatctcaggttaaacaaagagtgacgttggaaagggttggggtatctatatagataacccatcacaatatgcatatatatccaagaatanactttattaaatatattggttaggatcaaacagagtatgcagagagagaagtctac

SEQ ID NO: 59941 - DNA, 429 bp, Zea mays
tatcagcagtataaatacacaagagagaatgctgcttcagcggatcagccgaagcctatgctcctatgtgaagacatagcagaacaaagggtactgctggggtctcagctatctgaagagcaagagaagactttgctaagatttttattcaacaacaaagatgtctttgcttggtcagctaatgatctatgtggtgtcaatagagatgtcattgaacattcactcaatgtggatccatccttcatgccaagaaaacaaaggcttcggaagatgtctgaagacaaagctgaaggcgctcgaaacgaagtaaagagacttcttatcgccggtgtcatcagggaggtgaaatacccacaatggctagccaacactgttatggtgaagaaggccaatggcaaatagaaaatgtgcattgatttcacagatctc

SEQ ID NO: 59942 - DNA, 393 bp, Zea mays
agcttggaagcggcgaagggaagtctacttgttgtttactcttgcctcttctcctccggcactttgaatgcgacacggtgtgcctcgggcgtggaggagtcgccttgctcgatgattttctttgagcctttgatcattagctcaaagctcacgaatttacctattacttcctcgggagacattaacttatatctaagatcaccacgaattaattggacttgcgtacgattaagaaatactagtgatcttagaataaccttgaccatttcatggtcatcccatttggagcttctgatgttgcgcacttgattgaccaaagtctttagccggttgtacatggcttgagggtcctcgccttggttgagtcggaaccgaccgagctccccctcgatc

SEQ ID NO: 59943 - DNA, 480 bp, Zea mays
  unsure (1)..(480): unsure at all n locations
tgtcaagcatattttggtccccatctcttgatgggtccatcaaggttagtcaacaaaaatataggaactcaaatgtcctttgtgctaacacttggtaaactcattacctttntagcacaagttgcgagtttgggttgcctagttacatatgaatcaattggcaagctaggagtggaatagttactaatgggacaatccttgcatagatgtcccttccttcggcatatgtaacaaaggcgatcttcatgttttgaggatttcttctttccttatttcttgcttgctacatggttagtaaatatattattttctaaaaatatgcctttntgttntacatagggacatgacttaaccatatgtcccttcttagagcatcntaaaacattttttatcatcctagttaataaccaagccattntctttaacatagggacatgacctaatcaagtaccccttttcaaaacattcactacacttctt

SEQ ID NO: 59944 - DNA, 484 bp, Zea mays
agcttggtgccgatggagaagcagaaatccttttagtcttggctgtcaaattgtttgccattgtcaattatgagttcggacgggactccaaagcgtcaaacaatgttttgccagaagaatttgaggttatcgtggatacagccctcgcctcgatccatttggtaaaatactcgacggcgatgaaggtgaacttgaggttcccctgtgccgtgggtaggggcccgacaatgtccaggccccagcgctgaagaggccacgtgtgggcgattagctttgtgaattgcgaagggcttcccgagcgcggagaaaatttctggcaggcttcgcaggaccttgtgacctgatttgcggcgcagatcatggcgggcaagtagaaaccttgatggatcacctttgcggctagggccctgtgccctgcgtgagagccgcaagtcccgctgtggacttcgcgcagaatatggatgccttcggtctccgtgacaca

SEQ ID NO: 59945 - DNA, 422 bp, Zea mays
  unsure (1)..(422): unsure at all n locations
gatttgatcaccacccgtacccacagggaactagaatacccgaattcgcgaaattttctggtgatcaaagaaaaaacacgcgcgaacatataggccagtttttagcacaattgggagaattggccgacacagtggcacttcgtgtgccgttgttntcattatctctaacaggaaccgcgtttgaatggtatgccactttacctcctaattccatttcatcatggngggatctagaacaaaaatttcatgatcactttttctccggcgactatgacgttggattggtagatttagtgtcattgcgacagacaaaagatgaatcggttaatgaatacatccggagattccgagatacaagaaaccgatgctctcatattcatttagcagactaacagctagtacgattagcgcttaatggtcta

SEQ ID NO: 59946 - DNA, 391 bp, Zea mays
  unsure (1)..(391): unsure at all n locations
agctntagggtaaaagtcataaaatgaccccattaataatctngaatcacttttatacccctgggataccagaaaccctaattgaaaccctggaaaaccctgaaaccaaaccctagggacttatatgcaaaattagccacttttgggctaaagtgcaaaaaccaagccaaataagcattttaagtcatttggttcaccaatatgtggacttgaaagcaaaaccctaagttttggacttaaatgcaaaatggacctcatttgagttctataccaagtctgaaatttaatgttaaaggctccactttggggctntgtaactttcaaagcatagggtttttgccctaggtcaccatatcaaagttgaagaccaaacataggagaacaactttgc

SEQ ID NO: 59947 - DNA, 375 bp, Zea mays
  unsure (1)..(375): unsure at all n locations
gcttaacaatcttcaaaatgagcttcagactatngaccttcggcatcgttatcctgcacacaacaaaacagtataaggtaaaaagtaattacaagagaacaagcaatagatataagtatcgtactgaaagggaaatgtgcccttgggccatttctaagtattttggtgattgagtgccaacacaagtgcttaagtgtaaatctatgccaaatattggacaaagtgcanatcaagtctaaaggtatgtttctagacttagtacattgttttgagaactaatgtattgtgtctaagtgctggaaacaggagaaatcgaattggaaaagagatggctctgttcagccaaagtcagctcggtctgggtgcaccggactg

SEQ ID NO: 59948 - DNA, 393 bp, Zea mays
  unsure (1)..(393): unsure at all n locations
gtttgagcagagttatggattgacctaacatgcctcgggtgaaaccttcctccgaagcccctggtcatttcagagaacctgaatgcttcctcccttctttggcggaagtcattgtcagctcaaatgtattcgtccatcttctggagcagcttctccaacgtttgtggtggctcnctggcaaagtactgcgctgatggtcccggccgaagccccttaatcatggcctcaatgacaatttcattgggcatctgtggcgcttgtgccctcaggcgcagaaaccttcggacatacgcctgaaggtactctttatggtcctgggtacactggaagagagcttgagcggtgactggcttcgtctgatacccttggaagctagttatcagcatatccttc

SEQ ID NO: 59949 - DNA, 488 bp, Zea mays
  unsure (1)..(488): unsure at all n locations
cctactacgagcaccccggtgcaagataatatatgcctcattccccctctcgtggttcatcttgcatcaacccatctgggcatggacacgcaacgtcaaattcactagtcggttgagggtcctcgcgggtccaaaacgctgacaatatatatatatatatatatatatatatatatatatatatatatagggcaggtataacgggagccctgggcttcggatattaaagagatcccacgtcggttacgtggtctggtccgctgaaacaagcgcgcctgtccaaacaggcgacatgcatgacagacgacgccgttacgcggttggtttaatggcaaggcggtaaacatatggaagtggcgcggaattatatggaatagattccacatgcacacttgcttactctgttacgtgggcgcggaatttatggatctcgcatggngtgtaatggcggcacgtaaatataatgtacaataagatgttaaaagata

SEQ ID NO: 59950 - DNA, 383 bp, Zea mays
  unsure (1)..(383): unsure at all n locations
cgcaagcttgccagatcagttctgatgtgtggttgtgttctttatatgtcagagaacacgcgtagaggaggaaggcgtgctcancaggagcgagccgctccgcaggatgaggtgccccagcagcagcacctgccgcccccgcccccgatgtcgattgagcagatgtttctgatgcagactcaggcagttcaagccatcggtcagactctggccgccattcagcagcagcagcagcagcaacagcagcaagcaccaccccagcctcagatgcctcagatgcctagagacaagcgtgctgaattcatgagaggtcatncaccaacgttcgctcactcttctgaccccatggatgctgaagattggctgcgcactgtggagcggga

SEQ ID NO: 59951 - DNA, 400 bp, Zea mays
tggagaaacataaatccttgaagtcttggctatcaaactgcttgccgttgtcaactgttagttcggacggtactccgaagcggcaaacaatgttctgccagaaaattttttgggcagtcttcgatgttattgtagaaacagccctagcctcgatccatttggtgaagtactcgacagcgacgaaggcgaatttaaggttcccctgagcggtgggcaggggcccgacaatgtccaggccccagcgctggagaggccatgtgtgggcgatcagctttgtgtactgcgaggggctgcctgaccgaggggaaaacttctggcaggcttcgcaggaccttgtgacccggtttgcggcgcaaatcattgcgggccagtaaaaaccctggcggatcaccttagcagc

SEQ ID NO: 59952 - DNA, 420 bp, Zea mays
  unsure (1)..(420): unsure at all n locations
agcttancanaagaaatatctagaatctataatattgtgctcatgcctaagcctggtaaaagattgttcatcaagtggctnggtaaagatatcggctaattgttctttagtattaatgtaagaaatctcgatatcccccttttgttggtgatccctaagaaaatgataccgaatggctatgtgcttattgcggctatgctcgacgggattgtcggccattttgattgcactctcattatcacatagcaaagggactttggttaatttgtaaccgtagtcccgcagggtttgcctcatccaaagcaattgcgcgcaacaatgtcctgcggcaatgtactctgcttctgcggtggaaagagtgacgtgaatttgcttctttgaagcccaagacaccaaggatcttcccaagaactggcaagt

SEQ ID NO: 59953 - DNA, 449 bp, Zea mays
  unsure (1)..(449): unsure at all n locations
ctctaacagataaagcaagtagcattgtctatgaattgtattgattttattattaagaaaacaatcactgagacataaaattgctaagatgcaatccaagtgtgcacaattaaagaagaaactaatcctctcatgtttctgaaaaaactgaccaagaaatgtgntcctcatacaagcatgcatatgatacatgtctaactggaagtctggaatgaaaattagtatgatgaggtatgcaatactactaacatgggaataacagcagctaggcttcatagtaaaactagtcttctaaaggaagtgccaaatcagcaaatgccatatagaacaaccgagttatccaaacagatggtctggccatcgctacgcccacaaatgatattgtaacaccaaatctcaaatgcatagctttgaatgataaaatgccttgcactntntaatatcttatc

SEQ ID NO: 59954 - DNA, 457 bp, Zea mays
  unsure (1)..(457): unsure at all n locations
agcttgattctttaaaatagcagtgcttggtttcatccatgtatatcctggtataagtggtaaggttatggttatctcaataagtagagtagcctagttgtttggttagcaaaccttgggccgagtctagttgtgaatacaatccatgaccgttgtgggtgttctgttttttttttcccttttcaattccgtctactgcgcagtgagtttacatgtactggctttgtttcaaatcctctggtaaatatatctgcgcatagcaaagttgtgttgtttagataactgatcacagaaaaaaacttgcccccgaacaggtcgtggaagtgatcagcaatccatacgcacaaaagaaacggtgcctgcggagaacattgacaggtccctggtaaccgagctgttgacgaccgaccgggcttgacaggatatntaacattatggcacctgtacatatatacct

SEQ ID NO: 59955 - DNA, 331 bp, Zea mays
  unsure (1)..(331): unsure at all n locations
gaaaacaccttccctgagctcgttggcgagaaacgatttaatttcccagcgcatagcggtcccaccttgcaaagatactggttgtccctgcggtccaccgcgcaacgagcgcaagcgggtgtccgtctggtgtaaaaattctggcgcttcgcctatttacctgcagcactatataaacagacaggtaggtgtgaagttaccacaacattcattgctatttgcactggtttcctaccagaatatttaaccatcgccgaaacttgtctgtcggaatagaacgaagctccagttngaaacctgattcggacgaagaaaatattaaagtttcaca

SEQ ID NO: 59956 - DNA, 466 bp, Zea mays
  unsure (1)..(466): unsure at all n locations
agcttgatctctgaagtgactnttctgcacttatgtatgattagctntacatctggactgatcactgatgaagctgccgattgatttctactggcatcacaaagtcgtatcatatatgtttgttatatcgacttgatttgtagtacgatgatttcggtgagattggatctaattcaggatggggttaacaactggagctggaaacaagccgagctcggctcggctcgcccatttcacggttcggctcgcgagccacacaatgatatatataattgaattatttagtgaattattagtatataaatataaaatatatagatattattcattattatgagtaatctaaattatgaattgacatatatctatcatgaaacgctaagaaacaaacaggctctctataaaattattcaatatctattattattattcatattaaataattttgcatagctcgctcgagctt

SEQ ID NO: 59957 - DNA, 478 bp, Zea mays
  unsure (1)..(478): unsure at all n locations
tctanagggagaacacattntatgattaacaaatgttcattttgagaaagacagggtttgtagcgcatgccaggcgggaaagcaagttggagcccatcatccacacaagaacatcatgacgaccgacaggccgcttgagctactccacatggatctattcggcccgattgcttacataagcatcggcgggagtaagtattgtcttgtaatagtggatgattattctcgcttcacttgggtattctttttacaggaaaaatctcaaacccaagagaccttaaagggattcttgagacgggctcaaaatgagttcggcttaaggatcaagaaaataagaagcgacaacgggacggagttcaagaactctcaaatcgaaggcttccttgaggaggagggcatcaagcatgagttctcctctccctacactccacaacanaatggtgtagtggagaggaagaatagaactctattggacatg

SEQ ID NO: 59958 - DNA, 352 bp, Zea mays
  unsure (1)..(352): unsure at all n locations
accggacttaagcactgagctcagcaacactgcatgggattctcttttatntcatggcagacccaaaaaacaactcagcatgatgattgttctcagccgttaggtcacattgatgtacaattttatatactgattgcacctatcactattatatacctcttggttgcaatattcctattggctgcacccaatccattaatttggaactttataaatctgtatttttacaacacttattttatgttgtattgtagcaatcacactgccatatatgataaaactaactgtctgctcacctacaagaacgcgcccacctggccaatccctgaatgggccggaatctgccaagaac

SEQ ID NO: 59959 - DNA, 419 bp, Zea mays
cgtgacactatataactctccatctaggcgtagcgcgccgacgggtcctgcgtgcacagcactattacgctctgacaggagatggcacaagattactgcctctgtcgaggaggtcgagtctgctatcatccacgccctcacatgacctagcaatcattacacgcaagtcgactgagagcactgagtggactctgtcgatgagggatttaatgatgctggccgactatgccgacgcgatctacgcgcgctgcgccgtcgtccggtgggccagtctcttcatcagcaccttcttgtctgtgacacatactgtgcctactcctaaagcaacctaatcctcccgattctcacaggctgctgaacctgcccgacggatacgaggcgcgatacttcatcgatcacagcctcagctgaggctatta

SEQ ID NO: 59960 - DNA, 406 bp, Zea mays
  unsure (1)..(406): unsure at all n locations
agctnggcatacaactggcaatccctgtacctctgaattactttcctcaaatgttcctcatgctcttgctcattctatgaatatataagaatatcatcgatgaacaccactacgaacttgtcaaggtaatccatgaacacactgttcatcaggtacatgaagtaagctggcgcattcatcaaaccaaatgacatgaccatgaactcatatagtccatacttggtgatgaatgttgtctttggtatatctgaaggtcggattttgagctgatggtagcctgaccttagatttatctntgaaaacacactggctcctctcaagtgatcaaataagtcctcaattcgaggcacggggtacttgttcttgacagtgacttcattcaaagctctgtaatcaatgcacattc

SEQ ID NO: 59961 - DNA, 446 bp, Zea mays
  unsure (1)..(446): unsure at all n locations
agcttacttcatgtgaagatgcccttttttgattatntgctattntatatggggtaaatgccttttccagacaaaaataaataaaataaattaccaaatatgataaaaaatagtgaatcttggcatagagtcgtaatatggctctagttgcttgagataaaaaattcataggattatatcacacattttaatataggtgctttacaaatggacacatctgtcgtcgagttttgtaacattcaaccataactacacatnttgagctatatttcgtacttttgtttattttgttgcttcaaaagtgaaccacatgttcatataactgttacaaacttacttcatgtgaagatacccctcttttgattatttgctattttatatgggttacatgccttttcaggcaaaaataaataaataaataccaaatatggtcaaaaatagtgaat

SEQ ID NO: 59962 - DNA, 444 bp, Zea mays
  unsure (1)..(444): unsure at all n locations
tacaacataattgatccttcttcgcaagctctgaaggatattatgagaaatcgagaagctactggaaggattggaacatgggctgcagagctcaatgaattntgtattgattatgttcatagatcctcgattcagtcctaggcgttagcaaacttcattgctgactggacgccacgggctcatgatgaagaaacatataaagatgccgaagcatggacagtgttttgcgatgggtcttgaggaaccttcggagcaggagcggctgctgtgatggattcaccttccaaagctaaaacttgttatgcggcaagacttgaatttaggtgcacaaataatatcgctgaatatgaagctctgctctcgggtcttcacaagttaaaggcaatgggaatcagaacggccattcttaanactgattctcaagttatttctggtcatgttgac

SEQ ID NO: 59963 - DNA, 496 bp, Zea mays
  unsure (1)..(496): unsure at all n locations
gacccggatcttaagtcacctgcggcatgcaagcttgtgaaagttcttcatctctccatgtgcttagcggcgatgccacagccagcccatgctagtcttagctattaagcatgcatctagaccggcttcttcttttacaaaatcaactaaataaagtttgccgtctaatacacccttaaaagctagtgaaccatcacttcttctaaagacagacacatctacatttggaatagacagttatatcccatattgcataattgactaaccaatagcaaattatatccaagagactctactaaaaacacattagagatagagtgctcatttgaaattgcaattntacctaacccttttaccttgccttgattcccatcaccgaatataattgaatcttgggaatccttattcttgacgtaggaggtgaacatattcttctcccccgtcatatggtttgtgcatccgctgtcgataatccagcttggacccccggatgcat

SEQ ID NO: 59964 - DNA, 475 bp, Zea mays
  unsure (1)..(475): unsure at all n locations
tcgtcgcgatagcagagaggggaaccgacttatagatgaaaagactacgtggaccttgtcaggtttccataagtcattgacaaatgtaatggacataaatgttattttacgtgggctgcgtcccgcgtctataaatagatgaacagtactcccgtactgttcacgctgacttggcatttgcttttgcgtcacgcttgtacttcttatcttctctcaggaccgaaggtacatcttgtaattgaaatcatttctatttttccatgttaataaaatagaaatgattctatgatgatgcttatattatatttcatgctttatatgaatccttcgtcattacttgttatgtttacgaaggtatgtctcttatgaccttcgtccgaaactcattatttcccgaagggacataatgcttcgaaggacgaaggactttaacacttaacactctntatgttgccttgttcttaattcttagcat

SEQ ID NO: 59965 - DNA, 408 bp, Zea mays
  unsure (1)..(408): unsure at all n locations
catgcaactnnatatantatttagtggatcaaagatctatgtttaaaatctatctaagcgggaaacatcataacacaacgaactgggaacatactcatctcatggtgttatcactaacacatggtctaccaaatatatgtattcttctttctaaacataacttcataaataattgtaaacaattaacatacaccatacgactgatagtagtcatcgcttacaattaaaatcaattcgttacgtacacatcatagtatacacaaattacaacaaatagtacataaaacatgatctgaaacataaaataaaaatcgagttgtcttcaaccctcaatacttgcgctcaagggagaggacgaacgacgtctatcatggagcggtcaacatctaacagggcgcgaccgggaca

SEQ ID NO: 59966 - DNA, 462 bp, Zea mays
  unsure (1)..(462): unsure at all n locations
acaagcaccatctcttaacatatattttctatggataaactcaacacaagagatgacattagtagcacacgcattagtttcttatttagcaaccctttatatgncgaagacaagcgtgttgctaaaaacagaaaaacctcataatatggactacatttcccttgagcccttaagcacaatatantttgaatgatatggataatatgcatgattattcaataaagtctaaagggctgacttaatccatattatggtgagtgtctaatatagaagaatcaaatccanattaactagagagagtacatcacatagttttggatttgttgaccatatgataatattcatttatcttccaattagacctttatttcataatcaataactgatgtatatcctcaagtgcttcttttcccttagtggctacacaagtcacacaagagataagatttgaaataatatgca

SEQ ID NO: 59967 - DNA, 436 bp, Zea mays
ctgcagctgctaccatcaccctttactggttttgtattttgtctactacgaagtgggctaagtactctcccgcagtactgaagacagactcacattactgtgactgcatcggccactcaatcagtgagagggagagatcgacttcactggaggacgaattgatgggctggcatggcggacctgaagggcggcacgccgtgctcccgcgcaaagcatatcggagctcatgcgctcagcgcatctgcgcagggtggagctcacagcaaggcggatttcatatttttagagctgcgtctacgcaggggccggcggcacttatagcatggcggagcttggagctgcgtctgcgcggtgggccggtgcgactcgggtggcttgcgggttgtggcttgcctatgcagcaccggtggctcttgcgcttgaggctgcaggatga

SEQ ID NO: 59968 - DNA, 518 bp, Zea mays
  unsure (1)..(518): unsure at all n locations
aactaagcttactcacagcatactctgtacacaagcaaccttcgntattaatcttctcttcgtggtcaaaacaataaaaagttgaagaaaagntnttaccttgaaattagaataaaataagctaccgacaagatgttgtcgtcggtagcggcttatgtcggtctcaagccttgggaaaccaatactctttgatagagtaccgataaccttcgcttcgggttgatctcggatgcaccccaacttttcatcgtcaacaccaccgaagagtagtgcccctggttgatatccgcaggatatggcatattcttttaattcttctttctcagccttcgttaactcttgtccaactaagttttgaaagtcgaaaatttcctcttctgaagcgtcttcagctattttcttccccttctcaagtactgtagccacggcttcttcagtggctgtggcagcttcttctgtggccatgtctagaagtatcttatcaatggttgaaattgtgccttctaaatgacatcttc

SEQ ID NO: 59969 - DNA, 418 bp, Zea mays
atgcttccgtcaactctgcacaagtcaatggctggccaagcgaatacatccttgttattaaatattaactttttctgactcccttcctgttccaatttcaattctgaccagaaaattactttctactcggctatgtcttcatagagaacgactgcctttggatgatctgttgatgttgcattgactcttacctactttagttcgttctgagcttcaacttcatcgacgttatgaataaatcctttatgtgtccagatccctataactctccttgcagcttcttgattcccgtgtatcgagatgagcccttgacttaatggtatgtatcttcatgcaaagatatgctagatgcatactgattcgagacattacagcccctaccaaattgcttatatagaactccatgtcactatatcaa

SEQ ID NO: 59970 - DNA, 423 bp, Zea mays
  unsure (1)..(423): unsure at all n locations
tacaagtttagaagggaaaaagctgcttccgctgatcatccaaagcccatgctcttatgtgaggacatagcagagcagaaggtgctattgggatctcaactgtccgaagaacaggagaaaaccttgataaggtttttgttcaacaataaagatgtttttgcttggtcagctaatgatctntgcggagttaacaaggatgttattgagcactcgctcaatgttgatccatccttcagacccaganagtagaggcttcggaatatgtctgatgacaaggcagaaggtgctcggaatgaagtgaaaagactcctcagtgccggagttatcagagaggtaaaatacccagaatggttggctaacactgttatggtaaagaaggccaatggtaaatggagaatgtgtatcgattttactgatctcaat

SEQ ID NO: 59971 - DNA, 242 bp, Zea mays
tgacagccaaccatctgctggtgagaatatcaacacaaggcttcggctcccacattgaagacacaaaaacctataagttttatcaacaaaaaaggcttgcaggcagccaaagactatgtggaggatcggatgtaagaacatcctcaaattaccctccttcaacccgcagctaggctcggaaatgttgaaacaagccaagggtcgcgcaaaaaaaaatccaatgcagagatctaaatgagttc

SEQ ID NO: 59972 - DNA, 414 bp, Zea mays
  unsure (1)..(414): unsure at all n locations
actccaagcttccccgcacgccaaggatacgcagagctcgggcgctanggaacattatgatcgccnttgctacagacantagnagactccaagcactatattctttatgtccctgggcccacatgtcggggcccacaccctttgtgcatgccccccttcagctataaaaggggaggcatgcgacgttacgcacacacactcaatattaggacacaccttagactcgcaagctcacaagcaatacatctcacagtggagtagggtattacgctccagcggaccaaaccactctaaatccttgtgtgttcttgagatctttccgttcattctaacgatcaagcanaacgcctaatgccctcctcatttcaagatttacggagggtgcactccggcacccagccggataattactct

SEQ ID NO: 59973 - DNA, 54 bp, Zea mays
  unsure (1)..(54): unsure at all n locations
gaccttaagtcacctgcngcatgcancctgggtgctatgaggattactcttatt

SEQ ID NO: 59974 - DNA, 496 bp, Zea mays
  unsure (1)..(496): unsure at all n locations
tagcgtggatgagaatctgataatttttataaatatattgttatangngagtgcccgngcgatgcaacgaaccactacattgcaacctttaagcacaagggatttgccacttgcaacgaggccaaaagctccaatgtccgggaacaattcataagaggcggaaatcataatgcggagtccttcagacaggcaaccgattattgattangttgcttcgtgcttgtgaaatttatcgaaaagcaaaggaaggcactaacttgagacaacaggaaaggagggaggcgaggcagagcgccgagcggcctcgtgaatgcccgctctagaacttggtggacattctcctcgtgccacagcttctttctcagcttggccacatgtaagacanaatcaaaaatgctagacgtcctcagcagaaatgcaacgggcttacgactanacaccatgtagagagagagagagagagatacatcttgctgcagtgcaattnttatgtccc

SEQ ID NO: 59975 - DNA, 391 bp, Zea mays
  unsure (1)..(391): unsure at all n locations
gcaaggcacaaccattncattctgggatgatcagcggagtcagggcatcccgaggcatattttcccagagctcttctcctttgccaagaactcaaatatgactatcatagaggtcaaggatcatgaacagcttcatgaactctttcatatacctgtctctgaacaagcgtttcattcatttctggtactcaaggagtcttgggagcaatatattcttaataatggtcatgaccgctggaagtacatttggggatcggacaaattctcgtcccacaaagcttacagatctttcatgggccagatgcagactcatcctatctacaaactatgttggaaaagtaagttcagcctaagcatacagccttctattggctgtggcttaagaacacgc

SEQ ID NO: 59976 - DNA, 481 bp, Zea mays
  unsure (1)..(481): unsure at all n locations
cttgagtttgatcaagngatactgatgttgcgcttttgtttgtcgctcgntcgnactttggggaagaaatctgccaattgagattctgacggcacatattgaagatcaatagtcttctgctgacaatgagatacagtaaatgatgcatcgataccaatgtgtttagtaagttcatgcttcactggatcatgagatattcgtatagcacttatgttatcacatatcagaggtgtaggatgtgcacaagagacaccaagatcactcataagccagcacagccaaataatttcatcagttgtagtagctagagcccgaagtttggcttcagcactagaacgagatatggccggttgcttcttggatttccaggcaatatgggaggattcaagaagaatacatgtacatgtagtataacagtcgtcaacaggatcacttgcctatatggtatctgaatatgcattgagcttgaagtgtgctatca

SEQ ID NO: 59977 - DNA, 269 bp, Zea mays
agcccttgtagaccgtcatgaatctccgccacccaccacaatcctagtgctctggacgatgcaaaccatctccgcttccgctgtgagaatgctctcttgtcgactgtcgtgctcgaagacaaattgtggacttgctcgcggacagggagcttctcccaagccactggaccggtatgggggctatagtgggctcaaagggtgaccggtgtgcgctcacattgctcgcaccgacgaattttcgcccatcgtcgtggccacgctcctgcgcc

SEQ ID NO: 59978 - DNA, 423 bp, Zea mays
  unsure (1)..(423): unsure at all n locations
agcttcttcctcctctgcccctagttgctgttttgttttatgaactctggtgtgtccctgttgattgagagtggctctactgcccttgagtatggatgttcttgtcttcactttggcctaggatgtggattgttctgacgtgtcttatattaaatattcccctgaaaccccttgtcatcttatagtatctggtagcctcctctcttctttgtcgaatatcattgtcgaccctgatatattcatccattttttggagaagcttctctagaatctggggaggctttctatcaaaatactgcgtcgttggacctggccgaagccccttgatcatagcttcaataataatttcatgtggcactattggtgcttgtgctctgagtcacanaaaccgtctgacgctatcctataattactcttatgacc

SEQ ID NO: 59979 - DNA, 117 bp, Zea mays
gaaagggggataagaaaaacacccccccaaaagagagaagaagagacgagaaggaggaaaagggaaaaagaaaaagggaaaaggagaagagagaaggggagaagaaaaaaaaaagga

SEQ ID NO: 59980 - DNA, 490 bp, Zea mays
atccttaagcaccgcggctgcaacttccatgtggcttgaacattcattttatcctctttgttgaccgggtgaccgccacaagttggtgttcttctgcagtccgaatccagcatgttcaaatccttttccctttcggtcttctccctagttcctaagcaaaacaagagtgcacgggtctccatggtctaaatatgatggacatgaactcaagtgtgtaatcacctgatggttgagttgacgagcacgagcgcgagtaatgggaccagaaattggtacttgtattggcatagatgtatcagtattgtggatgtcttcatcattctccccttcttgcatttgagttgtcctcgagctcaacttcctctcccaagtagggctttaaatcgtgtggatttaaccgtgaacttcgcctttgacatgtcgtgcaatgagcaaccaatctcgccacatctcttctcatattgtgccacaagaaatgaccagcaagtat

SEQ ID NO: 59981 - DNA, 438 bp, Zea mays
  unsure (1)..(438): unsure at all n locations
ttaagtctccttgaaatccttaaaggtaaatgcttgggatatttataacatgctttcataagtgcatataatgtcatgagcatctcacttatactatgacacaatacactttccactctttatgatatagacatggtctcattaacctaattatgtgcacttggctntttagaacaaaaatttgttttcctctctatgcacatatttagggggagcaatctatattgtatagaattgattaagattaattgacatatctttttaaatcatgtctctttcctttggtacatttgcatatttcttatctttcattgtgtgccaaggctaagactaatatgttttcatgagcatctcatgtattaagtcttagattgaaagggaaatagagtattcggcaaagacatcgcttccactcaactccattggtattatccactc

SEQ ID NO: 59982 - DNA, 458 bp, Zea mays
  unsure (1)..(458): unsure at all n locations
agcttaattccctttcagcgggcgggaccaacctttgtgtttcgctgccgaggccgngagccggattgaggtcctcgggggacagctggctgaggctacggagcggccaaccgaggcgtccgctcgggccggaacccttgcggagaacctgaccgtgagggcccaagcgcggtgttggcgtcctcctttggggtggagatccctccgcccgtgtcgccgtccgaggctgggccaggttctgccgagggtggaaacatcgccgagggtgttgttgctccccctgcctatgtctaaacctgcaggaacagtttgtctgtagtatgcgtatgtttttcgcggctgctgaggcctaaatattttaacgctggattgtaaagctgtgttttctttcctctcgtctcgcgtgttaggacttgtttggtagcataatccctcgtccgagcgtgagttactttttg

SEQ ID NO: 59983 - DNA, 499 bp, Zea mays
  unsure (1)..(499): unsure at all n locations
tctttcttccttctcatcctcattngtgcttccgctatcattttcattatccacacaacatatgtgggaatcgaaatgggaagacaaaccttntggagaggtggattcatcgtttggtctccatcgttcattttcttcttcttccttcaaagggttagtttcacaaataccaaaggaaggagaagcacaaaatgaactatcatgnttggacttgtcaaaattgttttaattctagtccaaatatcatgcacatcacaaatgggtttgtcatattttattatgagggcatgataatcttctntgctaagggattcacttaagatgtcataagctagatagtttaagcgtatacatcttaaatcttcttcggaggcattntccctagcatagttaggaggaataatactcttgtctaanatttgttctaattgtggatctaccgctctaaaagcatntatcactctagtagaccatgaatcatagttagaacaatcgaaaa

SEQ ID NO: 59984 - DNA, 419 bp, Zea mays
  unsure (1)..(419): unsure at all n locations
atgaagctcgaggctgactcgccgaagcaacagaaactgcaggatgattttttcatatncnggaangnanggcgaatgatactaaactgtatgcatgacctgcttcggctgagcttgttgtgctgctgcttcagctatttccttttgcttctgaatagtaacatggcacatcctggtagtatggcctttgttctcaccgcagaataagcaaaagattcttctcggttgatcgccaaatcttcctccaaagcccctggcgcctctgcctcttggagctggtggtctgaaggagctttgctgttgccccgaagcctgtgaagaacattgtggcctttgctgttggcttcctctatcatcattntgtgtagagntatgaattgatctcacgtgcctcgggtagaacctccctccgaagcccc

SEQ ID NO: 59985 - DNA, 477 bp, Zea mays
  unsure (1)..(477): unsure at all n locations
acctatanaagcagtcctacgtggtcgcatgcgtcgctttgtacgacaagctcccgcgaagccgccgcttggacgcggtccagagcagctgcaccgtgctgtccatcgntaagcagggggccttatggttgtcgccaatgtcgacgactctcgggttgttctggacaccgcatccgacgacgacgccatcacgccgtccagctcatcgtccacctgaagcccaacctgtcatgtaagtcgctactgaccggacatgaattcttgtgtgttgggacgatggacgttgctgacgttgtgttagtgtcctcgaacatgatgtatgtagtggagtagcgcatccggtggtgcaatgaccaggggtactaccttgctgatgaagcccaggtgcacttcgttngacagcccaaccaagagtcatcggtactcgtcatgtcgcgcgcattcgacgactactatatcgaggattgtgcgtcatct

SEQ ID NO: 59986 - DNA, 393 bp, Zea mays
  unsure (1)..(393): unsure at all n locations
agcttgtgacgccggagccgacgtcggtgactactccgtctatctcgtgcctgcgcccgaaaggatgagcgagcctanggtggttaatttgttgctttgctgcggccgtctgagtaaatccctgtcctcgcttgcaaaatggaatggcttgggtgttggtgaacatgtatagttacccgggaacgacggggtacttggcgttgccaaactcgttcttgatgacgtggaggtcagtgtggcaaagcccgcagaagagcaccttgatggtgacgtcgtcgtctctctgaaccctgaaatcgaaatcagccggcgcagcatttcagtccacgaagatgatgaactagtgcacaagttgtagactgcagcaaggaaagcaataccttcgtgagaagt

SEQ ID NO: 59987 - DNA, 441 bp, Zea mays
  unsure (1)..(441): unsure at all n locations
tgttagaaaacggggttgtgctagtgacccaggttacaaaatgcaagcaaatgtcatgtagaatcttgattttctcaactcatgatcttgcagaaccaatcaaatagtacaaatttatctattccccagcttcgctagccattttgtcgagattgaaaatgctaaatagtaaatacaaagcaaggcatctggtttaagtgaaccgaagaggtcatgggtttacatcagaatgaccaaatattaatttgtgtcacatactcaattgtcagttgtggggcagggtggtggtcatgtttttggggttatatgagagcgtagaanaggtcactgtgctagtgctatatgccttattaggatttattaggagtaccaccgtgtgaaacctctggcagtngttgcattacagctgggagctcttccttggtacttatgggtgaatct

SEQ ID NO: 59988 - DNA, 425 bp, Zea mays
acctgcagctgcagcttctaagggagaacacatttgggactatcttttgttcttttgagaaagacaggatttgtagcgcatgtcatgcagggaaactagttggttctcatcatccacacaagaacattatgacgactgacaggccactcgagctcctacacatggacctattcggcccgatagcttatataagcatcggcgggagtaagtactgtctagtcattgtggaagattattttcgcttcacttgggtgttcttcttacaggaaaaatctcataccccagagaccttaaaaggattcttgtgacgggctcaaaatgagtttggcttaaggatcaagataatttgaagcgacaacgggaccgagttcaagaactcacaaattgtaagctttcttgtggaagagagcatcaagcatgaagtc

SEQ ID NO: 59989 - DNA, 357 bp, Zea mays
  unsure (1)..(357): unsure at all n locations
tagctcttgcgctcggatagctttcttctttctcattctttcttgtgatcaatactcaatcgttaccaaggcaagagacaccaattgtgtggtggtccttgccgggaagttttgttccctgttgatttgagaagagaaagctcactcggtctgatggaccgctcgagatagggaaagggtttaaaaagaccggcctttgaggtctcctcaacggngagtatgttagcgataaccgaacctcggtaataacaaatccgcttgcgatttgttttgcaccctctctcgcggattcaattatatttctaacgctaacccggcttgtgttgtgattaacattgtaatttcacttcgccctat

SEQ ID NO: 59990 - DNA, 463 bp, Zea mays
  unsure (1)..(463): unsure at all n locations
agcttcgtnacaaagaattccttattttgttatatagctgatgaagctgtatttcttatttcttaaaggttattttgtgctttagcacattttaatttttacgaagcattctccggaggtcgacttcgtatttgattcatgccattgatgcgatatgatgtatgatgtgatactatgcacgatgatgtgatgatatgatgcaaaanatgatgctaatgccgaagacccacacccacactgaaacacacaatctctgcgtccccttaggaacgattggaatctctttgtcgtttatttttcggcttcaccgtttattatttggtgtaagttctgcatccccttaagaacgtcttttgaacttcttcgccttctatttcggcggtataagttttgcatccccttaggaacgtctgtagaacttcttcgccttatatttcggcgatatttggctctgcattccttt

SEQ ID NO: 59991 - DNA, 476 bp, Zea mays
  unsure (1)..(476): unsure at all n locations
tctaaagggagaacacgtaataggtctaaccaatgtatctttcgaaatatatagaccttgtgcagctggtcaagcaggtaaacatgtgggaagctctcatcatgccaaaaatgtgatgacaacatcaagacccctggagttacttcatatggacctcttcggacccgtcgcctatctaagcataggaggaagtaagtatggtcttgttatagttgatgatttttcccgcttcacttgggtattctttntgcaggataaatctgaaacccaagggatcctcaagcgcttcctaaggagagcccaaaacgagtttgagctcaaagtgaagaagataaggagcgacaatgggtccgagttcaagaaccttcaagtggaggagtatcttgaggaggaagtaatcaagcacgagttcttcgcttcctacacaccacagcanaatggtgtggtagagaggaagaacaggacactactagaca

SEQ ID NO: 59992 - DNA, 344 bp, Zea mays
  unsure (1)..(344): unsure at all n locations
tgtagtgcatgtcaagtaaggaagcaagttggtgttcatcatccacacaagaacatgattacgactgataaggcgcttgagttacgtgacattgacctattcggcccgatagcttacataagcatccacgggagtcagtactgcctagttattgaggatgattattctcgcttcacttgggtgttctttctgcaggaaaaatcacaaacctaagagaccttacagggattcttgagacgggctcacaatgagtntcgcttaaggaacaataagattataaccgacaaccggatggagttaagaactacatataaatgcttcttgagacgaggcatcaacatgat

SEQ ID NO: 59993 - DNA, 468 bp, Zea mays
  unsure (1)..(468): unsure at all n locations
taacaccacanacttgattaagagttagaacaatgaaatcttgtgagtagagaggagagctcttgtggagcacaatagacacaataagtacaagcacaagagacacgaggatttatcccgtggttcggccaagtacaaaacttgcctactccacgttgtggcgtcccaacggacgagagttgcactcaactnctctcaagtgatccaatgatcaacttgaataccacggggttcttctttactttactctttcccgtntgtgaggaatctccacaacttggagtctctcgcccttacaataagaatcacaatgaagcactagagtaaggaagggaagcaacacactcaaatccacagcanatacgcacacacaagaccaagacttgagctcaaaagagtatcacaaggttctcactagaacggagctcatatcactaagaatgtcgaacaagtgtgcgagaatgaagt

SEQ ID NO: 59994 - DNA, 443 bp, Zea mays
gcttctaaagggagaacacgtgatatgtcttacttatgtaactttcgaacaagatagaccttgtgcagcttggtaagcaagtaaataggtgggaagctctcatcatgcaaaaaatgtgatgaccacatcaagacctttggagttgcttcatacggacctctttggacccgtcgcctatctaagcataagaggaagtaagtatggtcttgttatagatgatgattttccctgcttcacttgggtattctttttgcaggataaatctgaaacccaagggaccctcaagcgcttcctaaggagagctcaaaatgagtttgagctctaggtgaagaatattatgagcgacaacgggtctgagtttaagaaccttcaagtggaggagtaccttgaggaggaaagaatcaagcacgaattctttcgtccctacacaccataacaaaatg

SEQ ID NO: 59995 - DNA, 87 bp, Zea mays
  unsure (1)..(87): unsure at all n locations
tgatctctntggtgtgtcttgtattgaatgctataactcttgtaaggtgtataagtgtataaacttggatgccattgaatgtggggt

SEQ ID NO: 59996 - DNA, 366 bp, Zea mays
  unsure (1)..(366): unsure at all n locations
agcttatgaagatacttcatcccaacatgggctattctgtggtgctagagccaacccatgttagtcttagcatttaagcaagtgtcgagttcagctctattaaaatcaactaagtatagctgaccctctaacactcccttaaatgctactgaatcatcacttcttctaaagacagtaacacctatatccgaaaaagacagttgtagcccattntacataattgagaaacggaaagcaaattgtaatctaaagaatctacaagaaaaaacattggaaatagaatggtcaggtcatatagcaattttaccaagtcctntgaccaaaccttgatttttgtccccgaatgtgatagctctttggggatct

SEQ ID NO: 59997 - DNA, 391 bp, Zea mays
  unsure (1)..(391): unsure at all n locations
tgtcggtctttgtgatcggtggagagagggaaagggttgttatagacccggtctttgtgaccacctcaatggggagtaggtttgcaagaaccgaacctcggtaaaacaaatcaccgtgtcatccgctctatttctttggttgatttgttttcgccctctctttcggactcgattatatttctaacgctaaccccgacttgtagttgtgcttaaagtttataaatttcagatttgcttattcacccnctctaggcgacttttaattggtatcggagcccgatgcttcattagagcctaaccgctcgaagtgatgtcaggagctcacgccaagaaggagatggtgaccggcgagaagcccgccacaagcaacgggaaaactccatcgggggag

SEQ ID NO: 59998 - DNA, 489 bp, Zea mays
  unsure (1)..(489): unsure at all n locations
tcacatccaagaggccncttggtcgagattctttcaagatatgtatagaggactaaatctgtggacacatcttcatcagattctgagtttatgacacgcatgggtgatctatctttggagcgcctgtcagtttacaaaacaactgttacaactgaggaaaagaagttggattcaatgaacagaaatgagaggcagaaattgctccttgaaaagaagacgttgaacctagagaaattaaggcttgaaaggcagaaactaaaggaggacaaggaagaggagataatgatcttaagcatggatttgagcaaatgtaaccctctcctccggcagtactatgaagccaagcaacaagagattctggcaagggttactgggtctacttcatctgggcagtgaagggtccttacttaatatgtttgtttctcgcttatgaattgaggcgtactcggacttgttactgtgagcttgctgtcgtgagatcgtaatctg

SEQ ID NO: 59999 - DNA, 368 bp, Zea mays
  unsure (1)..(368): unsure at all n locations
agcttcagccgaagctggttctttttgcaagaccttcngcgacaaagcatggtcccaacagtagccccttcgcggtgctagatcgtttctcgtaacgagcttgatccgtgaaaaaagtctcttatgctttaagaagccgaagggcctgaaaacaccttccctgagctctgtgtcgagaaacgatacagtcttctagcgcgtagcggtcccaccatgcaagttcactattctgggttttgcggaccaccgttcaacgggtgcgagcaactgtttggctggtgtaaaatcctgacgattcgccttcttacctgcagcactatataaacagacgggtaggtgtgaagatatcacagcattcattgctattg

SEQ ID NO: 60000 - DNA, 281 bp, Zea mays
cacacatggggcgggaatgggactccgacgagagctccaccgactccttctctaacaaggacaccaccaacatcgccgtcaacaaaggcctcctcttccccaacgtcgttcacaagtgtctcatggctaaggatggcaagaagaagaaggtacactctatagccacccccaaatataccacatctagtgatgagggtagatctattgaaaatgaagatgatttaatttctctctttgccaccttaacatggatcacaagaaaaattaaatgaactgataga

SEQ ID NO: 60001 - DNA, 491 bp, Zea mays
  unsure (1)..(491): unsure at all n locations
catgcaagcttcatgaaagctggacttcggttccccttgtatatgatgnttgtcacagctctaaagacttttgaaatttatcttcatcaacttacccccgaagctattatcaaagtagggatttttatatgggccatgagaagccaagggttatagccagatgccaagtgtttctacaaatatccacgagttaccatatcagacgaaagctactgggaaagagcaataccacaacaatattggttactacagcttcataccccacgctgaggccagttatcctgtgccaacatttcggaaaaagtggccaggttcttggatgcaagaatagttntatgtgaaggttgacctgagtgagagggaagatataaaaggngttattcagcgccctatatggtctcgcttcggcatcatgagtccggtcattgcgcttgaaacaacgtgcaagcgtgccatgcagctttaatacagtgtgtactacatcggcacaa

SEQ ID NO: 60002 - DNA, 394 bp, Zea mays
  unsure (1)..(394): unsure at all n locations
actcagctngtactacgcggtagtaagcgtggcacccttaggagtgttctcctttctccgttataccggngactgccacggttgcagccaccgtgttattccctatctacggccgccagcactgctcggccaaattgtgcgccaccgcctaagccctctataaattgaaggccgtggcagctgcgctatgtaatcacgaaaccaaagcacccgctcccaccctcaatcgttcgcgagggctcacgaattttgagttttgcccaaatcggttcatcacaccgcgaagaacacctcgccgcggccagctcaactcagatcagttcaagtctctccgtcgcttgttctagcgtccctaggccctcctcaagctcctcgacccaccagatngaactag

SEQ ID NO: 60003 - DNA, 469 bp, Zea mays
gcttctaaagggagaacacattctaggagtaatctttgttcattttgagaaagacaggatatgtatcgcatgctcagcacggaagcaagttggtgctcatcatccacacaagaacatcatgactagtgacaggccactggagctcctacacatggacctattcggcccgatcgcttacataagcatcggcgggagtaagaactgactagttattgtggatgattactctcgcttcacttgggtgatctttttgcaggagaaatctcatacccaagagaccttaaaaggattcttgagaccggcttcaaatgagttcggctttaggatcaagaaaattaaaagcgacaacgggacggagttcagaactctcaaatcaacgctctcttgggaggaaggcataagcatgagttctttctcctacacccacaaacaatggtgagtggagaggaagatcaaactctattgacat

SEQ ID NO: 60004 - DNA, 453 bp, Zea mays
tgaggcatgcaaacttctaaagggagaacacattttaggactctcttatgtttatttcgagaaagatacgatttgtcgcgcatgatcagcatggaagcaagttggagttcatcatccacacataaacatcatgacaactgaatcacgccgcttgaactactctacatggatctattcagcctgatcgcttacataagcattggcgggagtaaagactgtcttgttatcgtggatgattattctcgcttcacttgggtattcttcttgcaggaaaaatctcaaacccaagagaccctaaagaaaatcttgagacgagctcaaaatgagttttgattgagaatcacaaagatgagaagcgacaatggaaccgagctcaagaattcacaaatcgaacgattttctgaggaggatggcatcaagcatgagttctcttctcctacacacctcaacaaa

SEQ ID NO: 60005 - DNA, 478 bp, Zea mays
  unsure (1)..(478): unsure at all n locations
tactctgtcgaggtgttactactgtccatgttaaattatgtaacctgtcaagctgtttctacttattttcaagctggtaaatagtgtaagctgttaagcttgaatcaagctgtccatgttactatctctgtctctggtgctatctctttccatgttgctatacctgtcaatatggtaaactttgtgaatantcaacctatttactggtaaattgtgtaaatatttcaagaattcattcgtccatgtccatgtttagctggtaaattgtgtaaatttttaagttgtttagttgttacaactttagtgtggcacgcctagatctgtatacacgcccaacagcagcagatgaatcaaacacacgcccatcaaatcatggctcattaaatatagacaaccaaacgcactcccatcaaatcctggctaatttaatacagacaaccaaacaactaaactaattatcacttgcatccatttattt

SEQ ID NO: 60006 - DNA, 410 bp, Zea mays
agcttcctcccttctctgtcgaaagtcattgttatcgctgatgtattcatccatcttctgaagcagtttttccagtgtctgagggggcttcctggcaaagtattgggctgaaggtcccggccggagccccttaatcatggcatcaatgacaatttcattgggcactattggcgcttgtgccctcaggcgtaagaaccttcggacatacgcctgaagatattcttcgtgatcttgggtgcactggaacaaagcttgagcggtgactggcttcgtttgaaacccttggaaactggtgatcagcatatccttcagcttctaccatgatgtgattgttcctggccgaagggagaagtactatgtttgtgcaacattcttgacggccatgacgaaagacttcgccatactgcagt

SEQ ID NO: 60007 - DNA, 482 bp, Zea mays
  unsure (1)..(482): unsure at all n locations
ngcanagaaactctggatgaatanggtcttcaaaaccagtgggttgtttcatatacacatcttcattaagaaaatcatgaagaanagcattctgaatatcaatttgtctaagagaccaatcacgagatacagctagagatcataataaccgaatggtagtgtgtttaacaaccaggctgaacgtgtcatcataatcaacaccatactgctgcttaaaacctttagcaactagtctagctttctggcagactactgaaccatcagctttatattttaatttanaaccccacttggaatcaatcacattcaaatcagaacgaggaggtaccaagtgccatgttttgttcttaagtaaagcgtcaaattcttcttgcatcgcatgtttccatanaggttgagtcaaactagtgacatgtgaagatggctcagcagaagggacacgagtcacagaataaagtaccgtgtcgtcgtgcgaaattttg

SEQ ID NO: 60008 - DNA, 450 bp, Zea mays
  unsure (1)..(450): unsure at all n locations
agcttacctgactccttcttctccaccggcactatattgtagacccactctgcgtatctgcaagggctaataaaattagcttctagcagccggtggatttcgtccttgattcgtgggagaagatctggacgaaatgttctagctttctgcttgaaaggtctgaaaccaggcttaataggcagccgatgttcgacaatttctcggcttagtccaggcatttcagtgtaattccaagcaaaacaatctgaatattccttcaatagaccgatcatctcatttctagaatcggtctccagggtcttgtttacaaaagtcggccttggagttttaccatctcctatgtcaatttcctccaaaggatcggccgatgtaaacccctgtcctagtttatcaagatctcntgaattctctatcattgtccccacagaggaatcagatgatctttgtgtg

SEQ ID NO: 60009 - DNA, 405 bp, Zea mays
  unsure (1)..(405): unsure at all n locations
tgagctcgaggcagaggaganaaggaagcgtctggaggggaaagtgtttacactggaggagcgagtccgccagttccaggcagcgcaggcgacgcagacggcctcggtcccccatgtggtggaggtgatgaggaagacactagacgacctccgggcagagcaacgcgccggggctcagcgcatcaccgcctgggctggcgaggcaagcacgacgctagtgccattggggaagagtcccatcccggcattggtgcagccggcgtccatttctgacgcgctcccgatactggattccgctgctgaccgcctccgacgtcttgatcagattcttggtgcccacctggaggccgagggcagcagactctgccggtcggccatcgagtacgtcttgacatgcttctggag

SEQ ID NO: 60010 - DNA, 450 bp, Zea mays
  unsure (1)..(450): unsure at all n locations
agcttacctgactccttcttctccatctcactttatnggagacccactctgcgtatctgcaaggtctaataaaattagcttctagcagccggtggatttcgtccttgattcgtgggagaagatctggacgaaatgttctagctttctgcttgaaaggtctgaaaccaggcttaataggcagccgatgttcgacaatntctcggcttagtccaagcatttcagtgttattccaagcaaaacaatctgaatattccttcaatagaccgatcatctcatttctagaatcggtctccagggtcttgtttacaaaagtcggccttggagttttaccatctcctatgtcaatttcctccaaaggatcggccgatgtaaacccctgtcctagtttatcaagatctctgaattcctctatcatgtcccccacagaggaatcagatgatctttgtgtga

SEQ ID NO: 60011 - DNA, 408 bp, Zea mays
  unsure (1)..(408): unsure at all n locations
tgagctcgaggcagaggaganaaggaagcgtctggaggggtaagtgcggacactggaggagcgagtccgccagttccaggcagcgcaggcgacgcagacggcctcggtcccccatgtggtggaggtgatgaggaagacactagacgacctccgggcagagcaacgcgccggggctcagcgcatcaccgcctgggctggcgaggcaagcacgacgctagtgccattggggaagagtcccatcccggcattggtgcagccggcgtccatttctgacgcgctcccgatactggattccgctgctgaccgcctccgacgtcttgatcagattcttggtgcccacctggaggccgagggcagcagactctgccggtcggccatcgagtacgtcttgacatgcttctggagcca

SEQ ID NO: 60012 - DNA, 423 bp, Zea mays
  unsure (1)..(423): unsure at all n locations
ccacagccagcccatgctagtcttatcaattaagcatgcatctagaccggcctcctcttttgcaaaatcaactaaataaagtttgtcgtctaatacacccttaaaagctaatgaaccatcacttgttctaaaaaacagacacatatacatttgtgaataaacagttatatcccatattacaaagttgactcacagacaacaagttatatccaagcgactcaactaagaacacattagaaatagagtgctcggaagaaatatcaatatttcctaaccctatcaccttgccttgggtcccatcaccgaatatgatngaatcttggggataattgatcttgacgtaggaagagaacattctcttcttccccgtcatgtggtgtgtgcatgcgctatcgataatacagctggaagccccggatgcat

SEQ ID NO: 60013 - DNA, 461 bp, Zea mays
  unsure (1)..(461): unsure at all n locations
ntcatcctctgttatacatgtcatatttatgaatgtatgttcttcataaccttcgtctgaagatcattatatcctaagggaaataatgcttccaaggatgaaggacattaacatttaacattntgtgttgccttgctcttaactcatagcatntgagaacaagtccccaaccttcataattatgacatgtataaacagaggatgaagcttatgatacataggaaaacaacatanacaattatatgatatcataatgtaaacatatattattaaataattatgagtacatgaaaacaatatcaaattacanttgtaccttgagcttgagagaaggcaaaggtaaaagtgaaaatgcgaaatcgtgaacagtacggtggtactgttcacctatntatatgcacatgacgtagcctatgtgaatntacattcatatnctctacanatgaatacaatcataacac

SEQ ID NO: 60014 - DNA, 400 bp, Zea mays
  unsure (1)..(400): unsure at all n locations
agctntattccagtgcacccaggattactaattaataccttcangcatatgtccgaagggtcctacgtctgatggcacaggcaccaacagtgcccaatgaaattgtcattgaggctatgatcaaggggcttccgccaggacctgcagctcattactctgccaggaagccttctcaaactctagagaatctgcttcaaaagatggacgagtacattccagctgacaattgatttcgccaaagaagggaggaagctctcaggttctctgaaatgactaagggtttcggaggaagattttatccaaggcacgtcaggtcgattcacaattctactcaaaatgacgacaaagggagtcaacagctaaggccacagtgcttctcgcaagcatttgggcaacagca

SEQ ID NO: 60015 - DNA, 500 bp, Zea mays
  unsure (1)..(500): unsure at all n locations
ntaatacacanattctccctctgtgacatcaaacaccatttatcatactcaagcaagatcataggatgatgtcaatggacagcacggtgtttaaggaggaaaaacgactatcaaaactcccncttacttattgaacatatgcactatcaacatttaggtaagatacatatatgcaaataagattatcacgaagatgtcaaattgaagcaaactattacggctaccaattgaaagataccaattgcaaagttcattcattatcatagctccatgatatttaagaataagcatctattatcaccagatgttatagagcatgagcaatcttaacaatatgcacttactcatgacttgngatactaatntcttgacttatcttctctnttccaccttgagactacacaaagcagttagtctcataagacacaagttatgtgtgctccccctcacgctgtgtatcatgtattngaatgacttgcactttgcacattctaactttc

SEQ ID NO: 60016 - DNA, 448 bp, Zea mays
  unsure (1)..(448): unsure at all n locations
tntaaagggagaacacgtgataaggctaaaccaatgttcattctatatagatagaccttgtgcagcttgtcaagcatggaaacaagtgggaggctctcatcacaccaaaaatgtgatgacaacatcaagacctctggagctgctacatatggacctcttctgacccatcgcctatctgagcatacgaggaagtaagtatggtctagttatcgttgatgacttttcccgcttcacttgggtgttctttttgcaggataagtctgagacccaaggaaccctcaagcgcttcctaatgagagctcataatgagtctgagctcaaagtgaagaagatcatgagcgacaatgggttcgagttcaagaaccttcaagtggaggagttccttgaggaggaacggatcaaacacgagttcttctgtccctacacaccacagcataatggtgtggta

SEQ ID NO: 60017 - DNA, 421 bp, Zea mays
agcttgtgaagggtcttcatcctcacatgtgcttagcggcgatgccacagccagcccatgctagtcttagctattaagcatgcatctagaccggcctcttcttttgcaaaatcaactaaataaagtttgccgtctaatacacccttaaaagctaatgaaccatcgcttcttctaaagacagacacatctacatttgtaaatagacagttataccccatgttgcataattgactaacagatagcaaattatatcccaaggactcaactaaaaacacattaaagattgagtgctcatttgatattgcaattttacctaaccctttcaccttgccttgattcccatcaccgaatataattgaatcttgggaatccttattcttgacgtaggaggtgaacatcttcttctcccccgtcatatggt

SEQ ID NO: 60018 - DNA, 413 bp, Zea mays
gcagctgcagctttgttggaagaagctttttgtgtaattgaagagacatgttaccagcgaagttgccgaactatttggagtccatttacgcacggttcaacgattatggcagcgaggtaaaagctcccttgatcaaggcattccggttgatatttgtaataaaaagcgtggtacagctggccgtatgcaagtttcattaaatttaagaccattacgcaatatcccacttaaggatagaacaacacaagaagatgcacgtgcaactttgggtattattaaacaaaaattcatgagattgatccgagaaggacatattaagtgtcattcaaatagtataaagccacatttaacagaggctaacaagaacgctagactacaatggtgtgtggatatgcttgatcatgaaggcatgc

SEQ ID NO: 60019 - DNA, 344 bp, Zea mays
  unsure (1)..(344): unsure at all n locations
tttatatgcgcgcggtgaagaggtggcggtggagctccccgactccggcgagcttaccagtgccgccataaatggcgcacagcgctgccgaggggacgctactgcgaggtggtaccggcgaggacgctggtcaaggggaggaggacggagcggtgccaaacttccctgtgcggcanggtggcaaaagggaggactgaggcgactgccggaggtgacttcggcgaggggacggcggacggacgatgaagcagctgacccgtggggtcacttggtcagagggagcgagcgagcgagagagcgggtggctgacgggtggtgatgccttgtcagcgagagggatggcg

SEQ ID NO: 60020 - DNA, 402 bp, Zea mays
acaattcttttttcttcagaactgtattcacttggtcgatggcatactgggacaaataggtgaacttattgagatactgcattacaatatctcccccttgctttaaccggatgaaatcttcttgtttcatatggagcactccctccggaacataatgctccccgaatgcttgcttgaattcctcccaagtgatctgatgtcgagccgcgtgaattgctacaaaatatgcccaccaagtactggcagtccctcttagttgatgtgcagcgaacagtgacttctgcgtctccgtgcaacatcatgtgcgcgagtcaccgcaccatcatgtgcgcgagttcgtgatggcatctgaggcacagaaacatttggataaatataacatgctagcacataccatcatat

SEQ ID NO: 60021 - DNA, 497 bp, Zea mays
  unsure (1)..(497): unsure at all n locations
tcgcaacctttgatcttgctntccaagccctcttttatgatctcatttntcttggcctcgaggtcttgttgcattctcaatgctttacttagcagcatactctgtggaaataggctgacttcaaaaaattttaatttatcacaaagataacaaaaatttaggcaaaagaattttaccttgaaattggaataaaagaggctgccgacgatatgttgccaccggtaaccgctaatatcggactctagcttcgggaagccaacactctttgatagagtgccaattattttcgccctagctcggtcgcggatacaccccagaattttctcatcaacaccaccgaagagcatggatcccggctggtacccacaagattntgcatattcttctagctcctctttctcttgctcagacaattcttgacccccaggtgccgaaggtcaaattattttcctttnacanagtattagcaacttctttatctttgccgggcaccgggg

SEQ ID NO: 60022 - DNA, 445 bp, Zea mays
  unsure (1)..(445): unsure at all n locations
gcttattataggtaccaatctatgaattagtgttataagatacaaccttacattgataaatcatcaattgcataagcatcagtttcagatgcaacaagctcattattntcgtcctgttacagcacggaagatgtagttacacaaatatggcaatatgcatcagaaacatatgaaaaatgacataacttcttatctttcaaatattcaaacaactgcttaccatagttccagtggagtttatatacaggtaaatgggttatgtgtggtcgtcatagtctagccatataaattgagcaacaataatctcagttactactggaccagcacaataaatagttaaaggccactacacctctttagccaatggaccagcacaagctgaaagagcaaccgccttcaagtggacaagcattctcacaagcacaattgttaaacccagttaatt

SEQ ID NO: 60023 - DNA, 447 bp, Zea mays
  unsure (1)..(447): unsure at all n locations
accgcccacttaatgtggtgactatcaagaacaagtatcctttgcctcgtattgatgttctttntgatcaattggtcgaagccaaagtgttttccaagatagaccttcgctccggctatcatcagatcaatatacgagcaagtgatattccgaagactgccttctcaactagatatgggttgtatgaatatttggtaatgtcatttgggctgactaatgccccagcatacttcatgtatctgatgaattttgtcttcatgcctgaattggacaagttcgtggtggttttcatcgatgatatcttggtgtactcaaagaacgaagaagagaatgtcggtcatttgcatgtagtgcttcaacgtctgcgagagcatcgtctttattgccaaatgtcaaaatgtgaattttggctaaaagacatcaaattcctgggtcaaactatctctc

SEQ ID NO: 60024 - DNA, 480 bp, Zea mays
  unsure (1)..(480): unsure at all n locations
agcttataagcatctggaagagaagaggtcactctagttttgttgatgaaacactanaagagcaatcaaggaagggacccatggataagttcgcaagaagaatgcttgtgtgtaggcatcgatgcttcttcaataagctagctgccaagcaaaagctaaaagcctgaagatgatctttgagtacccagaatcagcgcttagcaatcaacaacccggatgctcctcataggccagattntgttgaagttccatctcctcgaagagtctgcaaagtgaagatatgtagctgaagtaaaactatacccataacccttctaagccgaatctcgaggaccagaatcctattaagtggggtagatttgtagcatcccaaanatacaaatcttggaattttctcacacttcctctacattcaaaatgaatttcagatttcatttcacaatgtttgtttggagttatatcagcaatatacatagcggc

SEQ ID NO: 60025 - DNA, 449 bp, Zea mays
gcttaacacacaagagattgctcttataattattatcttctatcttatcctcaagcacaataaggggaaggagtacaaactctactccaagagggtgtgctaccggtgtgataagttctgtcattatattgataaatgtctatatgcaagcgatagtgacagggatgacgactagaatgggaataagaatatggatatcaagaataacttccacaataagaacggtggcgaggcgcacatgtgtaaggagtggaactccaacgagagctccatcaattcctcctctgacgaagacgccgccaacatcgccatcaataatggtcttctcttcctcaacgttggacacaagtatcttatggccaccgagggcaaaacgaaaaatgtatactttagagacaccctctaatatactactctcgatgatgacggtatctctattgaaaagaatg

SEQ ID NO: 60026 - DNA, 494 bp, Zea mays
tagccttatgccaacgggtctctgctttctcggcacgttgtatgtggtccatcacacgcttgtgcagttggtcgcacaaatcatcgaggctaagcagatagccagtcatagtgacaatagtgggctctttctcagtcgtggtactccccaagttacggatccttgccgcccaagaaggacggttacaatccagtggagggaagtacttcatgggggtggaacccagtgccagtcaaacatctgggacaagtacttcaatgctttctgagccgcaagttggacggtgtcttgcatactacttccagtggcggtgatgttctggggttgcatctccaagtacttgtcacttgcgccaatgtggacagtgacctcacaacttttagtaccatgctctgtgaactcacgactcacatattctagacgctctggaatgcccaacgaacaattgcgcataagcacctgggaatcatcttattgctagagatgtgatctat

SEQ ID NO: 60027 - DNA, 430 bp, Zea mays
  unsure (1)..(430): unsure at all n locations
tcttgctcggctgtccattgcgaccctttagcaccgccttgaatctcttgatgatgagggccatttcttcatcattaagaccggctgcctcaatttgcgccaccttgctgggtagtgcctccttgctccttgtggctttgagagcaaaaggatgcggttcgttgatccggccattcaaagcgtngtccacataccttgcctccttgatcatcattcgcccgctgacgaattttcctaggacttcttcgggcgacattttggtgtacctgggattctcacgaatattattcaccaaatgatgatcaagaacggtggatgacctgagcattatttggacgacgtccgtgtccgtccatcgcgtgcttccgtagctcttattttgtgataacggcttgagccggtgtatgtctgagtggctcctcgcccctat

SEQ ID NO: 60028 - DNA, 432 bp, Zea mays
  unsure (1)..(432): unsure at all n locations
tatcgattgctntaacagcccaagaagggatgtccaacgctagagcatcataaatcattcttgatgtcatcacaaattgaacataagtggctctaccagcttttgtcatcagaccagctttccacccaggtaactgggctgcagttttatcaacaattgcttgaatttgacttctcctaagctntccaagagaaagcgggaggccaaggtactgacagggaaactccgaaatggaacatggaaggagctcctgaacacaagcaagatccgcctcagaacatcgaataggaaaaacattactcttctgaacgttggtctttagaccggacgcatccccaaaaatcctaaggatttccagaatcagaattatgtctgaaggcaccggcttgaggaaaaccaccgcatcatccgtgtacaaagagaatcggtgct

SEQ ID NO: 60029 - DNA, 385 bp, Zea mays
  unsure (1)..(385): unsure at all n locations
agctttatctgattcagagtctcctgttggattatcctcacggntagcttttccatctcttgacaccaagtgttgtcagaggtcttcaccataagacagtggcgggaagccttactgctcaatgcatctgccaccacattggctttgcctgtgtgataatggatctccaattcatagtctttaataagctcaagccatcgcctttgcctcatatttaattctaactgggtgaaaatatacttcaaacttttatgatctgtatatatgtgacagatatttcccagcagatagtgacgccaaattttcatggcatgaaccacagcagctagctccacatcatgagttgggtaatgctcctcatgtcggcgcaactgccttgaaacat

SEQ ID NO: 60030 - DNA, 400 bp, Zea mays
  unsure (1)..(400): unsure at all n locations
tgtgcaaagttcactggaactgaccttcggagaaacccacccncagtgccacatgttaccagagggtccgacctcaaaagcaatgtacgaattcaaaataattgcagagaatatcagtacaagggacttggtccacgaattcttggctttcaaggtttttcctagtgtaaaagagtgggaaatgccgaagctgaatggggaaaagaaaaaaggtgaactcgtacgtttgccttactacttcaaatttaaaaaatactntaaaactccttgccaagagtggctggatacgactgaagtgatgtgcaacgagatacttggcaattattcaaaaaaggaagatcaattgatgaccgcagccttcggcacccgttcgaaacgaaggctaaatcgagtggtggac

SEQ ID NO: 60031 - DNA, 478 bp, Zea mays
  unsure (1)..(478): unsure at all n locations
agcttgcacccaggtacataggtcctttttggtgcttgagcaatgtggaccagtggcataccgacttcaactacccgaaacattgtctactgtgcataatatgttccacgtgtcacaagtgaagaagtgtcttccggttcccgatcgaaccgttgaagtgactgatgttgtcctggaaccatatttaacatactcggaacatcctattcgagttctggatcaaaaggacagggtcacccgaagaaagactctcaagttctacaagatacagcggaaccagcattcggaagatgaggctacatgggaaacccaagactttctagataagaatttcccaggctttctagcctcatgtcaattggacagcctgtatagctgttgtaataaagaagtaacccncacattacccctgtcttgtaccataattaaggaaataaaaatgtgatgtgtatgctttaccattacctaccctatgatt

SEQ ID NO: 60032 - DNA, 449 bp, Zea mays
tgagacaaatttcctcctcaatatttgatgtgttgctacactcgacaatccatttacccgatgaagcaatccttagaggtccagtgcaatatggctggatgtacccaatagaaagactgttatacactttgaaacattccgtgaggaacatggctcattctgaaagttcaattgcagaatcatatgttgctaatgaatgcttaaccgcgtgttcgaggtattttgatgatcttgatacacgacacaacagggagggaaaaaacagagagcgtgttgatttgaccaagggtgagttgtctggttttcaacatggtgttcatttacttggagcccctaagaatacatatgtagataaagtctttgacaagatggtttggtacgtgttacacaattgtccggagggtgagccatatataatgtatgtactcacatgtacatgctttttgttc

SEQ ID NO: 60033 - DNA, 412 bp, Zea mays
  unsure (1)..(412): unsure at all n locations
cttcgtcttgaccatactctcgtatgctcgttatccgattccgaaggtacctgttcacatattttacttggaaaacattgtcaaatcatgtttttgaggaccttcgaaagccgaaggcccccaacattatcgaatttttagaatatttcagttttcacatattaaattatagggattaaaataatatcagaaaaaaaatcttaaattcatatttaataaaaaatgttccgaaggttcccgaaaatttccggaaacataaacaagataactcgatatagtttgaaaatctttgcactcataaacactatacaacaacatgaatgcaacaatcaaaagttctctaggattntattntactacgcttaaaacctatatataataaaataactctccattatttagaaaaaagaga

SEQ ID NO: 60034 - DNA, 477 bp, Zea mays
  unsure (1)..(477): unsure at all n locations
tctanagggagaacacattntaggattaacaaatgttcattttgagaaagacagggtttgtagcgcatgccaggcgggaaagcaagttggagcccatcatccacacaagaacatcatgacgaccgacaggccgcttgagctactccacatggatctattcggcccgattgcttacataagcatcggcgggagtaagtattgtcttgtaatagtggatgattattctcgcttcacttgggtattctttttacaggaaaaatctcaaacccaagagactttaaagggattcttgagacgggctcaaaatgagttcggcttaaggatcaagaaaataagaagcgacaatgggacggagttcaagaactctcatattgaaggcttncttgaggaggagggcatcaagcatgagttctcttctccctacaccccacaacanaatggtatagtggagaggaagaatcgaactcttttggacat

SEQ ID NO: 60035 - DNA, 353 bp, Zea mays
ttgaaaaaccaaaagatcctgacaggtgacaggttcaataaaatgcacttttaacgtcctcgcggaccatcaagggtgcacaaccggatcgttcacgactgcttcatctgacatctgaccacgcatttaatgcacttttaactgttgatatagccattattgttgacttgtgcgatttcatccgttgatgtgaacgggcggatcgtccggactatgggcgcataccgtccacagttggcagaaatgaggcaacagctaggaagtggctggtggctataaatacaaccctagtcacctccattcaatccatccgagcatcccattcactcacattcaatacaagaacaagcact

SEQ ID NO: 60036 - DNA, 487 bp, Zea mays
  unsure (1)..(487): unsure at all n locations
tctaaagggagaacacattntgggactaacttgttcattttgagaaagacaggatttgaagcgcatgtcaggcagggaagcaagttcgtgttcatcatccacacaagaacatcatgacgactgacaggccactcgagctcctacacatggacctattcggcccgatagcttacataagcatcgacgggagtaaatactgtctagttattgtggatgattattctcgcttcacttgggtgttctttntgtaggaaaaatctcatacccaagaaaccttaaagggattcttgagacgggctcaaaatgagttcggcttaaggatcaagaaaattagaagcgacaacgggacggagttcaagaactcacaaatcgaaggcttccttgtggtggagggcatcaagcatgagttctcttctccctacaccccacaacanaatggtgtagtggagaggaagaatagaactctactggacatggcaagaaccat

SEQ ID NO: 60037 - DNA, 440 bp, Zea mays
  unsure (1)..(440): unsure at all n locations
agcttaaccatgatgaggcatgtgaccagttatatggtcttctatcagcaagcctacatcgagaaggtccttaatcgactcagatggagacactacactgagcctctcttctcgtgcaattcacccgcccggtctcagctttatcatttcaaacccaaagtttggtacctgacagaggtacatctttttcgacggtgaacccatcacggccatgatggatccaccctcaagttttattttgaaaacatcccacccacttgaagcatcatattttgtcaaaacaaaacattttgttttttaaagcaaagctaagcataagataagcctttttgtaaataagggatcaaggaaaggtaatcaaattctcatgaaggaaatgcaacaattgttagcacacaactnctatacctaatcatcagcaaggagaaagatttaaatac

SEQ ID NO: 60038 - DNA, 411 bp, Zea mays
  unsure (1)..(411): unsure at all n locations
tgtttcatgctggggcttggttacccctaagcatatttgtgtgtgaagttttaaaaatatatcaggtttaccttcatcaaattactcccgaagcaatcataagaatgggaatcttcgtctgggccgtgaggagccagggcttggagccaaatgcataaagtttctgcagtatgcacgaactattatatgagaagaaaccctgcggcaaagagtaatactataacaattttggctgctatagcttcgttgctcgctctgggtcaagctgccccgtgccaacttttcggaagagatggcccagagattggatgaacgaatggttctatgtgaaaaatgatttaaaagcacgagaggatattaaggagatcatcatgcgcccttattggcaacgtttcggccttcanaaacccg

SEQ ID NO: 60039 - DNA, 437 bp, Zea mays
  unsure (1)..(437): unsure at all n locations
agcttacccatgatgaggcatgtggctcttttttatgtcctcgatcatcaagcctacatcggttcggtccttaagcgactcaaacgaagacactacactgagactctcttctcgtgtaagtcaaccgccagtctcgtctttattatttaaaaccccaaagtttggtacctgacagaggtacttctttctagatgttgaacccatcacggccctaatgaattcaccatcataattcttttctttgtaaaaatccccatccagtatgaagcatcaccttttgttttaaaacaaaacatttttgtttttttaaagcaaggctaagcataataaaaatcctattcataaaaggggatcaaggaaggggtatcaatttttccaacgaaggaaatgcatcaactatntagcatataacttctatcacctaatgcatcatataa

SEQ ID NO: 60040 - DNA, 450 bp, Zea mays
  unsure (1)..(450): unsure at all n locations
tgattaagaaggcgacattccaaagatatctgactaagctattatatcaccgaatattgccgaagccagaccgccaacttatactgaagcaaaaccttcaggaactactttgattatggaaaaagaaagcgcacccgagaagattaaatctcctacccccgaagcgcctactgaagagctagattatatcatacgacatgcttcggggaaacagtngtcgaaagagcatattgccgaagccaagcaatatgctagggatttgaagtacccaataggatccttggtgtataatggcactggtgaaaatgactgtctgtactgccttccggacaacaaagagatatctctttgccaggaaatggcgaggaacatatggtttctgaagcttgagcttgagctatctgcaatgctgaaggatgaccttgcagacagcctcgcttattacagtct

SEQ ID NO: 60041 - DNA, 453 bp, Zea mays
  unsure (1)..(453): unsure at all n locations
aactcaagcttgtgtgcactcactaccttgtgcaagaggacggaagaccctatatctctcttaaaccatatcttccaaaaccatgtgtaagaggaggagagaataagcaattgtgcaaaccatgagttaatctttaaccaaaccttaaataaccttataaccagcaattgtgggaaggatatattgcaaaaagaccctgcagaaaccccaaatccattccctaagtagagagagagctagagctctctaatctttctaagtcaaaaatacacctacactaaagatcaaccgtgttcacctcaaagctggcaccaaaaccacctaagttctataccaaanatgtggcataccacctatggcacccactggaaaaagntgagcccgagaccctgacgtttgacatgccttggcatgagttttgtcgcgaggcgggcacagtgacatacctgattt

SEQ ID NO: 60042 - DNA, 422 bp, Zea mays
  unsure (1)..(422): unsure at all n locations
ctatanaccactcaagccttggaactgtatccaagtatttctcaagcttcgggtctctttctctgtaactcttgtcaacangaccaanaataacttgagaatcggttataatgaccgcccttcttatccccattgcctttaacttgcgaagccccaaaagcaaagcttcgtattcagcaatattatttgtgcagctgaaattaagctttactgcatatcatgttctgactttggaaggtgcaactaagacagcagttacacctgccccgaaggttctccaggaacccgcacagaacattatccaagcttcggcatctttatttgcttcttcttcctaagcccctggcgttcatccagcgatgaagtctgctaatgcctgngactggatcgaggatctatgcacataatcaatgctgaattcg

SEQ ID NO: 60043 - DNA, 358 bp, Zea mays
  unsure (1)..(358): unsure at all n locations
agaacacattntaggattaacaaatgttcatctctgataaagacagcgattgtagcgcatgccaagcagggaagcaagttggcactcatcatccgcataagaacataatgacgaccgacaggccactggaactcctacacatggatctattcggcccgatcgcttacataagcatcggcgggagtaagtactgtctagttattgtggatgatcattctcgcttcacttgggtattctttctacaggaaatatctcaaactcaagagaccttaaagggattcttgagactggctcanaatgagttccgcttaaggatcaagaaaattagaagcgacaacagaacggagttcaagaactc

SEQ ID NO: 60044 - DNA, 445 bp, Zea mays
  unsure (1)..(445): unsure at all n locations
ctcaagctcttaagcgggaccgtcgatgggaaacaccatcaagcacgcttatatgtgtgtatatatagtatcccataagtgctcctatccctttgcataagtatacgaattctgcgcctcctcctgtcttttgaaataatcttaccacatactatngagcacaactgattagaaaactctatttgttttgtcatctattcatcaaaaccctcagtcggggttgattgcacttacaccaacatcgccatcaacaagggtctcatcttccgacaacgttgccacaagtgtctcatgtgcaaggagggcaagaagacaaatgtatactcttgatacacccccaaatatactacttccgatgatgatggtagctctagtgaaaaagatatatgatttgtcttctctctttgcaaacctcaccgctgaacaaaagagataatcaataaat

SEQ ID NO: 60045 - DNA, 446 bp, Zea mays
  unsure (1)..(446): unsure at all n locations
tgcttctgccgagggatccttcgtgtcatcaatagagaaatcagcttcngcttgggccagaatcttcacgtgttcgcatcctgcctctccaaaatagccgcaattcccctggcacctgagaaggcgcagacatctccacggccactcaaaacttcctcaaaggcttcggcttcgccgttgatccattcaattggaccttcgggatcgcccagtacgaagttgtcttcattcgaatatgcgccaatattggcgaagctggtttttatcttttgtacacatgctatagatttttcatagcatcttttnttttgaagaatgaagctccataactatttttccccagtaattcttccagtagtcactggcgtctcggtcagcttcggcgatagcacattntaacttcgcttcagccagctgctttcgaagatcttcaatttcgcacttct

SEQ ID NO: 60046 - DNA, 424 bp, Zea mays
  unsure (1)..(424): unsure at all n locations
tatagccatggtnagtagcatacgcaagtaatatacatattgtctcaagcctagctacaggtgcataggtgtcaccgaaatccaaaccttcgactggtgaatatcctctagccacgagtcgggctttgttccttgtcaccacaccatgctcatcttgcttgttgcggaatacccacttggttcctacaacattttggttaggacatggaactatatgccatacctcatttcttgtgaagttgttgagttccgcttgcattgccaacacccaactcaaatctcttaatgcatcttccaccttgtatggctcaatagaagacacacaagagtaatgctcacaaaaatgagcgactcgagatcgagttgttacccccttatgaatgtcactgagaaatgagttcatggngtgatctcttagaatcgc

SEQ ID NO: 60047 - DNA, 240 bp, Zea mays
  unsure (1)..(240): unsure at all n locations
gaccaactggtccgggccaacgtgttttccacgatagaccttcgctctatctaccatcagatcaaaatacgagcaagtgatatttccaagacggcattctcaaccagatatggactatatgaattcttggtgatgtcantccggcctgacaaatgcaccagcatatctcatgtatctgacgaattccggtctcatgcccgaatcggacaagttcgtggtggctctcatcgatgatattct

SEQ ID NO: 60048 - DNA, 451 bp, Zea mays
  unsure (1)..(451): unsure at all n locations
tacaaaggataattgatgcccataatatataatgaaggtatgaagcacatccatgagaagatagaagccgganaagccaagtgctttataacagacgatcaaggcattgtatggttcaataaccgcatagtagtgccaaagaatgaagaaatccgccaacaaattntggatgaagcacatcttattcgctattctattcatcccggaggcactaagatgtgtcatgatttanaacaacattattggtggacaaatatgaagattgaaatcgcacgctatgtggcaagatgtgacacttgtaaacgtctcaaggccatacaaccgaaagctgctggtccattacaatctttaccaataccaacacggaaatgggaagatattagtatggacttcattgtgggattacccagaatggcaaaaggctttgactccatntgngttatcattgatc

SEQ ID NO: 60049 - DNA, 172 bp, Zea mays
cgtgcacgtatcgacgactcgaacgaacatgttgcaaaaatttggcgcttgcgtatgggaacgcctgctatcattgtagactacacacaaggactgagtcctgacctggagggccacattcagcccacctgaagcctgtgggcacacttgaatgcaggctctgacagaaaac

SEQ ID NO: 60050 - DNA, 400 bp, Zea mays
  unsure (1)..(400): unsure at all n locations
atattaaaaaggttttctggttaaccagtttacaccgaggaccctgngctnttcctaaaccagttctttatcttatacccctgcgcaactattcatctgagtctctgacagttcaaaaacccccctgacttctattccttcttccccgaggtccctccccccttttgaacagtacccgcaaaaggaaaaagggcggcgcggcttaccaatggcgaaggaggtccggcgaaggacggngttggcttcgggaagtccttgcggtcacaacgaggtacggctcgacgacggtgatggccggaatcggccgatccacgtgcgcaggcgggcaagctcgtcggcggcgagtgctctggcctatccacggtgatacaggtcaatccaagggcacagggagcttcac

SEQ ID NO: 60051 - DNA, 405 bp, Zea mays
  unsure (1)..(405): unsure at all n locations
tatgaagattcttcatcccaacgtgagctagtcggtgatgttctatccaacccatgttagtcttagcaattaagcacatgtcgagttcagctctattaaaatcaactaagtatagctgaccctctaacactcccttaaatgctactgaatcatcacttcttctaaagacagtaacacctatatccgtaaaagacaggtgtaacccattttgcataaatgagaaacagatagaatattgtaatctaaagaatctacaagaaaaacattggaaatagaatggtcacgtgatatatgcaatttaccaagtnctgtgaccaaaccttgatttccatcctcgaatgtgatagctctttggggatcatggagtttctcgtaagaggagaacatacttttcttccctgtcat

SEQ ID NO: 60052 - DNA, 508 bp, Zea mays
  unsure (1)..(508): unsure at all n locations
actcaagcttgggtaatctacttcatcatcactagagtcatcatcacttgtagtgtatacttatgggtatctcgagtgcttaccttnttctcctttgccatgaggcaagtatgacgctcgttggggaagagagatgacttgttgaaggccgaggcggcgagtccttcgtcgtcggagtcggaagaagagcaatctgaatcccattctntgccaaggtgcgcctcgccctttgccttcttgtaagccttcttcttcttcctcttcccgctcttttcttgttcctggtcattagcattatcgggacaatttgctataaaatgaccagtcttaccgcatttaaaataggagtgcttttcctttgctttgctcttgttgggatgctccttgcgtccttttagcgcggtcttgaagcgcttgatgatgacggccatctcatcttcgtttagcccggcagcctcaacttgtgccaccttgctaagagcgccttcctggcgctgcttgttgcttg

SEQ ID NO: 60053 - DNA, 436 bp, Zea mays
  unsure (1)..(436): unsure at all n locations
ccgcaagcctacatcgagaaggtccttaatcgactcagacggagacactacaccgagactcccttctcgtgcaagtcaaccgcccggtctcagctttattatttaaaacccaaagtttagtacctggcagaggtacatcttttccgatggtgaacctatcaaggccttgantggatccaccatcacaagttttctttttgaaaacatttncacccactgaagcatcacttttgttttaaaagaaaacatttttgtttactaaagcaaggctaagcatcataaaattcttttcaaaaagggtatcaaggaagggtaatcaattttttaaggaaagaaatgcatcaacggtttagcacacaactcctatcacctaatgcatcaaacaaggtgtcggggaccataattaggggtacccncaagaactctaatctcagct

SEQ ID NO: 60054 - DNA, 454 bp, Zea mays
  unsure (1)..(454): unsure at all n locations
ttggccccacctgcaggctcgcatccctccctgagatgggtcttgtggccactatcggtacccctgaaactagggtaccccttactactgcataaagacgcagtacccacgcggctatctttagtcgcgtggtaaaagggatgtatgtgggaccaggccatgactcaccccagcctcgggcgactactctgggccagcaacagcgcctgaccccaccacatgggcgggtctagggcctccacgtgtccagagaaagtgatatactctaaagcatcaacggtgagtccggacccccatgggagagtgcaagacccctgtatatacagtccaggcctccaagtttggcccangaacctcatgtgtgcgaaccggacccctagaatgggatccggaccccccgtatggggttcggaccacccatagtggtgtcccagggttctatgacagaacatac

SEQ ID NO: 60055 - DNA, 458 bp, Zea mays
  unsure (1)..(458): unsure at all n locations
cttcatccctacatgtgctaagcggtgatgctccaaccagcccatgctagtcttagttattaagcatgcatctagtccggcctcctcttttgcaaaatcaactaaataaaggttgtcgtctaatacacccttaaaagctagtgaaccatcacttcttctaaagacagacacatctacatttgtgaaaaggcaattatatcccatattgcataatggactaacagatagcaaattatatccaagagactcaactaaaaacacattagatatagagtgctcatttgatattgcaatctttcctaagcctttcaccttgccttggttcccatcaccgaatatgattgaatcttgngaatccttattcttgacgtaggaggtgaacatcttcttctcccncgtcatatggtttctggatccgctgtcgataatccagcttgaaccccccgatgcataaacct

SEQ ID NO: 60056 - DNA, 414 bp, Zea mays
  unsure (1)..(414): unsure at all n locations
acttaagctctcataatctatcttgttgcttatcaaatatactttatcttttattattggcgcaactcaaaatgttaaacttctcattcccttttgcttattttctagaatctcgctcatggggttcacttaaggttcttaattacggtagcacattcttatcctttaagagactcaattgtcttgatcatgacacttttaagcatatacttggcgaattctttcttacttaagttgatttgatgctcatgcttactctggctcacataacataatggtccttgtgttggctcttcaagagaaaccctangtgacaactgggtgtcacagtggcggacctccgcggctgcactgngaacggctgctgatcgcgggcatatagaaatatggatggggaggggaaattgtggcacg

SEQ ID NO: 60057 - DNA, 422 bp, Zea mays
  unsure (1)..(422): unsure at all n locations
tagttcccagtggactggactggacatgacgatcttctatatcggntcttcaacgccagctggtccttgctaaggttcatagtacgtgtcgatttgacgttacgtacaggccggccggagagatacagagtaacgcgcggcggtacgtatgggctggcatggcgactgcgtccgagcttatgatggcaccatgatatgtaagctggatcctgcccctgctcctgcccatcagagaacgatggcacatagccatgctgcgcgcacggaagcgatggagcgttcgagcgatccataataatgtctgcggccgtctcccagccacatcagtacatcactatgctcactcggagtggtaccggcggactgcgtgctgctagtctgctactatagtacgtgccccctacgtgatcctgtcagcgggc

SEQ ID NO: 60058 - DNA, 461 bp, Zea mays
  unsure (1)..(461): unsure at all n locations
ggcttcagccgaagggtccttcgtatcatcaatgcttatgacagcttcagcctgagccaaggtcttaacatgctcacaacctgacttctccaaaatagctgcaatttccctcgcaccagagaatgcgcagacgtccccgcggtcgctcaaaatttcttcaaaagcttcggcttcgctgctgatccactcaattgggccttcggggtcgccccgtatgaagttatcttcgcttgaatgtgcgccaacgttggcgaagctagttnttatatttttcacgcattctacagatttttcaaaacatctctcttttgtataagcgaagtttgcaactgttttttcccaataatttntccagtaatcattggcatctcgttcagcttcggcaacaacgccatttaatgtggtttcagccagcttgtntcgaaggtcttcaatttcacatttctgggcttcagcttgga

SEQ ID NO: 60059 - DNA, 154 bp, Zea mays
  unsure (1)..(154): unsure at all n locations
gcttcttggggcactgctgcagctctnctaaaagctggctgcgatcattgaaagattgtcaataagccaaatttcactttatcaccatcaatcctagatgaacattctgatctcgcccgatgtatctctaatagatttgataaatgatatcgac

SEQ ID NO: 60060 - DNA, 477 bp, Zea mays
  unsure (1)..(477): unsure at all n locations
actctngacatgtgcatgactaggctggacaagaagagagcttctatcttcttcaaagcctctgctgatggttacacatcttgtgctaaggagatgaccaagctctcaggtatctcggacattatcctagagacggagatctgcgactaatttgttaggttggttcttcatcattctgtagatgcccttccttctcgctacattaactaactaatgacagaaggtggaagtgacccatgaagcatgtcgtcaagctcactacatgaactaactntactcagtctgcttgtcgtcaagctcactacatcaacaacatgaagctcaatagggtggaagtggaccttataaggctgttggaggctactttatggcagcacaacaggctaaacttgtctatgtatgtaagtgtagctaatatgaatatcttaaataattcgttttccatcccgtgtaactgatttaaaggaaaataagtag

SEQ ID NO: 60061 - DNA, 505 bp, Zea mays
  unsure (1)..(505): unsure at all n locations
tgcacaatttcntcccctttgtcattaatctccaaatattatataaagagtataaagggtagaaattatgattaatcaagatttgaacacactatcatgaaaagggtccttatatggcacaaaggtaatggagaagtgtcataagtgacgtacctttgcgttttaccttttcaaaggggtgttccacacttgtgttgtattaagagttcattntgcaatctcttgttggcataattgtgacatangtccaagatatcaaataaatattgtcatactaattgaaagataaatcttgatacctagagtctagatgtcacctagcattttcttaacacaacaagagtcaacatgaaaattgcacaagtatggattatacaactagtgatcatatatganaataccaatngaaaacaccaattgatacaattnttagataagcagaccactaatngcatattacactaagtcctttctcaagtntagtgcgcacatatatatgaattca

SEQ ID NO: 60062 - DNA, 473 bp, Zea mays
  unsure (1)..(473): unsure at all n locations
ttaagcttgcaccacgatatatnggtccttttcttattctggaaagatatggttctgtggcataccgactccaactacccgaaacattggttgctgtgcataatgtgttccacgtgtcacaatngaagaagtgtcttcgggttcctgatcgaaccgttgaagtgacagatgttgtccttgaaccggacttgacatactatgagcaccctattcgagtcttggatcnaaaggacagggttacccggagaaaaactctcaagttntataagatacagtggaaccagcattccgaatatgaggctacgtgggaaactcaagactctntagataagaatttcccaggctctttagcctcttgtaaattgtaaagcctgttaactgtgaataaagaagtgaccccacacacccctgccttgaccaaaataggaaaaaaagatgccgcgttcttttcattactacctngattttaattc

SEQ ID NO: 60063 - DNA, 417 bp, Zea mays
  unsure (1)..(417): unsure at all n locations
tcgacaacatcgaagtattgatggacactactcaagggtcaatgcttatctatggatggcaacgggtatatactcatcgagtaatagtgttccatacttgtacccatcaataaaaattgtactcgtcgagttacccatattcgctcgtgggtatagaatcttacccatactcatacccacgtgggtaattntacccgtcgggtaacccgtactcacatggaaggtctcaaattctaatattcccatcacttaaaatgtccaataaacacacaaatataagttcaacttanaatataacaaaccatgtgattacataacttaatagttaaaacaaaaaaatagctgaagaaggaatctattntagctaagatngtctttattatcgataataatagtatgatgtgggtatattttacc

SEQ ID NO: 60064 - DNA, 373 bp, Zea mays
  unsure (1)..(373): unsure at all n locations
tctcttcggtgtgtctataatctaatgctacacgtcttgtaagtacttggaaggtggaaaacttggatgactttaatgtgggggtggccnnncnncccctctcccactccccctctanntctcttccctcctctctttntctctctaccccacctccctctctcccaattattaccctttattccatttcttctctcctctccccctctcctcttcatttctccacctctccctatcactctctttcttacattctccctcttttcttcttctnccctcccttctccataccttttctcccccccacttatacttcctcccatctctttcccccctcccatcacatcctcttccccccccctcttcccccccc

SEQ ID NO: 60065 - DNA, 428 bp, Zea mays
  unsure (1)..(428): unsure at all n locations
tctnagggagaacacgtgataaggtngactaatgtgcatttctaataagatagaccttgtgcagcttgtcaagcaggtaaacaagtgggaggctctcatcacaccaaaaatgtgatgaccacatcaagacctttggagatgcttcatatggacctcttcggacccgtcgcctatctaagtataggaggaagtaagtatggtcttgttataggtgatgatttttcccgcttcacttgagtattctttctgcacgataaatctgaaacccaagggaccctcaagcgctttctcaagagagctcanaatgagtntgagctcaaagtaaagaagataagaagcgacaacaggtccaaattcaagaatcttcaagtggaggagtttcttgaggaggaagggatcaagcacgagttctccgccccctacacacc

SEQ ID NO: 60066 - DNA, 421 bp, Zea mays
  unsure (1)..(421): unsure at all n locations
tgcacgccgacgatacgcagatctcagatgttatgtttcatgaagatcgccccagcggcgaacatttgtagctccaagtgctatattcactatgtccctgngcccacatgtcggggctcattacctttgtgcatgccccccttcagctataaaaggggaggcatgcgacgttacaaggggagatccaatcttggacccagctcaagctcgcaagtncatacaaagctctcaagcaatacatcacacagtggagtatggtgttacgctccggcgacccgaaccactctaaatccttatgtgttcttgtgtttcttcccatttttccaactaacaagcaaaacacttaggcccctcctcatcttaggatttatggcgggtgcactccgccacccggccggagatttcctctccgacaatgctc

SEQ ID NO: 60067 - DNA, 505 bp, Zea mays
  unsure (1)..(505): unsure at all n locations
ggacattgtcnntcctttggaagccaatgccatccttaattctatggcgtctcccattatagagcatgcttctagcaaatntaaaattttcattntctaagtcatgctcattaatcttagcactaagttgagctatgtgattattttgttgtttaattaaagctaggtgatcatggatagcatcaacattaatgtctttacatctagtacaaatagtaacatgatcaacactagatgtagagggtttgcatgcatttaattcatcaatcttagcatgtaaaatgacattttcatttctaagattagaaacaatatcattgcaaacatttaaatttttagccttagtaatcaatttatcattttctatcttaaggctagcaattgattcattcaacttgtcaatcttatgcaatcaaattagcattatcactttaagtttcacaagagaatcatcacaatcatttaaaatcttcaaccttagcaataatttagcattctcatttct

SEQ ID NO: 60068 - DNA, 455 bp, Zea mays
  unsure (1)..(455): unsure at all n locations
tatgaagattcttcattccaacatgggctaggcggcggtgctatatccaacccatgttagtcttagcaattaagcatgtgtcgagttcagctctatcaaaatctactaagtatagctgaccctctaacacacctttaaatgctattgaatcatcacttcttctaaagacagtgacacctacatcagtaaaaagacagttgtagcccaatttgcataattgagaaacggaaagcanattgtaatataacgaatctacaagaaaaacattggaaatagaatggtcaggagaatatagcaatttacccaatcctttgaccaaaccttgatttccatcccgaatgtgatagctcgttggggatcttggtttttctcgtaggaggagaacatcttcttctcccctgtcatgtggtntgtgcacccgctgtcgatgatccaacttgagccctcggatgcat

SEQ ID NO: 60069 - DNA, 391 bp, Zea mays
  unsure (1)..(391): unsure at all n locations
atgactacatcgacacgggccttaatcgagtcagatagagacactacaccgaaactttcttctcgtgcaagtcacacccccggtctcagctttatcatttcaacccaaaagttggtacctaacagaggtacatctttctcgaagttgaacccatcatgggcatgatgggatcaccatccagttttaattttgaacatcatcccatcccacttgaagcatcatcttttgttgaacacaaaacactttgtttttctagagcatgactaagcatcagaaaaaccttttcataaaacaagtgatcaaggaanagtaatcaatntctcaaggaaggaatagcatcaattggntatcacacaacttctatcacataatgcatcatgcaagtgagaaa

SEQ ID NO: 60070 - DNA, 432 bp, Zea mays
  unsure (1)..(432): unsure at all n locations
tgtgagcagtacaagtacataagagagaaggctgctttggctgatcagccgaagcccatgcttctatgtgaagacatagcagagcacaaggtactgctggggtctcaattatctgaagagcacgaaaaaactttgataaggtttttattcaacaacaaagatgttttcgcatggtcggccaatggtctctgtggtgtcaacagggatgtcattgaacattcacttaatgtcgatccatccttcangcccagaaagcataggcttcggaaaatgtctgatgataaaactgaaggtgctcggaatgaagtaaaaagacttctcagtgctggtgtcatcagagaagtaaaatatccagagtggctagccaatacttgtatggtgaagaaagacaatggcaaatggagaatgtgtattgatttcacgaatctcaac

SEQ ID NO: 60071 - DNA, 421 bp, Zea mays
  unsure (1)..(421): unsure at all n locations
taccacacttgaagcatgagcgcttctcctttgtcttggtcttgctaggctgacccttgcgacctttaagcgccgtcttgaatctcttgatgatgagggccatttcttcatcattaactccggcggcctcaatttgtgctaccctgctgagtaacgccttcttgctccgtgttgccttgagagcaacgggttgaggctcattaattggaccgtatagagcatcgtccacgtacctcgctttcttgatcatcattcgcccgcttacgaattgtncaaggatatcttcgggcgacactattggagacctgngattctcaccaatgttattcaccacatgaggatcaagaacggcaaaggaccttatcatcaatccgacgacgtcgtgtgcctgccatactgtgctttcgtagctcttattttg

SEQ ID NO: 60072 - DNA, 518 bp, Zea mays
  unsure (1)..(518): unsure at all n locations
ctcagcttaaggatactattcaactaaagtaagaatgaagtgataagatgtctaggtatgaaaacttcctctccttcagttgttntagtattctatccttagtgggatgtaccatagtataagttaatttccttgtaatataaaatgttcaatagtgcatataactttgacatcaactatatgtgtgcactaatttaagggaatttaatctatccttttgggtttcaagaatgatgattcattctccatccacatataaggattatcatttgtgaaaccttcccttgtgtttctaatgccctcttttctaagtgtttcaataaggtctttccaagtgctttcaagatggattcaaaatctacaaatataagaagtttggttctttcaatcattgagtttcatttggtctcatatcaagtatgatcgaatcaagcaaagatgaatgaagttcaagatcactttgatggatgaaatcacannaatanaagagatcacaatgaatcaagaaagtgagtaac

SEQ ID NO: 60073 - DNA, 492 bp, Zea mays
  unsure (1)..(492): unsure at all n locations
tatatcacactcaagactgcacgagcttgaaccgaggacccgcaccactggaatagcgaaatcgtgctcgccagagttcacaaccccgccggcgcacgtggaccgggttagtcactgcgccatttntcgattcaatgcacagatagcctctacatcacaccgtgaagcttaccgtgccattggatcgaactagatcgccgtgggttggtcggcacacccgccgccgacgagagcacccgcctgcgcacgtggactcggcgattccggccatccncgccgtcgagccgtacaccgttgtgaccgtcagaacctcccagagccaaccccgcccctcggcggacctctatcactggcggttagccgcgccgcccttttctttcttgcgggtactggttaaacctatggagggacccgcggggagaacaccagaaagctacggggttttgcgaatgtcagtgactcatacgactagtatcgcgaggggataactga

SEQ ID NO: 60074 - DNA, 417 bp, Zea mays
  unsure (1)..(417): unsure at all n locations
tcngcttcaccgctgatccactcgattacgccctcatggtctccccgtatgaagttgtcttcgcttgagtactgtcggngaccataattaggggtaccctcaagactcctaattctcagctggtaacccccatcagcataaagctgcaaaggcctgatgggtgcgattaagtcagggatcggtccattcgagtgactcgatcatgcctcgcccgagcctagccttggacaagggcagccgaccccggaggatttccgtctcgcctgaggccnccctccaacgacgaacgtatttccggctcgcccgaggccctgccttcgctaagaagcaaccctgactaaatcgccgcaccgactgaccaaatcgcaggagcatttaacgcaaaggtggccttacacctttatcctgacgcacacc

SEQ ID NO: 60075 - DNA, 423 bp, Zea mays
  unsure (1)..(423): unsure at all n locations
ttgtatgcaccccgacactcgttttcggaatgtgtgacgttctgctacgaaattgcgcaaaaccaccccaaacatgagttttggacctaaagtagtggattgggcatgttcattgagaaaaacgaagaaatggttccggtggcaaaaactcgtgcttgtatgcaccccaacacccgtttttggaatgcgtgacgtccggcaacgaagttgcgcataaccaccccaaacatgagttttggacctaaagtactggattgtgcatgttcgttgcgaaaaacgaagaaatggttccggtggcaaaagctcgtgctttgtatgcaccccgacaccctgtttcggaatgggtgacgtgcggcaacgatatagcgcgaaagcaccccatacatgagttntggacctaaagtagtggattggctagttcga

SEQ ID NO: 60076 - DNA, 450 bp, Zea mays
  unsure (1)..(450): unsure at all n locations
aactcagctttcaagagtttgtggacaaatggacgaagatttttttttttctgttaagcatccggagtcaaatggacttgtcgaaagagctaatggcattataatgacaggaataatgaagttaatcttcaaccagcccagggggaagtggccagacgaattaatcaaagtggtgtggagccacaatacaacaatgtcaaggtcaacacgctttacaccattcaaattgttgtttggtgacgaagcaataaccccagaagaagctagagcgggatcaataagaacagtggcttctgcaaaggacgaagctgattattctgtggcaaaagatgctatagaacggatcangcttcacgctgtggagaatatcaataaatatcaagccgaaacaataacatggcgtgacagataagttcggttaaaaaatatcaagccaggacacttggtact

SEQ ID NO: 60077 - DNA, 350 bp, Zea mays
  unsure (1)..(350): unsure at all n locations
ttatggtcagtgatggcttatgattatatatatatgcacttgatgatggactgctcagtacatggtcaacttctataaatgatcgtcttttaatctccttggtttgtgtgataattattcttatcatcgaacttttccataaatttagcttgtaactactggtttatctgatctacagagcataaatattctgaaagctcacggtaaaagcatcaaggatagctacatgctaaatggctatgcactaaagactaaacatatgccgtgcacgtcaaggaatgcctacgagagtaactnctactacaatcacttctcttgattttaacattcataagacaaaaatgccaaca

SEQ ID NO: 60078 - DNA, 328 bp, Zea mays
  unsure (1)..(328): unsure at all n locations
tggtgccgagaccaaactagctgaagagacgaagctatttgaagaaaagaaagctgtgaatccttttattcgccgggttatttgaatctatgtccaaaacaaacactaagaaggttactaaagagatactggaaaggtttgtctaaagatactgatgacagtgatagctatgatgtggacagtggggatgaagattctgaagatcgcccctggagaccaagccatattgtcttcggaatatcgactattaaacagagtcatcttgacaacatgagaagaanggactttcgtgacatgtctatcgtgagagttggcagagacaacatcg

SEQ ID NO: 60079 - DNA, 388 bp, Zea mays
  unsure (1)..(388): unsure at all n locations
atatcatcaacgggtcaagaaaccatgtcttaagttgtttcttcttatcatccatgtattgcatcctacgtgtaatagtgttaatcgttagactctcgtttatgtgtgcgtgtacaaaactaacaaatatgaaagtctagaggtacttacaagcaaaagagggttaagtagttggtgtccatcctttgtcggtggtacaacgaccagagatcgtcaaagaataaatgctgcacaagatctatatgatcattgctcgaaaatgcatcttctggcacaacacatgtgaagtcctcgagtttgtatatgttgctagccaccatgtaccactcatgcattctaatctccggagtcgacaacttataaagtngcaccgtcgtcaagaacggcc

SEQ ID NO: 60080 - DNA, 341 bp, Zea mays
  unsure (1)..(341): unsure at all n locations
ctgggctggaactgtgtgccagtgatagtccatccatcaatgtaacactcatgtgcttccttttggagctaagcatccctgtgatggttctttttttggaaaacctggccattcatcgtctgacagtgcatctgctattagttggtctatggagaccatngacttttataccagaanataaaatctggtgcttctggttagtagtttcactnttcgttgtactgatctggcgacaaggatatccatagtactcacaacaacaacatgttccaagaccatttgtctgttggtgtgcaatcctttgtgtttgttatcaagtgttctttctagtgacgctctac

SEQ ID NO: 60081 - DNA, 228 bp, Zea mays
aagtttctcttcttcaaatgaggtgaagtcttcgctgatgttactgtctgcttgggcgtcgcctgatcgatggggacagtcttggtcccgccttgccactgcaactgtgccttgtctagctgcttgtctgctgggctggccggcgcaaggacctcgctctgggtcgtgagacagtgaacgtttctctgatcgggcactaagtcccgctcaatgttgctcgccgtctgc

SEQ ID NO: 60082 - DNA, 417 bp, Zea mays
acctcgggcagactaataccagaataaaagataacacgctatggtagtggagagatggcgagagtatcgtgtaccctccgtggcaagaggttggacggtagtgtatttgtgctctcggttggcgtgaacctgatctgattctaagaaccccagtggcgagttgacatatgcaagggttaagtgctacatatgtcgtgtgattggagatcctcagctgggtattaatcgattcggaatcgccgtacttctcggacatgaagacttggtcactgccctgcaatctaagtcatggatggaatcataatgagccaaaatcacgttgtattaattaatgtgatgatgaaattagactagatgcaaacaacgtctattaatacttaatctagcattaaaatgttgaaagtaaggatccactta

SEQ ID NO: 60083 - DNA, 394 bp, Zea mays
  unsure (1)..(394): unsure at all n locations
acatgtgctaagcggtgatgctacagccagcccatgttagtcttagcaattaagcatgcatctagatcggcctcttcttttgcaaaatcaactaagtaaagtttgtcgtctagtacacccttaaaagctagtgaaccatcacaccttctaaagatggacacatctacattagtgaatagacagttatatcccatattgcataattgactaacagataacanattatatctaagagactcaactaataacacattagaaatggagtgctcagatgaaatagcaattttacctaacccttttaccttgccttgattcccatcaccgaatattattgaatcttgggaatccttgtttttgacttaggaggtgaacatcttcttctcccccgtcatat

SEQ ID NO: 60084 - DNA, 478 bp, Zea mays
  unsure (1)..(478): unsure at all n locations
tatccaaaagtttagggatgtttggagttattaaacaatttctaaaattccaagaaactagcttttggtattttaaatactaaataattcctggtttggactaaaaatcttagatccatttttattaaatactagggaattttaggagtccaaaaaaattagtcccacattttatcatttttctatagttctctatggatttcctaagtctggtagaaaaagaaaaagacaggaatgaatagtacggtgccgaaaccagcccaatagagcccacgcccaggcgaaacgcgccgcgctcgcgcccgcgttggcagttttacacaaaagacctcaactttttgaataagcagtaaataacccagagtactatntgtttgtctcattgacgtttgcaccaagacccccgtagttctattccttcgcaacaccaagtccgcgatggtggtcggcgacgagcacgtcttcggcgagcctatac

SEQ ID NO: 60085 - DNA, 423 bp, Zea mays
tgtgaagggtcttcatccacacatgtgctaagcggtgatgtctcagccagcccatgctagtcttagcaattaagcatgcatctagaccggcctcctctcttgcaaaatccactaaataaagtttgccgtctaatacacccttaaaagctagtgaaccatcacatcttctaaagacagacacatctacatttgtaaatagacaattatatcccatattacataattgactaacagatagtaattatatccaagagactcaactaataacacattagagatagagcgctcattagatattgcaatcttgcctaaacctttaaccttgccttggttcccatcaccgaatatgattgaatcttgggaatccttattcttgacgtaggaggtgaacatcttcttttccctcgtcatatggttcgtgca

SEQ ID NO: 60086 - DNA, 357 bp, Zea mays
aaatctaaccagtatagcttgacctctaacacctccttaaatgctattggatcatcacttctttctaagacaggggaccctatatcagtgaatagacaggtgtagccattggacataattgagatacgggaaaggcaattgtaatctagagaattacaaaaaaacatggaaatagaatggcatgagaatagcaatttaccaagacttgaccaacctgattcatcccaatggatactcgtgggatctggttttttgaggagagacatttctctccctgcatgggttggcaccgctgcagatcacatgaccccgatgctaaccacaacagttagtctgacttagaccaatgtttggtct

SEQ ID NO: 60087 - DNA, 467 bp, Zea mays
  unsure (1)..(467): unsure at all n locations
actatanacaactcaagcttgtaagagnggggtaagatgcttcataactagtattccacctacactaanggctctgtttggtactctagtatntacctcaatccacatgaattgaggtggattgaggtataacttaaactaatttacacttcaatccacctcaacacatgtggattggagtcagtactatagtacccaaactatgtctaaatagagtagtctagggctcatatctttgattctgctggtattaacaatgattggaacaaagaacaacgataatgactctaagcctaatggtgagagtgtatcccaactggaattgaaggacatgttacacacgatgattgaagcctttgccaagtaccaagacactgcaacaccatcctttgagtgtcttgatcgtcgagcttctaatcttgctacactgatggacatgatgaangtgcgcctcccaccagatactg

SEQ ID NO: 60088 - DNA, 410 bp, Zea mays
  unsure (1)..(410): unsure at all n locations
ntacanagcacttaaagaaatatgaatgagaaggacacattctattgccctatccaccaaatatntgaacacaaccatcacacgcacatagaattcacaaatacattcagtgtccctcaggatgtcactgcatcaaaatgtctctanttggcaatgtctttcgcaggagcaatcgaggaagaaaggcgactcgaggcatcatgcgcagccttgacatgggcgataatgtcattatgaaccactacaccaggcctcctcatcaaaatccgccccgcgtgaatggctatgtccatagccttgtcgtgctgagctctcagaacgacgcagatgtcctcagaagctttggcagccaatcgagcagtttctagctcctgtgcaacgagtttcttctaagcacgaagatctttaat

SEQ ID NO: 60089 - DNA, 439 bp, Zea mays
  unsure (1)..(439): unsure at all n locations
ttaaaactaagctgactaacaccaaccgacccgctcatatacattcttggtttacaatagtggaacgtcaatgtaaccaactggtcgaattaatcttctattggtcatatcgcgatgttgctgactgtgatgttgtgcctatggatgcttgtaatattctgctaggtagaccatggcaatctgattcagaatgtatgcatcatggtagatcaaatcaatattctctcatacaccatgataagaacattattgtgcttcccatgtcccctgaggctattgtgcgtgaagatgttgctaaagctaccaaagcttagactgagaacaacaagaatattatagctgttgctaataacaaagatgggataaaattgataggacattgcttgcttgcgataaanactgatgttaatgaattattttgcttcactactgttgccta

SEQ ID NO: 60090 - DNA, 314 bp, Zea mays
  unsure (1)..(314): unsure at all n locations
ttaagtgggacatagaactccataggtaagacatctcgtagctatgaagcgaccacttgagcccttgaccctttacgaacaacaggcaagacttgtctgaaatccncaccgaagacaatggttttaccaccgaatggtagttcgggccgacccattatatcgcgcatgctattgtccagtgcctccacggcttgtctcttggtcatagaagcctcgtnccagataatgagagatgctntccgtancaactctgcggttccactctgcttcgtgaagcttcatacaccgccctcgcaatattgagaggtatcttg

SEQ ID NO: 60091 - DNA, 411 bp, Zea mays
  unsure (1)..(411): unsure at all n locations
aactataaaactcagcttaaacaagactgatctgcatctcaagagtttatgctcatctacctcgggttcatcaccaatatctgccaaacgcttataattatgccaatgaatatcatactcatattcacagtanaatacatcatctcctccatcgttagcatccctaaagtctttggggcacattatagaacaatgtctaaggattggttccatctgcacaggccataagcacaaagaacttgagacaacatatgaacaagcaaataaaactgtgaaagagccaactatacacatagaagacagttatcacctcaatgtctgcaagatcattggtacgatacagctctcttctcaagttatgcagctgccttcctgctgcagtctcttcggggataatagaccacctgacct

SEQ ID NO: 60092 - DNA, 466 bp, Zea mays
  unsure (1)..(466): unsure at all n locations
cgtgttggatcatccagaaatgagctctcaacatcatacatctcaagatataaaatacaacatcattcagtggccacctctggaggcagttgacttaagctagctccagcaagggactctaaagggttctgtaccctaaatatagagaatcaaatggtcctctatgctttccagcagcgtcttctatacagtcctctaaagttagaggacgctgctggattctctctatatatagagtttctctaaacggtctatctatttgaatactctaaataaccggtttagtaaaactaaaatatgtacaatacgtttgagagtatgacaaatacatatgtacaaaacataaaaataaaaaatgtctctaatatagatatttgaatatagaggacattgttggagagaaaggagatatagatgatgaaatcttttatatgagactgtcnacgactgatatagaagataaata

SEQ ID NO: 60093 - DNA, 382 bp, Zea mays
  unsure (1)..(382): unsure at all n locations
cttggatcactctntntgggtgatctgaagatttacttatggatggttaaagtgtgaagactgaatctgtccaattttggacagcaaagccttctagtgtatgttacccttgatacatattaaaccaaccagagaagtttataaataatgtgtagaaaatttatttagcttttccataaagcctaggatcaattgatttggatgcctgatgtaacaccccaggtgctaccaaggtgctggcttcctaatggcacatctacctaatatcacatgtgggtaaaacttggaggagagggagcacttataaccttggaagcatgagtgagttaaaaaatgccaaggaacaaagcattacccaagcttttacgcaataatcaccttg

SEQ ID NO: 60094 - DNA, 247 bp, Zea mays
  unsure (1)..(247): unsure at all n locations
cttgtgccttagaggtcggcatttcaatttgtatgactctgaacttcattgggtgcaccggaggtgcacccaatgggtgtagccnccgagcttcgagtagaatttagaaaataatttactcgaaggtcttccccagaaattatttccatttgtgctcctgcgttttagttgagggccggcctatgttttaatcttggcccatgtcttaaaagtcggcactatcttggctcggaatgataatccatgg

SEQ ID NO: 60095 - DNA, 433 bp, Zea mays
  unsure (1)..(433): unsure at all n locations
gggcgacaagagtattgatgcgagactaatactggactgagataattggatgccggacccggtattcataattaatccatttctttgattgtaattgcaaaaaacaaaaatgtacatcccaaaagtcgctntagtccaaatagtttaatatttgccaaaacctactgctagaactgtgtatatatatctgtttacgtcttgtctagatcccaatattcggaacagatnggagttatctgttttcaattagtttggacatagtatagaatatccaagccgatctcgtttggttcattccgtgtgtttctcgtcccgatctaaatctccaaatataaacaacggttaagcattcatctgactctggagtattctctagatcaaatcttgtccaaatattatcgtcgatcttgttntagtctgacccatctataca

SEQ ID NO: 60096 - DNA, 457 bp, Zea mays
  unsure (1)..(457): unsure at all n locations
gctgagtacgaagcattgattctatgtcttcggaagttaaaagcaatgggaatcagaagggccatacttaaaactgattcccaggttgtttcgggccatattgacaagagttgcaaggctaaggatccgaagcttgaaaaatatctggatatggttcgaagagtcgaagcttccttcgaggggttntctgtcaaaaatatccctcgaggacaaaatgagcatgctgatttgtagctaagtcagcagcacaggggctgcctctaccttcagatgtgttcttcgaaacaataaaagcaccttcggtggaacttcttgaaagagcagtccttaacatatcntcctgttttagcgaagattggagaactgagatcatctcttaccttcanggtaaattcctttcagatgacgaagcctataacaagagaatagagggcagagctcgaccatatgtcataat

SEQ ID NO: 60097 - DNA, 501 bp, Zea mays
  unsure (1)..(501): unsure at all n locations
tcataaagattgcctnctcaacaagatattagtgtatgtgtatattctcccncattctgataagtgcactcagcaagcatcgcccataagcatatatactacaaatcaccctcaaaagaggtctccccatctggatatgcatgaaagcataaagagatgcagaatatgtaaaacctaggttgtgagaataatgttgaggatgccagnacantacattcaacaagatgcaatgattcctaataggatagcaactattaaagaaagccctagactatggatatagtatggaatggagacaatgtgttatgatttccactggtggcaactctagataagataaggctgagtttgaatgtctcgctaggatgatgaaactctactgctcgagtagccataaacccctaaacccctaaaccctaaccctaagcctaaaccgtataccctaaaccattactctaacaccaaactataagagcaaaacggcgacgatgagatgatatg

SEQ ID NO: 60098 - DNA, 509 bp, Zea mays
  unsure (1)..(509): unsure at all n locations
tanagatntgcgataacaaagaggaccttcgaattatcaataattcttcgaagcaacaaanagtcgttctaaggaacacagagtatgttngctgaagttacaaaaagccgctccaaagggagcgcagtgtaagttttctgctccaaagtcgttccaaagggaatgcaaagcttacagcgaataataaacgctgataccgcctaattaaaatgcgaagcgcgaaaagtcaacgcgaataccgctaaaagtagaaggcgaagaagctcctacaggaggcttacagcaaanaataaacgctgattccgctgaagtaaaaggcgaagaagctcctaagggaggcttacagcgaaaagtcaacgctgatttaaaaagattatgtgttttattacagggatgtgcgtgtatctttngaacatataccatcttacatagcataacatcatcacatcatttcgcatggcataagcatcatacatcatgctgcatatggcacaagaaaggggacacat

SEQ ID NO: 60099 - DNA, 427 bp, Zea mays
agattcctcatcctgacatgggctaggcggctatgctatagtcaacctgctgggggccttcttccttcgaaagttctcaaaatcgcgatttaattatattttccaagtgtgacatgtaaacaggcaccttcgccctcgcgtcaaaggcatatatatactacggagagtatgatcgggaccaacgtacatggcatcgaaggtcgaattaatcccgaagctatatgctaagaaacttctgctacatggtggaaaaatgaactgacttataggggaaaaggctatctagtcctcatagaactgtatatgaagtaataatacatgtaaagggcatgaatgtgatttctcacacgatgtgtcctgtgcctataaataagtgaacaatacccctcgtactattcatgctgacttgtaatcgctcgtgcgtcat

SEQ ID NO: 60100 - DNA, 453 bp, Zea mays
gcctcgactctatctttcgttgcatatgttgatcccaaggcaatagatcttgccatgagaatcgcccaaaggatgttcctccaaatgaaggatgatgatgcgaacaacattattgatgaagaagataatgatcgatggagaccatactatgaatcctcctcttcacaaagtacgtctttcaaatccacttgtcatatgggctttgtcgctaatgagagtgacagcgaaagcgaatgtgaggatgatgaggagcatgatagtgatagtgaacatgatgatgatcttcaataattactcgctcaactaagttagaagaaccggacgaacttgctcaaacttatgataacagcggaagaacaaaatgaaaagctttataagctagatgatatcctcattgaaacaatctaagacttggagaagtttgaccaagagcatgagatagttaagtgctct

SEQ ID NO: 60101 - DNA, 431 bp, Zea mays
  unsure (1)..(431): unsure at all n locations
actcaacctctaaaggagaacacgtgatacgtctgactaacgtgcaattctaanaagacagaccttctgcagcttggcaagcacgtaaacaagtgggaggagcacatcacagcaagaatgtgatgaccacttcaagacctctggagctgatgcatatggacctcctcggacccgtcacctatctgagcataggaggaagtaagtatgggctagttatttgtgaaaacttttccccttcacttgggagtcttcttgcacgataagtctgaaacccaagggaccctcaagcgctctctaaggagagataaatacgagtttgagctcaacgtgaagaagatgacaagcgacaacgggtccgaattcacgaatcttccagtggaggagttccttgaggacgagaggatcaagcacgagttcctcgcttcctacac

SEQ ID NO: 60102 - DNA, 449 bp, Zea mays
tgagctttcttcagattatgaattattctctgaaccttctcttcgggctctctcaccatatcaggcctgaagaagtacctttcacctagttcagaccaatttagtggagtacgacatcgtcgtccatataaagcttcaaatggtgccatcttaatgctttcttgatagctgttattatacgagaactccactaatggtaaacaatcatcccatatctgtgggaactacagaacacatgctcgtaacatatcttcaagtatgtgattaaccctctcagtctgcccactagtttgaggatgatatgccgaactatggagcaatttagtacccaaggatttatgaagttcttcctagaatttggatacggaatgaggtctacgatccaacactctattctttggaacaccgtgcatactgagaatatgagcaatatacatgttcacatatgc

SEQ ID NO: 60103 - DNA, 382 bp, Zea mays
atcagatatctctctttttattaaattaatcaatgtcctattactagactcggcctgtccattggcctgagcataatatggagatgaattaagcagcttaattctatataattcagcaaattcacgtacctcctttgacataaaagaagtcccttgatctgtagtcaaggtctggggaatgccgaatctatgaatgatatgttcagttatgaactcaattacctccttgtgtgtcatgttcttcagagcaacgacttcagtccatttggtaaagtagtcagtggcaactaacacgaaccgatgcccctttgatgatgaacgatgaatttctccaataagtctaatccccatcctctataaggcccatgcttgatgataggat

SEQ ID NO: 60104 - DNA, 368 bp, Zea mays
gcgcctctacggttacgcgaggaatagaaccacgatagatgaagctatggtcgaggggttagcgtgtttacactaagcaaatattagttagaatatgtaatccgacatttctatattaattgatattaatcaaatgtaaattaataccgctaattagttttgactaacttactattttaattgttgatgattaaataaataactaattaattcatatgagtaattataagcgaacatcttaatctcgcgcgcggacaacgcgcgatcgcgcgaacggcgcgcagcaaggcgcgcgacacacgtgaactgcgcgcgacactcgagaacgactcgtgacgacgcgtgcgaaacagcaccaggcacgagca

SEQ ID NO: 60105 - DNA, 453 bp, Zea mays
tgaagctggattatgcgctctgacgaaagaggatcttgcggatagccttgcatacaatagcctgaaggtgcgagaattgtatatttagaaatttacaatttttgaatcattcttttattcttatactaattcttgtatatataggagttaatatcgagcaacgcgctgagagcgcataagaatgccgaagacgagagctatgatattgctttcaacaacctacgatcagagggtattaagctgagaaacgaagctctggaaaaggataaaattctgcttacattggtggacaagataaaagaggacgaagctgcctcaaaagcccaggctgaagcccaaaaacgcaaaattaaagatcttcagatacagctagctagagctaaagaagaacgtatacttgaagagacataacgagagcttagtgatcaatgggtcgatcatttagaaataaat

SEQ ID NO: 60106 - DNA, 335 bp, Zea mays
  unsure (1)..(335): unsure at all n locations
tataacaagaggatagaggcaagagctcgtccatatgtcatgatagaaagggagttgtacaaacatggagtttgtgctccgctgctcaaatgtttatccagagccgaaggtatagagttaatgaaagaaatacatgcaggcctgtgtggatctcacatcggatctaggccgttactcggaaaagttttccgtcaagggttttactggccgaaggcagcttcggatgcagcagaatnggttcataagtgcgaaggttgtcagaaatgtgcaagagatcaaaaacaaccttcgtccttaacacagctcatacaacccacttggccattgcaaaggtg

SEQ ID NO: 60107 - DNA, 329 bp, Zea mays
  unsure (1)..(329): unsure at all n locations
taatgcgcctaanagattnntctaatttgtaaagggctatgcacccatggttcaagataatgagggttacattttatatcctactaattatcctgagcacaaaattaggagaattcatgctaagaaatctcattctgtttctcaccatgcttttatgtataagaatgaggcttctagctctaggcactctactcatgttaaaatgcctaaaaagaaaactcctactgcatcanatgagcccaacatttcatttaagacttttgatgcatcttatgttttaactaacaaatcaggcaaagtagttgccaaatatgtcgggggcaaacaca

SEQ ID NO: 60108 - DNA, 464 bp, Zea mays
  unsure (1)..(464): unsure at all n locations
ctaagactaagacttgtaggcttgacccgagttaatctttttcactcgctntgttggcggctatctcaactaggttagacaagtcctagatgcaatacaaggaatttaaatatgcaatgcaagtgacaacaccatttgacattttacataaaatttctgagatcaagaatatttagttcattcctcaacatgcaaaagcgggtcttatcaagtggcttagcgaaaatatccgctaattgatcttccgacctcactccttctaaaatgatatctcctttagcaacatgatctctaaggaagtgatgacggatatcaatgtgcttggtgcgagagtgttgtacaggattattatgcaatttaacagcactctcattatcacacaacaaaggtaccttttctagaactacgccatagtctacaagagtttgtttcatatataanatctgtgtgcaacacgcacctgc

SEQ ID NO: 60109 - DNA, 389 bp, Zea mays
  unsure (1)..(389): unsure at all n locations
tcagattccgctctgaattcatgttgctgntgagagtgctggcgcccttctggctgctggcttcgggaataagtacgttgcagtggcggacgcggtgggggctgatgccaagaagcctatgaatggttgccgaagcaacaaaagctgcacgatgattgtccacatattctggtatgtagggagaatggcacgaagcagtgtgcaagacctgcttttgctgattctgccgagcttcggctctggcgatctccttctgcttcagaatagtgattcggcacattcttgtagtatggccattatcctcaccacagaataagcaatagatcttcctgngctaatccccatatcttcctctgaagcccctggcgcctctgccccttagagctggc

SEQ ID NO: 60110 - DNA, 213 bp, Zea mays
  unsure (1)..(213): unsure at all n locations
acttagaatactaagcttctaatggggaacacgtgataggtctgactaacgtgcaattcgaaanagatagaccttgtgcagcttgtcaagcatgtaaacaagtgggaggagcgcatcacatccagaatgtgatgaccacatccagacccctggagctgctacatatggatctcttcggacccgtcgcctatctaagcataggaagaagtaagt

SEQ ID NO: 60111 - DNA, 483 bp, Zea mays
  unsure (1)..(483): unsure at all n locations
atagaaactcaagctagatactaacagnnattggtgtaacagactcatcggtccgtttattctcatcaatcaattctccaaatgtagcagctagattggactgctttgtaccaacagtattcaaacattgtttggtagaggcaaatatcttgccaacctctaagtcataatcaatcaatgtagcttggaacttctggcgttgatgtacaggaagcatctgaatcttatttgccatcaagtcttgcataagagggagttggatgattatatngggaacgcgatcatgttgatttgggtcttcatcacaagtttctggcctcataggatactcaagtaaaaaaagattataatgatatgataagtatggtaaagcaacagacacacanagatcatagtgggtatatgacctaacctcaatctggctagtagttggcgaatttgagacataacatgtctcactgctgctaccaaactgatgaaaca

SEQ ID NO: 60112 - DNA, 371 bp, Zea mays
  unsure (1)..(371): unsure at all n locations
ctaagcttcttaccatgtgatcacgggtatctcgagaaggtagagcatatgttctttctctttagtngagtcaagctcatttttagcctctcattgtcttccttgagctcttgatatgtatcatcatttgttcctgcaagttctagctcaaaagaagatttgcttgtcgacggacaagcattagcacatggtaatatagtatcaatttgaatacatgtgcacaagtgaggttgtcgggatttaaattttcatcacaacctcatgagtgatgttaatatgatatgatcatctctaagattttcatgagagcataggagcatatcatatttctcttgaagagctagatctctcaattttagctttcctacttg

SEQ ID NO: 60113 - DNA, 513 bp, Zea mays
  unsure (1)..(513): unsure at all n locations
ctcatccataaccttcattcccttaggaatgactgagatctctttgtctttatctttcngctgcaccgcttatttcttggtgtaagttctgcatccccttacgaacgtcctttgaacttcttcggcttctattntggcggtattcgcggtgacttttcgcgcttcgccttatatttcggcgcgatttggctctgcattcccttatgaacgactcttgagcattaaacttacgctgcgctctcttangaacggctgtttgtagcttcattgtgctctgcatccccttaaggacgactatcgagcttctccatgtgttctctttnttctgcactcgatggtgcatgctcagaatttacatttacatatttcgggggattntgctctcgtggagctgaataagaaagggaaaaatacaaactatggccccattaanaacctnntctccccttaggaagggatagggtgccatggacaaatgaaaagattacatgaatctatacataataccggcga

SEQ ID NO: 60114 - DNA, 517 bp, Zea mays
  unsure (1)..(517): unsure at all n locations
cttaatgctttctcgatagctattattatatgagaactccgctaatggtaaacaatcatcccatttctgtgggaagtccaaagcacaagcccgtaacatatcttcaagtatttgatttaccctcttagtttgcccactggtttgcggacgataggccgaactatggagcaacttagtacccaaggatttgtgaagtgcttcccaaaacttggctacaaattgaggtccacgatctgacactatagtcttcggaataccgtgcaaactgagaatacgggcaatgtataattctgcataagtggccattgtatattttaccctgaccggaaggaagtgggcgatctttgcaagtcgatcaacgataacccagatagaatcataccctttagcggtcctgggcaaccccacaataaagtccatactaatatcctnccatttccatgttagaatagggtaacgattgcaatggcccagcagctttcatgtgtatgtccttgacacgtctacaagtgtcata

SEQ ID NO: 60115 - DNA, 435 bp, Zea mays
ctcagctttcgacctggttccggctctggctcttcacagcccagactatatctcctcttcttaatattgcttcaggggtaagttgatgaagattaacctgatatgttttcagaacttctaccacaaacctgcttaaaggaaatcgtagcccagctttaaaaaagattcggaagatcacgacttcattatcttcgggagtcggcacagtcttctctccgtcatctgccctcacgatggatatatctcgaaaatatctctccctcatgttttcaagatgaccttgtccaatggttgattttctgaagactaaatggctcggtcgccatggtggatcttcggaatcctcacctccactgtctgcgtcatagctgtcactttcaccagtatcttcagataagcctttcaaaatactcctagtaattctctctgtatttg

SEQ ID NO: 60116 - DNA, 363 bp, Zea mays
  unsure (1)..(363): unsure at all n locations
agaatatccctgaccttgctaggatctaccgccaattccttagctgataatacgtgccccacaaattgaatctcttccagccagaacgcacacttgctgaacttggcatatagctgatgttcccttagacgcgtcaatacaatccgtaaatgctgagcatggtcttcttcattcttggaatatatcaagatatcatcaatgaagactaccacgaacttgtccaattcaggcatgaacaccgagttcatcanatatgtgaaatgggcacgagcatttgcgagcccaaaagacattaccaacgattcaaataatccataccgcgtagtaaacgcggtcttcggtatatcctcgggccgaatacgg

SEQ ID NO: 60117 - DNA, 455 bp, Zea mays
  unsure (1)..(455): unsure at all n locations
tcgtcagaagatggatgagtacatccgggccgataatgatntccgccagagaagggaagaagcttataggttttctgagatgactaggggctttggaggaagaatccaccctaggcatgtcagatcaatccacaactctagtcagagtgatgacagaggaagccagtttcagaggccacagcatagctcacaatcttcagggcaacaacaaagctctttcaggccaccaactccaaggggcagaggcggcaggggcttcagaggaagatatgaggatcagcccaagaaactatattgcttattctgtggtgaagacaagggccacactacaagaacattccaggtcaccattcagaagcaaaaagagattgccgaagcagaagcgcgacagaatcaaccgaagcaggttctacatactgcttcgtggctactctcctatataccagaatacgtgg

SEQ ID NO: 60118 - DNA, 463 bp, Zea mays
  unsure (1)..(463): unsure at all n locations
tactcagctttaagggagagccatttaggataaccaagttcattttggaaaacagcgttgcagtgcatgccagacggaaagcagttggagcccatcatcccacaagaacatatgacgaccgacggccgcttggctactccacatagatctattcggccaattgcttacataagcatcggcgggagaagtattgtcttgaatagtggatgatattctcgcttacttggggttcttttgcagggaaatctcnacccaataaccttaagggattcttggacgagctcaaacgagttcggcttaagatcaagaaattagaagcacaatggaacggagttaagactctcnatcgaggcttcttgggagggggctaagcatgagtctctttcctaccgcccacaaatgggtagggaagaagaacgactctatggaatggaaggactgctgagagacagattggatcgtt

SEQ ID NO: 60119 - DNA, 430 bp, Zea mays
  unsure (1)..(430): unsure at all n locations
cttggctcaatgctcttcggcttcgtcatcctgtacatatcatatctttataagggaaattcaagtttcaaggaaaaggtaagcacaacgtacgagtttatctaccggttaaggtgacttcgagcttcgtcactagccaagtntcgcctggcctttgcccagatttgagtaacaaatctgtttccgatgcttctgcccaggccgaggatgttatccaaatctgctggtgacaggctgagtttggtctgtttacaatatttccatgtgtacagccagccttcatgaaagcgacagctgtgcctcaagaagctagcaaggcacagaagtcaccatgtccagctataacttcgtcgagagcatcaacttcaccttcaatatgattaaatgtgcccgacaggtcttcaaccgaagggttaaatntttcggagct

SEQ ID NO: 60120 - DNA, 400 bp, Zea mays
  unsure (1)..(400): unsure at all n locations
taccgcattngaagcatgatcgcttcccctgggtcttagtcttgctcggctgtccattgcgaccctttagcaccgtcttgaatctcttgataatgagggccatttcttcttcattaagaccggccgcctcaatttgcgccaccttgctgggtagcgcctccttgttccctgtggctttgagagcaaaaggttgcggctcgttgatcggtccattcaaggcgtcgtccacataccttgcctccttgatcatcattcgcccgctgacgaattttcctagtacttcttcgggcgacattntggtgtacctgggattctcacgaatattattcaccaaatgaggatcaagaacggtaaaggacctgagcattagtcggacgacgtcgtggtccgtccatcgcgt

SEQ ID NO: 60121 - DNA, 448 bp, Zea mays
  unsure (1)..(448): unsure at all n locations
gcagtgctcgtcgactttctccgtgcgaacgccgacgtcttcgcgtggagtccctcggacatgcccggcataccgagggatgtcgccgagcactcgctggacatccgagccggagcccgacccgtcaagcagcctctgcgccgattcgacgaagaanagcgcagagccataggcgaggagatccacaagctaatggcggcagggttcatcaaagaggtattccatcccgaatggcttgccaaccctgtgcttgtgagaaagaaaggagggaaatggcggatgtgtgtagactacactggtctaaacaaagcatgtccgaaggttccctaccctctgcctcgcatcgatcgttgaggaatgtgggtgcgacgtaccagcggtgcatgaaccatgtgttcggccaacacattggccggacgatcgaggcctacatcgatgacatcgtagt

SEQ ID NO: 60122 - DNA, 529 bp, Zea mays
  unsure (1)..(529): unsure at all n locations
tactcagcttacacatgatgatcattgcaacatatataccatattgaaaactacaagatcatgcatataaagcacaatgtctaagcacaccatgattaagaagtattttcttaggtacaccaaaggaaataacattntaaagcataaagcacctaagccaagatactaccaattgaaaggcaagaacatagctatgatcacaatcaacggaacttcaagatattcaatgaaattgcatagttccattctccatacctttgccttttacctgaatgccatgagattcattcttttaggtagtgtgtagtgagagcccctgttgtcaccaattntagggctccttttgctcatgcacctcatagctcgagagggtgcattagagacacaacatggatttcttgttntggtatacacagagtaccaagacanagtaatcatgtgaacatggactanacaaaactatcatgcttgcacataggttaatcattataaaccacatagcatgacttacanaaagatacatggttat

SEQ ID NO: 60123 - DNA, 468 bp, Zea mays
  unsure (1)..(468): unsure at all n locations
tctagaatcaagaatattgagctcatgcctaagtctggtaaaagaatggtcatcaagtggcttggtaaagatatcggctaattgatctttagtattaatgtaagaaatctcgatatcccccttttgttggtgatccctaagaaaatgataccgaatggctatgtgcttagtgcggctatgctcgacgggattgtcggccattttaattgcactctcattatcacatagcanagggactnntggttaattgtaaccgtagtcccgcagggtttgcctcatccaaagtaattgcgcgcaacaatgtcctgcggcaatgtactcggcttcggcggtggaaagagcgaccgaattttgcttctttgaagcccaagacaccaaggatcttcccaagaactggcnnagtccccgatgtgctcttctattgattntgcaccccgcccaatcggcatccgaataaccaattaaatc

SEQ ID NO: 60124 - DNA, 441 bp, Zea mays
  unsure (1)..(441): unsure at all n locations
tgcccaaagaaatgatattggtatgaaacacattcatgaganaataaaagccggtaaagccaactgcttcagaaaagatgatcaaggtgttgtatggtttaatcatcgcatagttgtgcctaagaatgatgagatccgccagcaaattctagatgaagcacatcttagtcgctattctattcatcccggaagcactaagatgtatcatgatctaaaacaacattattggtggacaaagatgaagattgaaattgcatgctatgtggcaagatgtgacacttgcagacatgtaaaagccatacatatgaagactgctggtccattacaatctctacctataccaacatggaaatgggaggatataagtatggactttattgtgggattgcctangacagcaaaagggtatgattccatctgggttatcattgatcgacttac

SEQ ID NO: 60125 - DNA, 440 bp, Zea mays
  unsure (1)..(440): unsure at all n locations
gggccaatcatgtatcttccaaagctaatctataaatatgggagacatttcagagatcatggagggaggaaaacatcccatggccaccgacagtaacctcttgagcagtaaagatggacttggtacggtgtaatgcataattcaattcgcaaagatatacaagcaccacaaaaatttacaaaactaaagcaacactgaataaaacaccagtggatagtagcggagaaagtgtttgacctgaagttaaaatataataacttgtgcagatatacctttgcactgccatacttgaggcaactaattcctagttntaatccttcccttgtctgcatgatccgaacaataagtggctctttcgaccttttcttcttagcttttgctttctttggtagttctggagccgttgaggttcatctcatctatgataatgccccttgagt

SEQ ID NO: 60126 - DNA, 493 bp, Zea mays
  unsure (1)..(493): unsure at all n locations
tactcagcttcttaccacgcgcccgtggatatcttgagagagtcgagcaattcgtcttctctcttagtgnctntgcttcttggtcccacacaatntcttttgtgtccctaaaacttgttgctcaatcaatgattggctttcttttaagtgacaggggttagcacatggtgatatgcaattcaaatgcgcacacgtgcgggaatgaggttcacatgaatttaagttcgcaattataacctcatgagcaacattaagcatgatatgtctatccaagagattatcatgagaataagacaatgaatcatatttttcagtgagagctagtttatcatgacttagcaattctacttgcttctcaagcatggcatttctcattctaagttgagcaacacaagataaagcatcatcatttctactttgctcaattagaaattgaatcataccgtggaccaagacatcatgagagcaccttagcnntctcatgtccttggca

SEQ ID NO: 60127 - DNA, 477 bp, Zea mays
  unsure (1)..(477): unsure at all n locations
ggaagattcttcattccacatgtgccagtcagctttgctttatccagcccatgttagtcttagcaattaagcaagtgtcgagttcagctctatcaaaatctaccaagtatagctgaccctctaacactcccttaaatgctactgaatcatcacttcttctaaagacagtaacacctatatctgtaaaaagacagttgtaacccattttacataattgcgaaactgaaagcaagttgtaatctaaagaatctacaagaaaaacattggaaatggagtggtcaggagatatagcaatnttacccaatcctttgaccaaacctttatttccatccncgaatgtgatagctcgttgaggatcttggtttttctcataggaggagaacatctntcttctccctgtcatgtggtttgtgcacccgctgtcgatgaatccaacttgagccccggatgcataaacctacanaacanatttagttc

SEQ ID NO: 60128 - DNA, 393 bp, Zea mays
  unsure (1)..(393): unsure at all n locations
tctgttaaaaatattcctcgtggagaaaatgaatatgctgatttattagctaagtcagcagcacaggggctgcccttaccttcggaagtatttttcgaaacaataaaagcaccttcggttgagcttcttggaagagcagtcctcaacatatcccctgtctatagtgaagactggaggactgagatcatctctttccttcagggtaactttctttcagatgacgaagcttataacaggaggattgaggcaagagctcgaccatatgttataatagaaggggaactatacaagcgtggggtctgttctccgttactcaagtgtttatccagagccgaaggtatagaattgatgaagaanatacacgcaggcctgtgtggatctcacattggatct

SEQ ID NO: 60129 - DNA, 494 bp, Zea mays
  unsure (1)..(494): unsure at all n locations
ctatgatactcagctacacagaacacgggggcaatctttccagtctgctccattgccgagaaactctttgcacaaagctgacggaagaaatagctcaactctgaaagcgttagccagacatgctcagggacatagcctcgaaccatcgcaggaagaatccgttcaatccatatgtggaagtcatgactcttcatccctaagactcgcatagtagataagttcacccccctactcaggttagctgcatacccatcagggaacatcaacatcttgatccactgaagtacttccttcctctgggccctgcttangacgaaatcggccttaggccttctccatgtctttccgccacttggcggcttcatctctaagtttggtctatcacataacgctgccagatccactcttgccttcacattatcctttgacttatcaggaatgtccataattggtgcccacagtgcctcggaacattttntcagtgtgcatacgtc

SEQ ID NO: 60130 - DNA, 488 bp, Zea mays
taaagccatggtaagtagcataggccaataatatgcgaattgtctcatgcctagctacgggtgcataggtttcaccgaaatctaaaccttcgacatgggagtatcccttggccacaagtcgagctttgttccttgtcaccacaccatgctcatcttgcttgttgcggaagacccatttggttcctaccaacatttgattaggacgtggaactaaatgccatacctcattcctagtgaagttgttgagctcctcttgcattgccaccacccaatccgaatcttgtagtgcttcctctaccttgtgtggctcaatagaggaaacaaacgagtaatgttcacaaaaatgtgcaacacgagatctagtggctacccccttatgaatgtcgccgaggatggtgtcgacggggtgatctcgttggattgcttggtggactctggggtgtggcggccttggtcttgctcatcctcctttttcttgatcgttgatc

SEQ ID NO: 60131 - DNA, 428 bp, Zea mays
  unsure (1)..(428): unsure at all n locations
tctccttgtcgtcatcaaccttgacatagaaccactccgacttccagcctgctgcccatttgcttcggtagctgattacaggaaactntgtggttttccgataagcaaaattatatcaaccaaaattgtcatgcaatccatcttttctagccttcgtctgatagtgcaattcgtgaactcgacaaaagctgtccgcaaacggctccaccgcttggcttcggagggcccagatataaacactaagcctaacaatagcgttaggagtcaactgatgaacatagataccgaacctcttcagtacctctgcaataatcccatgtagggggaatcttaatccagcctttagaaagcttntgaaaataacaatntcatccttctccggctttggggtagtttcctctcccccgaagcgtaatagcttcttctga

SEQ ID NO: 60132 - DNA, 496 bp, Zea mays
  unsure (1)..(496): unsure at all n locations
tcacttggatggctntggcatatgaggctcgcacatgttgttatgagcacactcaagaaggtattaaagaaagacatggttagaggattaaaagatgtggtgtttgaaaaagataagccatgcagtgcttgtcaagctggaaagcaagttgctaatacacatcctactaaagctttcatgtcaacatcaaggccactggaactacttcatatggatttatntggacctacaaattatgtaagtgccggtggcaacctctactgtctagtgaatgttgatgacttctcaagatacacttgggtgttctttctccatgacaaatcagaagttgcatctatattcaagaagtttgccaagaaagctcanaatgaatntgattggcagatcaagaagaatagaagtgacaatggcaaagaanttgacaacaccaacattcatgagtactgtgatgaaatggggatcaagcatgaagtatcttccacatacacacctcaac

SEQ ID NO: 60133 - DNA, 481 bp, Zea mays
  unsure (1)..(481): unsure at all n locations
tccaatctctccaatntccacaattaagacaagtgatcattatttttagtgactngagagagagagtgatatgtgtgttatttgtcgctcttgtcgcttggcttttggaatcgtgctttcttcttcctccactcttgttctcaagacatttgtaatcaacgcaagagacaccaagttgtggtggtccttgtgaggggtctaagtgacccattgattaaggagaaagctcactcggtctaagtgaccgtttgagagagggaaagggttgaaagagactcgatctttgtgaccacctcaacgaggagtaggtttgcaagaaccgaacctcggtaaaacaaatcaccgtgtcatctgctctatttcttnggttgatttgttttcagccctctctttcggacttgactctatttctaacgctaaccccggtttgtagctgtgcttaaagtttataaatntcagatttgcctattcacccccctct

SEQ ID NO: 60134 - DNA, 534 bp, Zea mays
  unsure (1)..(534): unsure at all n locations
tactcagcttacggctcctcgngaagctgtccagggctcggntgaagctggtggtctctggaaatggctagccacggtgaccgacgctcgggtggctctggcgggtggcacagtgctcgccacagctaaggatggtgtctggccagcgaaggtgagtgcggagtgaggtaaggcgcgtatggnggtggtcttaaaggcatgggcgagcacagccgaggggtggctctgacacgcgctcggngtgtgcgcangcgagcgccagtgcgcgctctggcgcttgggcacggcgtcaagcacgaggcagcgcagagagaggtcaagttcaagcgcggattggctccaaatcttcgtgattatggccgtgatcccgttgagagatctcttcccctgacattcctttgtcgtttgtgtgtagaggcttatgaagtttgctgactggatcanaagatatggagggatgaagttnggtttgtctcattgctgaactccgagaggaaatcccagattttgacgtgttanggcacgaatctcgat

SEQ ID NO: 60135 - DNA, 421 bp, Zea mays
  unsure (1)..(421): unsure at all n locations
tctcagctgattcttaagatgaattgactctatgcttggtatgattttgtgttctctacttgcataatatactagcttgctttcattcttagtatttggctagttgattatgggaacctaagtgcatgcttataattaagttgtgtagtgcttgcgtgttattccgactgtaccaaatagataaaacctatgcttaacatgggttagcttaagcttaccangggtgatgtctacccatgtagattggtgtagtccacatgggacggggtgtggtctatgatctgcccatgacataagttacatgcattattagtctatattactgctttcgtggtatagacttgggccaagggttatagctatgttataattgatggtatgtgatgtatgtgaaaactgttactattgattacgtactata

SEQ ID NO: 60136 - DNA, 362 bp, Zea mays
  unsure (1)..(362): unsure at all n locations
catgctagtcttagcgattaagcatgcatctagaccagccttctcttttgcaaaatcaactaaataaaggttgccgtctagtacacccttaaaagctagtgaaccatcacatcttctaaagacagacacatctatattagtgaatagacagttatatcccatattgcacaattgactaacagatagtaaattatatcccagagactcaactaanaatacattagagatagagtgctcatttgaaattgcaatcttgcctaagcctttcaccttgccttggttcccatcaccaaatatgattgaatcttgggaatccttattcttgacgtaggaggtgaacatcttcttcttccctgtcatat

SEQ ID NO: 60137 - DNA, 372 bp, Zea mays
  unsure (1)..(372): unsure at all n locations
cactatagagcatgcttctagcaaatntaaattntcattntctatctcatgctcattaattntttcagttagttgtgctatatgatcattctgttggttaattaaagcaaggtgatcatgaatgtaacgccctgaatttgggggtagaaattttttcttcttttctctcaccaaattcgggtgttactctcttttctctttccccgttttgctccttctccctaatttcaaaccagtatagcgacaggtgtccgtgtcatgtataaacctaagtgtcatgggtgtngcatcatgccgaagcacattttctctgtctgatgtgagtgttcgtctcgttccgttccggatttcgattcgcgatnntaattccgt

SEQ ID NO: 60138 - DNA, 348 bp, Zea mays
gagggttcaacccgaactaggaagcatatgcagacctatatgtgttaagtcacatatggagccggcatatggcagttggttcaattcgaagaccctattcatacggtcattcgacccgcggatctcccagctgcgctggccctcggtcctcggcacataacgcccaataagccgcaccgtctcatgctcaggttcacgcacaaaggctggcgcatcacggattcgcaaatgtagcgcgaatgcgggactccgcaccatctgtccaccactgataggcatctggcgagggcatacttcgcccaacgcccaaccatgtgcccagggccatacacccgacgccacaaactc

SEQ ID NO: 60139 - DNA, 465 bp, Zea mays
  unsure (1)..(465): unsure at all n locations
aaagaggaagcggccttttatgcttcgttgtgtacgaaaagaaaggaaggtgttttttcgccttcggctcanaaaactgatttcgtccacatcaaagcaccttaatcgaagggtaagaatatattacaaggtatatacaaggttccttgaagaacagtttaattctatttacaagagttgttacaaaattatcctgagtttttctaaagcacacttctgctagtcttcattaagcttcagcttcgacgacaacttcggcgacatatcctaggcatcatcttcaccttcgtcatcctacatgagtcaaggaatcataagaatcaagcccaaaggaaaaggtaagcacgaaatgtcatttcatactggttcaagatgacttcnnggcttcgtctcagctttctctcgcccgccctttgccataccatnnttataatctattgaaatacttcgncgaagtcggcatat

SEQ ID NO: 60140 - DNA, 440 bp, Zea mays
  unsure (1)..(440): unsure at all n locations
tctagatatgtcgaggtgacaaatgatgagggtgaatnggtatttactaaggttgcagctaagcaacttcgtcggttgcccatcattcctcggctttcaaggttgttcctcaacaaggaaatagctctgcatatgacgtggccaaagaatggtgtacgtctcgtcactgatccagacataatggtccatccgtcggacggtgatgcgtggaaggcattngacgagtttgatcccgaatttgcaaacgaccctaggagtgtacggcttggtctatcgacggacggattcacacctttcaataccagtgcaagcccttactcgtgttggcctgtcttcattgtgccatataatcttcctcctgagttggtcaataaagaagagttcatgttccttgcactagtcatcccaggccccgagcatctatggccaaagctgaatat

SEQ ID NO: 60141 - DNA, 524 bp, Zea mays
  unsure (1)..(524): unsure at all n locations
tcggggagccgaaggtccaaaaaacaccttccctaagctcgttgccgataaacgatttaatttcccagcacgtagcggtcccaccttgcagagtttactgtttgtccctgcggtccaccgcgcagcgagcgcaagcgggtgtccgcctggtgtaaaaattctggcgcttcgccttcttacctgcagcactatataaacagacgagtaggtgtgaagttaccacagcattcattgctatttgcactggtttcctgccaaaatttttgaccatcgccgaagcttgtctgtcagaatcgaacgaagctccagtttgaaacctgcttcggaggaagaaaatattaaagtttcacaagttcataattgaatggccagagttcgctctaccgccagggttgagcgcgaggnggaggaaactgaagcttcagagactctncctatctccgaagccatgcaacgatcgggtctagtgacttcggaaaagatccctcatgatgatgcagaacaagcagaacaagcaatcgctg

SEQ ID NO: 60142 - DNA, 318 bp, Zea mays
  unsure (1)..(318): unsure at all n locations
tcttcgttgcgttctttctggggaaatntcggcagataattatccataagaacacgtgggagctaggcctaatcgatcatctcagcgagatcatccaagcggnggtggacgaggacgaggagaccaactttcagaaggtaccgacctgcaaagatctcccatttcctcctctctttgtagccttcttagtacaaatttgtctagagggagattcgtctactgtatttngaattgttggcaataatgtggtacttttatggaacaggcaagctgcacactggaggcggnggtcaagatatattcacttcgtgtggattc

SEQ ID NO: 60143 - DNA, 439 bp, Zea mays
  unsure (1)..(439): unsure at all n locations
cgcgcgcggnnacgtgtcctaagggcgtggcatctttcttattaatgangggacggcccacaggaatcacggcgacacggtagaaacgctacgccacgcggcggagaaccgtcgaccggagttggagaagaaacgcaagccgcggatgtgctggcaggccttctgcgcggcggtctccgtcgagggcacggggtcgccgcttaaccagaggtcgccacctctggaactccttgccatggtgccaagaaactttactgcgaccaccgacgaccggacacgccgcggtggtgttcttatcgcagcgaggtccaagacctcttcctctgctcgatattctcagatgacggcatacagtgctctgaattcgatatgagcttgactgacagagccaacttgagcacgattatcttcaattgtcagtggtacatactgcatgctc

SEQ ID NO: 60144 - DNA, 478 bp, Zea mays
  unsure (1)..(478): unsure at all n locations
cacgtgatacgtttgactaacgtacaatttgaataatatataccttgcgcagctggtcaagcaggtaaacaagtgggaggagcgcatcacagcaagaatgtgatgaccacatcaagacccctggagttgctacatatggacctcttcggacccgtcgcctatctaagcatangaggaagtaagtatggtctagttattggtgatgacttttcccgcttcacttgtgtattctttttgcaggataagtctgaaacccaagggaccctcaagcgcttncaaaggagagctcanaatgagtctgaactcatagtgaagaagataagaagcgacaacgggtccgagttcaagaaccttcaagtggaggagtttcttgaggaggaagggatcaagcacgagttctccgctccctacacaccacaacataatggtgtggtagagaggaagaacangacactcatcgatatggcgaggatgatgc

SEQ ID NO: 60145 - DNA, 498 bp, Zea mays
  unsure (1)..(498): unsure at all n locations
ctggaaaanacgtcagaactgatacaagcatggtttctgtgacacttcgagtgaaaccagagctaactcttccagcaacgtatgtttgtaatttgtttctggttatctatggtaatttgttctcccaatttttcatgtgttgtctgttagtgtgtctaatcatttcaaagcccttacaaatgccttactttangctttcttcaaggatgtcattnttgtcactgaaaggtacctccaggtcccacatgtgaatgtcatctacttgctagaaattntgattntgtgatcaggaagcttattntgtaatacaactganagtgaagttcgttntataggacaagtggacaacataaaaataagaccctgaataattcacaacagaccanatgatgccttntgctctgtttgttacccttttgtgctcatgcttgnngttacatacttaagccttttcctattatggtgaagcctggatcattctatatcagttgaactcta

SEQ ID NO: 60146 - DNA, 210 bp, Zea mays
gaaaacgaaaacaagaccacatttgtcaagaccggccgagcgaagcacaaagggcacccaggacgagggccatccacgaccggaacacccaaaacacgccccccagcccacaggcaccaccacccaccaccgcaagaggcacccggtacacgcgcagtacggcgtcacacgatgcccccaagggaaatacccccggcgcaaaacggggaa

SEQ ID NO: 60147 - DNA, 461 bp, Zea mays
  unsure (1)..(461): unsure at all n locations
atctttctgcctagatacagttataaccaatgatgttgtgattgattataccggaatatacaaggctgatatcggtataaaaggtggacttatagttgctattggaaaggctggaaaccctgatgtcatggatggtgtccataacaacatgattngtggggtaactaactatttactgaacgttccatattaatttgctaaagaaaagagataaaatttcatgaaattgcaggtcaatactgaagttattgcatatgaaggcatgaatgtcactgctggtggcatagattgccatgtccactntatatgtcctcagttggcagaagaggcaattgcaagcggttaggcttcttgacttctaccatatattangtgcaatcaaatacacttcatttgatatcatggaaatttaccatttacaaacaaagggtatcanataacactggngtaatcattctggc

SEQ ID NO: 60148 - DNA, 365 bp, Zea mays
  unsure (1)..(365): unsure at all n locations
agaggaggccggtctagatgcttgcttaatagctaagactagcatgggatggttgtggcatcgccgcttagcacatgtagggatgaagaaccttcacaagcttctaaagggagaacacgtgataggtttgactaatgtgcaattcgaaaaagatagaccttgtgtagcttgtcaagcatgtaaacaagtgggaggagcgcatcacagcaagaatgtgatgaccacatcaagacccctggagctgctacatatggacctcttcggacctgtcgcctatctaagcatangaggaagtaagtatggtctagttattgttgatgactnttcccgcttcacttgngtattctttntgcaggataagtctg

SEQ ID NO: 60149 - DNA, 497 bp, Zea mays
  unsure (1)..(497): unsure at all n locations
tggatattcttcatcagagaagtatgcagattcttgtgatattttatagaatttcttcacgaagcatgaaaagaagggaaggtgttttttcgccgaacgctcaaaaaatggtatgtatgcaaaatttcatgcatcgtaaagaattaaactataaatagattatatattacattcaaagttacaatgtactacacatgttacgttccaaatgtttctacaatagcatttaatcctccttaagaactatttctgcagcttcgttcagtagctggtcgacaaccttgtccataatggcttcggccatttttctaatttcatcgtcccccttcgggtgggggcccggagatgcctcagcaggttctaagggaagagaagatacggctatattactattacataccgcgaacaaagtctggaataaaaaattacaacataatanaaaccactaattaatacctatntgcccttcgggctctgtacttttctcggcagcttct

SEQ ID NO: 60150 - DNA, 405 bp, Zea mays
  unsure (1)..(405): unsure at all n locations
tcatccgctggctgatcttctcccttctcacctgaatttgtttgttcataagaagcagtctaccatcaaggaatgacggatggtagcaagaaagagcaatgcgatcgagcctgaggaaagccgtaccctctcagcgaggctgtggctgtcggtcgcctcgccgcgcctcgcccggacgtggatgtagtccttgggcggctccggaggcttggacgcgccgtccttcccctgcttcttcccaccgttgtcgctgttgctctgcgcggcggccttacccttgccggagttctcctccgcgccattgctctcctccgccgatttgcaccgtttcccactggactcctcctgcggaacgcgcccggaatgaaacctttntgccccggacctgaaccgcgtggccgcgtg

SEQ ID NO: 60151 - DNA, 490 bp, Zea mays
  unsure (1)..(490): unsure at all n locations
tgaagtcgtgtgagcccatggggaacagggcattctgtacattctctcttgggccaggttggaagttgagctgtgctgttgagccatggactaagggctntagcatgtcgtgtgcggcgccatattctgctggagccacagagcatcaattatcgctcgatgagaaggtggataactccaccgttgcatctgattctgatgggtatgtaccatattattaatgcctctatnttctgtttatataaacagaccattaataattttcaatttgtcttgacaatatttttcaagctaataacaacattattcatttccatcccacaagaaggaatatcaaatggtcttcttcgaaggtagagtttaccacattntgtacacaaaaattgactcggaatggtaaagtgtgtacgtgtttatatggatgcatcttctctaactttatatcttctctatatcttatgggacctatnactgactcacacattctaca

SEQ ID NO: 60152 - DNA, 453 bp, Zea mays
  unsure (1)..(453): unsure at all n locations
attgagcgcatgccaggcggggaagcaatgtggagtccatcatccacacaagaacatcatgacgaccgacaggccgcttgagctactccacatggatctatntggcctgattgcctacataagcatcggcgggagtaagtattgtcttgtaatagtggatgattattctcgcttcacttgggtattctttntacaggagaaatctcaaacccaagagactntaaagggattcttgagacgggctcanaatgagttcggcttaaggatcaagataataagaagcgacaatgggacggagttcaagaactctcanattgaagggcttcttgaggaagagggcatcaagcatgagttctcttctccctacacacctcaacaaaatggtgtagtggagaggaagaatcgaactctattggacatggcangaaccatgcttgatgagtacaaaacacc

SEQ ID NO: 60153 - DNA, 337 bp, Zea mays
  unsure (1)..(337): unsure at all n locations
gggagggcgtcgatgggtgtctacttggtgtagactcctccttcttgtcctccgtcgccttgaatgcgacgggttgtgcctcggatgtagatggatcatcaagctcgttgatcttcctcgagccttcgatcatgcactcaaaacttacaaaattcccgataacttcctcggnggtcattttagtatatctaggattaccacgaattaattgaacttgagtggggttaaggaaaatgagagatcttagaataaccttaaccatttcgtggtcgtcccacttgacgctcccgaggttgcgcacttggttcaccaaagtcttgagccggttgtacatgtg

SEQ ID NO: 60154 - DNA, 420 bp, Zea mays
tcgtcatctagaaggtagatacctcggacgaaagatatcatcttattcctacgatcttgactatgaataggagatatagtgagcactgctctatcaagaagatccaccgaaggtgctcttagcgcctcataaaatacttccgaacgtagaagcagctcctgtgccgctgacatagctaacagatcagtgtgctcattatctcctcatggaatattcttaacagataacccttccaatgaagcttcaagccttcgaactatcgccaggtatttctcaagttacagatctcttgccttgcaactcttgtcaatatgaccagaaataactcgtgagtcggatataaggaccgcccttcttatgcgcagggctattaatcttcagagccccaaaagtaaagcttcctattcagcaatattattt

SEQ ID NO: 60155 - DNA, 408 bp, Zea mays
atgaagtagataccatctgttccaaaatgaatggatccaaacacgcccttataagacattacattcaaaggttcatttgtccttgaataacatcaagctctcattctggctacaccctcctaaacgctagatgcggccgtttcaaactaaacaaatgaacattatacgggctccttcgatcatggactcccataacctactcttgggcagacagactggcttcggacacagactaggcgatacctcgcctgggaacacgactcactactaaactgaattacggtcgtctatacgtatctactatcatacaccatgacaagaagctgcggtgcctacttctgtaatacattcaaactaagatcaccacccagaactattggacgagtatgaatcttagattctctgaca

SEQ ID NO: 60156 - DNA, 445 bp, Zea mays
  unsure (1)..(445): unsure at all n locations
aagatatggngaccagcccaggaagatctactgtctactttgtggtgaggacaanggccacaatacaagaacgtgtcaaatcaccatccaaaagcaaaaagaaattgcagaagccgaagcccagaanaatcagctgaagcaggtcctgcacactgcttcgtgtcattcaccctacataccagaatatgtgggtaatcatcgcgcagcttctgttgcttcggctagtcagtcgcaagtttcttgtgcacagcttccaccttcgccgccactacagcctgtctactcacgaggttgagagcacctagagggcggggtgaataggtgatcctgtaaaacttcaatacttaagccacaaaaacttggtaagtggtagcacaagtatggccaagtggctagagaggagtcanaacacaataaccacaagaaagcaatcacagagttgaca

SEQ ID NO: 60157 - DNA, 458 bp, Zea mays
  unsure (1)..(458): unsure at all n locations
actaggtgttcactacaagcattaatgtcaaaatctttacacctagtacaaatttcaacatgttctacacaagaattggacttatttgctacttctaacttagcatttaaatcattggtgacacctttcaaagtagaaatggtttcatgacaagtagatagttcaaaagaaagcatttcatttctcttaacttctaaagcataggatttttgtgcctcaacaaatntatcatgctcttcatacaacaaatcctcttgcttttctaanagtatattcttttcattcaaggcatcaattaattcacttaatttggctatcttagatctatctaagcccttgaacaaacatgaataatctacttcatcctcatcactagattcgtcctcacttgaagaagcataggtagagttgcgagtacataccttcttctcccttgccataaggcatgtgtgacgctc

SEQ ID NO: 60158 - DNA, 379 bp, Zea mays
  unsure (1)..(379): unsure at all n locations
taagcttacgtgattgttttagaataattattattattctatcaatattttttatcctatggctatttttaaaaaaaactaacactatagatngtgttttacttctcttgccattttattatatatcttctaacatagaatagtagagcactgagcacgacgcggcggggatggaagcttctcccccttccgtcctttactcgtgcggcacgtggcgatgatgcgaagcgggagtgctggactcattttctttgaccctcgccaccgaccgcatggcgatggtcatcggcggacggagcaggacgatttggactcgcccaacgcgttcgcacgctaggtgactggcgagctggatgcttcatgctgcgtgctggatgct

SEQ ID NO: 60159 - DNA, 489 bp, Zea mays
  unsure (1)..(489): unsure at all n locations
accttagatactaagctggatcaattggagggggcctgtacacttatgagctctatttgttatggaaccacttatgatccgactgatgggaagatacacgatcggccaagcttgagcatggatganaatctccagatgatcggaaagatagctgcggtttgcaatgatgcaagcattgcccactctgagcatcagtacgttgctactgggatgcccacagaagctgctctgaaggtacgacttgttcatgtgataaaaattcctttcatctgggatgctgttatagttaagttggtttttctactgatgtagctcggaagcaggtaatgtatacctgcaaaaagttaataaaaaatatataaataagataagatgataaaagaactggtagttactttcagtgacctctacaattaataagaatgagcacaactctctcctcaagatacctganattgatgaatntacattctcgtgtgcctgttctac

SEQ ID NO: 60160 - DNA, 522 bp, Zea mays
  unsure (1)..(522): unsure at all n locations
tgacanataagcctacggatcagatatttcctaagattcttccttgcacatgcagaatttcagaaggaccaactcttgtaagttgtaacagaatggttgaacattcaacctgccttttcactatattgagaagccaagcatgtaatgtcacaatcatggacaaatatatccccacaatgtggttgtgatggggaagtttgattaccaccatttaatttatgcacctaaaacaactgggtgaatcagatgttatgcttacactgcaaatcttcaacatataaaaaggagagaatggcaaaaggatacttgcacaaagtcatgaacaatgcctagataaagaatgcaagtgacctaacagaatatactgcgaaggtgtaatagaaacaagaaaacatgcagttcatgaaagaatcaaggggagataagttcacctttccatcatactcgcgacgggatagcacctcaggtgcaatatatgctggcgttcctactgctgatttgngtcttgaatgcaacactgat

SEQ ID NO: 60161 - DNA, 521 bp, Zea mays
  unsure (1)..(521): unsure at all n locations
tcgtcagcaatttccttttctttcaccgacactgcggtcattgtctcttcggcggcagtagtagcttcttctgtggccatgtctagcagcattttgtcgatgtgttcgattgtgctttccaagttcaaatcttcaattgaggtagcttcggcagccgcgacctccgaaggtgtgatttcaatatttgttatttcctcagccgccggtatcttctgagctgaagctctcggtggtgtcttgtcaatgacctctgtcacagcgatgattctttgtctctttgctttagtcgttctcttcagtttttcgggctccttttccttctgaaaaaactttgtcagttgaggccccaatggacttagcttcgcaggcagggattcagtcattaccttcaaaanttcctccacgttagtggcagagtgtgatgcgagaagttcttcttcgtcggatactttttgcttcggagaagacactctcctcttcnttcgaatttcttctttgatcggtctttctcatctttcatt

SEQ ID NO: 60162 - DNA, 502 bp, Zea mays
  unsure (1)..(502): unsure at all n locations
ntatcanatggacgtgaagagtgccttccttaatggaccaattctggatgaggtctatgtngagcaacctcccggctttgaagatagtgagtaccctaacaatgtttataaactctctaaggcgctntatgggctcaagcaagccccaagagcatggtatgaatgcctaagagattttcttatcgctaatggcttcaaagttgaaaaagccgatcctactctctntaccaaaacaattgcaaatgatttgtttgtatgccaaatttatgttaatgatatcatatttgggtctactaacaaatctacttgtgaagagnttagtaggattatggtacaaaaattcgagatgtctatgatgggggagttgaagtatttcttaagatttcaagtcaagcaactccaagagggcaccttcatcagccanacgaagtacattcaagacatacttcaccagtttgggatgaanggattcangcccatcaagacacccatgggaactaat

SEQ ID NO: 60163 - DNA, 400 bp, Zea mays
  unsure (1)..(400): unsure at all n locations
ntatcanatggacgtgaagagtgccttcctcaatggactgatcaatgaagaggtctatgttgagcaacctcccggctttgaagatagtgagtaccctaaccatgtttataaactctctaaggcgctttatgggctaaagcaagccccaagagcatggtatgaatgctctagagatttccttatagataatggcttcaaagtcggaaaggcagatcctactttattcactaaaactcttgaaaatgacttgtttgtataccaaatctatgttgatgatattatatttgggtctactaacgagtctacatgtgaagaattattaggatcatgacacacaaattcgagatgtctatgatgggggaagtgaagtacttcttgggatttcagtgaagcaacttca

SEQ ID NO: 60164 - DNA, 464 bp, Zea mays
  unsure (1)..(464): unsure at all n locations
tactaagcttatcatctgaaaatagttgccctagagaaaggatactatttctgtcctccagtcttcactatgtataggtgagattgtgagcactgctctttccatcagctcgactgaaggtgcttttattgtttcaaaaaatacttccgaaggcaaagggagcccctgtgccactgatttatctagtanatctgcatgctcattctccccttgngatatgttttatagaaaagccttcaaaagaagcttccaacctttggactgcatccaaatacttttcatgctttgggtctcttgccttactgcttttatccacatggcccgagataacttgcgaatcagttttgaggattgcccttcttattcccattgcatntagcttccgaagccccaaaagtagagctttgtactcggcaatgttatttgtatagctgaagtctaactntattgcataacatgttctg

SEQ ID NO: 60165 - DNA, 392 bp, Zea mays
  unsure (1)..(392): unsure at all n locations
agaggcaccttcggctatcttatacgaacagcttcatccgaggatcacttctttctacaagaccttcggcgacgaagcatagacccaacagtagcccctttcgcggtgctagatcgtttttcgtaacgagcttgatccgtgaaaaaagtttcttaagcttcggagcgccgaaggtctcanaaacaccttccctgagctcgttgtcgagaaacgattcactctccctgcgcgtagcggccccaccttgcagagttactgttcggtctctgtggtccaccgtacagcgagtgcgagcgggtgtccgcctggtgtaaaacttctggcgcttcgccctcttacctgcggcactatataaacagaggagtaggtgtgaagttaccacagcatttact

SEQ ID NO: 60166 - DNA, 500 bp, Zea mays
  unsure (1)..(500): unsure at all n locations
gcgcggaccgtccgggcctttgctgcggaccgttcgcgacacctaaataaccctcggacagaaccaatgcaaaaacacatgtctctactgcggaccgtcgggtaggtgaggaaccgaaaaacccgaaggtgccgggttcggtaaaatgaattatagcgtcctcgcggaccgtccggngtacacgactggaccgtccgcgactgcctttatctgacatctgacatcgcattaaatgcaatatagccgttgatatagcagttaatgctgaccgttacattttcagccgttgatctcaaggggcgaaccgtccgaaccaggggcgcagaccgtccgcggtcggcagaaaggagcaacgactaggaagtggttggtggctataaatacaaccccaaccacctccattcacatcaaccaagcattccaaccttcaacattcaatacaagagataagcaatccattccaagacancatcaaagccttcaatctcttcaagttccac

SEQ ID NO: 60167 - DNA, 499 bp, Zea mays
  unsure (1)..(499): unsure at all n locations
taactcggcanatgacaagtaaaaaccaggcaagcagaacttatagccttatgcaggttccacgcagagtaagatcatggagtaccatcgttgactatggtacccctcaacatcagtttgacccggctcaagacgtcctncaccaagatccacctatctattacccgagagggatctctaaccccgtatacaagtatgcaggatacactntgtattttagaggctggatattagtaaacacaanatcaagcacaactacctcggcgatcaggcctctatatttcaaatcggcgatctcagttagcagaatccttaacttcactaacttcagtatcattgggcccttcagctagctgggcaccctaacatatgcctnctagaatggngagtaaggaagttattgtggttctctagtgtaaaccattcatagcaccacctcttgatgctatctttcagaggaatacccaggtactcagctntttgacctcgatggagttct

SEQ ID NO: 60168 - DNA, 277 bp, Zea mays
  unsure (1)..(277): unsure at all n locations
catgggctagtcgacgatgccagagttcacctatattagtcttagcaattaaacaagtggtgagttcagttgtgttctcattaaaattaactagatatatctgaccctctaacacttccttaaatgctattgaatcatcacttcttctaaagacacgaacacctacatctgttatcagacagntgtaccccattttgcataaatgagaaacagaaagcaaattgtaatctaaagaatctacacaaanaacatttgaaatggattggtcaggggatat

SEQ ID NO: 60169 - DNA, 476 bp, Zea mays
  unsure (1)..(476): unsure at all n locations
tcggctcaatgctcctcgacttcatcatactgtgcatatcanagcattattgggtaattcaagtttcaaggaaaaggtaagcacaaggtatgagtttattaccggnttaaggtgacttcgagcttcgtcaccagccagatttcgcccgccctttgcctagatttgattaacgaatctgtttccgatgcttcgggccaggccggggatgtcatccaagtctgctggcgacaggctaaagtttggtctgtttacaatatttccatgtgtacagccagccttcatgaaagcgacatctgtgcctcgagaagctagtagagcacanaagtcaccatgctcagctataacttcgtcgagagcatcaacttcaccttcaatatgatcaaatgtgcccgacaggtcttcaatcgaaggttaaactnttcgaaactggctccaactgagttgaagacctgcttcagccgttgaatgcaccgagt

SEQ ID NO: 60170 - DNA, 430 bp, Zea mays
  unsure (1)..(430): unsure at all n locations
cttcagccaccatgcanaagttgttgtggctgaatattatttgttacttcgaaatgctgaagtgtgatatcttggcccctgggatggtgatatccaggcccaaggcttaatagaattattagagtatccatgccaacaaggtgcatcnttctttttagaagcctatctcgaagaacctccaagttaagcgtgcatctcctgaagtggtgagacaganaagtaaaactcaagaacatagaaccaggtcatcttgtcctccatagggtagccaatacagacacagtaggaaagttacaagtaaaatgggaaggtcttttcttgtcatatcttcaaatagaccaggatcatacaaactcaaatacatggaanggaacgacattccaagatcattgaatgcngatgagcttcgatggtattatgtcttggtaac

SEQ ID NO: 60171 - DNA, 499 bp, Zea mays
  unsure (1)..(499): unsure at all n locations
ccttgtgataagttctgcgacacctctgtgtgtgccaatgatattaatctaaggttggggaaatgaanatttgactccttttctttagattgcagcaccaacatgtccaacttgccgtctaagtttagggtacgaagacgcctcanggaagaactggtgaacacactcaatgggatgtcatgaacatcaagagtgagggtatctatgtgttcgaggaaattagctttatcaataacagcagatagagcctcagcattaactccattctccttagaatcccaaacatgaagggactgaaggtgagccattttctcaaaagtgctgctgtcccaaccattatccttatcangatctatgctttcaagtgtctgcaggtgtttcaagtcacccacctgcttatgcaagaaaagaccctcaccaaatacatgccgcagtgtcgttatactccaaaatgcttctggaagttataaacaaacgtgtctcgaacatccaacgtctg

SEQ ID NO: 60172 - DNA, 500 bp, Zea mays
  unsure (1)..(500): unsure at all n locations
accgcacccgcatgcatatcacattctatggcttcacaatagtggtaaggtcaaggtaaccaagctggtacgaattaattttgctattggttcatatcgtgaatgtgttgactgtgatgttgtgcctatggatgcttgtaatattctgctaggtagaccatggcaatttgattcagattgtatgcatcatggtagatcaaatcaatattctctcatataccatgataagaaaattattntgcttcccatgtcccctgaggctattgtgcgtgatgatgttgctaaagctaccanagctaaaactgagaacaacaagaatattanagttngtggtaataacaaagatgggataaaattganaggacattgcttgcttgcaacananactgatgttaatgaattattngcttccactacttgtgcctacgccttggtatgcaaggatgctnttgattcaattcaagatatgcagcattctttgccttctgtattactaacat

SEQ ID NO: 60173 - DNA, 432 bp, Zea mays
  unsure (1)..(432): unsure at all n locations
tactcagctttccttgatgattgaaacntcctacattgggagtctctctacttattgccttttgagagttcggcatgggtttgctatgctggagaatccttgataagcggcggaataccctgccattccagaaagcttctacttcactgacgttggatggttgcttccaatttgaaacagcttctaccttggatgggtccacttctatcccttctgcagtcaagatatgccccaggaaagctatcttctctaaccagaactcacacttgctgagtttagcatagagttgatgtgctctgagtcttccgagaacgattcggaggtgacgctcatggtccttacgaatcttggaataaataaggatgtcgtcaatgaagactacgacaaatttgtccaattcttccataaataccttattcatgaggggtcatg

SEQ ID NO: 60174 - DNA, 445 bp, Zea mays
  unsure (1)..(445): unsure at all n locations
taatgcctccaaaagaatggtctaatttgttaagggcaaggctctcatggnttaggataacgagggctatattttatatcctgctggttatcccgaacataaaattaggagaattcatgctaaaaagtctcattctggttctcaccatgcatttatgtataagaatgaggcatctagtgtaacaccaggacaggattacccgaaggaaaactctcaagttttacaagatacagtggaaccaacacacggaagatgaagctacttgggaaacttcagactnttttgataagaatttcctaggctttttagcttcgtgtaaattgtaagatgtgtacaattgttgtaatagaggaatgaaccccataccacccctgccttgtaccanaaataaggaaataaaagtatgacacatttccttttccattactttcctagacttttaatc

SEQ ID NO: 60175 - DNA, 498 bp, Zea mays
  unsure (1)..(498): unsure at all n locations
tactcagctntttatccgacttagttnntgccaatgggtacgatatctgttatgcctttttttcatcaggtctgaatggagacggaacggngacgaaatgtacacatcagagatgtccatctcgtcagttntcttcggagctaaggatgcaaatcaccttatcacagcatagttnttnttggggttntaaatgcgaacacatggtttatacgtgtgtgtagagatggccaaacgggccgcccggcccggctcgagcccggtgaagcccggccganaaccgggccgggcctgctgagtccgcgggctcaattttctgtccaagcccggcccgcagcgggcctaaacgggccaggccggcccgtttagcacgataaaacgggccgaatagcgggctaaacgggccggtaagcacgtttaagtgtaaaanaaagggcttaacggacttagaggtaaacgggccgtgcctagttntctgtccaagcccgcccgcgtattcgt

SEQ ID NO: 60176 - DNA, 475 bp, Zea mays
  unsure (1)..(475): unsure at all n locations
ngccaatacctgtcanagcaacagcacatgccagcgcagcagttgcagaccataccagtaanttggcctttcgcatgcctgggactggatatgattggacctttcaagaaagctcaaggagggtatacccatgtattggtggcaattgacaaattcactaaatggatagagttccagcccattgcttccttaacctctgctaaagccgtggaattcatacaaagcataatattcagattcgggataccgaacagtatcattactgacttgggatccaacttcaccagctcagaattctttgacttctgcgagcaaaagagcattcagatcaagtacgcatccgtagcacatncaagagccaacgggcangttgagcgagccaacggaatgatattggaggcactcangaaaagggtcttcgataagaatgaaaaattcgcaggaaaatggataagagaacttgcttatgttgttg

SEQ ID NO: 60177 - DNA, 478 bp, Zea mays
  unsure (1)..(478): unsure at all n locations
ccatgaagctgaaacaatttgcttcttcatgtggttggtgcaaggttattcttcactgcgacggcaacgccaacagcgaacttggagggtgtgcggctctgcacacctcttggtagccttactcaacctctgcatccnctcttgcttgcttattccagcttattcccgaatctaaatttagtaactcanatttattttgcttattcttcatatgctcattagtacttaattattttgcttgatttgtaatgaaataaaaccaaattntgcttgatttcttcatatgctcagntnggttacaaacttgatgcaatatgtacagaaaatgaattagttagaatatggttaggcactgatatggttaggcactgatatggttaggcactgatatggttaggcactgatatgcaatatctaatctggaatttatgtgagggcctaggtgaatctcctatgagatattatatctcttcactat

SEQ ID NO: 60178 - DNA, 486 bp, Zea mays
  unsure (1)..(486): unsure at all n locations
actaagcttctaagggagaacatgtgttaggactaaccgatgtctggtntaatattgacagaccttatgcagngtgctatgtagggaagcatgtgggaactactcatccaagcaagaacgtaatgacaacgtcnagaccactggaacttctncatatggatctcttcgggctcggtgcttatcttatcatcggggcaagtaagtatggtcttggtaatttttatgactttccggctgcacttgggtattctttttgcaagataaatcagaaaccaaaagtacactaaagcgcttcctaaggagagctcancatgagtttgagctcacggtgaagaagatcangagcgacaatggatctgaattaagaatctcaagtagaagagttcttgagaagaagtatcaacatgagtttctgtccctaccaccatacaaatggtgagtaagggaaaatacatgctcatcagatgcgagacattgccacccggt

SEQ ID NO: 60179 - DNA, 289 bp, Zea mays
ctaagctgcagcctcgcccgacggactacggagccgaatcatctttcggacttcgcttccgcgcgcgcgggacgactatcagtgagtttcgccgatcctttactatgtttcctggcacccgggacctcctgactattgattgactatctcgcggaccaggccgtctctcgccgcgacgagcatcccgctgccgcgggaccgacgactcggcatctcgacgggtccgcaaccgtggatcccggactcccttgtctgacacttacgaaagctcgcgcggtagccctcgcct

SEQ ID NO: 60180 - DNA, 380 bp, Zea mays
  unsure (1)..(380): unsure at all n locations
ctaagctcgactctcctgaagccgtattgttggggcgctcttctggttttntacttcnggaattaataagttgtaatgaaggtggcggtggaagctgatgccaacaagcctgtgaatagcttgccgaagcgacagaggctgcatgttgatcgcccacgtattctggtatgtaaggagagtggcacgaagcagtgtctaagacctacttcggcttgatctgccgagcttctgcttcggcaatctccttttgcttcagtatggtgatntggcacgttcttgtagtatggcccttattctcaccacacaataaacaataaattttcttggttgatccccatatcttcctctgaaaccactgccgcctctgccccttggagctg

SEQ ID NO: 60181 - DNA, 149 bp, Zea mays
tgacgcttcacgaactgaatactgaataatcggccgtctgcagtcatcagattctgactcgggttgatctatgacgatgcactcttctgcttgatccatagagatgctcggctgcgcgatttcttgcactaagactgcgaggggtacct

SEQ ID NO: 60182 - DNA, 436 bp, Zea mays
  unsure (1)..(436): unsure at all n locations
ctgagcagcggctaggagaaagagaactaacgcgtgggctcgggtggagaacgttattttaaaaacgggttatgggcacaccggacagtctacagtgcctgtccggtgcacaccggacagcgcacagtatctgtccagtgaaccaccggacaacgcaacacaaaacgagatctgtgtgcgctcagcgggtgcaccggatattgcacagtgcagtgtccggtgcacaccggactgtccggtgagcccacacagacggaatcttacaaatttctacgacatttngaaccataccatatcccaacttatgagcacagcaaagaacacctgttgcgacaagtatatggaccctcacacattctctcgtatgtttgcaaatatattgccataggctagatagttcttagagaaaataggcaaatggtgagagttgcatttc

SEQ ID NO: 60183 - DNA, 480 bp, Zea mays
  unsure (1)..(480): unsure at all n locations
cttgccttgcctcagtatatcacccacaatctaacggtgtcattgagcgtcgccaacggcaaaatttcatagccatcaagaaaatgcttcttgacgacaagaagggcaaatgggccgacctgctacctgaagcagtctgggcgctgaacacgaccgagtgccgggcgactgggttcactcccttccacctgctatatggatcggaggccatgaccccgcaagaaataaagcatgggtcaccgcggacaagcacttcagccgtccccgacgtagacgaaccaacttccaaggacctcatcgacggagaccgtgtcttcgccctgcaggccctcaacaagtaccaagctcanacaaaagcatggcgcgaccacacagtcgtcccaagagaattcaacgaaggggacctcatactcgtccggacaactcggacagagtcacggngcaagctggagccaaagtgggagggtcctttcatcgtca

SEQ ID NO: 60184 - DNA, 455 bp, Zea mays
  unsure (1)..(455): unsure at all n locations
tgtacgcaactggcccaatccgagcaagcactgtgtatggtctatatattnngaaggctagcttacgacaaggcctattcaccacagtcttctgagcataatgttgaagtttaagcattaccaattcaccaacctgaaattccacgtgaatacgccccttgtctgccaattgtttcattctgttctgtgctctagctacgtgttccttgagaaaacctgagaattcagccctggttttcaggaactcttgcacagaaatgtcctcacccgtgctggaagactgaatagccaacatangagcatcataaccataaacggccttgaaggagtgaacccaaagctgatggacagaagattataccacagttcttgcagagctagccatgatttccacttgtatgtgtgagagtggacagcacatctgagatacatcttaacacattcggtcaatctct

SEQ ID NO: 60185 - DNA, 422 bp, Zea mays
  unsure (1)..(422): unsure at all n locations
tgtgaaggttcttcatncncacatgtgctagacggcgatgctctcatttgnccatgccagncttagcaattaagcatgcatctagacncggctcctccttcgaacaatcaactaaatagagtttgtcgtctagtacacccttaaaggctaatgaaccatcactccttctatagacagacacatctacgtttgtaaattagcaattgtaacccatgttacataattgactaacggacaacaagttatatccgagcgaatctactacaaacacattagaaatggaatgctcggaagaaatacgctacttttctagtcctttaaccttgccttgattcccgtcaccgaatatgattgagtcttgggaatctctgttcttgacgtangaagtgaacatcctcttctaccccgcatgtggttgtgca

SEQ ID NO: 60186 - DNA, 387 bp, Zea mays
  unsure (1)..(387): unsure at all n locations
tcggctccatctatatggtggatagctntagagtctgtccattttccttcggcctttctggcagcttcttgacttccatgaatagcaatggacccttgtttcgaaggtatcttcatgcatagatatgctaggtgaagtattgcttcaaaagcattgagtgttcctcggccaattattgcattgtaggggtattccatgtcgacaatgtcaaagacaacttgttcggtcctggtgttatgaacaaagccaaaggttactggcattgtgattttaccgagtgccacaatctatcttcctccgaagccgcatagaggatgtgtagcatcgtgaatcttgtcttctggctcttgcatctatctgaaggccttagcacatatgatatccact

SEQ ID NO: 60187 - DNA, 499 bp, Zea mays
  unsure (1)..(499): unsure at all n locations
taatggccctaagagactggtccaatttgttaagggcaaggctcgcatagaacaggataacgagggttacattntatatcctgctggttatcctgagcataagaattggagaattcatgatagaaagtctcattctgtttcccatcatgcttttatatacaagaatgaggcatctagctctaggcattccactcacattaaaatgcctaaaaagaaatctcctactgcatcaaatgaacctaaagtttcatttaaaactcttgatgcatcctatgttntaactaacaaatcaggcaaagtagttgccaaatatattgggggcagacacaagggctccaagacttgtgtttcggtacccaaggtgcttgtttctaatttgaaaggacccaagaccgtttgggtacataagaacaaggcctaaacttgttttgtaagntatgcatccggggcttaagttgataatcgatagcgggtgacaaaccacatgatangggagaaa

SEQ ID NO: 60188 - DNA, 485 bp, Zea mays
  unsure (1)..(485): unsure at all n locations
ttgatactcagcttctaatanaagggagagataaaatcatacacttattaaccatattataaaatcacaattataaggctagagagaaaggtgcaatcataaactntcctcagggttagtttgggaataccatttttccaagggatttccattttactaacggcgcgtttggatcccttcatttcagaggaattggaattcactcaataaagtaacttatttagtttggaatttaacattccaccactttccaaagttcagatataagcctatctcanattcatggggtggaggatgagaaatgattctatgtattagtagaattcgtttctactctgtaacttacatgacacactttgtctcactcctctgtagtaaaatgtagcacataaatatctctggcatcttactaataataatatacaaatatattttacataaaacataattaacttaattgatatatatcttaattactattatta

SEQ ID NO: 60189 - DNA, 285 bp, Zea mays
atggtgctggagtggaccattcggcgccctaaaacgagtgcattactagcaccggcgtactgtttcgcgccattgacgcatgtggtggtggtgcatgcactcacggtttacacaggtcggcatagcaggtgggggagctaccagcctagctagcataaggatgcactactagctagctagctagagtggtgtactatcgtgctaacatgacagctagcgttagctggagattagttcaacgcgtgcatgcggtcaatctgctatcgtttatgctgtccgatgatg

SEQ ID NO: 60190 - DNA, 421 bp, Zea mays
  unsure (1)..(421): unsure at all n locations
tcgtcctgaccatgctcttgtatattcataacccgattccgaagatacttgttcacatatttcacttggaaaacattgccaaatcatgtttntgaggaccttcngaagccgaaggcccccaacagtagcccctcgcaatattaatttataaatgataaattcatattgcgatatggacgaaggccctaagtcgaaggtccgaanaaacaccttccctttgctagaatagcaatagtcattgacaagcgggaccctccagttttcaacgcactaggtgtataaataagagctcactacgtgtttatttggcacgcttttcttgccatctgcgcttgctcactcgactnttagcccttgcgcaacaacactttgcttggctttttaaattttaagcttcggtttcgagagcactttctcagca

SEQ ID NO: 60191 - DNA, 368 bp, Zea mays
  unsure (1)..(368): unsure at all n locations
ntattgcattaacaatntgggatcgttatattaaatataatataaaacccgcgcatgtgaaattcatatatcggtcatgattgttattacctatgcctcataaaaattccagccccaaattagatagtttcatatgttgctaaaatgacacacgttttataattataagaataactagtgaaaaattagaagtaaacaaaagcgtgcatctctttaaatgcttaagtatctcaatataaatcgaaactttataactaagtcataatgatttacacttgagatattggtggtagtgtctctccatgattttaattgatgattgagttgagtgctattgngctagcaaactgaaattctgcatgtacagt

SEQ ID NO: 60192 - DNA, 470 bp, Zea mays
  unsure (1)..(470): unsure at all n locations
tatgaagattctntattccaacatgggctaggcggcggtgccttagtcaacccaagntagncctagcaatcaagcaagtgtcgagtncagctctatcaaaatctaccaggtatagctgaccctctaacactcccttgaatgctattgaatcatcacttcttctaaagacagtgacacctacatcagtaaatagacaggtggagcccatttgacataattgagatacggacagcatattgcaatctaaagaatctacaagacaaacacttgaaatggtatgggcatgtgatatagcaattntacccaatcctttgaccaaacctngattcccatccccgaatgcgatagctcgttggcgatcttggcttttctcatatgaggagaacattctcttctccactgtcatgtggtttgtgcacccgctgtcgagtatccaacttgagcccncggatgcataaacctacaaaaca

SEQ ID NO: 60193 - DNA, 444 bp, Zea mays
  unsure (1)..(444): unsure at all n locations
tttgtacccctgggataccagaaaccctaattggaaccctgganaaccctaaaaccaaaccctangggcttatgtgcaaaagtgatgaacctttggactaaaatgtaaaaactactatgtttaggcatctaaagccaattggttcacaaatatgtgaatttacaagccaaaccctgagaattggacttaagtgcaaaatggacctcatttgagttctacactaagtctgaaattcagtgttaaaggctccactnntagggcttgtaactngcaaagcatanggtttttgccctaagtcaccacatcaaagttgaagcccaattataggagaacaactnntgttaaggattcaagccatggtcttatgagaaatntggagataaactcagccaaagttggactgtcangtcactgagtctgaattttagagaacagtgtaccaca

SEQ ID NO: 60194 - DNA, 427 bp, Zea mays
  unsure (1)..(427): unsure at all n locations
gtgcagcgacaccctcatccatatcatgtcctttggttgtaatgaatcggagatatcaagattggttataaggtgaaagttccgttcaagattagagagtatgttgatacagtagagtgcgatgttgcacccatgtttgtgtgtcacatgcggctaggaagaccttggcaatatgaccgatattctcagcattgtggaagaacaaatcaatacacgctagatctgaaagggagaaagtttgtactcaagcctatgacccctcaacaaatcatggctgaacatttacaaaagaaaactganattagtgcagcaagtagaagaggagaagagcaaaagaaattgagtgccatccacaattcgatgagcgagtgttacaagccanattcaagagataaaaggaaggaagagggagaacatctagttatgc

SEQ ID NO: 60195 - DNA, 498 bp, Zea mays
  unsure (1)..(498): unsure at all n locations
tctactgcacatctacaagtattcttatgtctcacaagactacttttattatctttgaggcaacatttggtatcatttacatgtcttctccaatatttgattagaccatatttcatatcttatacttcccatgttgctataaatgcatatgatgtcaaaaatatctgttacctatgcataagggaagttagtctaatcaaatcatgtcttgttcttttatttctcacttgctttctcctaagtagaagatctctgtcaggggcagtatttcttcgtcaaggngagaagttcttccaaaaggagaacactcgcttacggggagtaatcttttaagtgcttaaattcataaatctttataagagatcaagtcttatttgcttcctatatgcttntaatgtcttccttttcggtggttgatgccacaggnggagaaagtttanggaccatagcaatgaaatgatatcanacaccanacaccaccaaattanaattttaatc

SEQ ID NO: 60196 - DNA, 369 bp, Zea mays
  unsure (1)..(369): unsure at all n locations
ggtccaaagctcttaactaatactaggtagcataagcatcctctcggtctgaagaatataagtcacactttcaggcctttcatgagtatctagagattacccatatcccatggactataactagcagtcgaacttatataggtgtgttccttatagtgtcttctataggataacatccctgcttaattacaacacccacattatattgcgattntaatcatcttgccctatagaaaaggagaaacatgcatctcanatgatctggactntgtattaaggggtctctccctcagtcaaccacttggttcatcattctacatcatgggatctctggccacatcgaacaagttaccactatggcgtgatctc

SEQ ID NO: 60197 - DNA, 434 bp, Zea mays
  unsure (1)..(434): unsure at all n locations
tccactgtanatcttcaagaattcttatgtctcacaagcctactcatttgtcttcaaatggttcgacattgattntcaaatnggtaattttagactacatttggcatcatttacatgtcttctccaatatttggttagactatatttcatatcttatacttcccatgctgctgtacatgcataagtggttaaatcatattttgttacctatgcataagggatgtcagtctaatcaaatcatgtcttgcacctctatttttcacatgctttttgctaagtagaagatctctgccaaggggagtatttcttcatctctaaagggggagaaaattctttctaaaggagaacactcatttatggggagttaagttcttcaattggtntaattgataatctttatgaaggcaatcttatttgttnctacatgctttaat

SEQ ID NO: 60198 - DNA, 431 bp, Zea mays
  unsure (1)..(431): unsure at all n locations
ttaagcaccgcggctgcagctgatttgaagccaattgatatattttgactctctcaattaaggactttgccacccagatttgtttaggtctactcttatctggtggacctaggaatgtaaccttaatctttccatttgcaacctttcttagaacatagtgagcattgaaagcaaatggtcttgactgcttatgcaacggagatggtggttacccttgcagttgtgggcaaaatgaccttcattttcacactcaaagcatttgataggcttgcgagtctcgtttggcttgcattaagagatagctntcttttgcacaaaagcattgtatccaataccactcttgttatttttcataacagggttcatacaccgctcattttggaggcatcgaccccttgtgaacttctgcacacttgttgcaagatgttcat

SEQ ID NO: 60199 - DNA, 437 bp, Zea mays
agcttcctccagcattcttgagcccctcagtcatcctaagataacaatatgtaccactcggggtgatgaagctggtctttggctcatcttccttcttcatccagattaggtggtagcctgaataacagtctattatactcatgagctctgacgaagctgctggatctactagacaatctattcttggtaatgggaaatcatcctttggacaagccttgttgagatcagtaaaagcaatgcatattctccatttaccataggcctgttttaccataacagagctggctagccgttctgggtattttacttctctaatgacaccagctctgagaagggattttacttcattccgagcaccttctgctctatcgtcagacatttttcgaagcttttgcttcctacgtctgaacgatggatccacattgagtgaatgctca

SEQ ID NO: 60200 - DNA, 289 bp, Zea mays
tcgactccatctatgttatagatcgccttcaaatccgtccatctcccttcagctctcctggcagcttcttgactcccatgaaaagtaatgggcccctgttccgaaggtatcttcatgcacaagtacgctgggtggagtatggcctcgaaggcattaagcgtgccccgatcaatgattgcattgtatgggtattccatgtcaacgatgtcaaagacaacttgttcagaccttgtgttgtggacataaccaaaggtaactaacattgtcattttaccaagtgctacaatct

SEQ ID NO: 60201 - DNA, 462 bp, Zea mays
  unsure (1)..(462): unsure at all n locations
atccttcagtcacctgcggcatgcaagctngtgcaaagtccacttgaactaatcttctgagaaacccgacctcgttgcaacatgacaccagaaggtccaacccaacaagcgttggatgaattcagaattatttcagagcatatcagtacaagagacctggttcaagagtttttggctttcagggtttttcctagtttaaaagaatgggaaatgccgaagctagagggggagaaaaaaagaaggagaacttgtgcgattaccttactatttcaagtttaagaaatactttaaaacaccttgccaagagtggctggatacaattgaagtaatgtgcaatgaaatactcggcaattactccaaaaaagaagatcagttgatgactgcggccttcggcacccgtccgaagcgaagattgaatcgagtgctggacgccttgagttttgaataccctgactacgaaaa

SEQ ID NO: 60202 - DNA, 451 bp, Zea mays
ctcagcttggcccgtacggatcccgcgctgctcaccgatatgggttgtaggcatgtgctggaatccctctgacctcagtatcggactttgcccgattataaaacgatgcactgtcttcccttcttggcaaccaccgcgtggatcgggcaaaacggtgtgcatcctcgccgtggacaaggattgggtgccgccggtgccgctgctggggatcttcgtctacgcaagcgctccggtcgggacggtcgcctggtgcttcactatgccatggggttgatatctgtggtctcaactggccgaatcggtgggcgaggggaaggtgaattctcatcggcacgccaccgtcgccattgttctgtcgtatcacgtcgacaagcctcatcctcgcaccaccgaccgtgagaacgcctcagtatgactcgccttcatctctgctccgtctacacgcccttgg

SEQ ID NO: 60203 - DNA, 410 bp, Zea mays
  unsure (1)..(410): unsure at all n locations
agcttgtagtcctagcccttggtagctagcggtgttatgaccccttgtcgttcttcgctggttagggttgaaagggaattangcttacacctatttcctaattgattttggtggttgaattgcccaacacaaataattggactaactagtttgctctagtgtataagttatacaggtgccaaaggttcacacttagccaataaaaagaccaagaaatgggttcaataaagagagcaagggataaccgaaggttgccctggtctggcgcaccggactgtccggtgtgccaccggacagtgtccggtgcaccaggggacttcaagccaaacttcgcaccttcgggaattctcagagacgcttcactataattcaccgtactgtccggtgtaccaccggacagtgtccggtgc

SEQ ID NO: 60204 - DNA, 383 bp, Zea mays
  unsure (1)..(383): unsure at all n locations
ctctgaaaatgtctaagcataaggagtatcaacagagacagaaaaaggtatgattcaattagtcatgttatttgcactaataatctctctatgtcatccaaaagccaaaaagagaagaggaaaaaggaggtgcttcaagtgcaagagatangtcacctcattgcttcttgtccatacaaagaacaggacgaaaggataaggatatgttntggatgcaatgaaaaggaccacatgatcacctcatgtccggtcataaagaatcaaggacatgcacccttcaagatgaccctcactaaggaaaatgataaacagcaagcatcatgtcgggttgagcgacgcttctgctacatgtgtggtgagcatggtcatctacctatggtatg

SEQ ID NO: 60205 - DNA, 438 bp, Zea mays
  unsure (1)..(438): unsure at all n locations
agcttagttgacaataccgcaagttacaaactacatggtgcatgaatggatcccaaagtgttatcgcaagggtgtacaagaaaaataacataatacttagagtccttggataaataataatagcaaacatgcaaaaaaatttgaaggctaagattaaggttacttattaagattcagatgatccagataaatggatagtctttgtagcagagaagctaaccgttgtttttcaatcaatcaacctaagtactaatggtaaggagaaaaggcacagaaagaagaggaaaaggactgcnagcatgggttgaacttgtgtaaacgatagctagaattcttcaaccaaaaggagagacaaatcacaggacagggttgaatgttgcttactgagaacaaattctggccgtgttaaaaactcctctacatgaggtatgtcagtat

SEQ ID NO: 60206 - DNA, 342 bp, Zea mays
  unsure (1)..(342): unsure at all n locations
tcgtcatctgataggaagntgccctgaaggtaagaaattatttcagttctccaatcttcactgtacacaggagaaatagtaagaactgctctttcaagtaactccactgaaggtgcctttattgtttcgaagaatacattcgaaggtagcggcagcccctgtgctgcagacctggctaacaaatcagcatgttcattttgccctcgagggatattcttaacagaaaatccttcgaaggaagcttctatccttctgactgtgtctaggtatttttcaagcttcgggtctttagccttgcaacttttgtcaatatgacccgagacaatctgagaatcagtttta

SEQ ID NO: 60207 - DNA, 404 bp, Zea mays
tactctacactgcagcttgcagcatgcaatgctatgtgtggaattcgccgagagtgattttatctctttgattgtgtctagacattgaatggcctagcttcttgtaagctggttggaagtcgtgacaaacttcggatgcaatcgaatggtgcagtggtgggcggtatttattagccccagcccaccaaactagccgtttgtgtgggggctgactagtcgtattggtgcacacggacagtcttggtgcacaaccacacatgtctcggtgcgccagccacgtcaccaaagccgttgggttacgaccgttggagctctgtcttctgggcccgcctggatgttcggtggcgcaccagacatgcactgtacagtgtccggtgcgccaacatgcgcgtgcctgacttctg

SEQ ID NO: 60208 - DNA, 333 bp, Zea mays
gacatataaaactcggcgtgcaccacactgcatgtggtctgaacttattattctctatcagacggtcctacatagagatccaatcctattctggacgatatgtggacggcttgtgctctgcaccatagtactggttgagacactacattaccatatgctgaatgtctttactacgacaaatataacgtcattttgaacatgtcaccataataaccgctctatcgcaggaatagcatatctcccgtgcataaggaccatactgttgagagacaggtgtgactaccgcatattgcgctagaagctgaatataacctcaaaatggtctgagataaa

SEQ ID NO: 60209 - DNA, 453 bp, Zea mays
gtcccggatcttaagcaccgcggctgcagctggccacccgggggaccgtcacttgaatggtgaagaaatgcgatctgagggtgcgctggcaagcctacggcggtctccggtgagggcacgattgccgcttaacccaagcgcgccaccgaggtaacttttgccacgatacccagtcactttaccgcggccaacgacgaccggtcacgccgcgatggcgttcttatcgccggcggagatgtcctgatccataacgcgatagtaactgatgacgatgaacagtgcctctgatccaatacacaacttgactgacagaccaacttagagcccatttttctctcaattttccatagtgacacaggttaagctctacagcaaacttgtagagtatggtacccactacaaacttgctatggcaatcataggtatatttacacaggatcatgctcaaaaccc

SEQ ID NO: 60210 - DNA, 371 bp, Zea mays
  unsure (1)..(371): unsure at all n locations
ctcaaactaagcttgctgacgcgtgggacccagcccncgtgtcgtatcgggatgaccttggagtgtgttggtgaagactcagtccgcgacggctgaggacgcaagtggggagagtcgcatttaanaaggtggcgacccccttggatggcagccatgccttcgcactcccctcatgcattgcgcccttccaccttccaagcccacagatggagagcgcccgcgttgctttcatcttgctgctgttggaggagcacaacttcgcggaagttggtacctttcagccatcgctcggcttcaatgatcttcatcangcagcctggctgcatccnctcgccgatggtcacccaagatggtgaccaccagtttgatgg

SEQ ID NO: 60211 - DNA, 436 bp, Zea mays
  unsure (1)..(436): unsure at all n locations
agctntgatatatgcacacattaatttctaatgacaagctcggggtgaatccttagaactgtctgattaagagcggtggtaatgaactaatgatcactgcttaaatgttttttcacaatttgtttcagttccaaattaatttagttccaaaataaatagaattggagctcaatcctaatctgatcctataacctaatctgatcctaaaatttagagatcataccctcacccctagataacaggcgagcatcatcgatgcaccatgcccagcttcgtcccagtcacaaaagcatggtttctgcaactgcaacccatcaattgtgacgacacacgtatcaatatcacatcagagctcataattcaccaaagaacactacaaaacctgcgtcatcgcgggtcaacaccagacaaggttatggaacatcgaagcaaaaaa

SEQ ID NO: 60212 - DNA, 472 bp, Zea mays
  unsure (1)..(472): unsure at all n locations
tactaaaagctccaagcaaaataacaagtgctagtcatagtgtgtcccatactaatgcaaaaataaagtatcagatgaagggccactatgtagatggatacttttgccttgggtgcatacaccagaataaaatctagcataatgtctcatttgggcatgcaagcacccaagattaattggaagtaacaaagcaatattgagaaataagatgtgcagaacactagtggctgttgtaaatccaacaggtcagtataaatgatatgcgcttcaacacaacaaaataaaaggtgaatactgaatagtacatatgaaaaagttaaaaggtgattataaacctgacacagttctctggattacttactgtgctattgtggccttcactggtatctcaatcatagcttgggccatatgtggctacaggtggcccatatgagtatctncattgatcacatgctgagcatttgtcaagtta

SEQ ID NO: 60213 - DNA, 416 bp, Zea mays
ctccatctatggtatggattgcttttgtatctgcccagtttcctttggcctttctggcagcttcctgacttccatgaatagcaataggcccttgatccgaaggtgtcttcatgcaaagatatgttggatgaagaattgcttcaaaagcattgagagtaccacgtccaatgattgtgttgtaagggtactccatgttaacaatatcaaacacaacttgttcagtccttgtattgttgataaatccgaaggttactggcattgttatcttgccaagtgctacaatctgccttcctccaaagccacaaagaggatgtgtggcgtcatggatcttatcttcgggctctcgcatctgtgtgaaggctctagcaaatataatatccgctacactgcctgtgtcaaccaaaacattgtggacc

SEQ ID NO: 60214 - DNA, 376 bp, Zea mays
  unsure (1)..(376): unsure at all n locations
aagcttggactctcaccttctgtcgagccgaaggtacaaatgtagttctatattgttcttattcatccatgactatataataaagatatgtnaataatgttatgtgattattcatgttattctctcatgtttcatatgcttctccatttatcaatgtaaaattgtgatgatgaaggtatgtccttcatgaccttcgttcgaagatcgttatattcgacaggaaataatgcttcgagggacgaaggccattaaccattaacttctttctatgtagccttgttcttaattcatagcattngagaacacgttctcaacactcgccatccgagccctaactttcgcccggacgaccctgctcgaacccttcgtgaccatg

SEQ ID NO: 60215 - DNA, 431 bp, Zea mays
  unsure (1)..(431): unsure at all n locations
agctngacttcagttgcacaaataatattgctgagtacgaagcacttctgttggggcttcggaagttgagagcaatgggaataagaagggccatcctgaaaactgattctcaagtcatttctggccacgtagacaaaagtagcaaggcaagagacccgaagcttgaaaaatatctagatacagtttgaagattggaggcttctttcgaaggtgtttctgtcaagaatattccaagaggcgaaaatgagcatgcagatttgctagccaaatcagtagctcaggggctccctctaccttgggaagtattttttgaaacaataaaggcaccttcggttgaactcatggagagagcagtacttgttatttctccagtacacagtgaagattggaggactgaaattatatctttcctctaaggtaattgtctttca

SEQ ID NO: 60216 - DNA, 321 bp, Zea mays
  unsure (1)..(321): unsure at all n locations
gctggtgccaaggagaagcaganatccttgaagtcttggctgtcaaactgcttgccgttgtcaactgtgagttcggacggtactccgaagcggcaaacaatgttttgccaaaagaatttatgtgcagtctttgatgttattgtggaaacagccctcgcctcgatccatttggtaaagtactcgacagcgacgaaggtgaacttgaggttcccctgagccgtgggcaggggcccgacgatgtccaggccccagcgctggagaggccatgtgtgggcgatcagttttgtgaattgcgaggggctgcctgatcgaggagaaaac

SEQ ID NO: 60217 - DNA, 430 bp, Zea mays
  unsure (1)..(430): unsure at all n locations
agctngcatagaatactgtggcctctgttgttgacttcctctgtcatcactctaagtggagttgtgaattgacctaacgtgtctcgggtggattcttcctccgaagcccctggtcatttcagagaacctgtatgcttcctcccttctttggcggaagtcattgtcagcccggatgtactcatccatcttctgaagcagcttctctagagtctgtgggggctttctagcgaaatactgggcagtaggtcctggacgaagccccttaatcatggcctcaatgacaatttcatagggcactgtaggcgcttgtgctcgaagacgcaagaaccttcggacatatgcctggaggtactcctcatgatcttgcgtgcattgaaacaaggcctaagctattactggcttcgtctggaagccttggagacttgtcacc

SEQ ID NO: 60218 - DNA, 311 bp, Zea mays
  unsure (1)..(311): unsure at all n locations
aaatgtgaagcccggcatttattgctaatgtctatattatgacaggacgagcgacacataatggagaccaaagagaagaagaagtactacaagatgaaggcggcgatgccatgtttgtcggaaatggactacgacgagagctcaagcgaactctccgacgacgaggacgccgtcaacatcgccgcaccaagggctctctcccacgtngcacagtgctatgcaagacgcaaaaagtaactaatctcataaatgatcttatgagacagttgagagagaactgcgtctttgcacctacatactaaagaaatgag

SEQ ID NO: 60219 - DNA, 433 bp, Zea mays
agctattatgggctgtatagatgtgacatatattccccaacagataatgacgctagattgttagggcatgaaccacagcagctaactccagatcatgagttggataatgttcctcatgccggcgtaactgccttaaagcataagctatcactcggccttcttgcattagaacacagccgagaccactgcctgatgcgtcacaatacatatcaaatggtttttcaatatccagttgagccaataccggagcagtggttaataataccttcaactgttcaaaggcttcattacactctgaagaccaaacaaatttagtatcattcttcaataaacttgtgattggtttcacaagcttggaaaaatctggaatgaatcggcggtaataaccagccagtccaaggaaacttcggacttgatgtacagtggttggggg

SEQ ID NO: 60220 - DNA, 441 bp, Zea mays
  unsure (1)..(441): unsure at all n locations
agctntaccgcattgaagcatgatcgcttcctcttggtcttagtcttgctcggctgtccattgcgaccctttagcaccgtcttgaagcgcttaatgatgagagccatttcttcatcattaagcccgaccgcctcaatttgcgccaccttgcttggtagtgcctccttgctccttgatgccttgagagcaatgggttgaggctcgtggattggaccgttcaacgcgtcatcgacgtaccttgcctccttgatcatcatccgcccgcttacaaattttccaagaatttcttcgggcgacattttggtgtacctgggattctcacgaatattattcaccaaatgaggatcaagaacagtgaaggaccttagcattaggcggacgacgtcgtggtccgtccaccgcgtgcttccatagctccttatcttgttgacaagggtcttg

SEQ ID NO: 60221 - DNA, 352 bp, Zea mays
  unsure (1)..(352): unsure at all n locations
cagattaggtttcttttctagctagatcctgcagcatctactagtccaggccacggtcgactggttctccttcgatctagtcttcctttcctttctttctttctgaatgcgcatggtaccacatccagttntctctgtctttgccaaagaaacacccccccccctcccccggttattggtaatacaggcagaggtcgtcttgagaagacggatagctatggctggtttgtttntgctgcacatgtttattaccgagtgtccattgctctgacgaactgaagaactgatctcctgtaccattgntacatgtacctttgtttgaattggaaatcattcataccatattactatc

SEQ ID NO: 60222 - DNA, 461 bp, Zea mays
  unsure (1)..(461): unsure at all n locations
ttaagtcacctgcggcatgcaagcttanaagtacttttgtttctaagtccccccgacatgatcttttcctcacgcggntaagcgttagaacgaggattatgatctgataccaattgaaagttgcctagagggggtgaataagaaacttaaaactttttcaacaaaaactagaaacaaactgggtaaaaccagttcaataggtgtcaaaactggttcaactggtttgaacgtgctcaactaaatgatgagatataaaactgaattgatctcgaaattcacccagttaactttagaaatgagatgttctaaatgatccacatgattcaaagtaatagatctgagaagggcacttctcaaaattcacacaccaaaaagatatgaacaaatcttccatggaagggtgagagaacgaagaacacaaacaaacacaatgagcaagaacacaagagacacaagattta

SEQ ID NO: 60223 - DNA, 479 bp, Zea mays
  unsure (1)..(479): unsure at all n locations
tgtaacaaccactacttcatctgcttcaggaagatgaacgatactctctcctccagccctcacaatggatatatcgngaaaatattatcccttcatcccttcaatctgtccttgtttaacactggactttccaaaaacaacatgactcggtctcaatggccgatcttcggcatcctcgttaccactttccacatcaaaactatcactgtcgctggaatccccagatagccctgccagcatctcattagtgattntttcaacgttggtcctttccattgcttcgtaaaaaaccagcaggtctggggtctacaatcttcttatcttcagccatttcgatgatgaccatagcaaatgccgaagcttacaaaccaattgcgctcacaggagaagaaggctaaatggaatcacacacaaaaactagatggacgaaaatatccagcgcggccttatattaactagtgtcactgtcaggggccacg

SEQ ID NO: 60224 - DNA, 429 bp, Zea mays
agcttgtgcctatgttgtttatgatgcccttcgacgagtttttagattgcctcgcatatacacatttgaaggtatagctcactatgcttttttgctgcttcgaagctggtaatatgttatatgacttaactcttatttctttttcatttttgcaggggctaatcttaagcaaggcacttaaaaactgaaaaacattgaggccgaagctacctagaaagatattataaaacttcggtccgaagtatctagcttcgctttgaatgcgaagagaagaaaaaatgctcaaaattcttaaacatgactttattgaaaatcgaagcaaagtttatgctttaactgaggaaaaaagcaaagttctaaagcttaaataaacaatgtgtggcaagatctcagagctcgaagcactgaacctggaaaaggacaagcgta

SEQ ID NO: 60225 - DNA, 327 bp, Zea mays
  unsure (1)..(327): unsure at all n locations
gacatcattttgggagatgtattgccctacgtaatcttttatgacttaacttgcaggtatgcgctaggaaggaacatctgtatagggaaatcgttgcttaacttgactgcatcgaanagatagttaaagaccagaacattggtatgaagtcaggcttgcataaacatgttgctgatcttagggagttggttaaaagtgagtggaagaagtatgancgtagttaaattctacttttttatagatngctattgaactgtacctagntttctacttctcttgtagaattgctatcgaaaatatagtacagaccagaacattgttctttac

SEQ ID NO: 60226 - DNA, 410 bp, Zea mays
agctctaagttttacaggatcacctattcaccccccctctatgtgctctcactactgcttattaatgtcattctcattctctcattctcatgttctatcatcattttatgttctgctattctcatttcttgttttggctttccattccccatgtctccgcaaagccacgtctagcttaaattaaaaaaacgcacataaaaaaacacacatatcccaagaggattcgaaccggcgatttctcaagcaaatgccaacattagttatcgctacaccatatgtgtgttcatgtatacatctatgacaggaaacacatctacttcatctcttctcaagcccaccttgtaccctcgcacaatgtgtagtagtatataagtatcaacgagattcttaaattatgtttttggatggag

SEQ ID NO: 60227 - DNA, 458 bp, Zea mays
  unsure (1)..(458): unsure at all n locations
taacttccagaagagataacgacgataggagatcggaaatcaccttctggataagtgantttgcattggttgggtcgtgcatgtagattgggcttgtgcatattctgctccttttctgggaggatgatggtgtagtattttgtaaagaatagtttgcgcatctagtaaattctgtaagcgtgtagtcccttacaaaggatcagttggagaaggcgaggaaatacctcgtgcgttgctgttgacttaagcgtacaagtactacctccgttctcgaatattngattatcgctcgttaatttattttttaactaaactgtaacaaataaaaaaacgaanaaagtactgttntaggacaaagggaataatntataaacagccaattattacagaattttcagcacaattgctgattagctcattagcatataaaggtaaaaaaacacaacttcagttcatta

SEQ ID NO: 60228 - DNA, 433 bp, Zea mays
  unsure (1)..(433): unsure at all n locations
agcttaggcacacanttttaaaaagcgctattgaatgttggtatatttaaaaaagaaaaaatggctttatgtatagagcacttctcaagagtcaagacctgcaattatttgataaaccatttaatcatttacagtactatttattttgtgagcttatgatgctggcatgctgcataggatctcacactgcaaatttccctgccattttcccttatgtgcatagttgccttcgacgccaacaaactttcaatctttttcagggaaaatattgatatgactgttaggctagtagtaagctacaatggcctcagcattggcacagttcgagagtgagcattcttttctttatatttggttaaaatatgctagcatctatgcaagttgaagttaatcatttgtctcaacatgctttccagtgcatttgagaagtctc

SEQ ID NO: 60229 - DNA, 367 bp, Zea mays
  unsure (1)..(367): unsure at all n locations
aactacaagaccggtgggagccattgggttattgacagtggatgcacacaacatatgacaggcaacccacggatgttcacctcactagatgagaatgttgatggtcaagataaaatcacatttggagacaattcaaaaggaaaagtgcaaggacttggcaaggtggcaatctctaatgatttatcaatatcaaatgttctcttagttgcacctttgagcttcaatttattatcagtgggacaactctgtgatcttggacttcaatgcttattcactccatcagagggtattgaacaaaaatggatgatgaatcaatggtattcaagggatntagatacaacaacctctacttagtggatttcacttc

SEQ ID NO: 60230 - DNA, 433 bp, Zea mays
  unsure (1)..(433): unsure at all n locations
agctatagatttctgagggactatgggcttattggaagaatccaccctagacatgtcagattaattcacagctccagtcagaatgatgataaaggaagccagcttcaaaggccatagcacacctcatagtcttcgggacatcagcaaagctccttcagaccaccacctccaagaggcagaggcggcaggggcttcagaggaagatatgaggatcatcccaganaaatctattgcttattctatggtgaggacaagggccacattacaaaaatgtgccagatcactattctgaagcaaaaagagattgccgaagcagaagctcggtagaattagccgaagctggttttatatactgcttcgtgccactctccttacataccagaatatgtgggcaaccaacctgcatcttctggtgcttcggcaagccattcac

SEQ ID NO: 60231 - DNA, 363 bp, Zea mays
actgagctacccatttgagctgagcgcttcccttgtttggtttgctcggtgccccttgcggcctattagtgccgacttgaatctcttgatgatgagagccatctctgtatcattaaggacggccgcctcaatttgtgccaccttgctaaggggcatatccttgcttcttgttgccttgagagcaagaggatgaggctaattgattggaccgtttagagcgccgcgacgtatctcgcctacttgatcatcatccgcccgcttacgaatttccgagtacctactcaggcgtcatgatcgtgtacctgtgattctcacgaatattgtttacgagatgatgatcaagaacggtacatgaccttaaca

SEQ ID NO: 60232 - DNA, 436 bp, Zea mays
agcttatgataaagttaattagcaatttctttattatatgatggaaaaagggttttggagatatttggtgtgattgggttatgaagactgtcagaggtggtaaagtggccatcaaaactaatgatacgattggtccctattttgctactcataaaggtgttatacagggtgatcctttttcgccccttttgtttaaccttgttgcagatggcctggcctgtattattcaaaaagctcaagaaagaggtctgatccgtggccttattcctcaccattcaaaacggttgatgttgccttcaatatgctgatgatactattttcttaattcaagattgtttggaaggtgctagaaatcttaaatttattctttgtctctttgagcacatgtctggtctgaaaattaattttcacaaaagtgaaattttctgcttagggg

SEQ ID NO: 60233 - DNA, 397 bp, Zea mays
  unsure (1)..(397): unsure at all n locations
tgaatgttcaaaatcaagaacttcaagtgcaacttgataattgcaagaacatcaatgcctcatctttagtgattgaatctaagtctagctccttaaatgataatttttgcaaacattgtgccaaatatcatacttcttgttgtctaactaaccatgcaaggaagaatagcccacaggtgaaggtcaaaggaattntgaaaagatgctctagcaatgatgggttaaagaaagttgaacccaagtacaagtccctaaagcccaacaatggaagaagggggcttgggttcaactcatccaaggaaaaccctagcacagtgcataaggggtggagatccnctagttcatagagggaaccaccctatatgatgccttgnggagaattcactcctcacatgac

SEQ ID NO: 60234 - DNA, 436 bp, Zea mays
  unsure (1)..(436): unsure at all n locations
agcttcngcattgaaaacagttntttagtattccctaagatgtctgaagataaaaaggctgctaccgagatgaagctaagtctcgatgaagagaaaaatctggggtttcttatagcaatgtcgaagaccaacacagaaaaaatcaccaaggagattctagaaggtttgtctgaggattctggtgacagcgacagttatgatgtggacagcggtggtgaagactccgaagatcgtccctggcgaccaagccattcagtttatggtaaatcaactatcaaagagaatcatcttgtcaacatgagaggaaggtatttccgggatttgtccgttgtgagggccgacgaaggggagaagacttgtccacaccctgaagagaatgaagtcgtagtgtaccgaagctttttgaaagctggactaagatttcccctgagcagct

SEQ ID NO: 60235 - DNA, 441 bp, Zea mays
  unsure (1)..(441): unsure at all n locations
ntcttcgcacttctcatcccactggaattctnttcctttctccaaaagcgaggtcataagcttggcaatcttagagaacccttcaataaatctccgataataacctgcgagtcccaagaaactccgaatctcggtaactgtagtgggcactccacgccactatctcttacccttagcaggatccactgatattcctccattagaaatgatatatccaaggaatgacacctcgtcaattctagaactcgcatttactcgtagtttctgtagcaccaatctcagatatttctcatgatcactatcactcttgtaataaataagagtatcgtcgatgaaaaccacgacgaatctgtccaaatcatgaacacctcaatcttcagatccttaaaataggctggtgtattggtagtccaatgaataacgggaactatataacatatc

SEQ ID NO: 60236 - DNA, 432 bp, Zea mays
agcttgaagccatggtaagtagcatatgcctatattatatgaattgactcaagcctagctacgggtgcataggtttcaccaaaatccaaaccttcgacttgggagtatcctttgggcacaagtcgggctttgttccttgtcaccacaccatgctcgtcttgcttgttgcggaagacccatttggttcctacaacattttgattaggacgtggaactaaatgccatacctcattcctagtgaagttgttgagctcctcttgcatcgccaccacccaatccgaatcttgtagtgcttcctctaccttgtgtggttcaatagaggaaacaaaagagtaatgttcacaaaaatgcgcaacacgagatctagtagttacccccttatgaatgtcgccgaggatggtgtcgacggggtgatcttgctggattgcttgg

SEQ ID NO: 60237 - DNA, 433 bp, Zea mays
  unsure (1)..(433): unsure at all n locations
tangcatttctcttgaagctccttcaaggagttttgcaagtttgaattcttctccatctcagttntaagacttgcttctaggtgtttcttttcctgctcagatttttctgattgtttgagcaattcattctttaaactgttattctcagcttggacctcagccaaggagccttccatagactgaataacaaagtctttcttttctaatgcaccttcgtgttctttagccatgatttcaaggtcctggatggtgaagttcttctttttcattacagctntgtaactttcaactttntcttccaaatctttaatgataaattttgtcttcttctcttcgaggtcttgttgcatttttagaaccttactcaatagtatactctgccaaaacaatcttcgtcagaaaacgacctcacaaaataaaaatatgtataat

SEQ ID NO: 60238 - DNA, 426 bp, Zea mays
agcttctccttgtcgtcatcaaccttgacatagaaccactccgacttccagcctgctgcccatttgcttcggtagctgattacagggaactttgtggttttccgataagcaaaattatagcaaccaaaattgtcatgcaatccatcttttctagccttcgtctgatagtgcagctcgtgaactcgacaaaagctgtccgcaaacggttccaccgcttggcttcggagggctcagatataaacactaagcctaacgatagcgttaggagtcaactgatgaaagtagataccaaaccacttcagtacctctgcaataatcccatgtagggggaatcttaatccagcctttagaaagctcttgaaaatgactatttcatccttctccggctctggggtagtttcttccccccccccgaagcgtagtagc

SEQ ID NO: 60239 - DNA, 378 bp, Zea mays
  unsure (1)..(378): unsure at all n locations
tgtanggttaattgaaccgaaagttgaagtagaactgacagaaactaccctacccaaaaatgttacagactattcgcttcaaattaaagtcttctgtttcgactgttacagttgctgtcgaagcactagaagatgggattaagcttcacttttcattcagttaatcagatccctgtgaatctaaacgcactcacttgccggcagcgcactcccactcccaccaggtccgccctggtctacgttctgtcgttctgtggctgagctccaaagtccaaagattagtgaatccaaaaggcgaccaaacagatcccccgctcctgtgctccgctcatgttagagaaccccctgcganaacgcagcggagaaactctggagatc

SEQ ID NO: 60240 - DNA, 429 bp, Zea mays
  unsure (1)..(429): unsure at all n locations
agcttctaaagggagagcacattntaggactaacaaatgttcattntgagaaagacagggtttgtagtgcatgccaagcaagaaagcaggttggagtccatcatccacacaagaacatcatgacgactgacaggtcgttcaagctactacacatggatttattcggcccgatagcttacataagcatcggcgggagtaagtactgtctagtaattgtggatgattattctcgcttcacttgggtattctttntgcaggaaaaatctcagacccaagacacttgaaagggattcttgagacgggctctaaatgagttcggattaaggatcaaaaagataataagcgacaatgggacggagtttaagaatcctcaaattaaaggatttcttgaggaatagggtatcaatcatgagttctcttctccctaca

SEQ ID NO: 60241 - DNA, 309 bp, Zea mays
  unsure (1)..(309): unsure at all n locations
tgacaaagaggagatggctcttatcatcaagagcttccggcttatcctcaaacaaaaaaggggaaggactacaaaccccactccaagagggttngctatangtgtggtaagtctggtcattntatctctaaatgtccatatacaagtgatagtgacagggacgacgataagaaagggaagaaaaagatggaaagaaaatatctacaacaagaagaaaggggcgaggcacacatggggcgggaatgggactccgacgagagctccaccgactcctcctctgacgaggacgccgccaacatcgccgtcaac

SEQ ID NO: 60242 - DNA, 413 bp, Zea mays
  unsure (1)..(413): unsure at all n locations
cttgttgagccttcngtgcaagagcagctaccggcctaatggcacctttaaaagtcaaaacatgttatgcagtcaaactgaatttcagttacacaaataatattgctgaataccaagcacttttattggggctttggaaactaagggccatgagaataaaaaaggccatcctaaagactgattctcaagttattgctggccatgtggataaaagcagtaaagcacgagatccgaagcttgaaaatatctggatgcagttcgaagtttggaagcttccttcgaaggttttttcgtcaaaaatattccaagaggtgaaaatgagcatgcagacttgctagccaaatcagcggctcaggggctccccctaccctccgaagtattttttgaaacaataaaagcaccttcagttgagc

SEQ ID NO: 60243 - DNA, 464 bp, Zea mays
  unsure (1)..(464): unsure at all n locations
tcaacggagccaatatgatggcccanaaattatgcaaaaaataatccattgtgtttggtcaaattagaaaatatgatgatgatgatctttttctgagaaaaagaaatagcatgatgaccatggcataaaggacttagcagaatacataccactcaaatggaaaatataaaacagagaaggttgaggaaaccaaatccagttagatatgtgaagcaatgtttacatcatcaaatgacagtggaagctaanaatagaataccatcagagactaatttaccaatacctcagtatgagacaaatattgcagttatcattntagaggatgtttccagaagatatgagtcaagagttgaccatacctcaatatagtcaattgttatgtggcccgttccctgatcatcccactgcccgtcattggttaaacgatatactttgacacgctggacatttgtttgaaacatcac

SEQ ID NO: 60244 - DNA, 415 bp, Zea mays
  unsure (1)..(415): unsure at all n locations
agcttggaggacaccacgtgatatatgcaggacaagttctgttgaggacagccgtgagcatgatggcgttggtcagagtgttataatctatactgcctaggatcgaatcctaagtccctaaaataccaatctgactgtgactgaaagtaaaatcttgatgacgtgtatatctgatctactatctaccgagaagaacgggaaacacacctttattggtgctgctatcttcataccgncgccctgaagagaagcaacangcatcgggatcctagctgctgtacgatgtcacgtttccaaacacttcgacgcctaagcgatgggggcctatgaagactatggttctggggcgaggtactatcgttaagttttcctgcgaccccttagtcctatatataagcgcgtgtgtctgggggct

SEQ ID NO: 60245 - DNA, 439 bp, Zea mays
  unsure (1)..(439): unsure at all n locations
agctntctagaatgttaaaaagtgcattcatatgaattatgaaactccagntatgtttgttttactgtggctatttctgtttgcctgacaaaaatgagtgtgtctgttcactggtaggtttcatcaggtaaatggccgaacaggctcttccaactatagagacttctgtagagggataaaagttcttactgccagtagaattgtatgatttttggttgagtggtttgtgagatatcgaattttgaagttaactacactgctgcctgaaacagattcagtcagttatcttgtcagatgttttagaacttatagatggcagaatttaattatctattgaataccgaagttgtagggtattttgtgtagatactcttagattatttcactagtagaaaaaggctcaaagcctgtggtgcggtatatttgtttgatatcacca

SEQ ID NO: 60246 - DNA, 463 bp, Zea mays
accttaaaactcagcttataaatggacgtgaagagtgccttcctcaatggaccaattcatgagaacgtctatgttgagcaacctcccggctttgaagatagtgagtatcctaaccatgtttataaaatctctaaggcgctttatgggctcaagcaagccccaagagcatggtatgaatgcctaagagaatttcttatcactaatgggttcaaagtcggaaaggccgatcctactttatttactaagacaattgcaaatgatttgtttgtatgccaaatttatgttgatgagtattattttgggtctactaacaaatctacatgtgaggaatttagtaggatcatggtacaaaaattcgagatgtcaatgatggcggagttgaagtatttcttaggatttcaagtgaagcaactccaagagggcaccttcattagccaaacgaagtacattcaagatatactca

SEQ ID NO: 60247 - DNA, 412 bp, Zea mays
  unsure (1)..(412): unsure at all n locations
agcttatgaagattcttcatcccaacatgggctattctgcggngccagatccagcccacgtcaggcgtagcaattaaacaagagtcgagttcagctctatcagaatctaccagtgatagctgaccctccaacactcccttaaatgctattggatcatcacttcttctgaagacagcgacacctacatcagtaaaaagacagttgtagcccatttgacataagtgagaaacagaacgcaaggtggtatctaaagaatctacgagaaaaacattggaaatggaaaggtcaggagatatagcaattttaccaacaccttagaccagaccttggnttacatccccgaatgtaatcgctcgctggggatctatgttttactcatatgaggagaacatccttttatcccctgacatat

SEQ ID NO: 60248 - DNA, 280 bp, Zea mays
tgaactaaatcttctagatcaatatgtttaaagacaattcataactctgccacatcatctgggcatggtgcccccggcgtcatgatgcactgatgcctagtgcaaccgaaggttaagtccagcgggctctgaactagcatcttctttttctcatcaattttaacatagaaccattcagttgttcaaccggtcggccacttagtgcggtagctaacactacacgagcggtcacttacagcgacctacagatggctgctaaaacgaccttcattgacctacg

SEQ ID NO: 60249 - DNA, 406 bp, Zea mays
agcttcagaagaggttcgtcatcttgttcaatatgatcaaaactcgaagcctccacgcagagagcttcatcaggaagacttccgcaatgaggataactggtatgaagatttccatcatggaaactttgcttttgatgatgcttctcctctctcaacagaattgcaggctacaccttggccacagacttacaagccacctcagcttcccatatatgacggtcactcagaccctaagcaattcctaatgagctatgaagcaactatatcttcgtacggtggcaatacagcagtcatggcaaaatcctttgtcatggccgtcagaagcgttgctcagacttggtactcttctcttctgcaaggacaatcacttcttggcagaaattgaaggatatgctgataactagct

SEQ ID NO: 60250 - DNA, 460 bp, Zea mays
  unsure (1)..(460): unsure at all n locations
gaaactcaagctttagcctcnttgtaattgtaaagcctgtatagctgngtaataaataagtgacccccacatcacccctgccttataccagaactaaggaaataaaagtatttcgcgtttccttttccattacctactctaggattnttaatctcgggacgagattctnttatggggggaaggatgtaacacccctggtgttactataactaaaacttgagcatggcatcataagcattggcattgcatatgtttgatacacctagaatgcattcactatgcacaaatttcaaacaagttgtattgttttaatgttttacgaataggaccctggataggaaactaaaccctaaataagggttaaaaggcgttaaacttaacctaagatgagaaaacctaagactttatggaaagagtcataaatattcccaaaacaaagtgagtcacattatcccctgga

SEQ ID NO: 60251 - DNA, 450 bp, Zea mays
atactctaaagtcgagcttgacgcatgcgagcttgccatcacacggatatatatatatacttcttactatagatgctacacacatatggtcgctcaaatacagcgcgtatgctatgtataatggcattgcaacgcagaaattaatgacaaagcagtgaggtaagcacgcatgtttcactagattacaatactgtgcattattaatttgccacagaatgctttcgcgcatgcccctaactactaatcatgaacagtcgtttagaacatattaatatctttgtttaccttggcttttgaagtgggcaacatagtgataaagcggcgcgcctgccggaccagacgaccgtcctgagacaactactactagacacacaccggaaggagctaacaaggacgaagccagaataatttgccactggggtccactataattcatgatactaataactt

SEQ ID NO: 60252 - DNA, 293 bp, Zea mays
  unsure (1)..(293): unsure at all n locations
acatagctcattagaatacctgcgatcatatctcttttatatgctatgactaatgagattacaagtgatatttcacaccaagtcataggtatattgaaagggaattggagtcttctgcgaagacaaaggcttccactccgtaactcatacttcgccaccactccgagcagctctctcctctttgggggagaaatgatcatcaacgaaaaggacttcatccttgacggagagagtaaaagctcaaacgcacaaagacttctgctttggtataatcctaacttacttatntatga

SEQ ID NO: 60253 - DNA, 436 bp, Zea mays
  unsure (1)..(436): unsure at all n locations
agctntataggtgatagcttcggcgctgcttctgatatgatctgccgaaggtgttctgtttctttaggatcttcggctacgaagcatacccccaacaacgagcaagaacgaagaagatgcaacataatttgtgaataaagatgaagatcataagctagggtctcacaaattgatgaacgacgaaacagtaaaaccatatattaatctaagcaaaccccatctaagctaatagatactactgaatgtatatgtaaaaaaggcggctaaggcggcgtccaaggggatgaccgagcaaccctagggtgtacaaggccttcggatccaaaaacaggtgtaactaatttctagcggattttggatgtaatcttgttatgacaatttttgtcgactccaagattgttccaacaatatctagagtgtctaaaacggagtccat

SEQ ID NO: 60254 - DNA, 397 bp, Zea mays
agaacctatgtggaggaccaagtcctcccgcacttcagacttgtttttcatcatggggaaccaccttggcacagaagcagcagaaatctgctacttcctcacctaaaaacaacgaagggataaaccctgagtatggaattactcagcaagtcttacccgactaaagaaaagactctcaagggtatgctggttatatgggagtcaaggtaaggctgttcaataaccaaagactctgttttgcagaaatgcttactaaagtggatccttaaaaatccaattttatttgtcaggttaagtacaattacctgcaactagagttctttctaccctagttcaatcacttggcctgtactagccaatttcttaacaaagacccatcatctttagtggaatgcta

SEQ ID NO: 60255 - DNA, 433 bp, Zea mays
agcttgcctcggacagactaataccagaattgataacacgtaatgggagtggagagatggcgagagtagcgtgtaccctccgtggcaagaggctggacggtggtgtatctgtgctctcggttggcgtgaacctgatctagtcttaagaaccccggtggcgagttcacatatgcaagggtttagtgctacatatgtcatgtgattggagatcctcagctgagtattaatcgattcggatcgccgttacttctcggacatgaagacttggtcactgacttacacttagaaattcagtgaactgaagggttgataaaagacggctagtataggccaagtgtttgaactagggtagaaagaactctagatgcaggtaactttacttaacctgacaagtaaaaatagattttaaggacccactcatagtaagcttttc

SEQ ID NO: 60256 - DNA, 414 bp, Zea mays
  unsure (1)..(414): unsure at all n locations
tcttcaccatgagatcacggttatcttgagaagggtgggctatgcatttcccttntagntgtgtcaagctcatctttagcctctcattttcttccttgagcttttgatatgaatcatcgtttgttcctgcaaattctagctcaaaggaagaattgcttgtcgacggacaacaagcattagcacatggtaatatagtatcaatttgaatacatgtgcatgagtgaggttgttgggattttaaattttctatcacaacctcatgagcaatgtttaatatgatatgatcatctctaagattntcatgagagcatacgagcatatcatatttttctttgaaagctagaatttcaatttttagcttttctacttggtccttaagccaggtatttcttattactaatngagctatacaat

SEQ ID NO: 60257 - DNA, 430 bp, Zea mays
  unsure (1)..(430): unsure at all n locations
agcttcacctgcagcatcttcgaagaacaccacattgctctcaaagtcatgaaggttcttcctccttatggtgttagtgtcgactgaaagtgctgaggcaacatgctcaatgatggcttcagcgatgaaagagccctgaacatcttcaggacccctcattgctgattttgatgagacatttgtcttgcagaccttggtatcaaatgcaagattgccccagttgtactttttgagagcacctatgatagcaggtggcaacattgggctcacatccggtgatattccagcattgatcccaagatcaatgtgcaaggctgtgatcttgccatctgacttgaacccaacagagtacttcaccttcataggatgccgaccgcctgccattatcatgtctgtcttgcgatccangtacatccgaactggacgccgc

SEQ ID NO: 60258 - DNA, 393 bp, Zea mays
  unsure (1)..(393): unsure at all n locations
tggaggcgtctatngtgtgccgactaggggtagagtcctctcttttttcttccgtcgccttgaatgcgacgggttgagcttctgatgtagatggatcatcaagctcngtgatcttcctcgagccttcgatcatgcactcaaaacttacaaaatgcccgattacttccttgggggtcattttagtatatctcggattaccatgaattaattgaacttgagtagggttaaggaaaataagagatcttagaataaccttaaccacttcatggtcatcccactttacgcttccgaggttgcgcacttggttcaccaaggtcttgagcccggtgtacatgtgatgtggcatcttccctttgcgaagccggaaccgaccgagctcccctcgatcgttca

SEQ ID NO: 60259 - DNA, 431 bp, Zea mays
agcttatcgcccatcgtctcactggtcggtcttgatcccttttacgtaccaaggggcatagaaaaaatggcataaccacatttagtgttccaaccccgatgaaagcctgagcaggtaaggaggcaagcgaagcagttgagcaaaccaagtttagtgacatgcgcgtgactgatcctatgtgagtgcagttaggcaattttttgcaatttaaccctttttcaaaaaatcacgtttaacccctggaagaagaattcatgttttagaccctttacttggtgtcataggcatggcgccaaggtaacacgacttgatgatatatgttatggcgccgaggtactgcccgtgttgacgcacgctggttgtcaggtggctgacctggcctagcgccgagcaagggaatatgggctagaggccttctttctcacacgtgc

SEQ ID NO: 60260 - DNA, 373 bp, Zea mays
tctatagggagaacacattttgggactaacaaatgttcattttgagaaagacaggatttgtagcgcatgtcaagcagggaagcaagttggtgttcatcatccagacaaaaacatcaggacgactgacaagccactcgagctcctacacatggacctattcggcccgatagcttacataagcatcgacggaagtaagtaccgtctaattattgtggatgattattcttgcttcacgtgggtgttctttttacaggaaaaatctcatacccaagaaaccttaaagggattcttgagacgggctcaaaacgagttcggcttaaggatcaagaaaataagaagcgacaatgggacggagttcaagaactcacaaatc

SEQ ID NO: 60261 - DNA, 431 bp, Zea mays
agcttggcttgaccacacgagagcattctctttcttatcacattcaatggtttaacaacagcggtaagttcaaggtaacaaaaacagcaagggtgcatttttctattggctcttaccatgactttgctgattttgatgtggtgactatggatgcttgctctcttttattgggacgtccttgggagtttgatactaatgctattcaccatggtagatctaataaatatactttcatgcataagggaaagaaaattgtgttgcttcctatgactcccactgaaattgtccactttgaacatgagaaaaagactaatgctaagcaaaaaggtgttttgaactctgaaaatcagcaacctattaagttaaaaactcctactttgctggccactaaatctgatcttgatgagttacatgcctctgttggactttgc

SEQ ID NO: 60262 - DNA, 385 bp, Zea mays
  unsure (1)..(385): unsure at all n locations
taataatagcaagaaggatggctgcactatctaactagggttataaaaatctggagaaggtaatatccacctattgacctaattaaaaatgctaaacccctctgttcactacattaagtagtcttaacccctaattctaaatgctaagttaaggaaaatagaaaggggatataaatgatgaaccagagagcacacccatttttgttaagatgcttagtcaatataattcactggaaaaatgtatcataccctgttgtagtgtaagataagcaagataccttttaaacgaagaacagaggaataacttatgtaaatcctacaaaaatacccctaaagtgaaacctgcccanaccttatgataancaaatgtttgataataagaact

SEQ ID NO: 60263 - DNA, 432 bp, Zea mays
  unsure (1)..(432): unsure at all n locations
agcttgagagaaaatcgcaatcagagagcgggagcagggaatcagtcgaacctggaggctgcaattccgtgcgcaatcagaaaaaacgccgctgtcacctccttccatgtagagcgcgagcgcggatcgaggccgccgtcaaacgccgctgtcacctccttccatgtagagcgcgagcgcggatcgaggccgccgtccgcgagcagtgattccgtcgatttggggatcccatagagcgacttccatagagcgcgagagatttggggatcgagagagacggcggngtaaacggccgcggcgccttccatgtatgcggcggcggctcaccttccatacagcgcgagcgcggatcgaggccgccgtccgcgagcagggacgagcgcgagggagttggggatgcacggtttcaccttccatagagtgacttccata

SEQ ID NO: 60264 - DNA, 370 bp, Zea mays
  unsure (1)..(370): unsure at all n locations
ntcattctcncaagttgatggcactagcccanaattatggcagaaacgatgcgaagaattatttgctatgtatgccactaaaatcactgtttgggtcagagtagcatccgtgcactttgagggggttgctgggcgttggtttcagtctattgaaccacaagtgtcttcctggtcgtggcaacagttttgtcacgctgcgcacgaatgttttgggcgtgaacagcacgagcttgttattcgcaaactgttccatatccgttagacatcttcagtccaggattatgttgatcgtttttgtgaacttattgatgtccttgtcacctatgagcacactacagatcctttgtattataccatgaaattcattgat

SEQ ID NO: 60265 - DNA, 437 bp, Zea mays
  unsure (1)..(437): unsure at all n locations
agcttctaagggagaacacattntaggactaacatatgtttattttgtgaaagacaggatttgtagcgcatgccaagccgggaagcaagttgggacttatcatccacacaagaacatcatgactagtgacaggccactggagctcctacacatggacctattcggcccgatcgcttacataagcatcggcgggagtaagtactgtctagttattgtggatgattattctcgcttcacttgggtgttctttttgcaggaaaaatctcatacctaagagaccttaaagggattcttgagatgggctcaaaatgagttcggcttatggatcaagaaaattagaagcgacaacgggacggagttcaagaactctcaaattgaaggcttccttgaggaggagggcatcaagcatgagttctcctctccctacacgccacaac

SEQ ID NO: 60266 - DNA, 420 bp, Zea mays
  unsure (1)..(420): unsure at all n locations
gaagaggccggtctagatgcatgcttaatggctaagactagcatgggctggatgtggcatcgccgcttagcacatgtggggatgaagaatctccacaagcttctaaagggagaacacgtgataggtctaaccaatgttcatttcgaanaagatagaccttgtgcagcttgtcaagcanggaaacaggtgggaggctctcatcacaccaaanatgtgatgacaacatcaagacccctggagctgctacatatggacctcttcggacccgtcgcctatctgagcatangaggaagtaagtatggtctagttatcgttgatgactnttcccgcttcacttgngtggttcttttgcaggataagtctgaaacccaagggaccctcaagcgcttcctaaggagagctcanaatgagtttgagctc

SEQ ID NO: 60267 - DNA, 435 bp, Zea mays
  unsure (1)..(435): unsure at all n locations
agcttctaaagggagaacacattctgggacttactttgtgcattntgagaaagacaggatttgtagcgcatgccaagcagggaagcaagttggtgttcatcatccacacaagaacatcatgatgactgacaggccactagagttactccacatggatttattcggcccgatagcttacataagcatcggcgggagtaggtactgtctagttattgtggatgactattctcgcttcacttgggtattctttttataggaaaaatctccaacccaagagaccttaaagggattcttgagacgggctcaaaatgagcttggcttgaggatcaagagaatttgaaccgacaatgggacggagttcaagaactctcaaatcgaaggcttccttgaggaggagggcatcaagcatgagttctcttcttcctacaccccaca

SEQ ID NO: 60268 - DNA, 445 bp, Zea mays
  unsure (1)..(445): unsure at all n locations
ttatacnatggacgtgaagagtgcctttctcaatggaccaatcaaagaataggtctatgntgagcaaccttccggctttgaagacagtgagtatcctaaccatgtttatagactctctaaggcgctttatgggctcaagcaagccccaagagcatggtatgaatgcctaagagatttccttattgctaatggcttcaaagtcggaaaggccgatcctactttatttactanaactcttgcaaatgatttgtttgtatgccaaatttatgttgatgatatcatatttgggtctactaacgaatctacatgtgaagagtttagtaggatcatgacacacaaattcgagatgtctatgatggcggagttgaagtattttctatgaatcccagtcaagcaactccaagaggggagcttcttagccaacaaagtcattcagacattctac

SEQ ID NO: 60269 - DNA, 250 bp, Zea mays
  unsure (1)..(250): unsure at all n locations
agcttatgctcgaggcgcattacgggtagactaatatactanacgttacgtgctctagttccacttagctctaacaaaaaggattagctacatgcacaactcgaatcatgaccattttcagttgatcgacattagataaggtagataattacctacatgaattaactaacgtaaccgatttctaaattgagtttccatttattaattaaataatgcgggcacacgcatggaaaacacggggggggggggg

SEQ ID NO: 60270 - DNA, 460 bp, Zea mays
  unsure (1)..(460): unsure at all n locations
tagaatgcccatttcttttctttacttatgactaagggagatgtattcaaaagcccaagctagacaatcctgaattgaccttgcctttaaaaaaccatattgattctggtgaactaacttggtaatcacatgctgcaatcgattagcgagaagttttgtcagcacttttacactcgtattaaggagggagataggcctgtagtcgccaactgaagcaggagagctgtttttggtgatgagagtcacatangaaccattgatgctatgcatgcagattgaaccttcaaagaacttgtcacatagttcatagaattctggagcaatcactggccaacattttctcacaaagtccgtgttaaatccatttggacatggcgatttatttgttggcagattnttaatgacctgatcaatctcttgatgtgaaaaggggatctcaagttctgacaggttaccaatc

SEQ ID NO: 60271 - DNA, 434 bp, Zea mays
  unsure (1)..(434): unsure at all n locations
agtcacctgcngcatgcaagcttgactctcggaatcgaacgaagctccaacttgtatcctgcttcgncagaagaaaaaacttcggaagaaaaaagtatttaatttccacaaattcagaattaaatggccagagtgcgttcttctgctatggttgagcgtgaggggggcgaaactgaaggttcggagaccgttcccatctccgaagcgatgcaaagatccggactggtaacttcggaaaagatccccagtgatgatgcagaacaagcagaacaaacaattgccgaagcagaagaagaagatattgaggaaactgatcccgaagacgattatcgtattgccatgccaagcaagcccagccacttggacttcggaaagtctactgtttcgaaggctgatctctccaagatggtaaagtcgggctttttcagtgaaaa

SEQ ID NO: 60272 - DNA, 421 bp, Zea mays
  unsure (1)..(421): unsure at all n locations
tcggcgacggttaanaaattttggcagcaaaacagtgcaaatagcagttaatgctgtggtaacttcacacctactcgtctgtttatatagtgctgcaggtaaaaaggcgaaacgccagaagttttacaccaggcgggcacccgctcgcactcgctgtacggtggaccgcagtgaccgaacagtaactctgcaaggtggggccgctacgcgcagggagattgaatcgtttctcgacaacgagctcacggaaggtgtttttaagaccttcggcgctccgaagcctaagaaacttttttcacggatcaagctcgttatgaaaaacgatctatcaccgcgaaaggggctactcgtgggtctatgcttcgtcgccgaaggtcttatataaagaagtggtcctcggatgaagctgtttgtataatat

SEQ ID NO: 60273 - DNA, 381 bp, Zea mays
agctttacgctcacatctatggcgctgtatttttcttcgtattattttgggcttctgctactgtgataccgactcgaggccgataatacctgttcacacattatacttcacaaatactgttaaatcatgtttttgaggaccttcgtaagccgaaggccctcaacaggacagctactgcgaaaggccttcctcaatcacggccactagtcttttcccagggcggtccatggtcaagacagtgttattctcgagatagccattgtgtggcaagcggatgcactctaagaccctatattagcgaacgttggatccactgatataccaactgcgcacagcctacgtaatcggtacataacgccccacaattcgcacagatgcatc

SEQ ID NO: 60274 - DNA, 244 bp, Zea mays
actcagcttgcgaagaattctagaatcagaaattgagctatgtcaagcctggcctaagatcgttcatcaaggggcttggttaagatatccggtaattcgactttattagtaatgcgagaaagatcaatatcccccttttgttggagaaccctacgaaaatgactccgcacggctatgtgcttactgcggctatgctctacaggactgtctgccattttaattgcactctcaatatcacatagca

SEQ ID NO: 60275 - DNA, 433 bp, Zea mays
  unsure (1)..(433): unsure at all n locations
agctntatcaaatggacgtgaaaagtgtctttctcaatggaccaattaaggaagaggtctatgttgagcaacctcccggctttgaggatagtgagtaccctaaccatgtgtataaactctctaaggcgctttatgggctcaagcaagccccaagagcatggtatgaatgcctaagagatttccttatcactaatggcttcaaagttggaaaggccgatcctactttatttactaaaactctcgacagtgatttgtttgtatgccaaatttatgttgatgatattatatttgggtctactaatgaatctacatgtgaggaatttagtaggatcatgacacaaaaattcgagatgtcgatgatgggggagttgaagtacttcttgggatttcaagtgaagcaactccaagagggtaccttcattagccaaacgaa

SEQ ID NO: 60276 - DNA, 364 bp, Zea mays
  unsure (1)..(364): unsure at all n locations
acactatgaatactaagcttacacataattgttccttcttccaacctctgaaggatattatgaggaaccgagaagctactggaaggattggaaaatgggctgcagagctcaatgaattntgtattgaatatgttcatagatcttcgattcagtcccaggcgttggcagacttcattgctgactggacgccaggggctcangaggaagaaacgaataaagacaacgaagcatggacagtgttttgtgatggatcttgnggaaccttcngagcgggagcggctgctgtgttggtttcaccctccacagtcaaaacttgttatgcggcaaaacttgattntagttgcacanataacattgccgagta

SEQ ID NO: 60277 - DNA, 436 bp, Zea mays
agcttgaagcagctcaacttcataaatgagttagataaggagaaatacaaagaaattatattgttcaaaacagctcttattcaaagagctagtaacataaacttcagtggacagtatagccattgaagacctgaagctacctagctcaactggtggaagatatgggtgtacatctccaacactgaggtttggtccttctttactaaactagaatatgtgtgcctatttctccttatcaacacaatggtacttattgcctcttaggctggttgagttttttaaatattaatgtgcaccctaacactcaaaacaagtccactgttatagatgaatgatgaaactttaccgacatggccatttcaccacggcccaaacagcgaaatggacatatgttcacaattcatatgacgacagaaataaaccggggcccaaataa

SEQ ID NO: 60278 - DNA, 484 bp, Zea mays
  unsure (1)..(484): unsure at all n locations
aactaagcttctaagggagagcacattttacgactaaccaatgttcattttgagaaagacaggatttgtagcgcatgccaagcagggaagcaagttggcactcatcatccacacaagaacataatgacgactgacaggccactggagctcctacacatggatctattcggcccgatcgcttacataagcatcggcgggagtaagtactgtctagttattgtggatgattattctcgcttcacttgggtattctttttacaggaaaaatctcaaacccaagagaccttaaaaggattcttgagacgggctcaaaatgagttcagcttaaggatcaagaaaataagaagcgacaatgggacggagttcaagaactctcanattgaaagcttccttgaggaggagggaatcaagcatgagttctcttctccctacacgccacaacaaaatggtgtagtggagaggaagaatcgaactctattggaca

SEQ ID NO: 60279 - DNA, 432 bp, Zea mays
  unsure (1)..(432): unsure at all n locations
agctngtagaccctcgtttggatgggaacttctccataaaaggcgcccagaagacggctcagctggcccatgcctgcctcagccgtgaccccaaggctaggcctctgatgagccaggtggtggaggtgctgaagcctctccagaacctcaaggacatggccagctcttcctactacttccagtccatgcaacatgagcgtcgcacagcacttgccaacccatatggcagtcaaagcatgaaagcgcagagcacctttgcgcggaacgggcagcagcccatgaggagcctctcgtatggccctcatgcttccccgtatcgccagtcgccaagacttgacagcaagcggcaatgagtcatggtgcttgtctgtcgaccataacatattttcaagactgaagttgtaaccagaactggtgtatgaactcagccat

SEQ ID NO: 60280 - DNA, 376 bp, Zea mays
tataaaactcaagctgtaaggttcctcatccccacatgagctaaacggttatgttctaaccagcccatgctagtcttagcaattaagcatgcatctagaccggcctcctcttttgcaaaatcaactaaatagagtttgccgtctaatgcacccttaaaagctaatgaaccatcactccttctaaagacagacacatctacatttgtgaataaacaattatatcccatattgcataattgactaatggataacaaattatatccaagtgactcaactaaaaatacattagaaatagagtgctcggatgaaatagcaatctttcctaaccctttcaccttgccttgggtcccatcaccgaatatgattgaatcttggg

SEQ ID NO: 60281 - DNA, 434 bp, Zea mays
  unsure (1)..(434): unsure at all n locations
agcttctaaagggagaacacattntgngactaaccaatgttcattttgagaaagacagagtttgtagcgcatgtcaaccaagaaagcaagttggtgcccatcatccacacaagaacatcatgaccaccgacaggccgcttgagttactccacatggacctattcggcccgattgcttacataagcatcgacgagagtaagtattgtcttataattgtggatgattattctcgcttacttgggtgttctttttgcaggaaaaatcacaaacccaagagaccttagagggattcttaagacgggctcaaaacgagtttgaaataaggatcaagaaaataagaagcgacaacgggacggagttcaagaactctcaaattgaaggctttcttgaagaggagggcatcaagcatgagttctcttctccctacacacctc

SEQ ID NO: 60282 - DNA, 318 bp, Zea mays
  unsure (1)..(318): unsure at all n locations
taatgcccttaaaagattgtctaattntgttaagggtaaggctcccatggctcangataacgagggttacattntataccctgttggttatcccgagcacaaaattaggagaattcattctaggaagtctcactctggctctcatcatgcttttatgtataagagtgaggcatctagctctagccaatcaacccatgttaaattgcctaaaaagaagtctcctatagcatcgaatgaacctaatatttcatttaaggcttttgatgcttcttatgtgctcactaacaaatcangcacaagtagtgccaaatatgttgg

SEQ ID NO: 60283 - DNA, 432 bp, Zea mays
agcttgtgaaggttcttcatccccacatgtgctaatcgacgatgccacagccagcccatgctagtcttagcaattaagcatgcatctagaccggcctcctcttttgcaaaatcaactaaatagagtttgtcgtctaatacacccttaaaagctaatgaaccatcacttcttctaaagacagacacatctacatttgtgaataaacaattataacccatattacataattgacttacggataacaaattatatccaagcgactctactaagaatacattagaaatggagtgctcatttgagattgcaatcttgcctaagcctttaaccttgccttgattcccgtcaccgaatatgattgaatcttgggaatctgtattcttgacgtaggaggtgaacatctatttctcccccgtcatgtggtttgtgcatccg

SEQ ID NO: 60284 - DNA, 366 bp, Zea mays
ttgagtttgagagccctatattgcataggaccagtgactctctcaattaatgactttgccacccagatttgtctaggtctactcttatttggtggacctaggaatgtaaccttaatctttccatttgcaaactttcttagaacatagtgagcattgaaagcaaatggtcttgaatgcttatgcaaaggagttggtggtttagctttgcagttgtgggcaaaatgaccttcatttccacactcaaagcatttgataggcttgtgagtctgctttggcttgtattgagtgatagctttcttttgcacaaaagcattgtatcccataccactcttgttattctatataacagtgctcataagcagctca

SEQ ID NO: 60285 - DNA, 426 bp, Zea mays
agcttctcctgaacaagtgctgcacttacctctgagtgcgaagctgccacatataacaacaaaggagcccctggcgttggtggagttaatgttgttaaatctatcaaatattgcttcagttcctcgaaggctttttgttggcttggtccccattgaaagacttcggctgatttcagcacttcgaagaatggtaaatttctttctgcagatctggatataaatctattgagagatgccagcctccctgtcaatctttgggcccccttttttgtagttggtggctccattcgaagtatagcttcaattttacttggattagcttcaattccctttgttgaaaccaggcatccaagaaatttccccttctttactccgaagacacatttttctggattcaactttaggccagcttgtctaaaactggcg

SEQ ID NO: 60286 - DNA, 433 bp, Zea mays
  unsure (1)..(433): unsure at all n locations
agctntaagtaagtagaaacctaattaatgtcttataanaactctaatgaagaagggaatggttattttctctcacagataaataggtattaacttaattgaatatacaattaatttatcaagggtatagtgaactgtgcacagtgaaaaacaattgtgaaacatcataatcaagtagactaatattagaatttaaaagtgacattgggccatgaaatacaagaggcaaaattatttatggtaggagagatataacaccgagacaaaagcaaaaataaaaaacacatcatgaaaaaaaaacgggggagggacatggaagtaatatatgacctttccatgctgcacttgggctgtttttatttcagccctcaaagtctcaattgtcacaacatgtgcctcaagttgttccctgagatcctgaatcaatttaagc

SEQ ID NO: 60287 - DNA, 360 bp, Zea mays
  unsure (1)..(360): unsure at all n locations
tctaaagggagagcacattntgngactaaccaatgttcattttgagaaagacagggtttgtagcgcatgccaagcagggaagcaagttggtgttcatcatccacacaagaacatcatgatgaccgacaggccgcttgagctactccacatggacctattcggcctgatcgcttacataagcatcggcgggagtaagtattgtcttgtaattgtggatgattattctcgcttcacttgggtattctttttgcaggataaatctcaaacccaagagaccttaaagggattcttgagacgggctcaaaatgagttcggcttaaggatcaaaaagaatagaagcgacaacgggacggaggttaa

SEQ ID NO: 60288 - DNA, 439 bp, Zea mays
  unsure (1)..(439): unsure at all n locations
agctntatcaaatgaacgtgaaaagtgcctttcttatggactaatcaaggaagaggtctatgttgagcaacctcccggctttgaagatagtgagtaccctaaccatgtctataagctctctaaggcgctttatgggctcaagcaagccccaagagcatggtatgaatgccttagagatttccttattgctaatggcttcaaagtcggaaaggccgatcctacgctctttaccaaaacacttgagaatgatttgtttgtatgccaaatttatgttgatgatattatatttgggtctactaacgaatctacatgtgaagagtttagtaggatcatgacacaaaagttcgagatgtctatgatgggggagttgaagtatttcttatgatttcaagtgaagcaacttcaagaaggcaccttcattagccaaacaaagtatact

SEQ ID NO: 60289 - DNA, 461 bp, Zea mays
  unsure (1)..(461): unsure at all n locations
cttaagtcacctgcggcatgcaagcttgtcannaatgttttgaagaactcaatattttgttttctactgcaccaatattggtgatgccagacatccataagggatttgatgtgtattgcgatgcatcacaccttggacttggatgtgtgctaatgcaagaaggaaaagtgatagcttatgcttcaaggcagttgaggaaacatgagaagaattatcctacgcatgatatggaactagctgccgtagtgcatgctttgaagatttggaggcactatatgattggaaacaagtgcaaaatcttcacggatcacaaaagcttgaaatacatattcgctcagaaagaactcaacctatgacagagaagatggcttgagttgattaaggactatgacatggaaatacaatatcaccccgaaaaagcaaatgtagtagctgatgctttgagccgcaagggtcaagtg

SEQ ID NO: 60290 - DNA, 424 bp, Zea mays
  unsure (1)..(424): unsure at all n locations
ctaaccacatgtgataaccagtcatcagtgcaagtatgaagccagtgtcttggtaacacctgaggtgttacaactagcccatgttggaatgaagaatcttcacagcttctaagggagagcacattttagaactaacaaatgttcattttgagaaagacagggtttgtagcgcatgtaagcaggaaagcaagttggtgcccaccatccacacaagaacataatgacaacggacaggcaactcgaattactccacatggatctattcggcccgatagcttatataagcattggtgggagtaagtattgtctagtaattgtggatgactattctcgcttcacttgcgtggtctttntgcagganaaatcacaaactcaagagactttgaagggattcttaagacaggctctaaacgagttcggatta

SEQ ID NO: 60291 - DNA, 406 bp, Zea mays
agctttgttccagtgcacgcaagaccacgaataatatctctatgcatatgtccgaaggttcttgtgtctgagagcacaagcgcctacagtgcccaatgaaatcatcattgaggccatgatcaaggggcttctgccaggacctacggctcagtattttgccaggaaacccccttagaccctaaagaagcttcttcagaagatggatgagtacatccgagccgataatgattttcgccagagaagggaagaagcttatatgttttctaagatgactaggggctttggaagaagaatccatcctaggcatgtcagatcaatccacaactctagttagagtgaggacaaaggaaaccaatttcaaaggccacaacatagctcacagtcttaagggcaacagcaaagcttc

SEQ ID NO: 60292 - DNA, 438 bp, Zea mays
agcttgtcgtacatagcggcaaatgcgaccacgtattattgtttttagaggttgaactggcagtcgccaagtttcttctcgttgtcgatgagcgaccccaacgcgagtgcctcctgctaatggtgtttgtttggggttttcaagtaagaaacatggattcatgtttagcgttggtttataaaaatgactcacaagtcagatccatggaaaaatattaccaagaataaatatcacgcatgcaaaaaaggaatttaagttgaaaacattattcaaacgaaagaaattgcatgcaaatctctttaaatactactccctccatccaaaaatataattcaagaatttcggtgatacttatctactactacgcattgtgcaagggtagcaggtgagcttgagaagagatgtagtaaatgtgtttcctgttatagatgaagatat

SEQ ID NO: 60293 - DNA, 419 bp, Zea mays
  unsure (1)..(419): unsure at all n locations
tgtcagcaatataagcacaaaagagagaacgctgcttcggcttatcatctgaagcctatgctcttgtgtgaagatatagcaaaccaaagagtatggctgagatctcagttatctggtgaacaagaaaagactctgctaagattnttgttcaacaacaaagatgtcttcgcttggacagctaacgatctctgaaagtcgcctagagggggggtgaatagggcgaaactgaaatttacaaagttaatcacaactacaagccgggtcagcgttagaaatataatcgagtccacgagagagggtgcaaaacaaatcgcaagcgaataaagagtgtgacacgcggatttgttttaccgaggttcggttctcgcaaacctactcccccgtgaggaggccacaaaggccggatctttttaacccct

SEQ ID NO: 60294 - DNA, 429 bp, Zea mays
  unsure (1)..(429): unsure at all n locations
agcntttgatgacgagcgccatttcctcattgtcgtgtttggacgcgtctattggttgacgacttggtgtagcctcctccttcttttcctccgtcgccttgaatgcgacgggttgagcttcggatgtggtgggttcgtcaagctcgttgatctttcttgagccttcgatcatgcactcaaaacttacaaaatgcccgataacttcctcgggggtgattttagtatatctaggattaccacgaattaattgaacttgagtagggttaaggaaaataagagatcttagaataaccttaaccacctcatggtcatcccactttacgctcccgaggttgcgcacttggttcaccagggtcttgagccggttatacatgtgttgtggctcgttccctttgcgaagccggaaccgaccgagccccccctcgatcg

SEQ ID NO: 60295 - DNA, 251 bp, Zea mays
tctacttcaagcattcatccagttttccatgtgtcgcttttaaagaaagatgttccacctctagtctccattggtagttgcctacctctttggatgggtttcaagcacctgaacaagttctgaagcatcgtgttggttctgatgggaagtcgcttgtgcttgtcaaatggtctgagatgcatccttctctggccacttgggaggatctcatggcaatgcaaccagcttttcctcacgcacctgcttggggg

SEQ ID NO: 60296 - DNA, 434 bp, Zea mays
  unsure (1)..(434): unsure at all n locations
agctngagaaaatctttccacctgtcttctttgatgtcatggtgcacttgagtgtccatcttcccgatgaggcaatgcttagaggacctgttcagtatggatggatgtacccaatagaaaggcgactaggaattttgaaaaattttgtaaggaacaaggctaggccggaaggatcaattgctgaggcatatatggcaagtgataccttaacattttgttctangtacatgaaggatgttgacactagatttaaccaggatgatgatagtggtacagaattgccattgcctaatgacatgtttgtttttaagcatggtgctactcttgttggagctactaagactgagtacattgatgatgctatcatgaataagttagtttggtatgtgctacataatgctgatgaagtacaggaatatttgacgtaagttagt

SEQ ID NO: 60297 - DNA, 437 bp, Zea mays
agcttcaacatcgttctcaagaaattgtgcgatcaacactacactgaactaaggcgcaagactgaaccagtataactcatcatctcacaccccctcttttggaatccatgtgattcaccattcagagtgagttcgcgctagcaacccgcaccgaacataaattttattgtctcccgatttccgaaaccgcgatagttacgtgccaggcaggggaccgttagattgccaaaatacattcaccactccgatggcccagtcatcagcgctcaccagcagcgagacttttgctccaggaagtcgcatcgtgttcggctccctcgactttctcgccacagccaccagcgagctccacctcgccaaccagcactactacaggaaacctctgtacaggcggtctgattagcctctacacaggcggttccaggaaccgcttgtgg

SEQ ID NO: 60298 - DNA, 372 bp, Zea mays
gaacgcatgtcaagcaagaaagcaagttggcactcatcatacacacaagaacatcatgacaagtgacaggccactggagctcctacacatggatttattcggcccgatcgcttacataagcatctgcgggagtaagtactgtctagttattgcggaagatgattctcgcttcacttgggtattctttttgcaggaaaaatctcatacccaagagaccttatattgattcttgagacgggctcaaaatgagttcggcttaacgatcaagacaattacaagcgacaacgggacagagttcaagaactcacatatagaaggctttcttgaggaggagggcatcaagcatgagttttcttctcctacaccccacaa

SEQ ID NO: 60299 - DNA, 435 bp, Zea mays
agcttcttttcagcttctccaaagtaacctcttttcttcatcatgggcacgtcggcttcagacacagtatatttctcaaaatccagatggctggattttgatgggatcaaaatgatataatcttcttctttttcatcaacattttcttcttcaatatcagcctgctcagcttcggcagcagaagtaccttcgtcaacgattccctctgtcacaactaagcccgattgtctcatgacttcggaaatcagagctgtctcagtggcctcggtctcctctccttcacgagttacccttgcagtcgagcgtactctggccatctgatgggtcttttgcggtttttacgaagttgatgtcttttacagttttgacgaagctctcttttttgatgaagctctcttttttgacgaagcgaattcaaaatgatggttcgctcga

SEQ ID NO: 60300 - DNA, 376 bp, Zea mays
  unsure (1)..(376): unsure at all n locations
tcgggagaccaatactcttcgacaaagactgataaccttctctttagttctgnctcggaggcaacctaaactttcatcgtcaataccgccgaagagtagcgctcctggtttgtaaccgcacgatatagcataatgttncaactcttccttctcagcttcagataactcctgacctattatatnttggaaatcgaaatccttttcctccgaagtatcttcggctttctccttttcttttccaggcactgtggccagggtctcttcggcgggtgtagcagcttcttccgtggccatattcagaagcattttatcaatatcagaaaatggtttctctagatttgtatcttcggccgatgaagcttcggtagttccagct

SEQ ID NO: 60301 - DNA, 453 bp, Zea mays
  unsure (1)..(453): unsure at all n locations
gaccttaagtnacctgcagcatgcaagcttgngaaggctcttcatccccacatgttctaatctacnatgccacagccagcccatgctaatcttatcaattaagcatgcatctagaccggcctnctcttttgcaaaatcaactaaatagagtttggcgtctaatacacccttaaaagctaatgaaccatcacttcttctaaagacagacacatctacatttgtgaataaacaattataacccatattacataattgacttacggataacaaattatatccaagcgactctactaaaaatacattataaatggagtgctcatttgagattgcaatcttgcctaagcctttaaccttggcttgattcccgtcaccgaatatgattgaatcttgggaatctttattcttgacgtaggaggtgaacatcttcttctcctccgtcatgtggcttgtgca

SEQ ID NO: 60302 - DNA, 381 bp, Zea mays
  unsure (1)..(381): unsure at all n locations
agtttgagagccctatattgcataggaccagtgactctctcaattaatgactttgccacccagatatgtctaggtctactcttatttggtggacctacgaatgtaaccttaatctctccatttgcaacctttcttataacactaagagcattgaaagcaaatggtcttgagtgcttatgcaagggagttggtggtttagctttgcagttgtgggcaaaatgaccttcatttccacactcaaagcatttgataagcttgggagtctgctttggcttgtattgagtgatagctttcttttgcacaaaagcattgtatccaataccactcttngtatttttcataacagtgttcataaacagctcaatttggaggtattgaccc

SEQ ID NO: 60303 - DNA, 428 bp, Zea mays
agcttggaggcgtcgatggggagcctacttgttgtatactcttctttcttctccgtcgctttgaatgcgacgggttgcacctcgagtgtggaggcgccaccttgctccaagttgatgatttgtttgaagcctttgatcatcaattcaaagctcacaaactttcctataacctcctcgggagacattagcttgtatctaggatcaccacgtattaattgaacttgagtaggattacgaaatacgagtgatctaagaataaccttgaccatttcatggtcatcccacttggtgctcctgaggttgcgcacttggttcaccaaggtcttgagccggttgtacattgcttgtggcttctctccttcgttgaggatgaatcgaccgagctccccctcgatcgtctcccgcttggtgatcttggtcacctcgtc

SEQ ID NO: 60304 - DNA, 438 bp, Zea mays
  unsure (1)..(438): unsure at all n locations
tctagacgtccttgactcgggccgagggcctcatcgcctctatcgccccgatcttctccgggttcgcttcaatgcctcggtacgaaaccaggaatcccagtaactttccggcggaaatgccaaaaacgcatttgtctgggttcagcttcgtgcgggttgctctcagcttgtcgaagactaaggtcaagtcttccactanggtcgaccctctcttagtcttgaccacgatgtcatcgacgtagacttctactttgtccctaatcaggtcctcgaaagtcttactcatcgcccgcacaaatgtaggcaaggcatttntcagaccgtacgacataacaacatagcagtaaagcccatccactgttacaaaagcagtatgcttcctatcttccctagacatctagatntgatggaaaccagagtaagcgtctaagaataata

SEQ ID NO: 60305 - DNA, 402 bp, Zea mays
  unsure (1)..(402): unsure at all n locations
agcttgtggcgaaatagccacttgccggtgtctcacgttggtgcctggcggacacggcaccaggtcccangtgtggttggccaggagggccgcgtactcctactccatagcgcgtcaccagtgtgggtcggcgagagcggtgcgaacgtatgaggggaccggggaggcgtctggtggagtggtaatcgtattagctgccaaaatcagccggtcgacaggtcgaagaacgccggctgctcgccgggtcaccatcgggtggactgcccggagtcgcggtggatggcgatcgggtggtacaccggtggttcgtggcggtctaccatgacatcgggggccgcgggcgtggtcgaatcacggcggtgatagacgacgactgtgtcggcgaagcgcaccgtgctcgtc

SEQ ID NO: 60306 - DNA, 306 bp, Zea mays
tcatgcatctagaccggcgtgctgttttgcctaatcaactaagtaacagccgcctgctgatacacccttaaaagctgatgaaccatagcttcttctaacgacagacacgtctacattagcgaataaacagccagattccatatcgcctaattgactaaccgattgcgcacgatgtccgagagactcagctcataacacattggaaatcgagcgctcatttgagactgcaaatctgcctaagtgtttcaccttgccttgattgccatcaccgaatatgagtgaatcttgcggatccttgttcttgac

SEQ ID NO: 60307 - DNA, 430 bp, Zea mays
agcttctccattcatagcttcagaactgatttattcttcttccagaccgtgcctttcataccgtgtgcaccttcaccttaaagtcgaaggttcctgttacagtatattatactttgaaaacatgttagtcgtgtttttgaggaccttcggaagacgaaggcccccaacagtagcccctcgcagtattaatttgttcttgtatctaacaaattcagactgcgacgtgaacgaaggcctttaatcgacggtccgaaaaaacaccttcccatcgctagaatagcgaaagtcaatgacaaatggggcccgccaagttgcaatgcagtaggcgtataaatagaaacccacagcagcatcatttgcaacgccatttttgttgcttgtgttattttctcaaatttttaactgttgctgtcagctctcgcttgatttt

SEQ ID NO: 60308 - DNA, 391 bp, Zea mays
  unsure (1)..(391): unsure at all n locations
tngaaacagntaaaatacttatgcgcctagcgcgctcggctacctcttcgggctcgttggcttcttctcgggcttcatgagtttctttctcactcttctttatagcttcatcggctaattctcggccgcctttcatccaaatgttggagtaaaagttcccgctcaacagagatgccttagccgaaggatccttcgtgttctccatagtgaagatggcctatgtttgggttgcagctctaacatgttcacagccagatatttccaaaattgctgcaacctccctagcaccggcaaagacgcagaaatcaccacggtcactaagaatctcttcaaggctttggcttctcgccgatcattcgatattcttcggatcgctctataattttgtcga

SEQ ID NO: 60309 - DNA, 435 bp, Zea mays
agcttctaaagggagaacacgtgataggtttgactaacgtgcaattcgaaaaagatagaccttgtgcagcttgtcaagcaggtaaacaagtgggaggagcacatcacagcaagaatgtaatgaccacatcaaggcccctggagctgctgcatatggacctcttcggacccgtcgcctatctgagtataggaggaagtaagtatggtctagttattgttgatgacttttcccgcttcacttgggtgttctttttgcaggataagtctgaaacccaagggaccctcaagcgcttcctcaggagagctcaaaatgagtttgagctcaaggtgaagaagataaggagcgacaacgggtccgagttcaagaaccttcaagtggaggagttccttgaagaggaagggatcaagcacgagttctccgctccctacacaccac

SEQ ID NO: 60310 - DNA, 436 bp, Zea mays
agcttgtgcaccggatattctggacgtcacaccggttcttccggtggcttctctccaccagtgttacctggaactagtcgttgggctcctgttccctggtgcacctgtcagtctggcgtgtggcaccggacaatccggtgctctcagccgatagtccgcgagttgcaacacttgtcttcgtttcttggacttgcttgatacttgttgatcttcacttgtgatcttcataatgtcttattttgaagtgttgctttactcattgccttagtccaagtaactttagcatcctgtgaactataatcataaacactaggaaatacattagtctacaggttatattgatcatcaaacaccaaaatctactgagtcaaatggcccgggatccattttccttacaccgaccctcgacctctatatacctgggctcggcgctgat

SEQ ID NO: 60311 - DNA, 454 bp, Zea mays
  unsure (1)..(454): unsure at all n locations
ttcaattgttaatgatgttatgttacaactaannaggaatatgtgtnacattataagggttatattaatttctttgacatttcatttgatattgatcaactataatatcggaaatgtaggattaggcacaatgaatagtagattgattatacgagatatggtggaggtggcttctcctgacaggtgcangaggagcacgtggtgcgctggcagccaccaccatggaagtgggggtgtggatgaccattgcatatggttcagttccttcagcagcatgtttgttctgggcttccaggaacatggtggaagggacgaccagatntaatgtgaaggccgatggagacgaacatgtcgttgaggctgcgaattangatgaggacgagggtacggttaggaacatattcaccaaggtcctcanggcgtcngccacgcccttgatgtgccgatagtaatc

SEQ ID NO: 60312 - DNA, 439 bp, Zea mays
  unsure (1)..(439): unsure at all n locations
agctngtgaatggcttcccgaagcaacagaagctgcttgttgattgctcatatattctggtatgtaaggagagtagcacgaagcagtgtgtaaaatctgcttcggctggttctgccgagcttctccttcagcaatcttttttgcttctgaatggtaatctggcacgttgttgtagtgtgacccttatcttcaccacagaataagcaataatttttcctgggttgatccacatatctttctccgaagcccctgctacttctgccccttggagctggcggcctgaaagagctctgctgctgccttgaagattgtgagctttgttgtggcctctgaagctgacttcctctgtcatcattctgactggagttgtggattgatctcacatgtttagggtggattcgtcctccgaagcccctagtcatctcagaaaacctataag

SEQ ID NO: 60313 - DNA, 404 bp, Zea mays
  unsure (1)..(404): unsure at all n locations
tctatattatgaattgccttggaatcagtccagctttcttctgcccttctggcagcttcctgactcccatgaatagcaataggcccttggtccgacagtatcttcatgcagagataagctgggtgaagaattgcttcaaaagcatttatggtaccacgaccaatgatggcgttgtatgggtattccatgtcaacaatatcaaacacaatttgctcagtccttgtgttattaacaaatccgaaggttaccggcatggtaatcttcccgagtgccacaatctgccgccctccgaagccacatagagggtgcgtagcatcatgaatcttgtcttcaggctcctgcatctgtctgaaggctntggcaaatataatgtcagctgcactgcctgtgtcaactangacatt

SEQ ID NO: 60314 - DNA, 437 bp, Zea mays
  unsure (1)..(437): unsure at all n locations
agcttctctctatcatcatcaaccttaacatagaaccattccgatttccaccctgctgcccatttgcttcgatagctaatcacaggacactntgaagttttccgatgagcaaaattatatcaaccaaaggtgtcatgtaatccatcctttctagcctttgtctgatagtgcagttcatgaactctgcaaaagctgtccgcaaacggttccaccgcctggcttctgagtgcccaaatataaacattaaacctaacgatagcggtaggggttagctggtgaaaatagattccaaaattattcaatatctctgcaataatcccgtgaagggggaatctcaacccagcctttaagaagcttttaaaaataacaatttcatctttctccggctttggggtagtctcttctcctccgaagcgtagtagcttcttttgattatc

SEQ ID NO: 60315 - DNA, 378 bp, Zea mays
  unsure (1)..(378): unsure at all n locations
taaatactttagggaaatagttataaaatatccctaaaaacaaagttgaatcacctttatacccctgggataccagaaaccataattggaaccctggaaaaccctaaatccaaaccctatgggcctatgtgcaaaattagtccacttttggactaaagtgcaaaaaccaagtcaaataagtatcttaaatcatntgggtcacaaatatgtgagtttgcaagataaaccctgagaattggacttaaaagcaaaatggacctcaattaggttctattctaagtctgaaattacagagttttggctcaactatggaagccttgaactttcaaactatagaatttttgccctaaatcaccacaccaaagttgtagatcaatc

SEQ ID NO: 60316 - DNA, 436 bp, Zea mays
  unsure (1)..(436): unsure at all n locations
agcttctaaagggagagcacattntaggactaacaaatgttcattctgagaaagacatgatttgtagcgcatgccaagccgggaagcaagttggcactcatcatccacacaagaacatcatgacaagtgacaggccactggagctcctacacatggatctattccgcccgattgcttacataagcatcagcgggagtaagtactggctagctattgtggatgattattctcgcttcacttgggtgttctttttacaggaaaaatctcataccccagagaccttaaagggattcttgagacgggctcaaaatgagttcggcttaacgatcaagaaaattagaagcgacaatgggacggagttcaagaactcgcaaattgaaggctttcttgaggaagagggcatcaagcatgagttgtcttctccctacacaccaca

SEQ ID NO: 60317 - DNA, 390 bp, Zea mays
  unsure (1)..(390): unsure at all n locations
tgagtcagtccttttacaaaggataatggatgctcacaatgataatgtntgtatgaaacacatccatgagaagatagaagccggaaaagccaaatgtttcataaaggatgatcaacgcattgtatggcttaataaccgcatagttgtgccgaataatgaagagatccgcttacatatattagatgaagcacatcttattcgctattctattcatcttggaagcactaagatgtatcaagatctgaaacaacattattggtggactggatgaaaattgaaatcgcacgctatgtggcaatgtgtgacacatgcagacgcttttaaacatacatatgaagactgctggtccattacaatctttaccgataccaacatggaaatggtaagata

SEQ ID NO: 60318 - DNA, 435 bp, Zea mays
  unsure (1)..(435): unsure at all n locations
agcttgccctgatcatcgtctacaatattatctctcttgaggctcaatgcaaagctcagtttcctgaagaatgttattggatgctctgaggctgagctgggcaatatggatatgtttggttgactggcccagagcacggccaggtccatttgaaacagtgccacaatgtttggtatcttggcccagcgcacgggtctggctgagtggagccagatgcgaattcgtagccaggcccaaataaaacgcacggatctggcttcgctcctcagtctggtcgcactgttctagggttttcactccactcgcagcagccgcagcctggcctctcgcctctcgagctcactcgcaggctcgcagccgccgccgtggcgcttgcctctcgcctctcgcctctctcgctgccggnggacgaactcgcccagacccggcgaacga

SEQ ID NO: 60319 - DNA, 406 bp, Zea mays
  unsure (1)..(406): unsure at all n locations
acctatgaaactcagcttgaaaaatgttaagaatcactacanaaactgattgcattttctgatacgntaatcactttgagccactcacagtttgccatacagaggaacaaacggtgtagactgttgagagggcactccttggtctccaaagaaaattctcccagaactatcttccttaaagcacatcgagaaggaattctgaactagtccagctctagcaaggaaactatgaactgaaatatctgccattccaaggccaaggagtccatccggtgcaataccatccagataatcaccactttgcttttgaccacagctataccagaaggacacacaatgtcagtaaaactaagtgccacacagtcatgaaaatcatgacaatcaaccattgagcagcatctctaac

SEQ ID NO: 60320 - DNA, 433 bp, Zea mays
agctttcttcggcggcatgacgaatgtgatgtttgccgaagatgttcaaaagctcaaaaaatggaagtgagttcaccagaggtgggcgccaatgttggggacttgttctcaaatgctatgaatcaagaacaaggcaacacaaaatgttaaatatcaaaacccttcgtcctctggatcattatttcccttcggatataatggatttcggacgaaggtcatgaaggacaaaccttcatgatcatgataaaagataaagaacattcaaacacataatacagaaaataacataatctctataaacattgtcattaatttatttttacttatattacttatgtaaacaatggcaaattacaaatgtaccttcgacttgaaggaatgtgaatacaggtgtgatgtaaaagcaaatgtcaaatcagcgtgtccagtacag

SEQ ID NO: 60321 - DNA, 431 bp, Zea mays
  unsure (1)..(431): unsure at all n locations
tctaaagggagaacacgtgatatgtttaactaatgtgcaatttataaaagatagaccttgtgcagctggtcaagcaggcaaacaggtaggaagctctcatcacaccaaaaatgtgatgaccacatcaagacctttggagatgcttcacatggacctcttcggacccgtcgcctatctaagtataggaggaagtaagtatggtcttgttatagttgatgactnttcccgcttcacttgggtattctttttgtaggataaatctgaaacccaagggaccctcaagcgcttcctaaggagagctcataacgagtttgagctcaaggtgaacaagaaaaggagcgacaatgggcccgagttcaagaaccttcangtgtangagtaccttgaggaggaagggatcaagcacgagttcntcgctccctacacaccac

SEQ ID NO: 60322 - DNA, 432 bp, Zea mays
agcttccactcattatgttctgggttggcgtctcttccgcatgcatcggtggtgttggtgtgcagagcgagccgcaccgcatgcatcacgtacagcggctggtggcctggctgcctatccgatcgagggccgagaccaccatgtatgtgcctctctggccgtctggcacataactgccggccggccggtgcagctaccgcggcgcggcatcgatgctgccaaaacccggccggtaagatccgtcccagggggccacgttttactgcgcacccaccacgactacacgtactacggtcgtgggcctgccgcggttttttcctgccgcgaatgatggatgggggtgggagacacggcccggccggtccccggctcataagatggtcgcagcagcttccacctgggccccccgctgccccggcccggcatgcatgc

SEQ ID NO: 60323 - DNA, 421 bp, Zea mays
  unsure (1)..(421): unsure at all n locations
atggagttcctaagacattagtgtctgacagggataattgtttcactagccaattctggaaagctntatttcagacattgggaactcagttggctttatctacagcctatcaccctcagtcagatggcaaatctaaaagaattaaccaatgtgttgaaatgtatttgaagtgtgccatttatgatactccaaagaaatggaagcactggttacccttaactgaattatggtacaattcttctttttattcagccattggatgttctccttttaaggcactatatggctatgatctcagctattttgtggagtttggggttgctggtactggtgagcatagtgtggatgagatgttggctgacacgcanagatattccaagctctttgcagacaaagtggtacttgctccaatcatatgaaa

SEQ ID NO: 60324 - DNA, 285 bp, Zea mays
  unsure (1)..(285): unsure at all n locations
tgacgcatatgaagcgtgtacctttnctatgcagcttgatgatcactctctgcacgtatcgaaagttatcatgtattgaccggctctggatgaacgcggtctgagccttggatagtaattcggtcattcttggcgcaagcctatatgccatgattattgttataatatttatgaagctattgatcaagcttatcggcctaaacctatcaactctgtcagcaatttcccccttgggtatgatgatgatgattgcttcgctgaccaaaagcatgcttacggatctat

SEQ ID NO: 60325 - DNA, 433 bp, Zea mays
tagcttctaaagggagaacacgtgataggtctaaccaatgttactttcgaaaaagatagaccttgtgcagcttgtcaagcacgtaaacaagtgggaggagcgcatcacagcaagaatgtgatgaccacatcaaaacctctggagctgctacatatggacctcttcggacccgtcgcctatctaagtataggaggaagtaagtatagactagttattgttgattacttttcccgcttcacttgggtattctttttgcaggataaatctgaaacccaagggaccatcaagcgcttcctaaggagagctcaaaacgagtttgagctcaaggtgaagaagataaggagcgacaatgggtccgagttcaagaatcttcaagtggaggagtaccttgaggaggaagggatcaagaacgagttctccgctccctacacac

SEQ ID NO: 60326 - DNA, 275 bp, Zea mays
tatgaagagtcttcattccacatgggctagtcggcggtgttattacctacccatgttagtcttagcaattaagcaagtgtcgaggtcagctctatcaaaattcactaagtacagctgaccctctaacactcccttaaatgctattgaatcatcacttcttctaaagatagtgacacctacctctgtgaatagacaagtggtgcccaatttgcataattgagatacagaaagcaaaatggtatctaatgaatctacaagaaaaacattggaaatag

SEQ ID NO: 60327 - DNA, 431 bp, Zea mays
agctctaccctggggactggactattatttggttacgggaggtgtaccttatgcagttgaccatttccaacatttgtgtaatgaggactctagggagaagcctcgtagtgagaccctggccattcacctcggaagtgaatacgggtctagctaacccgggctagaagggaatcgcgactcatgggtaaagatgcgccacctctgcagagtgtaaaactgatatatcagccgtgctcacggttatgagcagcctggactcctcacatgataattgaacttgaagatgaaaataaatcgagatccgatgatctgccaatggtttgcttaagtggtttcacttaagtattgttgatatattcttatacctctgtttaaatgggatacttgggattcacacttattagtaagacaggtgttgctaataaaatgct

SEQ ID NO: 60328 - DNA, 161 bp, Zea mays
tctttagcaatagtgctatatatctcgatatcgccctttcgatcggcatccctaggagaatgatgccgaaaggatgtgctcttagagcagctgtgctcaacgccattgtcggccatatgggacgcactctcattatctcataactcctggactttggatga

SEQ ID NO: 60329 - DNA, 429 bp, Zea mays
agcttagtatttatttgtggagcctcaaattcttataacaggctagaatagcaaatggcaacccactgtaatttttacagaatttttggaaaatattaaaccactgtcgtagttcaaacctcactagaaaccataagtagaaattaaaggaaggaaaaggataatggtaattaaggtcatcctaaaacccttgtaatttgtccactgaaatgtataaagacaatacaagtccactatgttatctccaataaaaacctaagcctaaaaggtaatgagtataaaccacttggagcctcgcatgactaagaaaccctaagttactccttaacttagttttctttttagcataatgttatttaatcctgcataaccatgacatacatgttcattgcattcgatagactgtaaccttgctgacggagagtacgt

SEQ ID NO: 60330 - DNA, 385 bp, Zea mays
  unsure (1)..(385): unsure at all n locations
tgtggaggactagatcactgaagcatataagtttctggattataagtggtcacccaagttccgctgatgaagcaccacaagaccaatcaaggaaggaatccatgtgggagttcgcaagagaaaggtttgcgtgttggcatcgatgcttcttcaataagctagttgccaagcgaaagctagaagcctgaagatgatcttgagtagccagaatcagcgtttgcaatcagcagccggatgcttcgcaagggccagaatttgttgaagttccatctcctcgaagagtctgcaaagtgaagatatgtagctgaagtaaagctatacccataacccttttaagccaaatctcgaggacgagattcattntaagtggggtagatntgtagca

SEQ ID NO: 60331 - DNA, 437 bp, Zea mays
agcttatatctcaacctgagaggaaagcttatcctatggggtgatgtgttagtttgagctttggtgatgtgttagtttgagctttggtgatgtgttagtttgagctttggtgatgtgttagtttgagctttgctagtgtgttattcatatgcttcttgcagtattatatgtgttgcatcatatggactagtgcttccgttgctatgaattaattggcatctattgtgttcattctgaaatagacagtcatgttgataatgatgcatatggtttatggtgcttaagattgtgtgttcattctgaaatagacagtcatgttgataatgatgcatatggtttatggtgcttaagattgctttaaattagtatctgagtttaaattggtatcttaatggtgaatagtggtaggttgatattcctgtgagatatccactaaa

SEQ ID NO: 60332 - DNA, 439 bp, Zea mays
  unsure (1)..(439): unsure at all n locations
agcttggacagtgttntgcgatgggtcttgttgagccttatgtgcaagagcagctgcggtcctagtggcaccttcaaaagttaaaacatgttatgcaatcaaactggatttcagttgcacaaataatattgctgagtacgaagcacttttattggggcttcggaagctaagggcaatgggaataaaaagggccatcttaaagactgattctcaagttattgctggccatgtggataaaagtaacaaggcacgagatccgaagcttgaaagatatctggatacagttcgaaggttggaagcttccttcgaaggtttttctattaagaatattccaagaggtgaaaatggctcaagggctccctttaccctcggaagtattttttgagacaataaaagcaccttcgattgagctcatggaaagagcagtgcttactatttc

SEQ ID NO: 60333 - DNA, 445 bp, Zea mays
  unsure (1)..(445): unsure at all n locations
tgatgcatgcaagcttctaaagggagaacacgcgatacgtntgactaacgtttaattcgaaaaagatagaccttgcgcagcttgtcaagcaggtaaacaagtgggaggagcacatcacagcaagaatgtgatgaccacttcaagacccctggagctgctgcatatggacctcttcggacccgtcgcctatctgagcatatgagggagtaagtatggtctggttattgttgatgacttttcccgctctacttgggtgttctttttgcaggataagtctgaaacccaagggaccctcaagcgcttcctcaggagagctcaaaatgagtttgagctcaaggtaaagaagataaggagcgacaacgggtccgaattcaagaaccttcaagtggaggagtttcttgaagaggaaggaatcaagcacgagttcttcgctccctacacacca

SEQ ID NO: 60334 - DNA, 496 bp, Zea mays
  unsure (1)..(496): unsure at all n locations
cttaganactcagcttactcaatacatactctgtacagaagcaaccttcggtagaaaacaccttcgttgttaaaaacaatanaaagtcgaagaagagatgttaccctgaaattagaatagaataaactaccgatgatatgttgtcgtcggtagcggctgatatcggactcaatcttcgggaaaccaatactcttcgatagagtatcgataactatcgctccgggtcggtctcggagacaacctaagcttttatcgtcaacaccgccgaagagaagcgccctggttcatacccacaggatatggcatagtctctcaactcttctttctcagctcttgacaattcttgtccaattaagttttgaaagttgaattatcttcttccaaagtatcttcgatcgtctccttctctatcccaggcactatggccatggtctcttcggcagctgcagcaacttcttctgcgtccatgttcataagtattatatcaatattagaa

SEQ ID NO: 60335 - DNA, 438 bp, Zea mays
agcttctaaagggagagcacattctatgattaacaaatgttcattctgagaaagacaggatttgtggcgcatgcccagcagggaagcaagttggtactcaccatccccacactaacatcatgacgaccgacaggccgctggagctcctacacatggacctatttggcccgatagcttacatatgcatacgcgggagcaagaactgtctagacattggggatgattattctcgcttttcacttgggaggtctttttcgcggaaaaatctcatacccaagagaccttgataggattcttaagacgggctcataatgagttcggcttaatgatcaggaagattagaagcaacaacgggacggagttcaagaactctcacattgaaggcttgcttgaggaggagggcgtcaagcatgagttatcttcttcttacacgcctca

SEQ ID NO: 60336 - DNA, 429 bp, Zea mays
  unsure (1)..(429): unsure at all n locations
acctataaaactcagcttcttggagaaaaggacttcttcttcaacaatggagggttcattggcagaagcccaaaccgaagttgctagattgaatgatgaactccttcgtaaatcagaaagcttcgaacaagaaaggaagaattttgatgcgaggcttgaagccgaagccgagaaaagctcaaatctacaaaaatccttaaaagaacttcagaatatttgcttgaacttcggcaaccgctgcgtgcaacggctaagacaggtcttcaactcattgggagccagctctaanaaatttgaaccttcggctgaatacttgccaagcaccttcgagcatattgaaagcgaagttgaggcgcttgacgaagtaatagttgggcatggtgacttctgtgccctgctggcttctcgcggcacagctgtagcttttat

SEQ ID NO: 60337 - DNA, 433 bp, Zea mays
agcttttataatctttattgtagactagatagtgtatttcaatttctataattggcctaagtaatggtttcaagattttcatggtctttcatcccttttcttctcttctacttaaatagcttaattaggattggtattagggtttcaacatttttcccctttttgaaaacctcaattgtttgagacatgactctttagatataaacttagtggatcttttattcttaagttgatttggtgcttcttgctcaatttggcttacatgaaatgatggctcctgatttagcactgagaaaaaccctatgtgacaatggggtgtcacataaactatactactctagtcttcttcatactttgttgctccattgcctattgtaggagaccgttcctcacaaggttcctggaaggagggggactaaaaaggttcagctct

SEQ ID NO: 60338 - DNA, 427 bp, Zea mays
  unsure (1)..(427): unsure at all n locations
tggaggcgtcgattggttgtctacttggtgtagactcctccttcttttcttccgtcgccttgaatgcgacgggttgagcttcggatgtagatggatcatcaagctcgttgatctttctcaagccttctatcatgcactcaaaacttacaaaatgcccgattacttcctcgggggtcattttagtatatctaggattaccacgaattaattgaacttgagtagggttaaggaaaataagtgatcttagaataaccttaaccacctcgtggtcgtcccactttatgctcccaaggttgcgcacttggttcaccaacgtcttgagccgcgtgacatgtgatgtggctcctaccctttgcgaagccggaaccgaccgagnctcccctcgaacgtttcccgcttggtgatcttggtgagctcatctacctcg

SEQ ID NO: 60339 - DNA, 436 bp, Zea mays
  unsure (1)..(436): unsure at all n locations
agcttattcatcgtgctcagacaaaaccttctcttttgattatgcttcgtcacacaagaaagagcttcatgaaaatcagacaaatcaacgaaaaatttcaagaaagacataattaaatggccagagtttgctccatttctagggttgatcgcgagggagatgagaccgaagctattgagaccgttccgatttccgaagctatgaagcggtctgggctggcaacatcggaggacgtccctgtcgctggggcagaacaagttgatgttgaggagaccgattctgaggatgattatagcagcgctgtgccgagcaaacctagccaccttgattntgggaaatccacagtctccaaaggtgacctacctaaaatgttgaaattggggtatttcaatgaagagaataaaaagctggctcgctctggtggagaggaaactat

SEQ ID NO: 60340 - DNA, 425 bp, Zea mays
  unsure (1)..(425): unsure at all n locations
acctataaaactcagctgtatcactgccttaattctgccagaggttttgtttttggccgacgagaagaataacatgtntgagcaacactccttactgccttgacgaaagactnggccatgacggtcgtgttgcctccatgatgatattngtgcttcataactcatcaggaattgcttcngatcanagtgacagtcatacatatgcaattgagttggttggtacaaaggtggccatggtatttcctacaactctgtaactaaaggagaagcatcatcatatagaaaatcgtcatgattaaaggcttcgtaccacatgtcttcttgattttggccttcatgtcgaaagtctttctgattctggtgatgctattgacgctcattatcgtgtgaaatatttcgcatctcttcagtcacatcatcaatct

SEQ ID NO: 60341 - DNA, 433 bp, Zea mays
agcttcgggaaccccatacttctagccatctcccggcagacagataattctttgttgtctgggaggcagtataagaagtcatcttcgtctgtgccattgaatactaaggccccctttggatacttcagttctcgggcatagtgattagcttcaaaaatctcttcttcagataatctttttcccgaagcatgtcgtacaatataatcgagggctttggaggatgcttcgggggcagcagtgtcagtttcttcaaccaaaattggctctgccatttttgtttctttggcttccaagggttttaccttggtgggctctgaaggcccagcttcagtttcagattgttgctttgaagcttcggcaacaaaggcttcagtatgcacttcagaagtttcaacaattttcttcggagttgtgcttgaagacttaattgtct

SEQ ID NO: 60342 - DNA, 375 bp, Zea mays
  unsure (1)..(375): unsure at all n locations
ctatgatactcagcttgcccaagtcctccctcaaggattatggtgacttggagtactcngaggaagcttcctctgagtatgatcgatcgcccgctcctgcctcccccgtggcgtcgttcaaggactcggatgactccatggggctgtccactatggcccgagcatactggcgctccatctagagcgtcgggcttggcgggtcggatgactcacaggaggtctcctcggaagaggtggactcctctaacgagtggagcggcagcgaaggtgacggcggcgaggacgactacagcagcggcgacgacgacggcggcaaaggcgaatgtgacgaccacgagggcgagggcgacgactaatgcaactacagtgactgac

SEQ ID NO: 60343 - DNA, 435 bp, Zea mays
agctttcttcggtgccatagcgaatgtctatatcttccgaaggtgttcacgaagactcgaagtggaagtgagttcaccggaggtgggcgccaatgttggggacttgttctcaaatgctaagaattaagaacaaggcaacacaaaaaatgttaagtgttaaggcccttcgtcctccataacgatatatcccttcgggatataaagcatctcggacgaaggttacgaaggacataccttcgtaagcataacaacgaagaatgaagcattcacataaatcatagaatataaaataaacatttaaatattgtcatagaattatctctatttgtaccattgaatataaatgactttgaattacaaatgtaccttcggtcctgcggaaggcaaaagtacaagcgtgatgcgaaagcaaatgacaagttagcgtgaacagta

SEQ ID NO: 60344 - DNA, 334 bp, Zea mays
  unsure (1)..(334): unsure at all n locations
ctataaaactcagcttgggaggttcttcattcccacatgtgctaagcggtgatgttacaaccagcccatgcaagtcttagccattaagcatgcatctagaccggcctcttcttttgcaaaatcaactaagtaaagattgccgtctagtacacccttaaaggctagtgaaccatcacatcttctaaagacagacacatctacatttgtaaataaacagttatatcccatattgcataattgactaacagatagcaaattatatccaagagactctactaaaaacacgttagagatagagtgctcatttgagattgcaattntacctaaccctttt

SEQ ID NO: 60345 - DNA, 457 bp, Zea mays
gatcttaagtcacctgcggcatgcaagcttgtcgatgctgacttccgttttaatattcttttactacgaaataagcataacaaggtcactagaacaaagtggtggaagcttacaggggatgtggcccatactttcatgaagagagttatcgaggagggcccttggtcaggagaggaagacgcaaatatcatgtggaggaagatggcgacatgcatccgaaagatagcttcacaagagtttgggttgagtcaagggaacagaatggaagttaaagacacttggtggtggaacgaatatgtccaaaaggctatcaaggagaagaaagattgctacaaacgcttacatcatgacaagtgtgcacaaaacatacagaagtacaggatagcgaagaagtttgcaaagcgagcggttagtagagacccgtgtcaagcctatgacgacctttatcaacggctgg

SEQ ID NO: 60346 - DNA, 393 bp, Zea mays
aagacgcgaggccgttgttcatagtgcacaagacatggaagcatggctgcggcgccggcgccgccgccgacgtcgtgacgatgcacggcggcggaaggacgtacgagatcgaggggagctcgcgcaaatcggactacaggatccgcggcgcggacggcgcgatcatggcggccgtcggacggaagcggacggcgtccggtgttgtgctgggggacgatgttctaacgctgacggttgggtcggggacggaccatttgctcgccctgagctttggggtcgtgtgtggcattatgaaccgccgcttgtgatatgggtgggaatgggaaggaacgaccaaccaacaacggaattgtttcttctgtaaatcacatacgtataacatactagctctac

SEQ ID NO: 60347 - DNA, 427 bp, Zea mays
  unsure (1)..(427): unsure at all n locations
agcttctaaagggagaacacattntgtgactaacaaatgttcgttntgagaaagacaggatttgtagcgcatgtcaggcagggaagcaagttggtgttcatcatccacacaagaacattatgacgactgacaggccactcgagctcctacacatggacctattcggcccgatagcttacataagcatcggcgggagtaagtattgtctagttattgtggatgactattctcgcttcacttgggtgttctttttgcaggaaaaatctcatacccaagagaccttaaaaggattcttgagacgggttcaaaacgagttcgacttaaggatcaagaaaataagaagcgacaatgggacggagttcaagaactctcaaatcgaaggtttccttaaggaggagggcatcaagcatgagttatcttctcccta

SEQ ID NO: 60348 - DNA, 410 bp, Zea mays
  unsure (1)..(410): unsure at all n locations
ntntaacgatgaanatccttgaagcataagtccaaattaatataaanaagttaccacaacctctcggaatgaacacagtaagctcttctggccgtattctgaagttatcgctcgactacaaaaataaaataaaaagggcgtgtggcaccacataaaactggcacatcaacagcctcgtcttcttccagagtgagatcgacctgaatgcctcttgtgatgcatagaactccgaaccgcctagcaataaagggtgtgagaaaaaatagactaatatgagaccaaaatcagggtaagcgcatgtagtcctttgggtgaacacacacctcctttatagagttcaatatatccacaatctctgcaaatgttggtcttagagcaggatctttctgccagcatctctggagtagctc

SEQ ID NO: 60349 - DNA, 432 bp, Zea mays
  unsure (1)..(432): unsure at all n locations
agctnttcaccanaaccctaaatcctcgcacaccacgtgctcggggaaatgcccaaaccagccaaacttgctccaattgaacccaaatttttcaggcaccttcacaacacttccagcaacatccttgccaaatttcacgccaatccgagatcccaggcttaaatttcaccaaaattcccgttttgagcgatcgtttccgagccgagtgccctaattcctttttttcgcctaaattcaaaccaagcactcacttcactaatattcacccatataaacctattcgtgaagtctcggctcaatcccatatcgtttcgtgcctcaattcgaattccaatcatcctatgtctctatttgtctgtcaaacgtcgttttcacgtcgtttgacttattgatcgtcccgtctcgtgccatatctctctgtgtatgtattta

SEQ ID NO: 60350 - DNA, 87 bp, Zea mays
gcacgaggcgagatactcacattaacgatctacaggatgcattggcttactttaggccctctggcttgaacacgaatcccaaaaaat

SEQ ID NO: 60351 - DNA, 427 bp, Zea mays
  unsure (1)..(427): unsure at all n locations
agcttatgaagattcttcattccaacatggttctttcggcggngccagagccaacccatgttagtcttagcaattaagcaagtgtcgagttcagctctatcaaaatctaccaagaatagctgaccctctaacactcccttaaatgctattgaatcatcacttcttctaaagacagtgacacctatatcagcgaatagacagttgtagcccatttgacataattgagaaacagaaagcaagttgtaatctaaagaatcaacaagaaaaacattggaaatggaatggtcaggggatatagcaattttacccaaacctttgaccaatccttgatttccatccccgaatgtgatcgctctttggggatcttggtttttctcatatgaggagaacatccttttctcccctgtcatgtggtttgtgcacccgc

SEQ ID NO: 60352 - DNA, 173 bp, Zea mays
gcatgtcatgcagggaagcaagttggtattatcattcacactagaacattatgactactgacaggccactctagctcctacacatggacctattccgcccgatagcttacataagcatcggggggagtaagtaatgcataactattgtggatgactattatcgcttcacttgg

SEQ ID NO: 60353 - DNA, 427 bp, Zea mays
ctcaatttgggttatgttctacccctttgatccctatttagggttaagttccctatccagggttctatttgcaaaatgctataacaatacaacttgtttgaaatttttacctagtgaatgcactctaggtgtgtcaaacatatgcaatgccaatgtttatgatgccatgctcaagttttagttacagtaacaccaggggtgttacatccttccccccataaaagaatctcgtcccgagattaaaagtcctagggtaagtaatggtaaaggaaacgcatcacgtctttatttccttattcttggtacaaggcaggggtggtttgggaatcactcctttattacagcaactatacatgctttacaaattacaagaggctaaaaagcctgtgaaattcttatctaaaaagtcttgagtttcccatgtagc

SEQ ID NO: 60354 - DNA, 420 bp, Zea mays
agcttcaactcttcgaaccatatccagatatttttaaccttcggatctttagccttgcaactcttgtcaatatgacccgaaacaacctgggaatcagttttaagtatggcccttctgattcccattgcttttagcttccgaagacccaaaagcaaggcttcgtactccgcaatgttatttgtgcaactaaaatcaagttttgccgcatagcaagttttaactttagaaggtgaaaccaacatagcagccgctcccgctccgaaggttccccaagacccatcgcaaaacattgtccatgcttcggcgtatttatttgtttcttcctcctgagcccctggcgtccagtcagcaatgaagtcttgtaacgcctgggactgaatcgaagatctatgaacatattcaatacaaaattcgttgagc

SEQ ID NO: 60355 - DNA, 451 bp, Zea mays
  unsure (1)..(451): unsure at all n locations
tcagtagaatgacatccaatgtccttcattctcaaataggcaggaatgtactgacctatgttgatgatatcatagtgaanagtacgaagcaagaaaatcacattggtgatttgcaagagacatttgccgatttcaggcaagctggcctgaagttaaatccagaaaagtgtgtntttggggtgaagaagggcaagttccttggctgtttggtatcaacaaagggaattgaagccaacccgagcaagattgaagctatccttcagatggagccgccgagcacaaagaagggggcccaacggctggcaggaagactagcatcattgaacagattcatatccagatcagcagaaagaaatctgccattctttgaaataccgaagtcagctgaagttcttcagtgggattcgactcagcaaacagctttcgaagaattgaagcaatattgatcgat

SEQ ID NO: 60356 - DNA, 437 bp, Zea mays
  unsure (1)..(437): unsure at all n locations
agctnggaaggggttcgggcacgtctacggtgacggtatggtcgagcaaggagtgtgtgggagaggtagctcggggaggagagagctcgggcagggagagggctcgggcgtcagtttttatagggagggtgaggcgccgagggggagggtggagaaacggcagccatgaattccattgatggccatcaatggagcttccatgagggagaggtaatggggaaggaaagagaaacgaccgcggggtctttgggtgtcgggctgcgtggctcccgtcggatggcggcatcgtggcgcggtcggtgtcggtgtcgcgcggcgcgtccaggctcggggcaagggcgtgcacctctcgggtctgggcgccggtcggtgcaccgtgtggggtcaccgcggctgcgcggagctcattcttggcgcttgttggcgcggaccctgcc

SEQ ID NO: 60357 - DNA, 392 bp, Zea mays
  unsure (1)..(392): unsure at all n locations
tgagaaaataatgcanatggtggaaacagcgtatcaaatgctgccgctgtggtttatatttatacgcccagtgcgttgcaacttggtgggccctgtctgtcattgactattgctattctagcaaagggaaggtgctttttcggactttctgcttaaggccttcgttcatgtcccagcttgaattcgttgttataacaaattaatactgcgaggggctattgttgggggtctttgaattctcagtttgaattcgttgttataagaagctacaccgcaggaatccctcgcctaaccgccatcgcagctaaatcaacccaaggacctccctacactgaccactaccctactgtccttgcctctttctggtactgagacatacactaacttttcta

SEQ ID NO: 60358 - DNA, 446 bp, Zea mays
  unsure (1)..(446): unsure at all n locations
acacataaaactaagcttcgctcggcgagggcagctctcctcggtggagatattgcatgtatggggtctgccagnttcgattaagtgtgaccccactccgctctttctcgacgcgcagtgcctcaccctcatgggccgagggtgcctcaagctgagcccagggtgcctcgggctgggccgaggccttctcgggctcgggcgtgtcgtcngtcttgactgagggttgatgtangtcttatgagaaggcgtccggtggaatcgntgtatcgtccgcagtcggtcccgcttgccaacccctcccactcccgagcgctcgtgctcactctttccaccgacagctcggtcccgcctgccaacccctcccactcccgtntgtgccatcccgaccccgcctattcgctccttctnccccgtgatgagctcataatggagaatagcaatgtcac

SEQ ID NO: 60359 - DNA, 435 bp, Zea mays
  unsure (1)..(435): unsure at all n locations
agctggtggagtaccagatcatccaagcatataagtttctggatgagaagtggtcacccaagttccgttgatgaagcaccagaagactaatcaaggaaggaatccatgtgggagttcgcaagagaaaggtttgcgtgttggcatcaatgcttcctcaataagctagcagctaagcgaaacctagaagcttgaagatgattctttgagtagccagaatcagcatttgcaatcagcaaccggatgctcctgaaagaccagattttgttgaagttccatctcctcgaagagtctgcaaagtgaagatatgtagctgaagtaaagctatacccataacccttctaagtcgaatctcgaggacgagattccttttaagtggggtagatttgtagcatcccaaaaattcaaatcttgaaattttctcanactcgctctaaa

SEQ ID NO: 60360 - DNA, 477 bp, Zea mays
  unsure (1)..(477): unsure at all n locations
tcgtgaagatattctccgaagctacactttncgaagatcaattgtgtatctccttgcgacttagcatgattgtcccctttttcaaaacattattcttgtgccgtatgcaacatgatgtatgatgcttatgctatgcgaaatgatgcaatgatgttatgttatgtaagatggtgtttattccgaagatacacacacattcctgcgataaaacacaatctttttgaatcagcgttgtccttttactataagcctcccttaggagcttcttcgccttttacttcagcggaatcagcgtttatttttcgctgtaagcctcccttaggagcttcttcgccttatactttcagcggtattcgtgttgactattcgcgcttcgccttttacttatgcggtatcagcgttgacttttcgctgtaagctctgcattcccttttgaacgactttggagcagaaaacttacactgcgcttcctttgga

SEQ ID NO: 60361 - DNA, 433 bp, Zea mays
  unsure (1)..(433): unsure at all n locations
agctntattagaacataaattgaactatgatatttatggttattgagagctatgaaatcttctaatatttgtcttactggtttcatatcttaaacatgcagaagggcctctagctgagttagttaggtggcctgagtagcacccctcaggtactaagtttgactccccgtaggagcgaattttatgttggggtaaaaaaatcgcatcgtctatctcacaccaaaccacgggtctaaggttcggtccccggtcgcggtcattctcatatgggttacagtgccgctatatatggtgaggcaggggttgaagggttttctcgatttgcgtgagaagatcttcttcttaatataatggccaggaactgtcttaccccccagtcgagtttttccatatcttannacatttttgttctacatagaacacaagtgttcat

SEQ ID NO: 60362 - DNA, 431 bp, Zea mays
  unsure (1)..(431): unsure at all n locations
tctanagggagaacacgtgataggtttaactaatgtgcaattcgaaaaagatagaccttgtgcagcttgtcaagcaggcaaacaggtggggagctctcatcacaccaaaaatgtgatgaccacatcaagacccttggagatgcttcatatggacctcttcggacccgtcgcctatctaagcataggaggaagtaagtatggattagttattgttgatgacttttcccgcttcacttgggtcttctttntgcaggataaatctgaaacccaagggaccctcaagcgcttcctaaggagagctcanaacgagtttgagcttaaggtgaaaaagataagaagcgacaatgggtccgagttcaagaaccttcaagtggaggagtaccttgaggaggaanggatcaagcacgagttctccgcttcctacacaccac

SEQ ID NO: 60363 - DNA, 427 bp, Zea mays
  unsure (1)..(427): unsure at all n locations
agctntgtcatctgaaagataattaccctatttgaaagagatgatttcagttctccaatcttcactatagacaggggatatgttgaggaccgctctttcaagaagctcgaccgaaggtgcttttattgtttcgaaaaatacttccgaaggtaaaggcagcccctgtgctgctgacttggctaatagatcagcatattcattttctccacgaggaatttttttaacagagaatccttcaaaggaagcctcaatccttcggactgtatctaaatatttttcaagcttcggctctcttgccttatagctcgtcaatatgaccataaataacttgggaatcagttttaagaatggcctttctgattcccattgcctttaacttccaaagacccaagagcagagcttcgtactcagcaatattgtttgtgca

SEQ ID NO: 60364 - DNA, 376 bp, Zea mays
  unsure (1)..(376): unsure at all n locations
ttatcaaatggacgtgaagagtgccttcctcaatggaccaatcaaggaggagggctatgttgagcaacctcccggctttgaagacagtgagtaccctaaccatgtttataggctctctaaggcgctttatgggctcaagcaagccccaagagcatggtatgaatgcctaagagacttccttattgctaatggcttcaaagtcggcaagaccgatcctactttattcactaaaactcttgacaatgatttgtttgtatgccaaatttatgttgatgatattataattgggtctactaacgaatctacatgtaaagaatttagtaagatcatgacacagaaattcgagatgtctatgatggnggagttgaagtatttt

SEQ ID NO: 60365 - DNA, 432 bp, Zea mays
agcttatgcgaagacgtggctctgttgttattataacagagataaccgaagacgcgcaagtgctcatatgaaggaggggtattgtacaaacgggtgtacggaacctcatggcgtatggaggaagaaggtctgcggttaagcaagtatgtggcagctgcgagggcctcaacccaatacttgggtggcatggactcatgaaggagcagggtacgcacagagttgttgagggtacggagaacacgttcggccttgccattctgtggtgaagtgtggggacaagaaaggtgaaaaacgatgctgtgggcagcaaggagatcatccatggcatggttaacaaattctgtcccattatcagcttggaagcatttaatagtgtagctaaattgtgtgcgaacataaggaataaaatcagcaatgtgctgacggacctca

SEQ ID NO: 60366 - DNA, 369 bp, Zea mays
  unsure (1)..(369): unsure at all n locations
tcttcctcctctacctcttagagctggtggcctgtaagaactttattgcgtccctaaagactacgagctctgctgatgtcctcgagcgtggtttcctntgtcgtcacttcagatgggattgtgaattgttctgacatgtctagggtagagcctccctccgaagcccctagtcaactctaaatatctgtaggcctcttcccttctctaccgcaagtcattatcggccctgatgtattcgtccatcttcttgaggagcttttcaaggtttgtggggcttcctagcaaaaattatgcccttggtcctggtcggagccccttgatcaaagctgcgatgacaatcttgtttggcaccgttggcgcctaaccctg

SEQ ID NO: 60367 - DNA, 452 bp, Zea mays
ttagagtcacctgccgcatgcaagcttatagatagtcaaaacaaacttaaatttaagtagatttctcatgagcatccatatcgaagtcaacaaaactatataaataatattttaaactatcgaatcatgtaacaaaaggtaaacaataacacgtgatatttaataagtgacatttgtacaaatataaataaactaaaactgatataaaatagtaaatgtaccaagaaaaaagattctattctaaaatgaatgaatgccctatataaatgtgtgtaccaaaacttaaatgaaaacattaagaaatttatctatatattgtaaagtggagagttctagttgaatatttatgaaacttcgttcagatgtgttcactatatagatacaatggagagttataattgattgttaatgaaatttattgaattttattattggatatcactagaaatata

SEQ ID NO: 60368 - DNA, 280 bp, Zea mays
cttgactaatggttaaaccagcttgctatcatgtaaataccaaaattgccgtttatcaaacagaccagctggacaaagaattggaccatatacttactggaggctgttagtgactgcgccgaaaaaactgtcacatggaaaaggctcaaaatcaatacggattgaatgcctaattaaagcagtggtaaaatccaggaatgtactactattaacttttctaaagactaaccttcaaagtagtaaggttgcattaaattggtactatacaatactttctaat

SEQ ID NO: 60369 - DNA, 346 bp, Zea mays
  unsure (1)..(346): unsure at all n locations
gagcttantatatcgactcactccaatgcattatctatgtctaacctagctntgctcgggttgtgcctcactgtacatgcaaatagccgtgtcttcataacaacaatgtttctttctatgatatcatcaatanttttcaacacatgtgcctcatcctcgacctgctcatcaccggatgcataatacaaaatctgcttgccgccatttctccatcatcaacgtgagtatcttcttagctacaaaacctttgctaacaccgtaccgccgaggaagacaatctaagaagttaatagctatgcacaaatgcctgtcacaatgaaaaatcangagaacgtagtatcatata

SEQ ID NO: 60370 - DNA, 451 bp, Zea mays
  unsure (1)..(451): unsure at all n locations
acatgtgctaagcggcgaagcttattcttctcatgctagncnnagctancaagcacgcatctagaccggcctcttcttttgcaaaatcaactaaataaagtttgccgtctaatacacccttaaaagctagtgaaccatcacttcttctaaagacagacacatctacatttgtaaatagacagctataccccatgttgcataattgactaacagatagcaaattatatccaagagactctactaaaaacacattagatatggagtgctcattagaaattggcaatttacctaacccttttaccttgccttgattcccatcaccgaatataattgaatcttgggaatccttattcttgaccgaggaggtgaacatcttcttctcccccgtcatatggttcgtgcatccgctatcaataatccagcttgaaccaccggatgcataaacctgcaa

SEQ ID NO: 60371 - DNA, 375 bp, Zea mays
  unsure (1)..(375): unsure at all n locations
gcttggccccacctacaggctcgtatccttctctgatgtgggcccaggggccactgtcggtaccctggatcaagggtaccccctactactgtgtcaaggcgcagcttccgtgcggctacctcttagccacatggtagtatggttgtgtttgtgacttaggtgtgcctcancacaaccaagggcggttgcttagagcccacaacggcgcccagcctcaccacttgggtgggtccgggaccgccacgtgtccatttggtgacttggagaagattcaatctatttgatgtgtcttagagtggagtcttttgctcttgtattgaatgcaatgttcagactacatggatgcttggagttgtggtggttgtgggttttcat

SEQ ID NO: 60372 - DNA, 454 bp, Zea mays
  unsure (1)..(454): unsure at all n locations
cacatctcgtgccgatcccaacaggcatgttgctattgctctattgtctgctgcttcctcttcttccctcttggtcttggcggcggctactttttcccttcttcggcgaagaaaatggccaggcacccaggcgtctactggtcgacgacggctctgttccaacaagtccgcgtcgtcggcgtccggccgggcgcgctgcatagtcatgacagangaaaaaaacatgcgcgagcgtgacgggcaagaagactccaccctatcgagggtaattgctagcacatttcaactcttggccgcggcacaaacacgtgcttggccctctggtaattactactatattgctagattttaactgatatatgcgacagattaaaaagaacggagggagtaattaacatcttgaatcactccatatatataggaggattacatacatatgcatctgcatgcagct

SEQ ID NO: 60373 - DNA, 411 bp, Zea mays
  unsure (1)..(411): unsure at all n locations
agctntccagaagttttctccccgctcgggcaacccttctcagttcaccaagctgattgcccacacatggccacttcaacgctggggctggatattgtcgggccactacctacggctcaagggaacctcaagttcaccttcgtcgccgtcgattattttaccaagtggatcgaggctagggcggtatccacaataacgtcgaagactgcccaaaagttcttctggcaaaacattgtttgccgattcggagtcccgtccgagctcacagtcaacaatggcaaacagtttgatagccaggactttagggacttctgcttctccatcagcaccaagcttgccttcgcctcggtataccacccacaatccaacggcgtcgtcgagcgcgccaacggcaaaattntcactgccatc

SEQ ID NO: 60374 - DNA, 458 bp, Zea mays
  unsure (1)..(458): unsure at all n locations
gggctgcataacatggtttgactntcgaaggtgctactaggacagcagccgctcctgcaccgaaggttccccaagaaccatcgcagaacactgtccaagcttcggcgtctctgtttatttcttcttcctgagcccctggcgtccagtcagcgatgaagtctgctaacgcctgngactgaattgaggatctatgcacatagtcaatggtgaattcgttaagcttcgtagcccattttccaatccttccagtagcttctctgttcctcattatgtccttcagaggctgtgacgaaggaacaattatgtgatatgcttgaaaataatgccgaagctttctggaggccattaacacaacatacaacaccttctccaattctgtataattnttctttgacaaacttaaaactttggagacgaagtacactggagcttgctttttgacttggccatctaactta

SEQ ID NO: 60375 - DNA, 460 bp, Zea mays
  unsure (1)..(460): unsure at all n locations
agcttcttcaccgtgtgatcacggttatcttgagaaggtcgagcaatgcccttccctttaagttgtgtcaagctcatctttagcctctcattatcttctttgagcttttgatatgtatcatcatttgttcctgcaaattctagctccaaagaagatttgcttgtcgacggacaacaagcattagcacatggtaatatagtatcaatttgaatacatgtgcatgagtgaggttgttgtgattntaagttttctatcacaacctcatgaggaatatttaatatgatatgatcatccataagattttcatgagaacatagaagcatatcatatntttcttgaaaagctagattttcaatntttagctnttctacttggtccttaagcaaggtattcctatttactaattgagcgatacaatgtaaagcgttatcttgctcaattganatagtttcataccttt

SEQ ID NO: 60376 - DNA, 434 bp, Zea mays
  unsure (1)..(434): unsure at all n locations
tctaaagggagagncacatttgngactaaccaatgttcattttgagaaagacagggtatgtagcgcatgtcaagcaggaaagcaagttggtgttcatcatccacacaagaacatcatgacgaccgacaggccgcttgagctactccacatggacctattcggcctgatagcttacataagcatcggcaggagtaagtattgtcttgtaattgtggatgattattctcacttcacttgggtgttctttntgcaggaaaaaacacaaacccaagagactttaaagggattcttgagacgggctcaaaatgagttcggcttaaggataaaaaagattagaagcgacaacgggacagagttcaagaactcacaaatagaaggatttcttgatgaggagggcatcaagcatgaagtctcttcttcctacatgccacaac

SEQ ID NO: 60377 - DNA, 462 bp, Zea mays
  unsure (1)..(462): unsure at all n locations
agcttgagcaagaaataccgattttggtatgcaaacttgaaaaaatatttccaccaggtttcttcaatccgatgcaacatctatttgttcacctaccatacgaagctaaggtaggaggtcctgtgcaatatagatggatgtatcacatcgaaaggacactaaagaagctacgtgcaatggttggtaataagagacgagttgaagggtgcatcgctgaagaattcaaatacaaagagatagcatcgntcacgggcctgtactttgcagaggaacacaatgtcaatgcccatacgttgcggtatcatgtcgacgagccccctattagtgatattgaaatttttcaatggaggggcaaaactgtaggacccagcacaacatactgtttcaccaacgacgaatggaagactgtctactctacatgtataacaacatggaagagatgagtcagtttcttctgtaagt

SEQ ID NO: 60378 - DNA, 342 bp, Zea mays
caccttgaagacaaacgagccgacacatgtacaatgctgccaatacggcactgctatagttggtcttgacaggtatgaagtgggctgacttggtcaagcggtccactactacccaaatggaatcatagccggctcgagtgcgaggcaatccgactatgaaatccataccaatttcatcccatttccagtgagggatctgcaacggctgcaacaatccagcaggtctctggtgctctgccttaattcttcggcaattatcgcacatagccacatgctctgcgatttccctcttcattccgtaccaccagaaattcttcttcagatcctgatacatcttctcac

SEQ ID NO: 60379 - DNA, 422 bp, Zea mays
  unsure (1)..(422): unsure at all n locations
agctntagatctaggcatccggtctttccatgctccctctcatcatattcaatctgaccaccgcaaggtgacctatggcgtgtgggagctaccggagagcttctagagcgccagctatgggtgacaatgaactctaaattttacactataaaatttaaggatcagatcgaattatgatcaaaccttacttatattcatttttaactaaaatttatttaataacctaccatttatattataaagaaatatttaaatcgcaatccattacaaccacccttagcgccaccagctttccctcggtgaaggcgctcatataccgccacgggcatcttcttcacctttatcaccttcacgctcttcctccncgtcatggtgctcatgccaaagaagttcaccatcttcatgctccgtgcgtgctcatc

SEQ ID NO: 60380 - DNA, 466 bp, Zea mays
  unsure (1)..(466): unsure at all n locations
cttgccctcaacaatcacnctagatgccataggtagtgtctgttttactangttcatcgntcatgcttctcagcctttaaactttgaatattaggcgttgaacagccagttccttcaaaccattggagggcgtccaaaggacaccagatgtttcaatgttaacgatgttgttgttatacactgatgttttgttcttgtttgcttgcaactttntgcatctgtccatgctatncgnttggaaagaacatgcataaagccaatcttggatcttgctttcttcaggtaccgacaacccattcaccagggaatgagtgtatttcgtgctttttctgctgttactttagtatccaaaaattgtagtcatattgttgtataggtatgttgtgcatgcttcaagtactatgtttcttgttttcttcttaataaggtgtgaaatgcaagccaccaccatgcatgttatttggac

SEQ ID NO: 60381 - DNA, 387 bp, Zea mays
  unsure (1)..(387): unsure at all n locations
agctctcaccctttttgtgtccaatccgcctgtgactgatagcaatttgggtcttagagtgcgaccctctgctgaagaggtccgtactttggttgcttcgctcggggagatacctgatgatgagcggcagatttattttgaagtgcccctgaaccctagtgatgcagacataaatgacatgcttgatctgctagctgaggattcatctgatgctgctcctgatggtacgttggcagtggtgccccttccagaggttgatacaaccttggatgtcccgaaacctgtcagtactcgctcgaggcgccctagtcgaactagtcatcctgagccttctgctgatgagcaaaagaagaagagaagacgcctncggcgagtatccagctttga

SEQ ID NO: 60382 - DNA, 449 bp, Zea mays
  unsure (1)..(449): unsure at all n locations
tgagcggtaactggcttcgtctgaaaccctngataactggtgtccagcatgtccttcagcttttgccatgatgtgattgttcctggccgaagagaggagtaccaggtttgtgcaacattttttactgccatgacaaaagatttcgccatgactggtgtgttgctgccataggaagatattgttgcttcgtaactcatcagaaactgcttcggatctgagtgtccgtcatacatggggagctggggtggctcgtaagacagaggccaaggtgtagcctacaattctgctgacaaaggagaggcatcatcaaaagcaaaatttccatgatggaaatgctcataccagtcatcctaattgaagaagccctcttgatgaagctctctgtgctgaggccttcggttttgctcgtcttgagcaagatgacgaacttcttcataagcttcgtctat

SEQ ID NO: 60383 - DNA, 427 bp, Zea mays
agcttgcacaggccttcttcttcttctccatagcaggaaccttgctggaacactaccccacttaaaatgaatgagggtagaactcttgaatcttgggaatttgaagtccttgaaatacctcataacaagggtgttacgggaccttcttctgttgttgctgcttgagcaggctgcggagaaatgactgacacacggttgattttgggagaaccttcttctcatcttctcttcactatcttcttttctcttctcacttttcacttttcactgcctctttctttctctttgctcttcccactcgaggattctatcaaagagtattactatcacacattggaggaaaccaaagactatgaaccatgtgcaacagtcttcaacccaagaatcaccaaacattgtgatcttatgggcgaaggagtggaaaatg

SEQ ID NO: 60384 - DNA, 423 bp, Zea mays
  unsure (1)..(423): unsure at all n locations
tgccctccaccaactccattntagtgagcatggtgatgtcgttcccctcgtgagaaatcttgagggtgtcccatatctgcttggcattgtccaagccgctcaccttattgtactcgtccctgcacaaagaggctagcaacacagtagtagcttgtgcatttttatgaatttgttcattaataaacatagggctatccgagctatcaaatttcattccattctctacaatctcccatatgcttggatggagagagaataaatgactacgcattttgtgactccaaaatccgtagtcctccccatcaaagtgtggaggtttgccaagaggaatggaaagcaaatgcgaattcgaactatgtggaatacgagaataatcaaatgaaaagttcgaattgaccgtcttcctgtagtcgttgtcgtcgt

SEQ ID NO: 60385 - DNA, 412 bp, Zea mays
  unsure (1)..(412): unsure at all n locations
agcttcggaaaaccaacactcttcgacagagtgttgataatctttgctccagttcgatctcgaatacatcctaagccttcttcgttaattccgccgaagagcatcactcctggctggtagccacatgatatagcatactcctgcagctcctgtttcttagccttggataattcttgaccaattatattttgaaaattgaagcctttttcttctgaaatatcttcggcaacttccttccccttttcaggcactgtggccagggtttcttcggcagctgcagcagcttcttccgcggcctactccaagagcactttatcaatatcaggtaatgtactttctagaatggtagctttgacagttgcaacttcggcagaagcagcagcttcggtagctggtgtcattntttacgctg

SEQ ID NO: 60386 - DNA, 431 bp, Zea mays
  unsure (1)..(431): unsure at all n locations
tcggatctcttgcnttgcaacttttgtcaacatgaccagagataacttgggaatcggttntgagaaccgcccttcttatccccattgccttcaacttccgaagccccaaaagcaaagcttcgtattcagcaatactatttgtgcagctgaaatcaagttttactgcatagcatgttctaactttggaaggtgcaattaaaacggcagcggtacctgccccgaaggttccccaggagccatcacagaacactatccaagcttcagcatctttacttgcttcttcctcctgagcccctggcgtccagtcagcgatgaagtctgctagcgccggggactgaatcgaagatctatgcacataatcaatgctgaactcgttgagttccgtagcccacttttcaatccttccagtagcttctctgtttctcataata

SEQ ID NO: 60387 - DNA, 435 bp, Zea mays
  unsure (1)..(435): unsure at all n locations
agcttatcagcaatataagcataaaagagattaggctgctntggcagatcaaccaaagcctatgctcttgtgtgaagacatagccaaacaaaaagtactgctgggatctcaactatctgatgaacaagaaaagactttgctaagatttttgtttaacaacaaatatgtttttgcttggacaaccaatgatctctgtggtgtcaatagagatatcattgaacactcactcaatgtggacccgtccttctgaccaagaaagcagaggattcggaaaatgtccgatgataaagccgaaggtgcacgaaatgaagtaaaaagacttctaagtgatggcattattagagaattaacatacccaaagtggctggccaacactgtcatgatgaagaaagctaacggaaaatggagaatgtgtattgattttacagatctcaa

SEQ ID NO: 60388 - DNA, 463 bp, Zea mays
  unsure (1)..(463): unsure at all n locations
ngtcgagatcacanacgtgcgaatcttggcatatatccggcgcatgcctcttcctggcacctatggctatctcttgtatgtgagttccaaggagaggtaagccctatgtcagaagatttgcggacgccaaatctggcttgtcccactgtccactccgcgacaaaagtgttgccaaatcaagtcaaacgaatttggctcggtttcaaattttccagtgggtgccttaagtggtttggcacctttttggtattcacaccaagtggttttggcgccatttactaagtgagcacatctggtctttagattaaggttaaatttgacttagagaagattagagagctctagtgtgctctctacttaagggggtgaattggggtctttaaggggtctttntgtaatgtttcccctctgcattntgcaggttataaagttacttaaactttggttaaagttaactcatggt

SEQ ID NO: 60389 - DNA, 397 bp, Zea mays
agcttcaataacaatctggactcactccattacgctactgtcagcagagtcagagctccctctagacaccctccgttgcaagcaaccagccgccagcaaacgcctgttggcactgcggagaccccagtcacttcaagaacaactgccctcagttgaaggcatctggaccaacctactccaactcagtgaatggccccaagattccatcggcacctacctccaaggcacttccttcaaacagccagcagagcatgactcagtatcagggcagagcccgggtcaaccacgtcgacgctcaagaagcccagcaagccccgggagtagtgctccgtgagttcctctgtgaaattactcccgctactgtgctttttgattccggagcattccattcttttat

SEQ ID NO: 60390 - DNA, 455 bp, Zea mays
ctatataaactcaagcttcttagggagaacacgtgatatgtttgactaacgcgaaattctaaaaggatagaccttgtgcagcttgtcaagcacgtaaacaagtgggaggagcgcatcacagcaagaatgtgatgaccacttcaagacccctggagttgctgcatatggatctcttcggacccgtcgcctatctgagcataggaggaagtaagtatggtctagttattgttgatgacttttcccgcttcacttgagtgttctttctgcacgataagtctgatacccaagggaccctcaagcgcttcctcaggagagctcaaaatgagttggagcttaaagtaaagaagataatgagcgacaatgggtccgagttcagaaccttcaagtggaggagttccttgaagaggaaaggatcaagcacgagttctccgctctctacacaccacagcaaaatg

SEQ ID NO: 60391 - DNA, 422 bp, Zea mays
  unsure (1)..(422): unsure at all n locations
tgcaagctntatgggctcataggatatctaaacatatggctactcaagtgtctccttttgagcttgtctatgggcaggaagcagcgttgcctgtggaaataagtttgaatgctgtcaggttcgccagacaaaatgatttaaatgctactgattattataattcaatgatggataatattgatgaggtgaccgacaaaaggatgatagctctgggagcaatagaaaaggacaagatcatggtagccagtgcctacaacaagaaggttatagcacaatcatttcaagtaggggacctggtgtggaagactattctgcctctaaggagtaaagaccggaagttcgggaaatggtcaccaagctgggaaggcccttataaagtaaaacaggtgatgtctggcaacgcctatctgctacaaacatta

SEQ ID NO: 60392 - DNA, 385 bp, Zea mays
ctcttccgcctccgcgacagaaggtgccgaaggagctccctcttatatctcagccatcgtcggatatatacgggcatcttttctcttcttcgacgctgtcaccttcggctcaaggctagatcttttctttttcaaaaatttttcatcttcttttatcatcctaacagcctgtctgttcataacactaacaatcctttttcgcttcgacccttcggcacccttgcttaatcgttcatagtcagggtattcaaagttcagcgcatccattactcgattcagacttcatttcggtcgggtgccaaatgccgcaggcatcagtagatcttcttttagtatcggtgcccaaaaatttgtcgcacatagccttaatcatttctagccactc

SEQ ID NO: 60393 - DNA, 369 bp, Zea mays
aatgaagcaaggatagagttcagctctatcaaaatcaactaagtatagctgaccctctaatactcccttagaagctactgaatcatcacttgttctaaagacagtaacacatgtatgtggaaaaagacagttgtaacccatttcgcataattggaaaatagaagcaacaggaatctaatgatctaaagaaaacatcggaaatagagcggcaggtgagattcaatgtacccatcctttgaccaaactgatgccatcccgaatggaaagccttggggacctggttttctcgaagagaaacatcgttctcccaacatgggattggcaccgtgcgatatcaactgagccccggagctaacctataaaaaatta

SEQ ID NO: 60394 - DNA, 378 bp, Zea mays
tggaccaagccattgaccaacatgacccgtatcctcagaatacaatcatatcctgacctcgcgcgagtgctataaaatcactcgactcttacgagatcctgattagcatgcaactactatacctagtatactaggattcattttagaggaatcctatggtcttgctactagaggtttcatgccactcctacacttaagtacacatttacactcctacaagccttaagtgtggtaaagtagcatatcattaacaggttatgcatataaccggtgctcgccttcaattgctggggctgtggagagatcctcactatcactctctggagcttgctcctgggcctcctattggacagactcttgctctgggatgagcacgta

SEQ ID NO: 60395 - DNA, 435 bp, Zea mays
  unsure (1)..(435): unsure at all n locations
gcttatgaagattcttcatcccaatgtgggctagtcatcggtgccagagccaacccatgttagtcttagcaattaagcaagtgtcgagttcagctctatcaaaatctaccaagtatagctgaccctctaacactcccttaaatgctactgaatcatcacttcttctaaagacagtaacacctatatccgtaaaaagacagttgtagcccatnttgcataattgagaaacagaaagcaaattataatctaaagaatctacaagaaaaacattggaaatagagtgatcaggagatatagcaattttaccaagtcctttgaccaaaccttgatttccatccccgaatgtgatagctcgttggggatcttggtttttctcgtaggaggagaacatcttcttctcccctgtcatgtggtttgtgcacccgctatcaatga

SEQ ID NO: 60396 - DNA, 463 bp, Zea mays
  unsure (1)..(463): unsure at all n locations
tanagccatggtaagtagcataggctaataatatgcgaattgactcaagcctagctacgggtgcataggtttcaccgaaatccaaaccttcgacttgggagtgtcccttggccacaagtcgagctttgttccttgtcaccacaccatgctcgtcttgcttgttgcggaagacccatttggttcctacaacattttgattaggacgtggaactaaatgccatacctcattcctagtgaagttgttgagctcatcttgcatcgccaccacccaatccgaatcttgaagtgcttcctctaccctgtgtgtctcaatagaggaaacaaaagagtaatgctcacagaaatgtgcaacacgagatctagtggttacccccttatgaatgtcgccgaggatggtgtcgacggggtgatctcgttggattgcttggtggactcttgggtgtggcgggctttggtcttcatc

SEQ ID NO: 60397 - DNA, 489 bp, Zea mays
  unsure (1)..(489): unsure at all n locations
agcttaaggatactattcaactaaagtaagatgaagttgtatagaggccaaggtatgaaaacttcctctccttcaattgttntagtattctatccttagtgggatgtaccataatatagattaatttcattgcaatataaaatgttcaatagtgcatataactntgacatcaaccatatatgtgcactaatttaaaataatttaatctaccctctttggttctaagaatgatgattcatttgccatcctcatataaggatcatcatttgtgaaaccctcctttgtgtttctaatgctctcttttctaagtgtttcaataaggtccttccaagcgctttcaagatggattcaaaatctatggatataagagtcttggttgtttcaatcattgagttttaattgatcgaatcaagaaaagatgacagaagttcaagatcacttggttggatgaaatcgtacagagaaaagagatcacagtgattcaagaag

SEQ ID NO: 60398 - DNA, 474 bp, Zea mays
  unsure (1)..(474): unsure at all n locations
tccgctccggntgttgtcggttggtcggtacctgagcggctgttgcggtggcacgggaggacagcgaacatgtcgtcgagcacgatccggaaggccctgtgcgcggtgaaggaccagaccagcatcagcctcgccaaggtcactagcaacatcgcgcccgatctggacgtgctcatcgtcaaggccaccagccacgacgacgagccggccgaggagcgccacatccgcgagatcctncaccttacgtccggatcccgcgcccacgttgctgctgccgtggcagggtgctcccgcaggctctcccgcacccgcgactatgtggtcgcgctcaagtcgctcatgctcgtgcaccgcctccttgtcgatggcgacccgtccttccaccgcgagctcctacatggcacacggcggggcacccgcctgctgaacctctctgattttcgggacgaggcgcactctggatcgtgggatcac

SEQ ID NO: 60399 - DNA, 410 bp, Zea mays
  unsure (1)..(410): unsure at all n locations
agcttcacgtgttcgacgcgagctgacattcggtggcgcgctcanagcacgcccgtgcgcgaacccccgcgcgcccgcggctgcccgtgaccacgcccgtgccacggctataaagcccgccccagtgcttggctgccttccccgttgcctcctccgtacctcgcctgacttgcccgagccagcctttagctccggcgacctccccgcgacccgccagtgccgtccgagagcaaccaccgtgggcagcccctctccccttctcctccgttcgatccaagccctcagatagcttcctggtgaggccgcgggacttgctcaagcttgacccggggaccctcgtcaccggaatagcccaatcgtgctcaccggagttcaagaaccccgcggcgcacgtggaccgtgtaagcccc

SEQ ID NO: 60400 - DNA, 479 bp, Zea mays
  unsure (1)..(479): unsure at all n locations
actcagcttcgaagccacacttctggccatttctcggcttacagatatctctttgntgtcaggcaggcagtataagaagtcatcttcattcgttccattgaatattactgcccccttcggatattttagttcctttgcataatggatggcttcatgagtttcttcttcagatagcttcttccccgaagcatgtcgtatcatgtaatcacgcatgctggcaggtgcttctgggatggcggtgtcagtttcttcaactaatacttgttctggaatttttattgcttcggcttcaaaaggttgctccttgcagggctctgaaggcccagcttcagctttagcttgttgagccgaagcttcagtagaagcttcagcaatntcaacactctcttttggaattgtgcttgaagacttaattgtctccaagacgtctagtacatttaccattcttttcctttttggggtcactgatggcccctttg

SEQ ID NO: 60401 - DNA, 478 bp, Zea mays
agcttgttactcaggagctggaggccgctcgcctccatatcaaggccttggaggacgactgcgtcgttatgaaggcgatgtgcgacaaggccatggataatgctgttcgcaccggggggatggtgcctgaagacattgtcgctgatgttgttgctgcacctgatgtcatgagtcgaccatcttcttccgctactcctgcagtcgaggcttcctgcaagaatgcttcaacacaatgatttgcttgaaaacacttgctcattgagttagtactttttacagaaaaatgtaatgtgaattctgtgtgtatgtaattgctatgtttgaacttattgctccatcagcagggtgctaaaaacacccttgacaatgcgcgtgagttatttctttctcgaaatactcctgatttgagttagctatttttgtactagggaatagtgatcacccttgcctgcgtacgcatgagcttatcacaccgact

SEQ ID NO: 60402 - DNA, 474 bp, Zea mays
  unsure (1)..(474): unsure at all n locations
cttgaagtattnganagggcaagccaaactgaaccgtcgccatgctcaatgggtggagtttattgaaacatttccatacattgtgaaatataagaaaggtaaggacaatgtggtcgctgatgccttgtctcgaaagaatgtgttgttgaatcaactagaggtaaaagttttgggtcttggaaatttgaaagaaatgtataatgatgatcctaaattttcagaaccatacaatcattgtaaagatggaaaaggttgggaaaaatatcatatacatgatggatttttgtttagagctaacaaactttgtgtaccaaattcttcagtttgattgcttttattgcaggagtcacatggaggaggtctaacaggtcattttggacaaaagaagacttatgaactgctcagtgatcatttctattggcccaagatgaggagagacatcatcagatttgtggagcgttgtgtcacctgtca

SEQ ID NO: 60403 - DNA, 410 bp, Zea mays
  unsure (1)..(410): unsure at all n locations
agcttgtgaagattcttcatcccaacatgggctagtcggcggtgccagagccaacccatgttagtcttagcaattaagcaagtgtcgagttcagctctatcaaaatctaccaagtatagctgaccctctaacactcccttaaatgctattgaatcatcacttcttctaaagacagtgacacctatatcagtgaaaagacagttgtagcccattttgcataattgagatacagaaagcaaattgtagtctaatgaatcaacaagaaaaacattggaaatggaatggtcaggtgaaatagcaattttacccaatcctttgaccaaaccttgatttccatccccgaatgtgatagctcgttggggatcttggttnttctcatatgaggagaacatcttcttctcccctgtcat

SEQ ID NO: 60404 - DNA, 445 bp, Zea mays
  unsure (1)..(445): unsure at all n locations
nttcgcgagcgcgctggcgtcgtccacttgctctggattggtgtgtcacggggagacggcgctcgtctttgtctcaagcgcgaagtcgatacccggtgcgcccctcgttggggtgccggcgctgtcgactcgctcgacagccgacgaggtgttgcctcctgcttggccttggtcgccctgccttcccctccgtcggcgggggaaagggcaggatgagctcgaaggttgttcttccaccacgcggggaagacgtcgtcgattccgccgccggcgggcgggctgtcggccatcattgtcgttgccgcgcggcggtggaaggagtatcatgtcgtagctgccgtcgagggacatgaactcaagactcccgaaacggagcaccgtcccgggttggagaggttgctggagactgcccatctggagcttgacgggaagctgttcatcaaca

SEQ ID NO: 60405 - DNA, 390 bp, Zea mays
agcttcatctttagtgccaccggtactagtatctcaagcccttgctgctggaggtggtgaccctgatgagttggatgcaggagatagaggttttaggactctatcatctcatgagtctctgacgccgctatccacctacgctgcttcgttccgtaatactactctgagctctgtggttgtaaagcccaaaattggtataagaaaaaatatagatataaaataaataaatatatttatgatgaagttaggagagttgttgaaacccttgaaacttcattaggacccttcctatttataatcaacaaagggtattaattcagttaagtaaccaacaaacaaaatatagaatggcacatctcttgttgatgaatgtggtatcatgcatttaat

SEQ ID NO: 60406 - DNA, 468 bp, Zea mays
tatgaagattcttcatcccaacatgagctagtcggtggtgccatagccaacccatgttagtcttagcaattaagcaagtgtcgagttcagctctatcagaatctaccaagtatagctgaccctctaacactcgcttaaatgctattgaatcatcacttcttctaaagacagtgacacctatatcagtgaatagacagttgtagcccatttgacataattgagaaacagaaagcaagttgtagtctaaagaatctacaagaaaaacattggaaatggagtggtcaggagatatagctattttacccaaacctttgaccaaaccttgatttccatccccgaatgtgatcgctctttggggatctttgtttttctcatatgaggagaacatctttttctccccagtcatgtggtttgtgcacccgctgtcgagtatgcaacttgagcccctggatgcataaacctacaaaa

SEQ ID NO: 60407 - DNA, 329 bp, Zea mays
agcttcttggggagagcttcttctacgactatcttacggtcaggacagcagccacatgggagccagcgcgcgtcacaccaggaggactgccgagagccatcctacactcgtgaacatcacgacgccgtgcccgaatcttgaactactatcgacgatatattaccctatcgcttcttactatccatgggagttattgtgtcaagggaataggtagatatatatcttccttgggtgatcttccgcggaaaattcttctccgcaaaatagaaaagtttgagacagcgataacagagagttggactccgaaatatagcacatgaacgtcttct

SEQ ID NO: 60408 - DNA, 375 bp, Zea mays
tgctcaacacgtctaacacacgcgtggagtagggtatgcggcttttccacgagcacacactgttgattcgcgtgtgatcatgtgctgagcgatgggctagcaagacaggcaaagacctcaaccgcccttcttgatgttatgatttacggcggatgcatgatgaaccccatccagaaacatggctctccatccgttaaaatgttatgacgtgatggagtgtttatatggagatgactaagaataccttggatctatgaatacgaatgtgggacgacgttacctgaataagaggtacgacactaatcgtgcgactattgagcgccacacgaaagctgtacacatccatatttacattcatcatcatctatatgaacg

SEQ ID NO: 60409 - DNA, 330 bp, Zea mays
  unsure (1)..(330): unsure at all n locations
agcttaaggtagccgactagttgcttcaggatcttgtattctgtatgcattcctccgcagctactggttgctaatgttgctcccttcctcatgttggttgtcatgtcactgtcagacggaggacgatggcagagtcttccctgtcactgacaattcagcttcagttgtagactgtctactgaacgaagcaagaaggcttgngggtacctcttgctaattaattattatctttcctgttgatttccccctgatgctgtggccaccactccctgaccacttcaaaaccaaatggaagtttctctgcaggccggcaaaactgtgtctagtgca

SEQ ID NO: 60410 - DNA, 456 bp, Zea mays
  unsure (1)..(456): unsure at all n locations
tgttagagaagctgatggtggggtaactgtgttacaatccctttatgtggaaaaggtattgagtcgctntggttttagtgactgtgatcctgctccaacaccttatgaccccagtgtgctattaagaaagaatcggagaatagcaagggatcaattgacatactcccagatcattggctcgctcatgtaccttgcaagtgcaacaaggccagacatctcttatgctgtgagtaagctaagtcggtttgtgtcgaaaccaggagatgatcactggtgtgctcttgagagagtgttgcggtatttgaaaggtactatgacatacggtattcattatatcggaaacccaaaagtgctggaaggctattgtgatgccaactggatttctgatgctgatgagctntatgccacaagcgaatatgtgtttctgtttggaggtggcgctgtttcctggaagtc

SEQ ID NO: 60411 - DNA, 384 bp, Zea mays
  unsure (1)..(384): unsure at all n locations
agctntaacataagccttctttgaaatggtggtggaagattgaaaatgaatcgagtcnttggcaacagacgtcaagaaatacttccatggaaaagacttatacaatataaaagtgagaaactctgacttcccctgtatggaaagacttgatgaaaatcagagctttctacctgaaaggtagacaaatcacaactaagtgcggagataagtccagattctggctagacagctgggtaaatgagaggcctttatgtacaattgatcccgaattatatgagatttgtgatgacaagtttattctagttaaggatgcaagaataaaaaattggcaattgtccttcaaaagatggcctaaataatgaaaagagaatcgatggatatcac

SEQ ID NO: 60412 - DNA, 489 bp, Zea mays
  unsure (1)..(489): unsure at all n locations
agctntgaatgactngtataaggctgctgcattagataactnttggcctttcttttcccatttcagaaacaatatgcaaacaaaatcagaagtataaggctaagttgtagactattcatttaccaaactattatttgccaagggcccaagctctatattttagaatcacaattccaaacattgtaagagaaatacaaaactgatcaaaacttgatgctaattcacttttcatgcaaggacaatagattgttgaacaaaacttctagaaactacaaatatgagatcttacaaattcattaagtggcaccagattatcacaaagatattacttcgacctatcattctctacatttaaattgaagctgagattcaaaaaatagtatntatgtgattagggacgcatgaacttgcgtgtgatgaggatggngtggataccagaaatgttgtacacttacgcagaacacatggagaatgaaatgaacactactt

SEQ ID NO: 60413 - DNA, 460 bp, Zea mays
  unsure (1)..(460): unsure at all n locations
tggagaagcananatctttgaagtcttggttgtcaaactgcttgccgttgtctactgttagttcggacggtactccgaagcggcaaacaatgttctgccagaagaatttttgggcagtctttgatgttattgtagagacagcccgcgcctcgatccatttggtgaagtactcgacagcgacgaaggcgaacttaaggttcccctaagcggtgggcaggggcccgacgatgtccaggccccagcgctggagaggccatgtatgggcgatcagctntgtatactgcgaggggctgcctgaccgaggagaaaacttctggcaggcttcgcaggaccgtgtgacccgatttgcggcgcagatcattgtgggccagtaaaaaccctgacgggatcaccttatcagctaaagcccttggccctgcgtgtgagccgcacgtgccactgtggacttcgcgtaggatct

SEQ ID NO: 60414 - DNA, 474 bp, Zea mays
  unsure (1)..(474): unsure at all n locations
agcttgtggacccgtagcctatcaagtggaattgccacctcacatgtcagcagntcacaatgtgttccatgtatctcagctgcggaaatgtgttcgcctacccactgaagtactgccagaaccggatattgagatagaaccagacttgtcctaccaagagtacctcgtcgaagtattagatcaaaaggagagatcaactcgggcaaggtcaatcagaatgtacaaggttcagtggagtcaccattcagcagaggaagctacatgggagactgaggattttctacgctctctgcttcccgactntctgcccaaaggagtcggtatgtaaccccaaaaccccacccccacctgccctttgaattcaattataagaaaaacttagatagcaaggataatctaagttgtggatttaacttaagaaagggcttcttctgaagttgcanagagaatgacattcgaagagcagttaacaag

SEQ ID NO: 60415 - DNA, 466 bp, Zea mays
  unsure (1)..(466): unsure at all n locations
actaagcntgacagtgttctgcgacgggttcctgggaaccttcagagcttgtgcggttgctgtcctanttgcaccttccaaagtcagaacatgctatgcagcaaggcttgacttcagttgtacaaataatattgctgaatacgaagctctacttttggggcttcgaaagttcaaggcaatgggaataacaagggcagtccttanaaccgactctcaagttatttctggtcatgttgacaagagttgcaaggcaagagatccgaagcttgagaaatatctagacacagtttgaaggcttgaagcttctttcgaaggattttctgttaagaatattccaagaggggaaaatgagcatgctgatctgctagccaagtccacagggggttcctctaccttcggaagtattttttgagacaataagagcaccttcggttgaactcctcgaaagagcagtgctcacaatatc

SEQ ID NO: 60416 - DNA, 396 bp, Zea mays
agcttggtgcacgacatagtgtagaggatgacatgtgtgtgtgtgtcattttttttcaataggccttgatttgaaccaggaaccactagaggcagaagatgatgatgttgtgatggacttgacatgggatgaaccggacacatgtaagttcattttgtttagaactaaccgctcacgtgtactaggtttatttttagaaccagccggacactaatacaagtaacatttgcttgtttcagttgatgttatgaagcggaaagattattcagaaaaagttaaaaattaaacatatataccatgaactgttgttggctataactagaagttgtagaggagtgcttccaaaagaatgctacaagagaaggtagagcttgtggaaactaggtaaaataaacc

SEQ ID NO: 60417 - DNA, 466 bp, Zea mays
  unsure (1)..(466): unsure at all n locations
taaccgagaggtccacaagattagttatgtctttaaatctatcgtcttctcttatgccatcaatataattgtcaagttgcaagtcaagttntaacaagtcagtgcttgacatgtcattaggataaaaatcagctagctttcgtaccttgtgtgcatcaaaagaagcaaaagagttggaaggatccaaggctgacatacaagaaagtagatccatattagcctcactaaaccgactatcaagctctaagctaatttgatcaatgaccccaatatatacttctcttctgaagtggtcatcattggtttggttatgaacaaatcgtgatgatcttccataaggcttataatttccatccatagcaggaacttggatatcatgtatgttgcaaaatgaagagattctttgaaggaattgatcccaaccatcaagccttaaatgtcgcattcttctctttgccacattaac

SEQ ID NO: 60418 - DNA, 443 bp, Zea mays
  unsure (1)..(443): unsure at all n locations
agcttggatgaggtgtcatcatcatcatcgtccgagctatcatccgagtcccattcaactaagtaggctntgccatctttcttcttgttatagtatttctttttcttcttgtcactttcatctttgcccttcttcttcttgcttgggcaattcatggcaatgtgaccgggttccccacactcaaaacattttctatcattgaaagcatttcttctagatgtttgacctcttctaggttgacctcttttcatcttcatgaatttattgaatttccttacaaataaagccatgtcaccatcactctcactttcattttcttcatcattgctatcttctttttcaattgcctttgatgccttggctttgagagcaatagattcatttttcaccttctttgccaaacttaaagcatcggcttgtgacttcttaaatatatcttgagt

SEQ ID NO: 60419 - DNA, 453 bp, Zea mays
  unsure (1)..(453): unsure at all n locations
gagatccttagtgatcatggtggattttgcgcctttgccggtgccataagggttgcagcnaatttggaaaaatctagctgcgagcacgttaaagctgcaacctagacagaggccgtcttcactatggagaacacgaagaatccttcgactgaggcgactctgatgggcagaaaattttactccaacatttcgatgaaaggtggccgagaactagccgatgaagctataaagatgaatgagaaagaaactcatgaagcccgagaagaagccaagcgggccgaagaggctgccgagcgcgcaagatgcataggtattttaactgtttcttagctttagtattttttctggctttggattaacaacttattactttttctatagttgaactttcgccgccacctgagccctatgatcctgaagctgatccagcaatgaaggcggcactagaaacta

SEQ ID NO: 60420 - DNA, 441 bp, Zea mays
agcttgcacttacgaccaaaccgcacccgcatccatattttattcaatggctcaacaatagcggctgggtcaaggtaaccaagctggtacgaattaattttgctattggttcatatcgtgatgttgttgactgtgatgttgcgcctatggatgcttgtaatattctgctaggtagaccatggcaatttgattcagattgtatgcatcatggtagatcaaatcaatattctctcatacaccatgataagaaaattattttgcttcccatgtcccctgaggctattgtgcgtgatgatgttgctaaagctaccaaagctaaaactgagaacaacaagaatattaaagttgttggtaataacaaagatgggataaaattgaaaggacattgcttgcttgcaacacacactgatgttaatgaattatttgccttcactactggtt

SEQ ID NO: 60421 - DNA, 480 bp, Zea mays
  unsure (1)..(480): unsure at all n locations
agcttgtgaaggttcttcatccctacatgagctaagcggcgaggctacagcctgtccatgctaggcttagctattaagcatgcatctagaccggcctcttcttttgcaaaatcgactaaataaagtttgtcgtctaatacacccttataagctagtgaactatcacttcttgaccgcctaggtgtcaaaggttaaaatccctatcgtgcgaaggaagtttatcaatttcttttcctttatctggcactgtggccatggtttcttctgtagctacatttgtctccgaagtcacatctgcaaatatgtctgacacaagcctatctacatctgacattgtcgttttggcttcatcagcatctttggcttcggcagcaccttcagctntagcttcggcatccgcatgaatcgctgntttggccaccgaagctgagggtggtgtttgtcaatggcttccattcacattacaattcgtcgtttctt

SEQ ID NO: 60422 - DNA, 481 bp, Zea mays
  unsure (1)..(481): unsure at all n locations
agcttctcccttatgacgaaagcacacaatatgaagacatccaaggaggataagagtaaatgtcgaagctatcactagatggacagctttggctcgcaatgaagatgataaataataataatgatcggaagaggaaaagactacttagtccttaataacttgtattataatcatgtgtaaatgttcaagacataaatgtacttttcctcgggctgtgtctcgtgtctataaatagatgaacagtaacaccatattattcacgctggattataatcactctcccgtattctcaccttcaagtaagccggaggtacaaatgtaatatcaattntgttgaatattcatttacattntatggaacatgaatataaatgaattaatgatgatccagctttcatctttatcctttcgcattcctattcatatattatataatgaatgtgtggcttttgtgatcctcgctgatgaagatatctcatgg

SEQ ID NO: 60423 - DNA, 474 bp, Zea mays
  unsure (1)..(474): unsure at all n locations
tatgctctntatgaagtcccgaaagccaagatctatacatgttatacacattctagggagcatgcagattggtagctgacatgaatcacactccaaattntgtgagcaaaagtgtaaatgtaacaccctaaattatggatggcaatggttgggccgggtggagcaaaaaccagcccgcgatcacacccgtgaagtttatcaaaatccgcccacgattgcacctgcgagtgcaattcanaatccgcacacaaacccgtcaggttttgggtcactagtgggtttttgctgtatacaataactcactcgggggttaaaatagaaacccgtacccacacctgtgaaactntgggtcaggtgcggggttgcacctatgggtcaaaatcttcacccgtacccgcagggtcgggtggagtgtaaatttcttactagtttgcaaatcagacaagtgttcataagctaatgaaatgaaagcag

SEQ ID NO: 60424 - DNA, 431 bp, Zea mays
  unsure (1)..(431): unsure at all n locations
agcttgtctaaaagttgatgacatttgtgattataaattactctataaaattccagaagtatggattttggctattttaaatgccccaaaattccttattagaactaaaatcctgaaactatttttataaaatactatggaaaattaggagcctagtaaaattggtctggtattcttagcatttttcttcagttttgtagaaattcttaaaccctgttagaaaaagaaaaggaaaagcaatgaacattgttggactggaactgggcaggagccgatgagtatcacgagtgtatataggtgctgaaacacgattaaaacgagcaagagcaaacctgagacgagctgaccacggngcgcggtggaaaacggcgtcccaccgttccaggtggaattgggaggtgagattanggctacaccaccgtaaaggacta

SEQ ID NO: 60425 - DNA, 436 bp, Zea mays
  unsure (1)..(436): unsure at all n locations
tcagcagcaggttcttcagcanatgcttcagaagtttcagctgtcnttcttggagttatgcttgaagatttaattgtctccaaaacatctaacacattaaccattcttttccttttcagggtcactgttggcccctttttaatttttgctacttcaatctctcctgaaggacttaaaatttctgatatttttactccctcagctgatgtttttgcttcttcagtctttggttcttccatcttttctgttactgacacttcggccaactctttgatttctggcagcagggttggttctttagcttcggtggtcgaagaggtctcaccggcgaactcaggcactgtggctggttcaatatagcgtggccggtgtgtgagaacctttaccctttttctcttcggcgctagctcgctaggagcggctgaagcagtttctt

SEQ ID NO: 60426 - DNA, 374 bp, Zea mays
agcttcagtcttagcgttagtttctctcttatttaagtcttagttagacagggtagtttgctatatcctgtgcatttatgtttgtcatgatgaactatgtttggtttggatctttgtaatgattgtcaccagagtgtgggtatcccctgcattttggtttacctattatgttaatgaagatagttatatagtggggaaaccttttattccactttcctctttatctgagaagctgtgtggtccgtgttggagatcagtgaagatgctcatctgttcagtgctgttgaaggattctattctctttccttatgctgcaagatatgccagatcagttctgatgtgtggttgcattctgcagatgtcagagaacaggc

SEQ ID NO: 60427 - DNA, 388 bp, Zea mays
  unsure (1)..(388): unsure at all n locations
nttccaattggaatttctctgattctagcacttatacaaacatgttagtacacaaaaaccaatgtactaagtctagaatcataccttcatattgatttgcaccttatccacaatttggcatagtttatcacttaagcacttgtattggacactcaatcaccaaaatacttagaaatggcctaagggcacatttccctttcacacccttaccaccgctgatggcgaagtcattgccaccgaaggcgggacaacaaccaactgtccctcacccgaccctgcaacatatcttcggtcaaaaaaacttaccaacaagataatcctcgacactgatattcgtgccaaagtcagcaacacgtctccccggcgaaggcagctcctgccctttcat

SEQ ID NO: 60428 - DNA, 374 bp, Zea mays
  unsure (1)..(374): unsure at all n locations
agcttgaaggacaaattaaaaagcaagccccagtatactctgtctccgaagttctaagtttatcaaagaaaaactatacagaattagagaaggtgttgtatgttgtgttaatggcctccaggaagcttcgacattattttcaagcataccacataattgttccttcatcacagcctctgaaggatattatgaggaatagagaagctactggaaggattggaaagtgggctgtagagcttaatgaattcagtattgactatgtgcatagatcctcaattcagtcccaggcgttagcagacttcattgctaattggacgccaggggctcangaagaagaagcaaataaagatgccgaagcttggacagtgttctgc

SEQ ID NO: 60429 - DNA, 465 bp, Zea mays
  unsure (1)..(465): unsure at all n locations
tctaagggagagcacantttgggactaacaaatgttcatttttagaaagacaggatttgtagtgcatgtcaagcagggaagcaagttggtgttcatcatccacacaagaacatcatgacgactgacaggccactggagctactccacatggatttattcggcccgatagcttacataagcatcagcgggagtaagtactgtctagttattgtggatgattactctcgcttcactcgggtattctttctgcagganaaatctcaaacccaagagactttgcaaggattcttgagacaggctcaaaatgagttcggcttaaggatcaagaagataagaagcaacaatggaacagagttcaagaactcataaatagaaggctttcttgaggaggagggcatcaagcatgagttctcttctccctacacgccacaacaaaatggtgtagtggagaggaagaatagaact

SEQ ID NO: 60430 - DNA, 464 bp, Zea mays
  unsure (1)..(464): unsure at all n locations
agcttgtgcataatacctagagtgcaataatatagattgtttcttatgattggcaactgatatagaaattcacctcatgttgtcatggggtcgtcgcccttctccaccacaacttgcaactgtccctcgtcatccctttctctagcccttctccaccacgacctctagctgctcctcatcgtcaatttatccggaccctcatagcatgtagttntgtactactaactatatacaaagaatcggcttgccagcctcccatgccatcacggctgtagggttccaacaaaatcacccacagaaaagcatagaggtggtttagtttggtaatctaaagcaaaaacagaatggttttacagaanaacattcatagattatagcgaaatagtatcacgaccatacttctaattntagattagaaaaagatccataacatttcaatgggtaaaagaacagaatcaccccat

SEQ ID NO: 60431 - DNA, 466 bp, Zea mays
  unsure (1)..(466): unsure at all n locations
ngaataacaatgagttacaagctgcatttgttagctgctntgatgaaataatgtcaaggcaagtaaccacatcataatctgtaccagctgggcatatgaatctttcatcccgcagtttcgccatataggtcaatgataccttaaaatgaccacccaaattaagttaagaacaagcattttatgtggtacaagactaggagaatggaatttaccanataagaacaagcttcttacattagttaaaacatatgccattttcactgaacaatctggagatgttgtggcattcaacgaagcatcaagcagtctgcataaaacaatatcaatacaattatcaaaacaatagtttttcattntgcatcaagggaggcatcactcactcaaacaatagctgagaacagtcctcgaataacgacatccttcttgatacagcaacctggttctcataaacagaaatcagtgcatc

SEQ ID NO: 60432 - DNA, 443 bp, Zea mays
agcttctaggattctaagatacgcagcagactacactctagagtctggtcttgctacacgggaatcggctctagctcgatttgatggtctggattccgcaaatacttcctcaacataaagacatggaatacatggtgtactctgatcatagactccaacaattgtaggagctaagccaagctgccaactcgggctaagatagtagacggtcctatataactcggaccaagctcttctgacaccaaatcaacattgacacatgcaagtacttcaatgaatatatatataaatacatattgtgctcaaatagcctaaaccaaacctatacaaacaagagtaacttcaaaagatcaatttaatgcttgcatatctctagacagcagcacaacaggtatttggtttccttattacttacaaaatattcatccaatagaaagtaacta

SEQ ID NO: 60433 - DNA, 467 bp, Zea mays
  unsure (1)..(467): unsure at all n locations
ntaccgtcgatccatcgaagctcggaaacagatcgcaatctattctcaacgcacagcgaatacaaacaggcacaaacaaacaaacatatatatgcataagaacattacaccatttaaataaaaacataaaaatatggaaaaagaaatagagcgcgttactacagtcacgcgaggaaaaagaaatgcgacagtcgaagctaccgtcgagaagttatcgcgtctacactaaacgagtatgaatcataacatttagtttgacgtgattatattaatcgatatttatttaaaatgaaactagagctatcgaacagttttaattagctgaccacactaacaattcttagttaaataagtaatttaaataacatcagcgactctaagtgggacgaattagtggagcgagacgaacacgtaacgcatgatatagcacgaccggccggacctagcacgcacaccatgcgcaacat

SEQ ID NO: 60434 - DNA, 464 bp, Zea mays
agcttagaaaaatctggtatgaatctgcgataatacccagctagtccaagaaaactccggacttgatgaacagttgttgggggtttccactccagaatatctttgaccttgctaggatctaccgcaattccttttgccgataacacgtgccccaaaaattgaatttcttccagccagaacgcgcacttactgaacttggcatatagctgatgttccctcaggcgcgtcaatacaatccatagatgctgagcatggtcctcttcattcttagaatatatcaagatatcgtcgatgaagactaccacgaatttgtccaacttgggcatgaacaccgagttcatcatatatgtgaaatgggcaggagcatttgtgagcccaaaagacattaccaggtattcaaataatccataccgcgtagtaaacgcagtcttcggtatatcttcgggccgaatacggatttgatg

SEQ ID NO: 60435 - DNA, 446 bp, Zea mays
  unsure (1)..(446): unsure at all n locations
ngtgaactatgcatgtatccaatctgcctgagccggaaatattatcgcttggcagatgcccccgttccggtcgaccaagactagcactcaacataagacttccctagttatttagccaaggacgtcccataccaccctcatggtagcactgttttcctgggtggtcactccatgttccaattaaatcatatgatcttgtttaatcatcggttaacaacaataatgtaaacttaccatttggaacattaatatcatcagcaggagtaccagcataaagttaaagttgtagcaatagcataatactaaagtaaagtacaatacccaagtttgatcaaggaataaggttggaaaggttagggtgtattgaataggtaacccatcaaattatgcatatcatgaatgtaaacttagttatcatgtgttgattaggttcaaacagaatatgt

SEQ ID NO: 60436 - DNA, 460 bp, Zea mays
  unsure (1)..(460): unsure at all n locations
agctngagttatgttattacagaccaaactaaaagtgagtgcataggagtaatattatacaaaccagggaggcacaaactcctcccgagaagttataaacaaagatcctaagtggaggaccgagtcctcccgcacttcagtcttctttttcctcatttggtaccaccttggagcagaagcaacaaaagtttatcgcttcctcacctaaaaacaacaaagggataaaccctgagtatggaatactcagcaagtcttacccgactaaggaaaagactctcaagggtatgttggataaataggagtcaaggagaggctctagcaaaaatcaacttatacttttgcagaagtagcttactaaagtgagtccttactttcaatcttttaacgccacgttaagtattaatagactccatttgcatctattctaatntcacatcacatcaagacaacatcattttta

SEQ ID NO: 60437 - DNA, 445 bp, Zea mays
  unsure (1)..(445): unsure at all n locations
tacctgtcanaacaacagcacatgccagcacagcagctacaaaccataccagtatcttggcctttcgcatgctgtggattggatatgattggacctttcaagaaagctcaaggaggatacacccatgtattggtggcaattgacaagttcactaaatggatagagtttcagcccattgcctacttaacctctgctaaagccgtggaattcatacaaagcataatattcagatttggaataccgaacagtatcatcactgacttgggatccaacttcaccagttcagaattctttgacttctgcgagcaaaaaagcattcagatcaagtatgcatctgtagcccatccgagagccaacgggcaggttgagcgagccaacggaatgatattggaggcacttagaanaagggtctttgataaaaatgaaaaattcgcaggaaaatgga

SEQ ID NO: 60438 - DNA, 377 bp, Zea mays
  unsure (1)..(377): unsure at all n locations
agcttggcggagctcttgtaagtaaacaatattntctatctttggtacctacaatcttctgtacttccccatttgtctgatgcttcaggttggtggttttttgtagactcccaagccatcgtctggacctcacaagtctagggagtgcctgcctctgatcctcatcatcaagaacaggctcaagtatgcactgacgtatcgtgaggtcatttctatcctgatgcaacgccatgtactctgtgatggcaaggtcaagactgacaagacctaccctgctgggttcatgggtatgcctatatctctatttatgcataaagatacctatacacatattntggttgctgatttgcggctcatttttttggcagatgtcattt

SEQ ID NO: 60439 - DNA, 478 bp, Zea mays
  unsure (1)..(478): unsure at all n locations
tgcccctggcgcttctctattttgacgcacagtccagagggcatggaaaatcatataagtaattataggaattgaattntagtgcaaaaataaattcaaaaactcattttattcatagaaaattcatactaactcctttttagtctgttctagttgctataattctgtaatattatggtttatcatctagtaccactgttttcacatgaaagtcacattaaaatttatatcctatttaatcttgtacaaaacacatagaatcttttaacttcgatttgatccattcaagttgtgttagtctcgtacaagtatttactatgcaataacaacattttatataccatgtctcattattttatgattagatctttatttaatttatgttggttagtcttgttaacttacttaccattataatctactaaaatatgatctatggtcaattcataatttagaataaagctgaattacatactac

SEQ ID NO: 60440 - DNA, 477 bp, Zea mays
  unsure (1)..(477): unsure at all n locations
tgcggcatgcaagcttanaaggggccatcttgatactttcttgataactgttattgtatgaaaactccgctaggggcaaacattcatcccattttggtgagaagtccaggacacatgcccgcagcatatcttcaagtatttggttcaccctttcagtctgcccactggtttgaggatgatatgccgaactgtggagtaacttagtacccaaggagttgtgaagtgcttcccaaaacttggctacaaattgaggtccacgatccgacacaatggtcttcggaacaccatgcaaactgagaatacgggcaatgtataatgctgcataagtggctactgtatatttggccctgacgggtaagaagtggacaatctttgtgagtcgatcaacgataacccaaatagaatcatacccattggctgtcctgtgcagtcccacaataaagtccatactgatgtcttcccattctcatgttggga

SEQ ID NO: 60441 - DNA, 480 bp, Zea mays
  unsure (1)..(480): unsure at all n locations
actcaagcctatgaagattcttcatcccaacatgggctagtcggcggtgccttagccaacccatgttagtcttagcaattaaacatgtgtcgagctcagctctatcaaaatctacgaagtatagctgaccctctaacacacccttaaatgctattgaatcatcacttcttctaaagacagtgacacctatatcagtaaaaagacagttgtagcccatttgacataattgggaaacagaaagcaagttgtaatctaatgaatcaacaagaaaaacattggaaatggaatggtcaggtgaaatagcaattttacccaaacctttgaccaaaccttgatttccatccccgaatgtgatagctcgttggggatcttggtttttctcatatgaggagaacatctttttctcccctgtcatatgagttgtgcacccactgtcgagtatccaacttgagnccncggatgcataaacctacaaaacaa

SEQ ID NO: 60442 - DNA, 258 bp, Zea mays
  unsure (1)..(258): unsure at all n locations
agcttgacattgtctcccttttggaagccaatgtcatccttaatacctgngcgtctctgtgatacccaattntctaaaaagaagttaaatgtactttttccttttctttcgtgatctgtgtagttggggttggagttttttaggaagcattcaccaataaaatagtagaatacttgttggatttgtgcgttggggttgggagcagacgtgagagcgaagttgggccgtggatctcgatccagcggtggggagcccatt

SEQ ID NO: 60443 - DNA, 446 bp, Zea mays
  unsure (1)..(446): unsure at all n locations
gggaggcgtctatngggtgtcgacttgaggtagactcctccttcttttcttccgtcgccttgaatgcgacgggttgagcttcggatgtagatggatcatcaagctcgttgatcttcctcgagccttcgatcatgcactcaaaacttacaaaatgcccgattacttcctcgggggtcattttagtatatctaggattaccacgaattaattgaacttgagtggggttaaggaaaatgagagatcttagaataaccttaaccacttcgtggtcatcccactttacgctcccgaggttgcgcacttggttcaccaaggtcttgagccggttgtacatgtgttgtggctcctcccctttgcgaagccggaaccgaccgagctccccctcgatcgtttcccgcttggtgatcttggtgagctcgtctccctcgtgcgcggttttgagcaca

SEQ ID NO: 60444 - DNA, 478 bp, Zea mays
  unsure (1)..(478): unsure at all n locations
agcttcggcatctttgttcatttcttcttcctgagcccctggtgtccaatcagcgatgaagtctgccaacgcctgtgactggattgaggatctatgcacatagtcaatggtgaattcattaagctctgcagcccattttccaatccttccaatagcttctctgttcctcataatgtccttcagaggctgtgacgaaggaacaattatgtgatatgcttgaaaataatgccgaagctttctggaggccattaacacagcatacagcaccttctccaattctgtataatttttctttgacagacttaaaacttcggagacgaagtacactggagcttgctttntgacttggccatctagcttctcctgtacaagtgctgcacttactgcagaatatgaagctgccacatataagagcaatggagcccctggtgaaagtggagttaatggttgtaaatcaatcaagtattgttcaactctt

SEQ ID NO: 60445 - DNA, 489 bp, Zea mays
  unsure (1)..(489): unsure at all n locations
gacctataaaactcagctcatcccattgaactctntgcctttctccagtagagaggtattaggcttcactaacttggaaaaaccttcaataaatcttctatagtatcctgctaatccaagaaaacttctgatcttggacgcatccttgggttgcttccaatttagtatctcacttatctttcctgggtccactttaattccaccatcggtaacaatatgccctaagaaagcaacttctttcaaccaaaaatcacacttcgagaattttgcgtacagttggttgtcacgaagcttttgtaggactagccttagatgatcttcgtgtgcttcttcattcggagaatatatcagtatgtcgtcaatgaatacgaccacaaactgatccagatattccatgaatactntattcatcaagttcataaagtatgctggtgcattagtcagtccaaacgacatgaccaanaactcatataatccatatcttgtcgt

SEQ ID NO: 60446 - DNA, 331 bp, Zea mays
agctgtaaccactactacgagcaccccggtgcaagataatataagcctcatcccccctctcgtgtttcatcttgcatcaacccatctggatagggacacacagcgtcaaattcattagtcggttgagggtcctcgcgggtccaaaacccgacagttggcgcgctaggtaggggcccagctgcgtgttggcaatactttcctgttgagttccagatggataatcttcagcaacctcttcggcccgggacggtgctccactttgggagtctcgagttcatgtcccccgacggtagctacgacatggtactcctccccccgtagcacgacaaca

SEQ ID NO: 60447 - DNA, 472 bp, Zea mays
  unsure (1)..(472): unsure at all n locations
tcggcgcgatggcagaaggaggaaccgacttattgatgaattgacttcggnggcctcgacagatttccataagccgttaacaaatgtaatggacatggatgtaattttacgtgggctgcgtcccgcgtctataaatagatgaacagtactcccgtactggacacgctgacttggcatttgcttttggcaccacgctcgtacttttcaccttctctcaggaccgaacgtacatttgtaatttggaatcatttctgtttttccatgttaataaaatagaaatgattctatggtgatgcttatatcatatttcatgctttatgtgagtccttcgtcattacttgttatgtttacgaaggtatgtctctcatgaccttcgtccgagactcantatttcccgaaggaacataatgcttcgaaggacgaagggatttaacacttaacactttttatgttgccttggtcctaactctta

SEQ ID NO: 60448 - DNA, 418 bp, Zea mays
  unsure (1)..(418): unsure at all n locations
agctctacttagttgatcttgcaaaagaggatgccggtctagatgcatgcttaattgctaagactagcatgggctggctgtggcatcgccgcttagcacatgtggggatgaagaaccttcacaagcttctaaagggagaacacgtgataggtttgactaacgtgcaattcgaaaaagatagaccttgtgcagcttgtcaagcacgtaaacaagtgggaggagcgcatcacagcaagaatgtgatgaccacttcaagacctctggagctgctacatatggacctcttcggacccgtcgcctatctaagcataggagggagtaagtatggtctagttattgttgatgacttttcccgcttcacttgggtgttctttttgcaggataagtctganacccaacggacccttcagcgcttcct

SEQ ID NO: 60449 - DNA, 398 bp, Zea mays
tcgtcctgaccatacttttgtatactcataacccgattccatatatacctgttcacatatttcacttggaagacattgtcaaatcatgtttttgaggaccttcggaagccgaaggcccccaacacatacatatcatcagacaaaatatagatcaatattggtcacatgacaaacacattcattgacatagttcacaaaaacttcacattacaaccacataatcaattcacacatcacatacttcacatcaccaacatagcttacataaccatttcaaatagcaataacaagataagttaaagtgtttagtttacgaaaacagcgtgcatgagttaagaaacaaagacgaccaagcaccatactcagggataaccaccacttggatggttagagctttg

SEQ ID NO: 60450 - DNA, 473 bp, Zea mays
  unsure (1)..(473): unsure at all n locations
agctntaatgcanaatttatcctcctttgtcataaatctccaaaaaggatacaaagaatataaagggtagaaattatgattaagcaagatgggaacacactattatgaaaagggtccttagatggcacaaaggtaatggagaagtgacatgaagtgatgtacctttgcattcttaccttttcaaggggtttccagacttgtgttggatntataattcatttgcaagctctatcaaaatttgcagtggaagcgattgtctttgcttgaagattcctttctaatttgagactacacacataatagacttgaaaatgaagttagtctcaaagattcaaattatagaccattctccccctaaatgtgtgcatacaagtgatgaatacttgtttagcttatgcacttggacttgtgaggccagnggattaagttctacaatttgaaccttggtacacataaagtatgaaaatatgaaa

SEQ ID NO: 60451 - DNA, 110 bp, Zea mays
tgtactactactctacaattaattgtatatatattatgttcgtaatattgcacaacggcgaggtgttagtttcatgctctactccggtccgagatggtgttagtttcatg

SEQ ID NO: 60452 - DNA, 322 bp, Zea mays
acatacactagttcactaatcttaccatttaggaaggcactctttacattcattcggtagagcttgatattatgcgcacaagcataatcacgtacaatccggagtgctcttaatcttgctacgggagcgaatgtctccccaaatccaatccttcaacttgagtatatacttgtgcaactaatcttgccttgtttcttactaccacaccatcttcattgtgcttgttgcgaaacacccatcttgtaccaataacaatgtggttctttggtctctcaacaagcttccacacttcatttcgagcgaagctatttaattcttcatg

SEQ ID NO: 60453 - DNA, 471 bp, Zea mays
actcaagcttgtggatatttcgcacatcttcttcatcttctttcggtttgatggctccaattggcatattcttcatggcttccctaagtgggtcatcacctacatcatcaagattttcaagtgctccttgggagccattagtctcatcgaattccacatcatatgtttcttccaccacgcctgtggcatgattgaatactcgatatgctttggattctgttgaataaccaagtaagataccaatgtcacaacatctttgaaacttccctaggtgatggcgtttcttgtagttgtagcatttgcatccaaacacccggaaggagacatctgtctttttcccatttagcagcttatagggagtcttctcaagtagccagtgaggaaacagtctgtttgatgcatagcatgcagtggtgacagcttcatcccaaaacctctccggtgtgttatactccgcaatcattatcctta

SEQ ID NO: 60454 - DNA, 466 bp, Zea mays
  unsure (1)..(466): unsure at all n locations
agcttcggcgtggttgcaggaaatgaaaccgacttaaagatgaaaaggctattcagaccttgatagattactatagaattattatcaaatgtaaagggcatgaatgtaattntgtatgggctgtgtcccgtgcctataaataggtgaacagtacccccgtactgttcaggctgacttggcattcgctttttgcgtcacgcttgtattgtcatctccttccgattgaaggtacacttgtaattcaacgatgtttttgtttatgcccaataataatatatgattgttcatattgtcttttacattctttatatttcattcttcatcattgattgacgaatttgtgaaggtacgtccttcgtaaccttcgtccgtaagccattacatcccaagggaaataatgcttcggaggacgaaaggctctaacgaataacatctttctatgtngccttgttcttaactcatagca

SEQ ID NO: 60455 - DNA, 392 bp, Zea mays
gtaaccctatataggcattaaaggagtaaaacttaacccattttgataaaacctaaagactttagggaaagagtcataaaatatcttcaaacacaaagttgaatcatatttatacccctgggatactaaaaaccctaattggaaccgtggaaaaccctaaaaccaaaccctaggggcctatgtgcaaaattagtccacttttggactaaagtgcaaaaaccaagttaaataggtatctttagtcatttgggtcacatatatgtgaatttgcaagccaaaccctaagttttggaccaaaatgcaaaaatcacctcttaaagcactatagaggctaagtctgaaattaaatgttgagggctcaactttggagcattggatctttgaattattga

SEQ ID NO: 60456 - DNA, 338 bp, Zea mays
  unsure (1)..(338): unsure at all n locations
agctctgaagaagggattaaattctctcattatattaggggcctggaccttgtggaaacacaggaatgatattatcttcaatggtgcgactccccatctctctactgctctctccaatgctggagaggaggcctggtgttggagcaaggctggtgctaaaggcctcctgctacagttggcgcacgatgtggatgatgtangttttttaccttaaagtcgttaggttgctggctgctgttgctggttttttctaaccggctctctgtagtccaaccttgtgggtagtgtgtgtgtctgtgtgccttaacctctggctgggcgtgtgaatttctttcttt

SEQ ID NO: 60457 - DNA, 466 bp, Zea mays
  unsure (1)..(466): unsure at all n locations
tctaaagggagaacacgtgatatgtttgactaacgttcaattctaataagatagaccttgtacagcttgtcaagcaggtaaacaagtgggaggagcacatcacaacatgaatgtgatgaccactttaagacctctggagctgctgcatatggacctcttcggacccgtcacctatctgagcataggaggaagtaagtatggtctagttattgttgatgacttttcccgcttcactagggtgttctttttgcaggataagtctgaaacccaagggaccctcaagcgcttcctcaggagagctcaaaatgagtttgagctcaaggtgaagaagataaggagcgacaacgggtccgagttcaagaaccttcaagtggaggagttccttgaggaggaagggatcaagcacgagttctncgctccctacacanccacagcaaatggtgtggtagagaggaagaacangact

SEQ ID NO: 60458 - DNA, 437 bp, Zea mays
agcttatggtaccccacaagttgggtgaagtataattccataaggatactatgggtgtagcgtcgctcctccccacacaggtggataagcaggtgggtaggcgagtatgggtggatatgatactagtgtatatgtgtatggtggatatgcaggcggtggatatggatgtggtagataaacatgtggtgatgtccttggtgttggtggtgtgggtggaaccagctggactacatctttggcagttttagtcagtcgtgtttattttgcttgtttgtttagtatgggtgaatgaggtcactttgttggccaatccctcagagcggccttgttattgaaatatttagaaagaacgtgatcaaaattaggaccgatagtattgagtcgccaaatggcttggaagtgtttgcttcacatacatatctcatacattgtgactg

SEQ ID NO: 60459 - DNA, 436 bp, Zea mays
  unsure (1)..(436): unsure at all n locations
ntagtcttagcgttagtctcggtcttagttagtcttagttatatagggtagntngctatatcctgtgcatttatgtttgtcatgatgaactatgtttggtttggatctttgtaatgactgtcaccagagtgtgggtatcccctgcattttggtttacctattatattaatggaattagttatatagttgggaaaccttttattccactttcctctttatctgagaagctgtgtggtctgtgttggagatcagtgaagatgctcatctgttcagtgctgttgaggaattctattctcttcccttatgctgcaagatttgccagatcagttctgatgtgtggttgcattctgcagatgtcagagaacaggcgcagaggaggaaggcatgctcagcatgagcgagccgctcaacaggaggaggtgcctcagcagcagca

SEQ ID NO: 60460 - DNA, 484 bp, Zea mays
  unsure (1)..(484): unsure at all n locations
agctttgatgtctccatcagccttcttatcttactcactatcacactccttattntgaacttcactatataaacagtatagtctaaagtacgaaatggtgttttgtatggtcttatgcacgatatgctaaacacggcatgactgttgaaattgaagtccatctatttttttagtgccattatcaccggcttcccggttgtcgctgcatctgcaattgaacggcatgcagtctttgcagaaaaaaatcgtaggacaaaacaaacgaaatggctgcatgctgacggatatgctcaaataatgctctactagtatggacatgtgataatccctaattttggcacactgtctatctctctntaaattgcttcagaagacgagtggtagatacgagagaacttgttgcagtgtaatctctgctccatttctttttgaacaatngtatctaaccttcattttcaaactccaaactatntacatatatcac

SEQ ID NO: 60461 - DNA, 448 bp, Zea mays
  unsure (1)..(448): unsure at all n locations
actcaagcttcaaagggagaacacgtgataggttngactaacgtgcatttcgataaagatagaccttgtgcagcttgtcaagcaggtaaacaagtgggaggagcgcatcacagcaagaatgtgatgaccacttcaagacctctggagctgctgcatatggacctcttcagacccgtcgcctatctaagcataggagggagtaagtatggtctagttattgttgatgacttttcccgcttcacttgggtgttctttttgcaggataagtctgaaacccaagggaccctcaagcgcttcctcaggagagctcaaaatgagtttgagctcaaagtgaagaagataaggagcgacaacggatccgagttcaagaaccttcaagtggaggagttccttgaagaggaagggatcaagcacgagttctgcgctccctacacaccacagcaaaatg

SEQ ID NO: 60462 - DNA, 480 bp, Zea mays
  unsure (1)..(480): unsure at all n locations
agcttgcttctgccatggttcaacggccgattatagcgctctagcgtgcgtatcttggcaaagtcactgtgtacggttgcttctctgctccaaatcctatcttttcgctgtgagttccaagtcgagatatggtcggggtagggagatagagaggggagaagtttgctgtgtcagctaagcccgaaccgagacaaaaggggtgtcaagtcgtgtctagcgccctacggtaggtgtcatctcttctcagggtgttctagggttaatttggcgcccttttgtcaattgggtcgaaaggttttgaaaaggggattaatgtgaacatggggagtctttgtgcaatggttagtctttgcacttangcaaaagctgaatttcccttgtgctaaatcttaggtggactgtctagggcttttctgaacacttttttggggtacttccttactattaattgtacgctattacgcatattacaacttttct

SEQ ID NO: 60463 - DNA, 421 bp, Zea mays
  unsure (1)..(421): unsure at all n locations
taccgcatntgaagcatgagcactntcccttggncttggtcttgcttggcttgtacttgcgaccctttagcgccgtcttgaatcttttgatgatgagggccatctcttcatcattaagtccggccgcctcaatttgcgccactttgctaggtagcgcctccttgctccttgttgcttttagagcaatgggttgaggctcatggattggaccattcaacgcgtcgtccacgtacctcgcctccttgatcatcattcgcccgcttacgaattttcctaggacttcttcgggcgacattntggtgtacctgggattctcacgaatattattcaccaaatgaggatcaagaacggtaaaggaccttatcattatgcggacgacgtcgtggtccgtccatcgcgtgctcccgtagctccttatttt

SEQ ID NO: 60464 - DNA, 405 bp, Zea mays
  unsure (1)..(405): unsure at all n locations
agctttattttctactacatgtcatcctcaaactgatggtcaaactgaagttgtgaatagaactttgtctactatgttaagggcagttctaaagaagaatattaagatgtggaaggactgtttgcctcatgttgaatttgcttataatcgatcattgcattctactacaaagatgtgcccatttcagattgtatatggtttgttgcctcgtgctcctattgatttaatgcctttgccatcttctgaaaaacttatatttgatgctactaggcgtgctgaattgatgttaaaactgcatgaaactactaaagaaaacatagagcgtatgaatgctagantataagttgctagtgataaaggtagaaaggaaataaattntgaacctggagattagtttggttgatt

SEQ ID NO: 60465 - DNA, 466 bp, Zea mays
  unsure (1)..(466): unsure at all n locations
gtatgcacccgatacccgttttcggaatgggtgacgtgcgtcaatgaaattgcgcgaattctccccgaacatgagttntggaactaaagtagtggattgggcatgttcgttgcaaaaaacgaagaaatcgttccggtggcaaaaactcgtgctttgtatgcacccgacacccgttttcggaatgggtgacgtgcgacaacgaaattgcgtgaaaccaccccaaacatgagttttggacctaaagtagtggattgggcatgttcgttgcgaaaaacgaagaaatggttcctgtggcaaaaactcgttctttgtatgcacccgacacccgttttcggaatgggtgatgtgcgacaacgaaattgcgcgaaaccaccccaaacatgagttntggacctaaagtaatggattgggcatgttcgttgcgaaaaacgaagaaatggttctggtggcaaaaactcgtgcttta

SEQ ID NO: 60466 - DNA, 424 bp, Zea mays
agcttctccaccatgtcgctgctagccaagttgttgcatctacctccatcaatgatcaaacgacatgaacgctccttaatgacacactttgtttgaaacaacgtatgtcgctgattctgctctgccttctccatttgtgcactaagcacacgctgtacaatgaggctctcataatgctctgcatcatctgcaccaatctgttcttcgggtggttccttagtgcctgcatcatcagccgcaagcaaagcaagtgtagcttcatccaaatcactagcagaggaatacccaccatcgtcttttaccaccaaaacacgctgattaggacaatcacgctgcacgtgtccatagcccttgcatcgataacacagaacatctcttgttctacccgtggaggctactgaagaggcactacctgctggtttct

SEQ ID NO: 60467 - DNA, 466 bp, Zea mays
atcaccttgcattctgcccctaacttcctagcaattacgtttctattctcttctacaaatgcaaatgaagcattcaaagcacaataaattgtagagggttcattcactacttttctatgaacatttgcaacatttcttttaggaacaacatttctcctagtaacatttctatcatacacataagaagaactaggagcaaacacggcatgagaatcataaacatatgaatcaaaagcatcataacttctatatctagtgtgtctttaatcatgatacaaaaaggcatggttccttttagcactagtagccataggggccttccctttctccttggcgggaatgggagccttatggcttgttaagatcttggcttccctcttgaagccaagtccatccttaattgaagggtgtctaccaaccgtgtaagcatccctagcacattttagtttttcaaaatcacttttgc

SEQ ID NO: 60468 - DNA, 457 bp, Zea mays
  unsure (1)..(457): unsure at all n locations
agcttgtgaaggttcttcatccacacatgtgctaagcgacgatgccacagccagccaatgctagtcttagcaattaagcatgcatctagaccggcctcctcttttgcaaaatcaactaagtaaaggttaccatctaatacacccttaaaagctagttgtagcatcccaaaaattcaaatcctgaaattttctcaaactcgctctaaattcaaaatgaatctcaaatttcatttcaaaatgtttgtttgcgagttgatatcaacaaataaattatagtggtctatattctctccaaaatcctcctcaaatatcctacaaatgtttctccagtgatccccctcaaattctttccagaaatactggccagatatttctcgagtaatccccttcaagctctttncagaaatattgcccaaatattccaccaatatatctncaagtattttcttcctgagaa

SEQ ID NO: 60469 - DNA, 324 bp, Zea mays
  unsure (1)..(324): unsure at all n locations
actcaagctttctanagctctctatgggcttaagcaagctccacgcgcttgtgtatgaattgtttatggatttctggctttccaaagacttcaaaattgggaatgtcgtcctcctctattcctaaaagaattggcacagatctatttgttcgtcaaatctacgttgatgatattatttctggatctactgatgaattattttgagaggagttcggaataatgatgtcaccagaatctgaaatgtctatgatatgagaatagagcttctttcttggccttcaaatccaacacttgacatatggaattttcataagtccatcaaaa

SEQ ID NO: 60470 - DNA, 417 bp, Zea mays
agcttgtggaggttcttcatctctacatgtgctaagcggcgatgccacagccagcccatgcaagtcttagccattaagcatgcatctagaccggcctcttcttttgcaaaatcaactaggtaaagcttgccgtctagtacacccttaaaagctagtgaaccatcacatcttctaaagacagacacatctatatttgtaaacaaacaattatatcccatattgcataattgactaacagatagcaaattatattcaagagactctactaaaaacacattagagatagagtgctcatttgagattgcaattttacctaacccttttaccttgcgcttgattccatcaccgaatataattgaatcttgggaatccttattcttgacgtaagaggtgaacatcttcttcttccccgcatat

SEQ ID NO: 60471 - DNA, 481 bp, Zea mays
  unsure (1)..(481): unsure at all n locations
tactcagcttctaagggagaacacattttacgactaacaaatgttcatttttgtatagatatgaccngnagcgcatgccaagcagggaagcaagttggagttcatcatccacacaagaacatcatgacaaccgacaggccacttgagctactccacatggacctattcggcccgatcgcttatataagcatcgacgggagtaagtattgtcttgtaattgtggatgattattctcgcttcacttgggtatttttgttgcaggagaaatctcaaacccaatagactctaaagagattcttgagacgagctcaaatgagtttggattgagaatcaaaaagagtagaagcgacaatggaacggagttcaagaactcataaatcgaaggatttcttgaggaggaggagggcatcaagcatgagttttctccctaacacctcaacanaatggtgttgtggaaatgaagaatagaactcttttggat

SEQ ID NO: 60472 - DNA, 418 bp, Zea mays
agcttgcttacgaagcagtagtggataagatgcttcggagccacaagaaattttgcagtagatggttgagtgcagtaaatgtggcctacgctgactcgctcgactgtttttatactgcgtaacaggcgcgggttgcgaaaaaagtacgcgcgtgtgcacgccaccttcagcttctttctacctgtcaaacctccaattctagttcttttttattaaatcattctccctaacgagcttcgggaagctatttttggaccttcaacacaaggcctctcaattttatttttttacgatctaagctcgttatggagaaacgagctcatttcgcaaggggccactgttggggcctactttaccgaaggtcctccaaaaaccttcacttcggcataaacaaatgtgtttaggtacatggcaacaa

SEQ ID NO: 60473 - DNA, 405 bp, Zea mays
  unsure (1)..(405): unsure at all n locations
tcagctccatctatgttatggataggttntgagtcagtccagtttccttcggcccttctggcagcttcctgacttccatgaatagcgatgggtccttgatccgaaggtatcttcatgcaaagataagcaggatgaagaattgcttcgaaagcattgagggtgccacgaccaataattgcattgtaagggtattccatgtcaacaatgtcaaacacaacttgctcagttctagtgttgttgatgaacccgaaggtcactgacatggtgatcttgcccagtgctacaatctgtcttcctccgaagccacagagaggatgtgtagcatcatgaatcttatcttctggctcttgcatttgtctgaaggccttagcaaatatgatatcagctgcactgcctgtatcaacc

SEQ ID NO: 60474 - DNA, 468 bp, Zea mays
  unsure (1)..(468): unsure at all n locations
agcttgttagagaagctgatggtggggtaactttgttacaatcccattatgtggaaaaggtattgagtcgctttggttttagtgactgtgatcctgctccaacaccttatgaccccagtgtgctattaagaaagaatcggagaatagcaagggatcaattgacatactcccagatcattggctcactcatgtaccttgcaagtggaacaaggccagacatctcttatgctgtgagtaagctaagtcggtttgtgtcgaaaccaggagatgatcactggcgtgctcttgagagagtgttgcggtatttgaaaggtactatgacatacggtattcattataccggacacccanaagtgctggaaggctattgtgatgccaactggatttctgatgctgatgagctctatgccacaagcggatatgtgtntctgtntgaggtggactgtttctggaagtctgaagcaacta

SEQ ID NO: 60475 - DNA, 441 bp, Zea mays
taaagccatggtaagtagcataggcaagtaatatgtgaattgtctcaagcctagctacgggtgcataggtttcaccgaaatccaaaccttcgacttgtgaatatcccttggctacaagtcgggctttgttccttgtcaccacaccatgctcatcttgcttgttgcggaagacccacttagttcctacaacattttggtttggacgtggaactaaatgccatacctcattccttgtgaagttattgagctcctcttgcatcgccaccacccaatccgaatcttgaagtgcttcctctaccttgtgtggctcaatagaggaaacaaaagagtaatgttcacaaaaataagcaacacgagatctagtagttacccccttttgaatatcgccgaggatggtgttcacggggtgatctcgttgaattgcttggtggactcttgggt

SEQ ID NO: 60476 - DNA, 481 bp, Zea mays
  unsure (1)..(481): unsure at all n locations
agctggtcaattgctgctaggccgaccttggttatatgatcgtgatgtctagattnttggaagaaccaacaagttgtatttcttctacaaaggagagcgaatctctttgtttccttcgacaccggaagaaattatgaaggatgatctaaagaagaaacagcgagagagaaagaaccacttgagagcgaaccacaaaaatagtaaggaagagtttccaaagccaaataaaactccacaacctccaataaccaagacactgggaaaagagggattagtcatgatgactatgaaggggatctacaagaattgagtgaatctaatgccatgttctntgtgctcctttacaaggacaccctactttgtactaacaacttaccctctactttgccaagtattgtctttgatacattacaggaatatgaaggatgtgttcctgatgaagtgccaccagcgctaccacctaagagagggattgaatatc

SEQ ID NO: 60477 - DNA, 439 bp, Zea mays
tccaaggcttccagatgaagccagtcatagctcatgccttgtttcattgcactcatgatcatgaggagtacctccagacatatgtccgaatgttcttacgtctcagagcacaagcgcctacagtgcctaatgaaattgtcgttgaagccatgattaaggggcttcgtctaggacctactgctcagtatttcgctagaaagcccccacaggctctggagaagctgcttcagaagatggatgagtacatccgggctgacaatgacttccaccaaagaagggaggaagcatataggttctctgaaatgaccaggggcttcgaaggaagaacccacccgaggcacgtcaggtcaattcacaactccatccagagtgatgacagcgaaagtcaatagcagagaccgcagtattcttcgcaagcttcgggacagcaacaaagctc

SEQ ID NO: 60478 - DNA, 438 bp, Zea mays
  unsure (1)..(438): unsure at all n locations
agcttcgggtctttagctntgcaactnttgtcaatatgacccgaaacaatctgagaatcagttttaaggatcgccctcctgatccccatcgcctttagtttccgaagacccaggagcaaggcttcgtactcagcaatattatttgtgcagctgaaatccagtcttgctgcgtagcaagttttaaccttggacggtgaaaccaaaacagcagctgctcctgctccgaaggttccccaggagccatcacaaaacactatccatgcttcggcatctttattcgcttcttcgccctgagcccctggcgtccagtcggcaataaaatctgccaatgcttgagattggatcgaggatctgtgcacataatcaatgtaaaattcattaagctccgcagcccattntccaattcgggcagtagcttctttatttctcatgatatct

SEQ ID NO: 60479 - DNA, 463 bp, Zea mays
  unsure (1)..(463): unsure at all n locations
actaagcttcatttctcttgtcaaattttctgattgggaaagaagcttctaatttaattctggtattnttgcttcagcatccactagtaagccttcggctgtttgtagctcgaggtctttcttctcgattgcagcagattgctcctttattttgttttctaaatttccaattataacttcttgccttttatcctctaagtcttgctgcatttttaacgccttgctcataagtatgctctatggacaaatagcattcgttagaaaatatcttcgtactacaaataataagagttagatacaaaatgtttaccttgaaattagaatagaacaagctgccgacaatatgttgtcgacggtagcggccgatatccgctttaagcttccggaagccgatactctgtgataaagaccgacaccttcgcaccggtggtctcgatgcagctacccttcatataatacaccg

SEQ ID NO: 60480 - DNA, 411 bp, Zea mays
  unsure (1)..(411): unsure at all n locations
agctnggcatacaactggcaatctcgtaacctctatggtagtttccccaagtgctcttcatgctcttgctcattatgggattatacaaggatatcatcaatgaacaccactacgaacttgtcgaggtagtccatgaacacgctgttcatcaagtacatgaaataagctagcgcattcgtcagaccaaatcacatgacagtgaactcatatagtccatacttagtgataaaggttgtcttcggtatatccgaaggccggattctgagatgatggtaacctgacctcagatctatctttgacaacacaccggctcctctcaactgatcgaataagtcttcaattctgggcaggggtacttgntcttaacagtgacttcattcaaggatctttggtcaatgcacatccttttcg

SEQ ID NO: 60481 - DNA, 467 bp, Zea mays
  unsure (1)..(467): unsure at all n locations
taanagattcgcgataacaaggaggaccttcgaattatcaaattaaaaattcgaagcaacaaaaagtcgttctaaggaacgcagagtaagtttgctgaagtcacaaaaagtcgttccaaagggagcgcagtgtaagttttctgctccaaagtcgttccaaagggaatgcagagcttacagcgaanagtcaacgctgataccgcctaaagtaaaaggcgaagcgcgaaaagtcaacgcgaataccgctgaaagtaaaaggcgaagaagctcctaagggaggcttacagcgaaaaataaacgctgattccgctgaagtaaaaggcgaggaagctcctaagggaggcttatagcaaaaagacaatgctgattcaaaaagattatgtgttttatcgcaggaatgtgtgtgtatcttcggaataaacatcatcttacataacataacatcatcacatcatttcgcatagcat

SEQ ID NO: 60482 - DNA, 471 bp, Zea mays
  unsure (1)..(471): unsure at all n locations
agcttaagttattntattacagaccagaactaanaaaaggcgagtgctgagtagtaatattatacaaaccaagggaggcacagactcctcccgttaagttataagcaaaagatcctatgtggaggaccgagtcctcccgcacttcagtcttgtttttcttctttaggaaccaccttggcacagaagcagcagaaatctgctacttcctcacctaaaacaacgaagggataaaccctgagtatggaattactcagcaagtcttactcgactaaagaaaagactctcaagggtatgcttgttatatgggagtcaaggtaaggcttttcaataatcaaagactctantttgcagaaatgcttactaaagtggatcctctaaaatccaattttatttgtcaagttaagtacaattacctgcaactagagttctttctaccctagttcaatcactggtcctgcactagccaatttc

SEQ ID NO: 60483 - DNA, 455 bp, Zea mays
  unsure (1)..(455): unsure at all n locations
ntagctgatttagagtcccttgttggatgatccccaggtttatcttctccatttcttggcacaaagtgttctcggaggtcttcgccataagacagtggcaggaagtcttacgactcagtgcatctgccaccacattggccttgcctgngtgataatggatctccagttcatagtctttaataagctcaagccatcgtctttgcctcatatttaattctgactgggtgaagatgtacttcaaacttttatgatctgtatatatgtgacagatatttcccagcagatagtgacgccacatcttcagggcatgaaccacagcagctagctccagatcatgagttgggtaatgctcctcatgtcggcgcaactgccttgaagcatacgcaattactcggccctcttgcatcagtacacagccgagcccactgccagatgcatcataatatacatcaaaa

SEQ ID NO: 60484 - DNA, 396 bp, Zea mays
  unsure (1)..(396): unsure at all n locations
agaacacattctacgattacaaatgttcattctgagacagacaggacttgtaccgatgccatgcagagacacaagttggagcccattatccacacaataacattatgacgacccgccggccgcttgagctactccacatggatctatttcgcccgattgcttacataagcattggcgggagtaagtactgtctacttattgtggatgactattctcgccttacttgcgtattctttttacaggaaaaatctcatacccaatagaccttatagggatttttgagaagggctcacaatgagtctggcttaacgatcaagaanataacgaagcgacaacgggacggagttctaaaactctcaaattgtatgctttcctgacgaggaggcgatcaagcat

SEQ ID NO: 60485 - DNA, 473 bp, Zea mays
  unsure (1)..(473): unsure at all n locations
gcttgctctctcgctcttgttagaagtgtgagcatgacgtccttatcttctaagcttatatgancgcagagttgcatgaagcttctttcatcctcctcatcctcatttgttcttccgctatcattttcattagccgcacaccatgtgtgggaatcgaaatgcgaagacaaaccttgtggacaggtggaacatatcaataggcctccatcgttcatttacttcttcttgcttcacagcgttagtttcacaaataccaaaggaagtagacacacaaaaagaactatcatgtatggactcatcaaatttgattttaattctagtccaaatatcatgcgcatgaggaatatgttcataataattcattatgaaggcatgatgatcttccttgctaatgagaattactangatgtcaaaagctagatagcttaagcgtatacatccttgtacttcttcataagatttttcttatcata

SEQ ID NO: 60486 - DNA, 438 bp, Zea mays
  unsure (1)..(438): unsure at all n locations
aacctggaagtacacaggccaataaaatacgaaatattctcatgtttacctaccggttcataggattcaccgaaatccaaacctttaacttgcgagtatcctttggccacaagtcgagctttgctccttgtcaccacaccatgctcatcttgcttgttgcggaaaacccatttggttcctacaacattctcgttaggacggggaactaaatgccatacctcattcctcatgaagatgttgagctcctnttgcatcgtcaccacccaatccgaatcctgaagtgcttcctctaccctgtgtggctcaatagaggaaacataagagtaatgctcacaaaaatgtgctacacgagatctagtttgtacccccttatgaatgtcgccgatgatggtgtcgaccgcgcgatcctgttggattgcttggtgcactcttgggtgt

SEQ ID NO: 60487 - DNA, 484 bp, Zea mays
  unsure (1)..(484): unsure at all n locations
agcttgtgatttatccaatataaaacaagcagcatctcttaacatagattttctatggataaactcaacacaagagatggcattagtagcacaagcactagtttcttatttagcaaccctctatatgtgaaaggcaaacgaattgctaaaatagagaaacctcataatatggactaaatttcccttgagccctcatgcacaatatattttgaatgacatggataatatgcatggttattcaatgaagtctaaggggatgacttaatccatattatggtgagtgtctaatatagaagaatcaaatccaaattaactagatagagaatacgtcacataattntggattgtgcaccatatgataatattcattcaacttccaattagacctttatttcataatcaacaactggtgtatatcctcaagtgcttctttttccttagtggctacacaagtcacaaaaagataagaattgaaaataatatg

SEQ ID NO: 60488 - DNA, 472 bp, Zea mays
  unsure (1)..(472): unsure at all n locations
tcagcttaatgctctccagctgctgcaaatatgccttcaccatagaaaaatatttagttntagaggtgtttagtttatcagccccaaaactattttaaccaatggtgaaaaacagcgaggcatggcaacattggttgagagctgctgcacatatgtctcgaaataagtgctctgtctcatcctaaacaccgtaagtatccattgaaacaaactggtacagaacacagccttaagatcttattcatatgcaaaaaatctttattgtcaattatccctaacctcatatttttggttactaatcacacgccaaaatcagtgcacctaggccatactgaagatgctcttattcaagtattagttgctgaaagctctagatatgttacttgtaaatgctaaatatagaccctgatgcaaaaccttatagtctagcaaattatttgccctcaagtactgtgatgctgtcttatatgat

SEQ ID NO: 60489 - DNA, 401 bp, Zea mays
  unsure (1)..(401): unsure at all n locations
agctngccagtacttgtcaaagcaataacatctaccagtacagcaactgcagaccataccagtgacttggcccttcgcatgctggggactggatatgattggacctttcaagaaagctcaaggaggatacactcacgtactgatagcaatcgacaaattcactaagtggatagagttcaaacccattgcttctttaacctcagctaaggccgcggaattcatacaagacataatattcagattcgggataccaaacagcatcataaccgacctaggatccaacttcacaagttcagaattcttcgatttctgcgagcaaaaaagcattcagatcaagtatgcttctgtagcacacccaagagccaacgggcacgttgaacgagctaacgggatgatattgg

SEQ ID NO: 60490 - DNA, 419 bp, Zea mays
agcgtacaccaatctgcccgtgcaaagaccggctacatgcgtactctactaacacaacaaatacaccagacaacgtacgtaacgccttcgcgagcatagccgaatgtgcgaaggtacacaacctgatcatacaagccattacatatgtacaagcgagggcatcacaccttacatcggctcaaccttcggaataattcccatgttcctatagttaaacaacattatcctcagctcctcacccgcaaaaagacttcgcagctccccctcacctgaactcacagtggccggcaaggacaacagttcttgcctaccagccctgctcacacgaagccgaccgccgtccgcctcactcactctacgcttcgcaaccgcccttcgccgcctgcgcccagcactcggaccaggcacaagcttcagca

SEQ ID NO: 60491 - DNA, 453 bp, Zea mays
  unsure (1)..(453): unsure at all n locations
agcttgacaatgaggagatggcgctcgtcatcaagagcttccgccaaatcctcaaacaaaggagggggaaagactacaagtcccgctccaagaaggtttgctataagtgtggtaagcccggtcactttattgctaaatgtccattatcaagtgatagtgacaggggcgacgacaagaaggggagaagaaaggagaagaaaagatactacaagaagaagggcggtgatgcccatgtttgtcgggagtgggactccgacgaaagctctagcgactccttcgacgacgaggacgccgccaacatcgccgtcaccaagggactcctcttccccaacgtcggccacaagtgcctcatggcaaaggacggcaaaaagaaggttaaatctaacacctncactaaatatgaatcctctagtgatgacaatgctagtgatgaagaagataatttgcgttctc

SEQ ID NO: 60492 - DNA, 463 bp, Zea mays
  unsure (1)..(463): unsure at all n locations
tattacggacctataaatctcagcttacagccgccccccgctntcttctgcacaacctatctgtgcttccagcttcctccacggcaacagaagcgtcgcgagcatcgacgacagacaaggccgggggagaacgaaagcccatcgatagagaggcctcaagtgaccatgtctgctccggtggcttaatctctactacttattaagtaagcaatagtagtctgcctctgacatgttctgcctctcacttgttctgccaccgacctgttctgccaccgactgtcgtacaaccccacgccaaaaaatcattttgatgcggcactagaggcgttagtatgaacaacaaacaacacactgacgcttataagccacgtttcgacgcttttagtggccggtatggcactaatcaaaaaaccccatagcagcgcctgtgtccgagcggtttatgcagcccagtggttcgtgc

SEQ ID NO: 60493 - DNA, 481 bp, Zea mays
  unsure (1)..(481): unsure at all n locations
agcttgtaaaaagaagttaaactcataatttattctaatgtcaaagttcataatgaagggacctgtactctgtttttaagttagttggatattaactttgtccacatgaagcgagaggattaactttactggacattagatgttatttaagttaaactttgttggatattagatgatcagctatggtgcatttttagatttttagtgatgtttcattgtgcttttttattttatttaaatattttctattttctttgatttttccctgatttttcgaagtattttgtcttagaaggagtttttagcacattggttaccaaatagtgccaggaaaatacacccgagtgtagaaaatactcacagaaaattgaagtttcgtttataatccccttgacgaactacttccctagtnttttcatctattttgtgtcaaaactaatccgagtggtgtcgagtcacaagtcaacgccgactgacatac

SEQ ID NO: 60494 - DNA, 439 bp, Zea mays
  unsure (1)..(439): unsure at all n locations
taccacatttgaagcatgagcgcttccnctntgtcttggtcttgcttggctgccccttgcgaccctntagcgtcgtcttgaatcttttgatgatgagggccatctcttcatcattaagtccagccgcctcaatttatgctaccttgctgggtaacgcctccttgctccttgttgccttgagagcaacgggttgaggctcattgattggaccgtttagagcgtcgtccacgtacctcgccttcttgatcatcattcgcccgcttacgaattttccaaggacttcttcgggcgacattttgatgtacctgggattctcacgaatattattcaccaaatgaggatcaagaacggtaaaggaccttagcatcagtcggacgacgtcgtggtccgtccatcacgtgcttccgtagctccttatcttgttgataagggtcttgag

SEQ ID NO: 60495 - DNA, 402 bp, Zea mays
  unsure (1)..(402): unsure at all n locations
agcntttaaagactaccacctcattctntttcggcttcggagtaatttcctctctgtcaaagcgaattagctcctttttggcctcactgaaatagcctaacttcatcaacttaagcatgtcatcttcggtaatggtggacctcccaaactccaggtggctgggtttagatgacacgacactataatcatctttagattcatcttcctcagcaccaacctgctcagcctcagcagcaggtgcaccttcgtcagaagcgtcttctgacactactagccccgaccgtatcatcacttcggaaattggagcggtctcagcagtttcagcttcttctccgtcatgtgtaaccctagtagtggaacgtacccttgccatttgatgatgaatttctcacaatctttgat

SEQ ID NO: 60496 - DNA, 449 bp, Zea mays
  unsure (1)..(449): unsure at all n locations
ntngaacaccacaacctcattcttttccggcttctgaatagtttcctccccgccgaaacgaaccagctcctttnttgcctcactaaagtagcccagcttcaccaattttggaagatcagcttcagagatggtggactttccaaagtccaaatgactaggtttgcttggcatcccgcagctgtactcatcttcggaaccaacttcttcgacaccagcttgtgttgcttcggcagcaggtgtgtcctctgatggaaccagcccagagcgcctcattgcttcagaaatcggaacagtttcaacggcttcggtctcgtctccatcacgctcaaccctagcagtggagcgtattctggccatttgattttaaactttcttgaaaaattctttggaagtcnaataacttttttccgaagctcttatcgtgacgaagcacaattcacactggagct

SEQ ID NO: 60497 - DNA, 436 bp, Zea mays
agcttcgtcatctgataggaagttgccctgaatgtaagaaattatttcagttctccaatcttcactgtacacaggagaaatagtaagaactgctctttcaagtaactccactgaaggtgcctttattgtttcgaagaatacatccgaaggtagcggcagcccctgtgctgcagatctggctaacaaatcagcatgttcattttgccctcgagggatattcttaacagaaaatccttcgaaggaagcttcgatccttcggactgtgtctaggtatttttcaagcttcgggtctttagccttgcaacttttgtcaatatgacccgaaacaatctgagaatcagttttaaggatcgccctcctgatccccatcgcctttagtttccgaagacccaggagcaaggcttcgtactcagcaatattatttgtgcagctgaag

SEQ ID NO: 60498 - DNA, 458 bp, Zea mays
ttgtggtgtcatgaatttggaggcatgctatatagatatagtcatctattataccatatcatgaataaagggttatcatttagtgacaattggccaatatactcactttaatactattcatgttgagtcacacgatcacatctttgtgactcattggggctgattggttgctggtccgtcgcgcctgtctcgtgcgagcctggtcccccagaccagcgaaggtaatttctggaggtttctccaggcatgcaggtccaactgcgaccaaacacccgcacgtgcctggtcaacgcataccaaacatccgctcgtgcccggtcaacgcatgccggagtctatacctgcaaatggggtgggtgtaaatgagtatcttatgtgggtctaagaaatgattttgttttggtgggttgtgatgggttctaactattaacgggttgggttaggtgaatttattttat

SEQ ID NO: 60499 - DNA, 408 bp, Zea mays
  unsure (1)..(408): unsure at all n locations
agctctaattgtgtcgccatcaatcaccatatagttggagattgaagcacccttgtgggttttggtggcttggatgacaatccacttaaaggattgagatgtgctgctaagtatctgaacagagcgcttatattcnacgctcacaggggtcaacacaagtgtataagtgtgatggtccaaacactaaaatgattattggataaaggacatcacaaaataacgatgaacattctacaagtgggaatcggtgtgcataactgtaacgccctgaatttggcgtatactatttctttctcaatatacatccaactcaggtgctactctctttcgctcttcgcgttctgctccttcctctatctcaccagaataaaaaaatggtatccgcgtacgcgaaacaaaactctatgt

SEQ ID NO: 60500 - DNA, 444 bp, Zea mays
  unsure (1)..(444): unsure at all n locations
cttagtgctcctcaatgatcatctacaagtatcttccttgtgcttcaattgttagttgcaattgtatttgaacctaaaaacgtaatttattcagacaagcacaagaaagttggcaaggaaaatctagattgatcttgaagctcaaaacgcctctaagactacaacctcatctacaaaacagaagaactgcctacactagactatcgacagctaagcattactacaaccatacccttatgtgtaacttgacagttaataagtgaatattaataatgggccacaatatcagcttgtagaagtagccccccagctaagtaggactgccgatcgtagtaggattgtctgtgaactaaaatgatgtaaaaaatagaaataaattaacagttttcaataacagacctctagntgctcatgtagtcgcttctgaaccttcatttgcatctt

SEQ ID NO: 60501 - DNA, 425 bp, Zea mays
  unsure (1)..(425): unsure at all n locations
agcttctccggtgaactcatgcaccgaagctggttcaatataacgcggccgatgcgtaagaacctttatctttttccttttcggttctggctcgctaggagcagctgcagcttcttcttttgcagagattgtgttttttctcttctgccttcgaatgggatagcagtaatcagggtagacaaacccaatggcatcaaatacccgattcagtctcttctttnttcggcctccgaaggctgctgacattgcattatcttcagccttcgagtaggtcccgagtagctcatcacttanattgtcaatgctnttcaaccactcatcatctggctcaataaatttatctccaaatttgaaggtgtacttcagtctcacaagcccaccttcgtcggcctcttttatgggttcttgtggcatttcccatttct

SEQ ID NO: 60502 - DNA, 463 bp, Zea mays
  unsure (1)..(463): unsure at all n locations
tttgntgctgaagcttcaaagctacagcctgaagctgaagctgatgctgggccttcagagcccaccaaggaacaacctttggaaaccaaagaaaaagctacaaaggcagctttggaagccgaaaaaatgtcagagccaattttggttgaagaaactgacactactgcccccgaagcaccttcctccatacgcgattacattgtgcgacatgcttcggggaagaaattatctgaagaagagatttatgaagctgatcattatgctagagaattaaaatatccaaagggggcactagtgttcaatgggacagacgaagatgacttcctatactgcctccctgataataaagaattatctgtctgccgggagatggctaggagtatggggtttccgaaacttgaagctggactctgcgctatgacgaaggacgatcttgcagatagtcttgcatataatagtttaa

SEQ ID NO: 60503 - DNA, 453 bp, Zea mays
  unsure (1)..(453): unsure at all n locations
agctntatcaaatggacgtgaagagtgccttcctcaatggaccaatcaaggaggaggtctatgttgagcaacctcccggctttgaagatagtgagtaccctaaccatgtctataaactctctaaggcgctttatgggatcaagcaagccccaagagcatggtatgaatgccaaagagattttcttatttctaatgacttcaaagtcggcaaagccgatcctactctctttactaaaacaattgctaatgatttgtttgtatgccaaatttacgttgatgatatcatatttggttctactaacaaatctacatgtgaagagtttagtaggataatgattcaaaaattcgagatgtctatgatgggggagttgaagtatttcctatgatttcaagtgaagcaactncaagagggcaccttcattagccaaacgaagtacattcaagacatactca

SEQ ID NO: 60504 - DNA, 455 bp, Zea mays
tcttaagtatgtcttgaatgtacttcgtttgacagatgaatgtgccctcttggagttgcttcatttgaaatccaaggaaatactttacctcccccatcatagacatctcgaatttctgtatcttgatcctactaaactcttcacaagtagatttgttagtagaccaaatatgatatcatcaacataaatttggcatacaaacaaatcttttgcaatagttttagtaaagagtgtaggatcgacttttctgactttgaagccattagtgataagaaaatcccgtaggtattcataccattcatacatggttagggtactcactatcttcaaagctgggaggttgctcaacatagacctcttccttgatcggcccattgaggaaggcacttttcacgtccatttggtaaatcttaaagccatggtaagtagcatatgcaagtaatatacgaatgact

SEQ ID NO: 60505 - DNA, 443 bp, Zea mays
  unsure (1)..(443): unsure at all n locations
aagcttatcagcaatttcttttcctttccccgacgctgcggtcacggcctcttcggcggcggtggtagcttcttctgcagccatgtctagcagtatttggtcaatgtgttcaattgtgctctccaggttcaaatcttcagctgaggcagcttcggcagctgcggcctccgaaggtgcaatttcaatatccgtcccctctgcagccgctggtgttttctgggctgaagctctttgcggcgtcttgtcaattacctctgtcacagtgataattctttgtttctttgccttgattgttttcttcgattnttcgggctccttgtccttctgaaaaaactttgtcagttgagggcccagtggacttagcttccaggtaaggattcagtcattaccttcagaatttcctcaacgacagcagcagaaggtgatgcggnggtttcttctgc

SEQ ID NO: 60506 - DNA, 477 bp, Zea mays
catctaagcttccacaatttggatacccttttgggatcataaatttagttacagctgttgagttagtatctctgaatctatccaaatctggacagcaatgtttgtttgtattaactgacttcgatacacattgaatcactttgagatgattataaatgaattatagacaattctattagctttctaaaaagtctaggatcacctgatttggatttatgaaactccagttatgggattttgaagtgaagagccgaattctgtccaaatctggacagaattaaagtttagcactgtttgaccattcaaactgttgaatcatgttgtgatgataatataagagttataggacaagtttgggagccacaaaaccggagaggattccagaggctaaattctccttcttatttaaaattgaataaaaaagggaatttatcctctccaatcctctccgggtttattagctccaaactagctcat

SEQ ID NO: 60507 - DNA, 395 bp, Zea mays
agaacgatctggctgacagcctagctcacaacagtatagaggcgcgacaaatggaattcttatacttttgttgaattcaaaatttttccgttgtttaaaactattgacacagacatattcctgtctgcacggcctgatactcatcaatgccctcagaccacataaagatgctgaggacgaaggatgtactatacccctgagcaaccttcgttccgaagtaattgaactgaggaacgaacgtctcgaataagacaaaatattatactcatcgatagataaaataaaggaggacgaagctgtttctaaagtcagctgaagctacagacgcgaaattataaccttctgaacaactggccaagccaagaaaactatacttgagaaacaaacgtaactca

SEQ ID NO: 60508 - DNA, 413 bp, Zea mays
gcctctgtcggtaccctgaatcaagggtacctcttactacagtatgaagccacggtgtccatgtggctatctttattcgcgcggcaatcaacgcccgaccccaccatgtgggcggctccggagctgccatgtggccagaggagacaatatactctaaggtgtcaacagtgggtccagacccccatgggaaagtgacggtcccctggatacacagaccggacctccgggcgaggttggaggtacaaaccacacccctgggacgggtcccggacccctcatgaggggtctgggccactcatagtatggtcccaggattccaaggcaaagaatacccaagccttaatcaatgccaagcgggggtccggtgctgacacgtgttcggagcataccacattgcgctccactccccgctc

SEQ ID NO: 60509 - DNA, 346 bp, Zea mays
  unsure (1)..(346): unsure at all n locations
acctgagtaacagnctaggcgactcatgagctccgatctagctgtcgcatcaataacggaatctattctatgcaaaggatactcattctttgggcatgcctttgtgagatctgtgatatctatacacattcttcacttcccgttggtcttttttaccactatggcattggctaaccaatctgaatatgtcacttttctaattactccagcacttaaaagtactttgacttcaattcttgctcctttggctttatcatccgacatcttctgaagcttctgtttcctcgatctgatggtgggatctacattaatagaatgttcactgacatctgtattgacaccacat

SEQ ID NO: 60510 - DNA, 419 bp, Zea mays
  unsure (1)..(419): unsure at all n locations
agcttgagttgatttgaataatcaacccagaagtcttcatcttatgctntatatttcagcactctgtttcaaacttttgcgagtctattgggtgtagcccccgagctctgagttgattntgaaataataaattcaaaggtcttcatcttatgcttttttccaaaatgatctttcggaatagcctggtgacgacatctgtcactatcttgtttggtctggagtcaattcaatcggcgacgagttggagtccggccagtcagaatagagaggtcctggctggacgccactcggtcatgaacttcaatgcctgtgtagattaaacttgtgcttggtgaccgcatctggacttcctcccatttcagccgaacttctcctttgtcgtgggatattcattgccgatatgttgcaggtctcaccgc

SEQ ID NO: 60511 - DNA, 480 bp, Zea mays
  unsure (1)..(480): unsure at all n locations
agcttcgcacctctgaactaactcggttgcatcgttctttgctggtggccaatagaatcctgacttgaagaccttcccgactagtgttctggatgctgcatgtattccacattgcccagcatggacctcctccagaagttgctttccagtggacgggaggatgcacttcatgagaacgcctgatacaccccttctatacaatgtctccccaatgagcgtgtagtgagccgactatctggcgatgcgctctgtcgagttcttgtcgtctggttcttcttcattctttatatacttaatgatcggccttctccagtcatcanagtctgactcgagttgatctatgatgttgcactcttctgtttgatccattgagatactcggctgtaggatatcttgcacgaagactccgggtgggacctgagttcgactggatcctatctcggacagtacatcggctgctgtgtccgatctttttacatg

SEQ ID NO: 60512 - DNA, 468 bp, Zea mays
  unsure (1)..(468): unsure at all n locations
actcagcttctttcgcttctccaagtagccccgtttcattatcatggtcacgtcttcttcagacacagtagatttctcaaaatctaggtggctgggttttacggtttacggttttgatgggatcaaaatgctatcatcctcctcttcttcatcaacattttttattcaatatcagcatgtttagcttcggcagcagatgtaccttcgtcaatggttccctctgtcacaactaaacccaactgtctcatgacttcggaaatcggagctgtctcgatggccttggtctcctctccttcacgagtcacccttgcagttgagcgtactctatccatctgatggatcttttgcggtttttacgaagttaatgtcttttgcagttttgacgaagctctctttnttgacgaaagtaactcaaaatgacggtctgctcgagagtgcagcacaaaagcttccgctatgggttaattt

SEQ ID NO: 60513 - DNA, 394 bp, Zea mays
  unsure (1)..(394): unsure at all n locations
acctgcggcatgcaagcttcagaaagccaacactnttcgatagagtgctgacttatcttaccccaatccggggccggaggcatcctaaactctcttcggcaacgccaccgaagagcaatgctcctggttgatagccgcatgatattgcataatccctcagctcttccttctcagccgtagacaacttttggccaaatatgttttgaaaattaaaatcttttttctccgaagtctcttcggcaacctccttctctttactaggcactggggccagggtctcttcggcagctgtggcagcttcttccgcggccatgttcaaaatcatcttatcaatatcggaaaaagtgccttctagatttgtatctctcgccgcctcagcttcggcagtcacaac

SEQ ID NO: 60514 - DNA, 439 bp, Zea mays
  unsure (1)..(439): unsure at all n locations
agcttcggcctcaccactgatcaactggataactgcatcggggtcttcgcggatgtatttttgctcagacgagaaggctccaactttagagaaactattctttaatcatttaacgcactcctggatatgtcatatcatttttctttgcccgcgcgaagctcatcaacattcttttgtgctctagaaattataataactgctatctcatgatttaccacttcaacttcacaattttcagttgcttcggcaaatttccttttcagctcttgcacttcggctctgtgagcttctacttgagcatacatcttggcttcactagacttcagcctttcgaccagagatatcaaaatcttatctntagcgagagcttgtaagacccaaaattggttgaagaaaaaataacatagcttatataagaaatanagatatctataatagt

SEQ ID NO: 60515 - DNA, 444 bp, Zea mays
  unsure (1)..(444): unsure at all n locations
agctntctcttagtgtcgctnttcatcctcatactgatggtcagncggagcgaacgatccaaaccttggaagatatgttgcgtgcttgtgttctgtcttggaagggtagctgggaagatcatcttgcattgacagagtttgcgtataacaacagctaccaggctagcatcaagatggcaccatttgaggctttgtatggcaggcggtgtatctcccctctgtgctgggagaccttgggagagagatccctggttggtcctgattgggttcagcagacttctaaaaaggttcgggaaattcatcagaatattntggccgctcagagccgtcagaagagttatgctgatgtgaggaggcgggatttggaatntgaagtgggtgaccaagtccttctcatggtatcacccactaaaggagttgttcggctcggtgtcttcggaaagc

SEQ ID NO: 60516 - DNA, 477 bp, Zea mays
  unsure (1)..(477): unsure at all n locations
ctcagcttaaagaattgcgataacaaggaggaccttcgaactatcaattatntnttttttcttcgaagcaacaaaaagtcgttctaaggaacgcagagtaagtttgctgaagtcacaaaaagtcgttccaaagggagcgcagtgtaagttttctgctccaaagtcgtcccaaagggaatgcagagcttacagcgaaaagtcaacgctgataccgcctaaagtaaaaggcgaagcgcgaaaagtcaacgtgaataccgctgatagtaaaaggcgaagaagctcctaagggaggcttacagcgaaaaataaacgctgattccactgaagtaaaaggcgaagaagctcctaagggaggcttatagcaaanagattatgtgttttatcgcaggaatgtgtgtatcttcagaataaacaccatcttacataacataacatcatcacatcatttcgcatagcataagcatcatacatcatgct

SEQ ID NO: 60517 - DNA, 432 bp, Zea mays
  unsure (1)..(432): unsure at all n locations
agctntcatctttcttctgtacaaacaaggttggacatccctaaggcgaagtacttgggtgaataaatcccttgtccagcaactcttgcaattgattcttcaattctgccaactcagcgggtgacatccggtaaggcctcttggaaataggtgtcgttcccggttgcaactcgatggcgaattcaatgtcccggtctggtggcattactggcaattcatcaggaaagacatctgcatactcacaaaccactggaatcttcttcaagggtaactccgtcatagcaaaagcacatgactgagtagagtcttgactgggcaaaaacaaggtgaaacttccacagatcggngaattgacttccacgatgcggctggctacatcaagcactaattggtgtagggtcatccaattagtgcccagaataatatccacat

SEQ ID NO: 60518 - DNA, 442 bp, Zea mays
tattacggacctatgatactcagcttatacaagagaatagaggcaagagctcgaccatatgttattatataaggggagttgtacaagcatggagtctgttctccactactcaaatgtttatccagagccgaatgtatagaattgatgaagaaaatacacgcaggcctgtgtggatctcacattggatgtaggcctttgctgggaaaagtttttcgtcaaggattttattggccaaaggcagcttcggatgcagcggaactagtccaaaagtgtgaaggctgtcagaaatgcgcaagagatcaaaaacagccttcatctctgactcagttaatacaacccacttggccattacaaaggtggggccttgatttgttatgtccattaccactagcacaaggaaatttaaaatatgttgtagtagcaatagaaatattttccaagt

SEQ ID NO: 60519 - DNA, 462 bp, Zea mays
  unsure (1)..(462): unsure at all n locations
agctntcatgtcaatatcaaggcctctggatttacttcatatggattnatttggacctacaaattatgtaagtgccggcggcaacctctactgtctagtgattgtagatgacttctcaacatacacttgggtgttctttctccatgacaaatctgaagttgcatctatattcaacaagttttccaagaaagcacaaaatgaatctgattgcaagatcaaaaagattacaagtgataatggcaaagaatttgacaacaccaacattcatgagtactgtgatgaaattgggatcaagcatgaagtgtctgcaacatatacacctcaacaaaatggagtcgttgataggaaaaacaggaccttgatcactcttgcagaacaatgatngatgagtataacacaccggagaggtttttgccgaactgcaacactgttgttatgataaacagctatttctcacggttg

SEQ ID NO: 60520 - DNA, 347 bp, Zea mays
  unsure (1)..(347): unsure at all n locations
tttgctggctttcattgcatatgtttcatcaattgttacatattatcgagatgcttgcaagctatacagacaatagtagttacctgggtatactctgccagcggtcaaagatactataactgtacctgtttgacattgttctttgaatatgccgtactaagacaatttgaattgatatgtaatctgcaagcagatttgcttaagatatttggtgaaaaacatgtgctntattatctttgttggcgcattagcaatgggatgttcatatttacttgtaaacaaggagtatgctaaagagatactttctgaagcttttgaacagaagacttctgggaatacaaaactca

SEQ ID NO: 60521 - DNA, 379 bp, Zea mays
  unsure (1)..(379): unsure at all n locations
agcttctaaagggagaacacgtgataggtttgactaacgtgcaattcgaaaaagatagaccttgtgcagcttgtcaagcaggtaaacaagtgggaggaacgcatcacaacaagaatgtgatgaccacatcaagacccctggagctgctacatatggacctcttcggacctgtcgcctatctaagcataggaggaagtaagtatggtctagttattattgatgacttttcccgcttcacttgggtattctttttgcaggataagtctgaaacccaagggaccctcaagagctttctaaggagagctcanaacgagtttgagctcaaggtgaagaagataaggagcgacaatgggtccgagttcaagaaccttcaagtgga

SEQ ID NO: 60522 - DNA, 339 bp, Zea mays
  unsure (1)..(339): unsure at all n locations
catttcctttgatagggaccaccacaatccatgacaagtcagtaacgaattgtagaagtcacaggccaatttgaggagggctcacgaccgctctagcaaaaaatagagcaagggatagtcgatgatgggcacagtagcagccaggacttagacgcgagaaccattaagggcatcatcagcttgtgttcgactcctaggaaggtctgactcatagnttatcatgaagagaattagcgagtcattggttccggtcaaatggaatcgacacctatatgagtcggcgcccgctgacagcgcctccctccctctcatgacccctccctcgtccccttccccgcc

SEQ ID NO: 60523 - DNA, 429 bp, Zea mays
  unsure (1)..(429): unsure at all n locations
agctnggaactagcggtatgactaaatctggttggcccttgtttcattctaaattataagatggttgatttcttagatatatttgttgtcatgcagcatatatctagatacatgtaaaaaaacaaataacaactttaattcataatagataagagtggttttagctgctagaagataacagatggtgtagttttagatgttggaagctacatggaacgtgttaaacaaattataatttggaacgaatgatgtaattcagatctaaaactacaacggaatataaattagagtttgaaaatatatttagtcctaataaaaaataaggaattcaatatggtatgtgtcggggaccataattaggggtaccctcaagactcctaaatctcagctggtaacccccatcagcataaagcttgtaaagcctgatgg

SEQ ID NO: 60524 - DNA, 460 bp, Zea mays
  unsure (1)..(460): unsure at all n locations
ngagacgggaacaaccgtggcatgcactacatcccttgaagaatatgtcaaggatttgaggattgccatgaggaggaaacaaaagatgaaattcaacacctcctccaaaagcctcaaccacgcctncacaaaaggtaacatccaaggtaatgatcaagccacacttcacattaagaggtgtagtgaatgctttgaaatggggcacttgattaggtcatgtccctatattaatggcttgattattaacaaggatgatagactttgttttaaatgctctaagaagggacacttgcttagatcttgtccccatttaaaacaaaaaggcatagggttagaaaagaaagtttttactaaccatgtagcangcaacaagcaaggaaagaagaaaacttcaaaacttgaaaaacgcctatgctacacatgccgaagaaagggacatcaatgcaaggattgtcccatt

SEQ ID NO: 60525 - DNA, 470 bp, Zea mays
  unsure (1)..(470): unsure at all n locations
agctntctaatagctggattaagaattcccctacatgggattattgcagaggtactgaagaggttcggtatttattttcaccagctgacccctaacgctattgtcagacttattgtttatatctgggcactccgaagccaagcagtggaaccatttgcggacagcttttgccgggttcacgagttgcattatcaaacgaaggctagaaaggatggattgcacgacaattttggttgctataacttcgcctatcggaaatctacaaagtttcctgtaattagctaccgaagcaaatgggcagcaggctggaaatcagagtggttctatgttaaggttgatgacgacaaggaaaaacttgtgcaaagtccactcgaattaatcttcggagaaacccgacctcgctgcaatatgacacccgaaggtccaacgcaacaagcaatgaatgaattcagaattattgcagagcatat

SEQ ID NO: 60526 - DNA, 444 bp, Zea mays
  unsure (1)..(444): unsure at all n locations
tcatgatcggaatgaataacaaactctntgtgccataagttgtgctgccatgtttcaagcgctcggaccaaagcatacaattctttgtcatacacagaataatttaattgagcacctcccaatttttcactaaaatatactataggttttccttgttgcattaaaactcctcctatcccaatcccactagcatcacattctacttcaaaagttttagtgaaatcaggaagaataagtacaggtgcttcagtcaaacgtttcttcaatttttgaaaagcatcttcttgtgagtttccccatttaaattcaacacctttctttgtcaattcatttaaaggagaagcgatggtactgaaatctcgcacaaatcttctataaaaaccagcaagaccatgaaaacttcttacttgacttacatttcgtggagcttgccaatccttgatg

SEQ ID NO: 60527 - DNA, 466 bp, Zea mays
  unsure (1)..(466): unsure at all n locations
ggaaaaaagacaaaattctgcttacattggtggacaaagtaaagagggatgaagctcacttcanaacccaatctgaagcccaaaaaattgagattgaagaccttcggaagcaactagccgaagctaaagagaagtgcgcagtcgcagaagctaaacgaggaattagcgaatagtggacaaatcatttagagaaaaacgttgaagaacttcgcatatccaaggaaagatgctttgaaaaatctatggactgcgtgaaaaagataaaaactagcttcgccagcattggcgcatattcaagcgaggacaacttcataagaggcgatcctgagggcccaattgagtggatcagcagcgaagccgaagcttttgaggaaatnttgagtgaccgcggggacgtctgtgccttctctggcatgagaggagttgcagctattttggagaaagcagggtgtgaacatgttaaaac

SEQ ID NO: 60528 - DNA, 388 bp, Zea mays
tactccaattccataaacgtaaactgtggtggttcttcagactaactacttcttgccatgtgttagtcagctcctaaacatggcaggcagatgtatgcatgcttctcactgcaacaatcacttggcttagtccagtagtgtccaccttgggtgccgcactaagtacagagcatgactagggcttcaaagttactcatagcaatatcgaacgatgacaaacatactgcccattcttaactgttttaaggcctaccaagggtctgagcctcatgtggcaactatgtgtacaagcttcatatgcattgcctgagtgtgatcgggggggacctggtgttggcgccgaaccgggcgccaatcactgcgttgagaaccggtggcagtactctct

SEQ ID NO: 60529 - DNA, 474 bp, Zea mays
  unsure (1)..(474): unsure at all n locations
aaaccccatgcttctagccatctcccggcagacggataattctntattgtctgggaggcagtataggaagtcatcttcgtctgtcccattgaacactagtgcccccttcagatatttcaattctctggcatagtgattagcttcaaaaatctcttcttcggataatttcttccctgaagcgtgtcgcacaatataatcgtatattttcgaaggtgcttcgggggcagcagtgtcaatttcttcagccaaaattggctctgaccattttactttttcggctgtctttgcaattntcgtttcttcggtttccaaaggttttaccttagcgggctctgaaggcccagcttcagtttcaaattgttgcttctgaagttcagcaacaaaggcttcagtagacacttcagaagtntcaacagctctctttggagttgtgcttgaagaattaattgtctccanaacatctaacacattaac

SEQ ID NO: 60530 - DNA, 387 bp, Zea mays
  unsure (1)..(387): unsure at all n locations
ntancagntcccacgtgtgcctaacacttggtaaagtacctctttgtcgagtgttacactgggcaaagagactagaaaaccccatttttatttatttttattattacattcaaactaacaaaagatatatatcattgccatcacatatatcacaaaatcaaaacatatatcaccaataccatatatctcacaaatatcaccacatcaaacaagtttcacaaacataagtctccaacactcacaaacgtaagtctcaagtatctcacaaagtattaccaatattaaaaagttcagaccaagttatttcacaaagtattacctacaccaacaaacataagatcatgtgcacaaagtatttcagcaaggtggacatctggactagttcga

SEQ ID NO: 60531 - DNA, 371 bp, Zea mays
  unsure (1)..(371): unsure at all n locations
agctttatcaaatggacgtgaanagtggctttctcaatggaccacccaatgaagaggtctatgttgagcaacctctccggtttgaagacagtgacttccccaaccctgtctataggctctctaaagcgctttatgggctcaagcaagcccccagagcatggtatgaatgccttacagattctcttattgcttacggcttcaaagttcgtaaggcccatcctacactctctactaaaactcttgaccatgaattgttttgatgccacatttatgtcgatgatatcatattggggtctactcaccaatctacttgcgaggaacttagctcgatcatgacacataaatatcagatgtctatgacgggggagttg

SEQ ID NO: 60532 - DNA, 468 bp, Zea mays
  unsure (1)..(468): unsure at all n locations
nttccttgtcgtcatcaaccttgacatagaaccactctgatttccagcctgctgcccacttgcttcggtagctaattacaggggaatttgtagttttccgatatgcaaagttatagcaaccaaaattatcgtgcaatccatcttttctagcctttgtttgataatgtagctcgtgaacccggcagaagctgtccgcaaacggttccactgcttggcttcggagtgcctagatataaacaataagcctaacgatagcgttaggggtcagctgatgaaaatagataccgaacctcttcagtacctctccaataatcccatgtagggggaaccttaatccagcctttagaaaactcttaaaaataacaatctcatccttctctggcttcggggtagtctcttctccaccgaagcgcaacaacttcttctgatttcagtaaaaaagcccgctttaccatcttggacaaatca

SEQ ID NO: 60533 - DNA, 462 bp, Zea mays
  unsure (1)..(462): unsure at all n locations
agcttctcccttctctttcattagctttcacataaaaccattcactngtccagccggcgggccacttggtgcggtatccaatcatacgggccttcgtatcctttcggtatgcaaaattgtagcatccgaaggtcttgtggagaccatctgctctcgccttggtcttgtaatggagttcatggaccctgcgcaatccttcatcattagcacttcttccctggcttcgaagagcccatatgtacacgctaagcctgactatagcgtttggagtcagctgatgaagatagattgtaaatttcttcgaaacttcaccgatcatttcatatagagggaaccgaagccctgctctagagaagctctgtaaaacaacaacttcatcatcccttggctctagaaccacttcgtcgctagcgaaccttaactactcatcatcatttntccaaaatatccaagcttcttcat

SEQ ID NO: 60534 - DNA, 418 bp, Zea mays
tctgcataatcgtttatttactcttgctgagcccctggcgtccaatcaccgatgaagtctgctaacgcctaagactgaattgaagatctgcgcacataatcaatggcgaattcattaagctctgcagcccattttcaatccttccaataactactctgttcctcataatgtcctttatatggtagtgacgaaagaacaattatgcggtatgcttgaaaataatgtccgagcgtctctagaggccattaacacagcatataataccttctccaattctgtataattgttatttgatggacttaaaacttcatagacgaagtatactggagcttgctttttatcttggacatctatcttgatctgcatcatcgtcatgactcactgaacaatgcgaatctgccacatataagagcaatgg

SEQ ID NO: 60535 - DNA, 306 bp, Zea mays
aagctgtgaagattcttcatcccaacatgggctagtcggcggtgccagagccaacccatgttagtcttagcaattaagcatgtgtcgagttcagctctatcaaaatctaccaaatatagctgaccctctaacacacccttaaatgctattgaatcatcacttcttctaaagacagtgacacctacatcagtaaatagacagttgtagcccatttgacataattgggaaacagaaagcaagttgtaatctaaagaatctacaagaaaaacattggaaatagaatggtcaggagatatagcaatttta

SEQ ID NO: 60536 - DNA, 463 bp, Zea mays
  unsure (1)..(463): unsure at all n locations
cttgtgatgatctttcaaaacttggtggagatgttaaaattctaatgaattntagtactaagatctttaaaattnttctctagaagctcaactggcttggccagctgaactttctagttcagctggaggaggccagccgaacttcggagctgaacttcagctcagctgcttttaaccagaattaaccaagactatcctggccaaaaccggttgaaccggtctggctctgaccgttcagctgcagttctgtccgcgcagattttttgcaggcgtgtgagccgtgtcagccgtgaccgcacctttctcagccgcgcagcagcttttgcagccgactggtcacatctgcgcagcactntttgacttttgtggcttttggaatctgctgctttaattaatgccatgtcaggtcgcgtcagtcactttttggaacaccttttcagaaactagtgcagtactttttcag

SEQ ID NO: 60537 - DNA, 454 bp, Zea mays
  unsure (1)..(454): unsure at all n locations
gcttctccgagaaatggatgagttcatcatagctgacaatgggtntcgacaaaggagggaggaagcctacatgtactctaagatgaataggggctttgggggaaggcttcatctaaggcatgtcagaacaatccacagtcccagtcaaagcgatgacagaaacaatcaaaatcaagggcagcagcaaagctcccattaaataggggcgcaacagaactccttcagaccgccagttccaagaggcagaggaggacaaagcttcaaagggagatacaattctcaaccaagaagattgttctgcatattctgcggagaggacaaggggcatacaacaagaacctgccaagttacgatacacaacagaaggaaatagctgatgctgaagcacaccaagactagccgaagcaagttcttcacactggcttgtgctacttctcatatatcccagagtatg

SEQ ID NO: 60538 - DNA, 417 bp, Zea mays
  unsure (1)..(417): unsure at all n locations
tctctggattngtggnggcttcctggcanaatattgagctatatgtcctggccaaagccccttgatcatggcctcaatgacaatntcattgggcactgtaggcgcttgtgctctcagacgtaggaaccttcagacatatgcctgaaggtactcctcattgtcttgcgtggattgaaacaaagcctgagcagtgactggcttcgtttgaaagccttggaatctagtaattagcatatccttgagcttcttccatgatgtgattgttcctggccgaagagaagagtaccaagtttgtgctacgcttttaactgccatgacgaaggatatcgccatgactgcagtattgtccccatatgaagatatggttgcttcatangtcatcangaactgcttggggtctgagtacccatcatacat

SEQ ID NO: 60539 - DNA, 380 bp, Zea mays
  unsure (1)..(380): unsure at all n locations
agcttagcaaaagaaatntctagaatcaagaatattgagctcatgcctaagtctggtaaaagattgttcatcaagtggcttggtaaagatatcggctaattgatctttagtattaatgtaagaaatctcgatatcccccttttgttggtgatccctaagaaaatgataccgaatggctatgtgcttagtgcggctatgctcgacgggattgtcggccattttaattgcactctcattatcacatagcaaagggactttggttaatttgtaaccgtagtcccgcagggtttgcctcatccagagcaattgcgcgcaacaatgtcctgcggcaatgtactcggcttcggcggtggaaagagccgaccgaatttgcttctttg

SEQ ID NO: 60540 - DNA, 480 bp, Zea mays
  unsure (1)..(480): unsure at all n locations
agctntgngcaaaatagctntaaatgaataactacatcataatttctaatgctagggttcctactatttttaaacagtgtctaaatgaggtttgaacatctacaaattttcttaagttcagcacagaagaaaaactaattttccttaattaaacaaggtttggtgggtttctgtttttaattntaaactctaaaatttagaacagaaagcatagggtttatcatctttaaatgatagttcataatattcaggagctagcaaaattggtttgacaactttctatgaaaaattcatcaagttatgggttttctaagttctctagtcattttaaaaagaataacagaattggtttaatggaaatccactctgcactgnggtccctggcgggttttaagttctcctcgcgaattagtccttaagctactattcacatgagtcactgacgttacagaaaacccctctggttctacaaatcctaac

SEQ ID NO: 60541 - DNA, 435 bp, Zea mays
  unsure (1)..(435): unsure at all n locations
tcagcctangtttcgtcttcagcttcgtcaaacttcagcttcttcattcatcagctntgtcatcctgtgtataccaaatagcagaataagaaaggtgcaaatttcaaaggagaaggtaaaagtaacaaacataagtttcttaccggcttaagatggcttcgagcttcgtcacctgccatttttcgcccgccacttacccagatctgggtcatgaatctatttccaatgcttcgggctaggcttgggatatctatcagatctgatgctgacaagctgaagtttggtctgttcacaatatttccatgcgtgcagccagccttcagaaaagcagtagctgtgccccgagaagctaccagggcacagaagtcggcgtgtccaccaataacttcgtcaagggcatcaacttcgccttcaatatattctaatgtgctgggc

SEQ ID NO: 60542 - DNA, 477 bp, Zea mays
  unsure (1)..(477): unsure at all n locations
agcttcttcttcattctgatgaanaccaaaccctttgatcacttcatcaaaacgaatgttccaactccgagatgcttgcttcaacccataaatggatttctgaagtttgcatatctttccagcattgatcggatcgacaaaaccctcgggctgtatcatatacacgtcctcatcaaggtttccattaaggaaagctgntttgacatccatctgccaaatctcataatcgaaatatgcggcaatagctagaatgatccgaatagatttaagcatcgctactggcgagaatgtctcgtcatagtcaactccttgaacttgtcgaanaccctttgcaacaagtcgagccttatagacatgaacatttccatccatgtctttcttcttcttatagatccatttgcattctataggtctaacaccatcaggcgggtcaaccaagttccaaacttgattntcctccatggaatctatctcgga

SEQ ID NO: 60543 - DNA, 448 bp, Zea mays
  unsure (1)..(448): unsure at all n locations
ntaccttgtagtctggactataagttggttacgttaggtgtgccttatgcagtttgaccatttccagcatttgcataatgaggactctanggaaaagcctcgtagtgagaccctagccattcacctcagaagtgaatacgggtctagctaacctgngctagaagggaatcatgactcatgggtaaagatgcgccacctctgtagagtgtaaaactgatatatcagtcgtgctcacgggtatgaccagcctggactcctcacatgataattgaacttaaagatggaaataaattgagatccgatgatctgccaatggtttgcttaagtggtttcacttaagtggttttgatatactcttaaacctttgtttaatgggaatgcttgggattcacacttattagtaagacaggtgttgttaataaaatggtgaccaactaanatgcttact

SEQ ID NO: 60544 - DNA, 324 bp, Zea mays
  unsure (1)..(324): unsure at all n locations
agcttgagaatatcctattatatgacanagctgaaataaaccagaacaagacggctcacatgtatttcaggcagatgttaaggaagcgagcctgttgctggctctgggagatagtaacagagccttctatgatctgatctatgttgagttgtatacgctcaaacaagtacaacagggtctgacacataacaactatgaatcagtattgtggatgttacacaatataatcgcgtacgaagttcagcagaatcatgcctatatctttaggtaaaagaaaaacaatatgatactgtgtaaaacaatcacctgctgaccgtgagtacg

SEQ ID NO: 60545 - DNA, 429 bp, Zea mays
tctctgctgtctggccaagaataaagatgttttctcctggttcgccctcgacctggtcggagtcagccgatccataattgagcacagcttgggaatcgacgcctttgtgcgaccaagaaagcaaatacttcgcaaaatgtccgacgaaaagacagaggccgacaaggcggaggtgcaccgcctcctacaagctaaattcatcgagccagcggcttaccccatgtggctctccaatgttgcaatggtgcagaaaaaagcgggaaatggcgaatgtgcatatacttcaccagcctcaataaggcctgcccaaaggacaagttcccgctgccacagatcgacaaaatagtcgataacgctgtcggatgcgacgtcatgtaactcctcgactgcttctccggctctcaacacatatacatgaacgaagaagac

SEQ ID NO: 60546 - DNA, 359 bp, Zea mays
  unsure (1)..(359): unsure at all n locations
agctctcggaaaccaatacttctggccatttctcggcagacagatagctctttgntgtcaggcaggcagtataagaagtcatcttcattcattccatngaatattattgcccncttcggatattntagttcctttgcataatggatggcttcatgagtttcttcttcagatagcttcttccccgaagcatgtcgtatcatgtaatcacgcgtgctggcaggtgcttcggggatggcggtgtcagtttcttcaactaatactggttctggaattattattgcttcggcttcaaaaggttgctccttgtagggctctgaaggcccagcttcagcttcagcttggtgagccgaagcttcagt

SEQ ID NO: 60547 - DNA, 459 bp, Zea mays
  unsure (1)..(459): unsure at all n locations
tgtgaaggttcttcatccccacatgtgctaagcggcgatgccacagccagcccatgctagtcttagctattaagcatgcatctagaccggcctcttcttttgcaaaatcaactaaataaagtttgccgtctaatacacccttaaaagctagtgaaccatcacttcttctaaagacagacacatctacatttgtaaatagacagttataccccatatgacataattgactaacagatagcanattatatccaagactctctactaaaaatacattagagatagaatgctcattagaaatcgcaattttacctaaccctgttaccttgccttgattcccatcaccgaatataattgaatcttgggaatccttattcttgacgtaggaggtgaacatcttcttcttccccgtcatatgggttgtgcatccgctatcaataatccagcttggacccccggatg

SEQ ID NO: 60548 - DNA, 430 bp, Zea mays
  unsure (1)..(430): unsure at all n locations
agctngatagagtcatgtgttctactgattgtgaggacttgttccctaatgttttgctgcagagttcagcttctgaagtgtctgaccactgccctttactgcttggtcttcgggataacaggtcaggaaagcgaagattccattttgaatctttctggccaaagctagatggattccaggaggctgttcaggaggcatggaactcagtccctgccttggagtgtcctttccaagctctagacagaaaacttaaggcgacagcaaaaagattgcaaagctggagcgatagtagagtgggacacgtgaactcccaacttgcccttgctcgtgaggtgctgcatangttggagattgcacaagatgctcgatccttatcgctaagcgaanattggctcacaaataaatggaagaagcactcccttggacttgc

SEQ ID NO: 60549 - DNA, 433 bp, Zea mays
  unsure (1)..(433): unsure at all n locations
ggctaaaagtcttttcatttatgggctttgtgaagatatcgactaattggttgtgggtgctaacataagcaatttcgatatcccccttttgctggtgatctctcaaaaagtgataccgaatgtctatgtgcttagtgcggttgtgttcaacgggattatccgccatgcggattgcactctcattatcacataggagagggactttgctcaacttgtagccatagtccctaagggtttgcctcatccagagtatttgtgcacaacaatgtcctgcagcaatatactcggcttcgatgatggatagagctactaagttttgtttctttgaagcccaagacaccagggatctccccagaaactaacaagtccctgatgtgctcttcctatcaattntgcatcgggcataatcggcatcagaatacccaattagatc

SEQ ID NO: 60550 - DNA, 423 bp, Zea mays
agcttcttctttcattaacatatactgtgatgatgaatgttcttccttcatgatcttcggttgaagattgttatatcctaagggagataatgcttcgaaggacgaagggcattaacacttaacattctgtgttgccttgttcttaactcatagaatttgagaacaagtcaccaacattagcgcccaccttcggtgtactcacttccacaatcttcggcaaagcatcaaccttcgtcgtgccgccgaagaagataacagcgccaggggctgcactgcaaccactggacacaaaccaggagactctctctctccgataggccagaagccaaaagagaaaggccaccagttcaacacttcatgaggaggaattggaccaggagattacggacctataaatcattcaccatcacgtgcaaaggaaaa

SEQ ID NO: 60551 - DNA, 463 bp, Zea mays
  unsure (1)..(463): unsure at all n locations
agctntgattgccaaagatcccatctaaccggatcactgtacgtgtcgccgctctcgaagcgctctagttcgccgctagagctgnttgtctgtgggctcatatagagtaatgtagagagagagaggcacacacataatcagatcatgaagcacgaacaaggctgtcaagcgaggagttaaggtctgtccataccggatggcagaggaggaatcgtcgactacgcgcgatccatggcgcgtcgcagactcggggtgaatagaaccttaggctctactaccgcctgngtcgctgggtgtctccggtctccctctctttcaacgcaagcatggtgggcttggcatccgtgacgtcagctangacgccttggcggtgggggctgggaagggagcangagggtggatctgttgctcatgccataatttaaattgtaaacaactaaacatgaacatacatgcacaaaat

SEQ ID NO: 60552 - DNA, 462 bp, Zea mays
agcttagcattttcatggagagaacatcttctattatttgtcgattcttcgcttgctcttttgctctctttagaagattgagcatgactgccttatcttctaggcttagatgagcgtagagatgcatgaagcttctttcatcatcctcatttgtactatcgctatcattttcattagccacacaacatatgtgggaatcgaaatggaaagacaaaccttttggagaggtggattcattgtttggtctccatcgttcattttcttcttcttccttcaaagagttagtttcacaacgaccacaggaagtagaagcacaaaatgaaccatcatgtttggactcatcaaatttgattttaattctagtccaaatatcatgcgcagcacaaataggttcattatatcttatgatgaatgcacgatcatctctcttgctaagagatttacttaagatgtgataagcta

SEQ ID NO: 60553 - DNA, 378 bp, Zea mays
atgaatgtttgagaagttaaactacgtatgaagcaggtataacgcaaaggacatgctttctcttccttctatctaagatatgcaaagaatgcttataagaggaagatttgggtacatgtttgaatgaaaggaagtaagtttaccgttttgttccttcgcatagagacgctctcttcattgcgctgtgtccttagtcttagatgcttaacacctattcttaatgacaatatatggaaatattttgcacaagagagagttctacaactagcgatcttttcaagttattgttagcatatatcaaacggatcacaagttgcataaatgtatcatgaattcttcttttaacttactgcatatcaagatagatgtcgaattgaa

SEQ ID NO: 60554 - DNA, 438 bp, Zea mays
agcttatattattctactgggttactatgtgctaatcttgattccagcacctacatctcgattgatcacctagtgttagatttaaatcctctcagtggtcactagttgtccagtcctggcaaactagtctttgggaacacacctggcaaaaaaatggatgtcgcactggattgtgaaatgttgtccagtccaggctgcaggcacactaactcacaccggcaacgggaggtgggaggcacggattgggcgagtctttgggaacaagtacctctacttgggaacatttggtatggatggacaggcagcgtactacatgccccatctataatttcgcacggtccctggtgcatctaatggcttctataatttcgcagctagtagaaagctagtagaaagcacggtcccttgtgcatccaatggcttctataatttcgcagc

SEQ ID NO: 60555 - DNA, 407 bp, Zea mays
  unsure (1)..(407): unsure at all n locations
agcttgttganacaaagagacataatgtgttttatatggtttatttgcttctcaaattggtattgcttttgccggnggcgacagcaagtgttgaaagggcattttctgcaatgagtttggtgaagactaaattgagaaacaagatgtgtgatagtcttttggatgattgtcttgttacatacatcgagagggatatntttttcgaagtgaatgaagaagatataattgaaacttttatggcgttgaggaagcgcacgccacataagtagtgcttatttgttgagtgtcaaactttatatctatatattgaattgtttaccaaatttactatgaaattatatatatatatatattagatagaattctacatgaaaattntgttgcggcacaccctattgtaaaatcct

SEQ ID NO: 60556 - DNA, 318 bp, Zea mays
ctaattggaaccttggaaaaccctgaaaccaaaccctacggggcttattgccaaattagtccacttttgggctacagtgcagaaaccaaacttaataaagattttaagtcatttggttcacaaatatggggacttgaaagccaaaccctatagtttggaccaaaatgcaaaaatcactttttatagcactatataggcttaggctgaaattagtgttgagggctcaacttttgagcattggatcttctcaaggattgagaatttgccctatgacaccacatctatatttgtagatctattggaggagagtaactttgt

SEQ ID NO: 60557 - DNA, 443 bp, Zea mays
  unsure (1)..(443): unsure at all n locations
agcttctaagggagaacatgtgatatgttttactaacgtacacatcgaaaaagatagaccttgtgcagcttgtcacgcaggtaaacaagtgggaggctctcatcacaccaaagatgtgatgacaacatcaagacacctggagttgctacatatggacctcttcggacccgtcgtctatctgagcataggaggaagtaagtatgggctagttattgttgatgactnttcccgcttcacttgggtgttcttgttgcaggataagtctgaaacccaagggaccctcaagcgcttcctcaggagagctcaaaatgagtttgagctcaaggtgaagaagataatgagcgacaaccggtccgagttcaagaaccttcaagtggaggagttccttgaggaagaaaggatcaagcacgatttctccgcttcctacacaccacagcataatg

SEQ ID NO: 60558 - DNA, 449 bp, Zea mays
  unsure (1)..(449): unsure at all n locations
agcttgggataactagtcgtatagggtgaatatccaaaggtctgatagaatnttgncaagatgtctacatgatgtaggttaaaagtttgtttgatgttacgtgagaatagacagattatacaatccattatgactctatggttaggttaggttttttctcacagttgagttggtttaatcctttccttccttcttttctttttccaatttttgatttcaaatttgaattcaaatttagatgtgagtttcatattttgagttaactgctcacattcaaatatcagtaggaatgaaatatttttgtttatgtatttattttctctactttatacaatattttctttctcttttactattttatattctatttagaatcggaggccaagtttatgttctccataaaatgcttcacgaaaattattatcaagagattaaacttaccttatcta

SEQ ID NO: 60559 - DNA, 451 bp, Zea mays
  unsure (1)..(451): unsure at all n locations
gcttggcctactatctgcagttcaccctatgttcggatgatgagataaatctnttgtggctcanaattatctgctggaaaatgaaacatgagaaggcatgtcatgatagcactccttagtactaaacagttataccaacaccttgacgaaatatagaagatgtacattgctggaattcaatataacggtttgggtcaaatctttatatcagagaggggatcagcatgtcatgatagcactccttagtactaaacagttataccaacaccttgacgaaatttgataccattgcatatataagcataaaaagtagcatagattggtgtcgggtaccataattaggggtacccccaacactcctaaactcagctggtaatcaccatcaacacaagctgtaaagactgatgggcgcaattcaggtcaaggctccgtctactcaagggacgcgatc

SEQ ID NO: 60560 - DNA, 457 bp, Zea mays
  unsure (1)..(457): unsure at all n locations
agcttggcagaccgaattntatctccggccttaatctgtgacataacatctctcccatcagtggtatacctgcaattgtttggatatactcataaaatttcttacagcgtcattattaacaatggaatatatcaattttgctactcaatgatcacataatgaaaccagtcaccacttacccgaaaactgaaaattgcccctcgtcgaacgatattcctcctaagccagactacatcaaagaaagagaaacatattaactcccattctatacacactgtttggttgaaagcctgccagacaattgactgccaggtacacaatctcaaccccaggcgatcaaaatccaacacactggggtaatgcctggctcaagcagctgtccggtgatgcaaaccaaacaagcccttcatgcttctaaagatattacaagctggagaagcgagtgttacttattata

SEQ ID NO: 60561 - DNA, 428 bp, Zea mays
  unsure (1)..(428): unsure at all n locations
agctngaatcctanattagaattagggtttgatataagttaagggaagaaatgagagaaatactacataaaataaaataaaaatcagaataaatacctttcacacggatattattaaactatacatttcaaactgaggacaagtttatcacaaagtttgaatttaaaattttattgaagaaatgaattgaaatgggaaaaggaaaatggaaaataaaaagaaaaacagaaaggaaatagagaagcgcgcgcgacccaggaactggtttcggcccacttcgctccacctcgtgccagcccaagtccccctccccgcgggcgctcacttacgcgtgggccctactcgtcggccacacaccacactcattcctcaccctctcactagatctcgggcccgcacagtcagtcgattccttcgtccgtgcgtca

SEQ ID NO: 60562 - DNA, 472 bp, Zea mays
  unsure (1)..(472): unsure at all n locations
ggaccttaagcgactgcagctcaagcttccacctctgaactaactttttgtatactcttcgaagnnggccaatagaatcctgacctgaagaccttcccgactagtgttctggacactgcatgtattccgcattgcccagcatggacctcctccagaagtcgcttcctcagtaatgggagaatgcacctcatgaggacgcctgatgcaccccttttgtacaatgcctccccaatgagcgtgtagtgagccgactgtctggcaatgcgctcggctgaattcttgtcatctggttcctcttcattctttatatacttgatgattggccttctccagtcatcagagtctgactcacgttgatctataatattacactcttctgttngatccattgagatgctcggctgtagtacttcttgcacaaagactccaggtgggacctgagttcgactggatcctaccttggacaatacat

SEQ ID NO: 60563 - DNA, 457 bp, Zea mays
  unsure (1)..(457): unsure at all n locations
agctggacattgnctccctgctggaagccaatgttatccttaatgccanggggtatcccattatagagcatgcttctagcaaatttacaattttcattctctatctcatgctcattaattntactagttagttgagctatgtgatcattttgttctttaattaaagctaggtgatcatgaatagcatcaacattaatatcttcacatctcatgcaaatagaaacatgatcaacaatggatgtagagggtttgtaagattttaattcatctatcttagattttagcatggcattttcatctctaagacaggaaatggaaacattgcaaacatttaaatctttagccttagcaattaatatatcattctcaattttaaggctagacagtgattcattcaacttatcaatcttagcaattgaactagcattatcattcttaagattggacattgaatcat

SEQ ID NO: 60564 - DNA, 406 bp, Zea mays
  unsure (1)..(406): unsure at all n locations
gcttatgctatatattgatatttgatacatggtccttngaataaccgactttcatttggctaattaattgactaactgctctctctcacagggctctcatttcagatattttgaagatctatctagaacttccaccaataggtccataccatttacaatggatgaggancttaagccacttgaaggtctttgaaaccactattcgatgaaggaatttggcttgaacgctaaatctgagatgaccgtgcctgttggtgtgctctgagcagttggctggtatcatgataacttgatgggttgatgctactatggtttatggggccacaccacttttccttttttttttattccggtagatcaaataacttccggtataattttaaaacggggattcttttttttggca

SEQ ID NO: 60565 - DNA, 444 bp, Zea mays
  unsure (1)..(444): unsure at all n locations
cctgaggcatgcaagcttgctagccagcctgtaggctaattnttttattattagctngccgaaactgtgcacaaggcttattggtctaaaatccttcacatgttcaacccctctgtttttgggatcaaggaaatgtaagcagaattcaacttgtcaaaattaacaaagttattattccagatagcttgaattgcacacatgatatcagatttgataacgggccaccacgaactataaaaacagccagtaaattcatccggccccggagctttatcggaaggtaaaagcttaatggtttcccatatttccctttccgaacagggagcctcaagcgcagccaaatcatgcttgaaaaggccaagggcctcctaaaacactgcttgctctctctcgcagcatgaaccaattataattgaaaagaaaccatccactgctgcagccttg

SEQ ID NO: 60566 - DNA, 342 bp, Zea mays
  unsure (1)..(342): unsure at all n locations
aacttaagtgcctaagtcccaccttataggctaaaccacacttaaataggaataaaacgccagtccctcggatctagtccgacgaggccactaacaggatcaagtaccacgtactcactcgaaggtgaggcacagagcaaataccataaaacataaaaccatacattaatgagtattaaaagttattacaacgtcatcggagtttagcaaaagcagcgatcattgttcgggttgcagcggaatataactaacgataaataaacggagggatggtgaagcccgtccaatctccccatgctcctnctctgccgagataaggtcccactcgactgtccacccggt

SEQ ID NO: 60567 - DNA, 451 bp, Zea mays
agcttcagctccatctatattatggattgccttggaatcagtccagcttccctcggcccttctggcagcttcctgactcccatgaatagcaataggcccttggtccgaaggtatcttcatgcagagataagctgggtgaagaattgcttcaaaagcatttagagtaccacgaccaatgatggagttgtaggggtattccatgtcaacaatatcaaacacaatttgctcagtccttgtgttattaacaaatccgaaggttaccggcatggtaatcttcccgagtgccacaatctgccgccctccgaagccacaaagagggtgcgtagcatcatgaatcttgtcttcaggctcttgcatctgtctgaaggctttggcaaatataatgtcagctgcactgcctgtgtcaactagaacattgtgaaccagaaaccctttgatcacacaagaaatg

SEQ ID NO: 60568 - DNA, 453 bp, Zea mays
  unsure (1)..(453): unsure at all n locations
agcttattgagaactacgttaccatggatcatcatatccgctcccttccctcccgtcagcagtagaggcgcaataagatgtagagaacccgtctcccttcccataagcacgacagaggaaacacacgagacactggatatagggttgggcctctggcctctttctgatctctgtattatgaaggggtgtacatgttccttatatagagatgtgagacccctcaggggcaaagcaggtatttgcccacataaccctaactagggttacttaacactcccccttgggcgaataccgcgaccaacacatgcctcgttaaaactccgaaaaacccagtgggaaaaatatagagaaagagagcatggtgatacaaattgcatttgcactntgttgcctcgttaaaaacctcatgtgagaaacttcanaaaaactcacaaagggaaaaagagtacaaca

SEQ ID NO: 60569 - DNA, 474 bp, Zea mays
  unsure (1)..(474): unsure at all n locations
cctgcggcatgcaagcttctcggtatcttcttgggtaaggcacttttctcttgagatgggttcagatgagaatggaagcataaggtgaggattagatctaatttgtgatttatgtttctagagaaaacctttcttaaaaagaaagaaaacacataagttcagcaatgataagcataaacaaatcaaatattttgaataggggaagaatagagtttttccaaagcacggactactcagattcgggggctaagcataactactattgctcggctcctgaactgagaactatgctaaatgtgacttataagcactaacgttaaggcatcacatatgcacacgaaaggggagaaaacatcaagcgaaattcattttgaaatgccctaggggggcacacaattagaagtttgcaaaacacgagtctacacgattacctctcatacatgcanggctctagccaaagtgaagaaaaacttc

SEQ ID NO: 60570 - DNA, 461 bp, Zea mays
agcttcttcaccatgtgatcacggttatctttataatgtttagcgatgcatttccctttaagttgtgtcaagctcatctttagcctctcattttcttctttgagcttttgatatgtatcatcatttgttcctgcaaattttagctcaaaggaagatttgcttgttgacaaacaacaagcattagcacatggtaatatagtatcaatttgaatacatgtgcacgaatgagattgttgggattttaagttctctattacaatctcatgagcaatgtgtaatatgatatgattatccataagattttcatgagagcatagaagcatatcatatttatcttgaaaagctagattttcaacttttagctcttctacttggtccttgagcaaggtattcctatttactaattgagcgatacaatgtgaagcgttatcttgctcaatcgaaatagtttcatacctttg

SEQ ID NO: 60571 - DNA, 397 bp, Zea mays
ttgcacaaataacattgctgagtacgaagcattggttctaggtcttcggaagttaaaagcaatgggaatcagaagggccatacttaaaactgattcccaggttgtttcgggtcatattgacaaaagttgtaaggctaaggatccgaagcttgaaaaatatctggatatggttcgaagagtcgaagcttccttcgaatggttttctgtctaaaatattcctagatgacaaaatgatactgcttgtttgtctactaagtccaaggacattggctgtctctgctttttttaatatcttcatatattattttatttctgaggatctttctgttaacactatttactaaattttgtttctccagatatgtatacttgtcattattaatcctatgttactttt

SEQ ID NO: 60572 - DNA, 448 bp, Zea mays
  unsure (1)..(448): unsure at all n locations
gcttgcttatacttatatatggactggagatttatatatttgtncaaatcttgtaattgcaggtctcactaaatcaccccctatcttctccctcgtggcatcaaaaagcttgccatgtgagagcacctagaggggggtgaataggtgatccttgaaaacttttaaaacttaattgccatcanaaactttggttaagtgttaatgcaataggatcatgtagctggagaggagtacttgtgaaacacagaaaccacagagagaaacaacacagtagacacagtggtttatcccgtggttcggccaagtacaaaacttgcctactccacgttgtggcgtccaatggacgatggtgcactcacccctctaagtgatccatgataacttgatacacggtgttctttctttatactttccgttgcaagatttcacagttgagtcttcgcctaca

SEQ ID NO: 60573 - DNA, 458 bp, Zea mays
agcttagttctcacgttgaatgtttatatatttactatggaaccataaaactaattaaacagatgaaggttaaaagaccagacggatttattaccaaacaatcctcgagattggtccaagtgcatggttccgaccaaactagagcgacggcttcaacgacaaataaatacgcgacactgcactgtgcgtgcaaggaaaaaacctcctccgaaaatcttcctttgcctaacatttcaggactcaccaaagtcagaaaaggccagtctgaaggacggacggtcctgagcagtgactagtgagcacttcctgcaagctgcagctgttgtatgaatcacgccaccttgtacgacgaatcacgacaacaaggagtaccgagcaatggaaaatctcccctcgaagtcgaagctggccgtttcagattcatagcactgccgccgcctgcacgaagagtagctttc

SEQ ID NO: 60574 - DNA, 349 bp, Zea mays
ccccccggctgtgcgcctccgcgccttgcgcgctgccgcgttgcggcctcgtgtcgaggaggactcccccttcttcattgtcaccctggcaggcctcccactgctgccgagagagatgtagcttcccgccgatagtgatctgcccagagagagcctgtggttcgtcggcgtcgaccaccttgaggcgaccaatcgcctcttcgatcgtcatcgcggagagggctaccatagacttaatcgagcgagccatctgctcggacttctcggagatgcgacggaagagcatcttcacagctctctcgtcatagtacgtgtcgactgcgaactggaccatcttctgctacagagt

SEQ ID NO: 60575 - DNA, 455 bp, Zea mays
agcttgtggctgaatatgccggtgtgttaatttctttatcccaactaggggacattttgcttcataaaggaatagctgtagattctggtctgcctatgtgtttcacacaatcgagatggagctgacctgatctggaggtctggacagcccatttcagcagcccactgaatctctaactatgacaatggtttattatgtgtgcatgttgttgctgctcggatgcacaagcagtcaagcactgagcatttcaaccccctgaagaaatacaacagctgtcatccgaactcattttatgactgcagacatagattgcctcccttttactgcagaaaataggactttgcatgccaacatatcacctcatctctggacattagcatgataacaactaacattagcccttttgagatggcagcacaactaactgtgttctcgagcatgcattcatgcatgaa

SEQ ID NO: 60576 - DNA, 445 bp, Zea mays
  unsure (1)..(445): unsure at all n locations
ggaccttaagcacctgagctgcaagctggctcatggctcggtttttttcttttgggggctccgctgctggaggtcctggcgcacggaccttatggaaagctggaggtccaagcttatgggaagctggaagcttaaagaatataaacgagatatggaatcattgtaaaatggcacaatagattactgaattagaagtganggttgtatcgcattcattccttcattaaattcttccttctgttctcgctgcagattgatccagcacaatgtcgaggagactagagactaaacttggaggtgctactgaaggatgtgactntgattaaagggtaaaagtgataatgagatgtgtgtgttgattttcattcctcangacaataatgttatttgtaggcagaagttattgtacatctgttatgtgttatctgcctgatcgtcgttatgc

SEQ ID NO: 60577 - DNA, 447 bp, Zea mays
  unsure (1)..(447): unsure at all n locations
agcttgcataggatcaatggaatatcttcttttatccgttgcacaacatctatccgtagatntctactacatagttccctgaagaaggtccccagctctgcaattgcttcatatacatccttcctcaccagtcctctaaggccagcggctatgattctctgtaggagtatgtggcaagaatgtgttttcagttttccaaccacctttgaaccatcttcacttatgtatcttgctaggttatccgcaaatccatcaggaaacttgatacctttgaggaacttgcaaaactcgactttctgatccttccccaacacatatggagcaggtggagccctgcaggccgagttgccatcttgttgcaagtgcagttcaggtcttatgcccatatcatacaaatctagccttgcattatgtgtgtccttggacttgcctggtatactaagtagt

SEQ ID NO: 60578 - DNA, 444 bp, Zea mays
  unsure (1)..(444): unsure at all n locations
agcttctaaagggagagcacattntatgactatcaaatgtgcattttgagaaagacaggatttgtagcgcatgccaagctgagaagcaagttggtgttcatcatccacataagaacatcatgacgactgacaggccacttgaactcctccacatggacctattcggcccgatagcttacataagcatcggcgggaataagtactgtctagttattgtggatgattattctcacttcacttgggtattctttttacaggataaatctcaaacccaagaaactttgaaagaattcttgagacgggctcaaaatgagttcggctttaggatcaagaaaattagaagcgacaatgagacggagtttaagaactctcaaatagaaggctttcttgaggaggagggcatcaagcatgagttctcttctccctacacgccacaacaaaatg

SEQ ID NO: 60579 - DNA, 421 bp, Zea mays
  unsure (1)..(421): unsure at all n locations
gctttagctgacttaaggctccgggttggatcattcctatgtttaacttctccatctcttggcatagtgtattgtcagaggtctgcaccgtaagacagtgacaggaaaccttacggctaagtgcatctgccactacattggcctcgcctgggtgatattgaatttccaattcatagtccttaataagctcaagccatcgcctttgtctcatattgagctcagactgggtgaagatatacttcaagcttntatgatctgtataaatgtgacagatattacccagcagataatgacacaagatcttcagggcatgaaccatagcagctagctccagatcatgagttggataatgttcctcatgccagcgtaactgccttgaaacatatgtgattactgatagtcgcctagagggggggtgaat

SEQ ID NO: 60580 - DNA, 437 bp, Zea mays
agcttcaagaactgggttggactgaaattatgtatggtatatttataaggcattcaaccaatatatatgtgttcccattccacctaaatgatgcatatagcaagcagataaataaatgaggttaaacggtcttgcctctaaaacttgttgttccactgtacgtccttctactccagatcgcccacctaaatgtgctaaatatctcataagcatcttcgttgtctcagtcttcccagcaccactttcaccactgaccaatatagagttgcttctcccttcatttatcattgccctggttcacattgacaggttgcatcacagtaatgcaattatgtaaattattacatgaatggcatgttaccatatatataaatagagtatttatacaacaagaatgcacctgtaagcaacatccgtgatatcaaaaacatgtgact

SEQ ID NO: 60581 - DNA, 414 bp, Zea mays
  unsure (1)..(414): unsure at all n locations
gcttaaccttgtaacgaggataggctacctttgtctcataggtggaagntccttaagtctctttgaaacctcaagggtaaatgcatcaaatatctataacatgctttcgtaagtgcatagtctatcgtgagcatcacacttatattatgacacaatgcacttcacattgtctttgatatagaaatgttctcattaacctcattatgtgcatttggtatttaaggccaaaatatgcattcctctcaaggcacatatttagggggagcaatctatattatgtagaactataataaagcttagttgacatatcttttgatcatatatctttcatttggtacacatacatatttcttattcttgttgtgccaaggctaagactaatgtgcttccatgagtatttcatgtattagtctt

SEQ ID NO: 60582 - DNA, 221 bp, Zea mays
agcttatgaagattcttcatcccaacatgggctattcgacgatgccagagccaacccatgttagtcttagcaattaagcaagtgtcgagttcagctctattaaaatccactaagtatagctgaccctctaacacacccttaaatgctattgaatcatcacttcttctaaagacagtgacacctatatcagtaaaaagacagttgcagcccatttgacataa

SEQ ID NO: 60583 - DNA, 351 bp, Zea mays
  unsure (1)..(351): unsure at all n locations
agctngacaatgaggagatggcgctcgtcatctatagctttcgccaaatcctcaagcaaaggagggggaaagactacaaatcccgctccaagaaggtttgctacaagtgtggtaagcccggtcattttattgctaaatgtcctatatctagtgacagtgaccgaggcgacgacaagaaggggagaagaaaggagaagaaaaggtactacaagaagaagggcggcgatgcccatgtttgtcgggaatgggattccnatgaaagctcaagcgactccttctccgacgaggacgccgacaacatcgtctggcacaaaggacttctcttctcaacgttggcccaagtgtctcatg

SEQ ID NO: 60584 - DNA, 458 bp, Zea mays
  unsure (1)..(458): unsure at all n locations
agcttgaagccatggtaagtagcatatgcatgtaatatgtgaattgattctagcctagctacgggtgcataggtttcaccgaaatccaaaccttcaacttgtgaatatcctttggccacaagtcgggctttgttccttgtcaccacaccatgctcgtcttgtttgttgcggaagacccacttggttcctacaacattttgattangacgtggaactaaatgccatacctcatttctagtgaaattgttgagctcctcttgcatcgccaccacccaatccgaatcttgtagtgcttcctctaccctgtgtggctcaatagaggaaacaaaagagtaatgttcacaaaaaagagcaacccgagatctagtagttacccccttttgaatgtcgccgaggatggtgntcacggngtgatctcgttggattgcttggtggactcttgngtgtggcagtcttgg

SEQ ID NO: 60585 - DNA, 316 bp, Zea mays
ccttgcgacccttcagtgccgtctcgaatcttttgatgatgagggccgtctcttcatcattaagaccggccggctcaatttgcgccaccttgctgggtagcgccttcttgctccttgttgccttgagagcaatgggttgaagcttatggattgagccattcaacgcgtcgtccacgtacctcgcctacttgatcatcattcgcccgcttacaaattatccaagaatatcttctggcgacatcttgatgtacctagggatttcacaaatattgttcaccaagtgatgatcaagaacgagcaatgaccttagcattat

SEQ ID NO: 60586 - DNA, 283 bp, Zea mays
  unsure (1)..(283): unsure at all n locations
caagcttgcgtaccactgggggctntcttcttaggatgctaggctgtgtgagttatcagggtccctgatttaaggatgttgaaggggatacctcgatcacctgctactcaaccagcacattgttagggtggattagggtttattgtgtgatcagggtcagccctaggcttttgtgtcctgcctgctcccatgtttctaggggcattgtatgaaactgcaaccgtgtggctgcaatgtgtatgtataaaatctgttcactgtttcattgacactctatacagta

SEQ ID NO: 60587 - DNA, 458 bp, Zea mays
  unsure (1)..(458): unsure at all n locations
agcttcggagactcttcccatctccgaagccttgcaacgatcgggtctagtgacttcagaaaagatacctcatgatgatgcaaaacaagcagaacaagcaatcgctgaagcagaggaagaagatattgaggaaactgattccgaagatgattaccgcattgccatgccaagcaagccgagccacttggacttcgggaaatctactgtttcgaaggctgatttgtctaagatggtaaaagcgggcttttttactgaaaatcagaagaagttgttgcgcttcggtggagaagagactaccccgaagccagagaaggatgagattgttatttttaaaagttntctaaaggctggattaaggttccccctacatgggattattggagaggtactgaagaggttcggtatctattttcatcagctgacccctaacgctatcgttaggcttattggttatatct

SEQ ID NO: 60588 - DNA, 448 bp, Zea mays
agcttaatgctcctcctataagatcgactaatttcgtttatggctaagctcccatgcctcaggataacgagggctacattttataccctgctggttatcctgaggataagattaggagaattcatgcaaagaagactcattctgtttctcaccatgcttttatttataagaatgaggcttctagctctaggcgttctacccatgttaaaatgcctaagaagaaatctcatatcggatttatttgaccttgcatgtcttttactaatgtagatagttcactatttatacttcattattaatctgactatctatctcttctttagtcttagtcttttgttattcaatctcaatcataattcatttctttgatttctttcttcatatacatctatatcgatttctaaatattcttcattacataatattactaatatcctttctctatctt

SEQ ID NO: 60589 - DNA, 243 bp, Zea mays
acctgaggctgcagcttggcgacagttaaaatttggcagatatatttttttatagcagtaaatgctgtggttacttcacacctactcgtctgtttatatagtgttgcaggtaagaaggcgaagcgccaggatttttacaccatgcggacacccgctcgtactcgctgcgtggtggaccgcagagaccgaacagtaactctgcaaggtggggccgctacactctgagaaattgattctttttct

SEQ ID NO: 60590 - DNA, 421 bp, Zea mays
  unsure (1)..(421): unsure at all n locations
catgccagcttgngagcaatacaagtacagaagggaatatactgtctctttcgatcagccgaagcccatgctcttatgtgacgatatagcagaggagaacgtgctattgggatctcaatattctgaagaacaggagaataccctgattagatgtctgttcaacaacaaagatggctttgcatggtcagctaatgatctctgtggagtcaacaaggaagttatgaaccccgctaatgggatccatcctcaacccaaaagcagaggcttcgaagatgtctgatacaaagccgaatgtgctcggaatgaaatgaaaaaactcgctaccgccggagtcatcaaaagaaggaaatacccaaaatggctagccaacactgtcattggtaaaaaaacccaaggtcaatggagaatgtgcactgattta

SEQ ID NO: 60591 - DNA, 154 bp, Zea mays
  unsure (1)..(154): unsure at all n locations
atgcaatttgcttgcgcgncaaaaagaaggcagcctgcaccagacataagcttgagaatcgtaaacacgcacacacagtctgcatacaaggcacgaaacagcacacaagcagatgcctgcgaattaagcagacctgcatagcatacaagcagca

SEQ ID NO: 60592 - DNA, 247 bp, Zea mays
agctcggtgccaatggagaagcatatatcctgtgtcttggctgcaaactgcttgccgttgtcaactgttagttcggacggtactccgaagcggcaaacaatgttttgccaaaagaatttctgtgcagtctttgatgttattgtggaaactgcccttgcctcgatccatttggtaaagtattcgacagcgacgaaggcgaacttaaggttcctctaagccgtgggcaggggccctattatgaccatgc

SEQ ID NO: 60593 - DNA, 339 bp, Zea mays
cacctggcgccaatggaataactatatttcttgtaatcttggctgtcaaactgcttgccgttgtcaactgttagctcggacggtactccgaagcggcatacaatgttttgccagaagaatttctgggcagtcattgatgttattgtagaaacagccctcgcttcgatccatttggtgaatattcgacggctacgaaggcgaacttaaggttcccctgagcggtgggcaggggcccgacaatgtccaggccccactcgtccgaaggccatgtatgggccattagttctgacactgcgaggggatgtctgaccgaggagataacatctggcacgcttctca

SEQ ID NO: 60594 - DNA, 378 bp, Zea mays
  unsure (1)..(378): unsure at all n locations
agctngngaagattcttcattccaacatgggtctattctgtggngccagagccaacccatgtgttggaactagctctcagcagcaaggaggccaacaagggtgagcggtggtgacaacagggttacgtgcacgggggcaatagctctgttgatctagcctctcacgggcactgtgcggtggtatttataggtatctgaggtccccgcgccttgtgttaaggacgcatgtgccctcagacacctagtttattctcagaatatttccataaagcagggttacaagctgtgattacaagaatgcctctacaagctaggcccgtaacacaaaggcggccacgcggtgcctgttacaatgggccaaatcactcgtgggcctta

SEQ ID NO: 60595 - DNA, 337 bp, Zea mays
  unsure (1)..(337): unsure at all n locations
tttgagactacatttggtatcatttacatgtcttctccaatatttgattagactatatttcatatcatatacttccctatacatacataagttgttgaatcatattttgctacctatgcataaggggagttagtctaatcaaatcatgtcttgcacctctatttctcacatgctttttccttaatagaagatctctgtcagggggagtatttcttcgtcactaaagggagagaaaattctttctaagggaaaacactcgcttanggggagtaatcctttagtgcttcaattgggataatgacaaattttaagagggcaagtcttattattgtcttct

SEQ ID NO: 60596 - DNA, 321 bp, Zea mays
cgagcagcaccggggccagttttctttttttatgctggctactgccgttcatcggaacctgtctgccctgattatgaatggcaaccaacccttgcgcgccggccgcacaatttatgttgacactatatcaattctgcatcatcgtattatatattagctacaccagcgttaaggcccatactcctaaaaatactccgctgtctattttgctgtttatattattttttcacttagcttttatttgttttttctattttctaataatatctatcctcgcgttatctcttttaaaactggaataatctttcattcttatttata

SEQ ID NO: 60597 - DNA, 271 bp, Zea mays
aaccgcaataacaattttttttaaactggggaagaaaatacaatattgaggaagttattttgccggtaacgcccggcaacttcgaaaatgccggatgatacaaaggttatgaaatactacatacaaaatataggttatatgccccattggaagctcgcttgagcaagtgaaaaagactgcaaaagcaaggctcggattgttttatgaacaaatatcaaacttgcttaggatgcgtccgaaaaggaagccaaacaaaaagcacaaggatata

SEQ ID NO: 60598 - DNA, 477 bp, Zea mays
  unsure (1)..(477): unsure at all n locations
acctgcngcatgcaagcttcaggttcctctggacctgatggaaggtattatctttcacataatctggccaccccatanagtgcgtcgggtggacaggatggtaccggaaggcatgattatgcctctgtcagcaactccaaggaggaagcaacaatagggtctcaatcgaccgcatcgaaggcgtcaacaattggaaggtcttcatacaagaatgcataacagaggtgaaatgtaataaaatgggatagatgaataatatatgagaacttatctctattgccttagcattctcagtatgtctctcgntacattagattaaacttataacataccttcggcttctgaacaatgggatgcacgaaggttcttctaaagctaagcactatgaaattatggcccttgaataggtattttatgtaggacattgttcatctatatattagcgagaagaacccccttagtataaatatacaataa

SEQ ID NO: 60599 - DNA, 214 bp, Zea mays
  unsure (1)..(214): unsure at all n locations
gagatggaggtctcgtcgaccacttttaatttgctcacgttctgcttccactccatccncatggtagcgggaggcgagagacgacaggtggtccttgtctcatgaggcangagagtgtgaggagggcggnggaagcaaaccctacctttgttctgcatgtggtggagttgagtcgtgggggcagccgacaggggggcgatgatgggtgaggaag

SEQ ID NO: 60600 - DNA, 469 bp, Zea mays
  unsure (1)..(469): unsure at all n locations
agcttgtgaagattcttcatcccaacatgtgctagtcggcgatgccagagccagcccatgttagtcttagcaattaagcaagtgtcgagttcagctctatcaaaatctaccaagtatagctgaccctctaacactcccttaaatgctattgaatcatcacttcttctaaagacaatgacacttatatcagtaaaaagacagttgtagcctatttgacataattgtgagactgaaagcaaattgtaatctaaagaatctacaagaaaaacattggaaatagaatgggcaggagatatatcgatnttaccaagacctttgaccaaaccttgatttccatccccgaatgtgatagctcgttggggatccttgtttttctcataggaggagaacatccttttctcccctgtcatatgtgttgtgcacccgctgtcgagtatccaacttgagccccgcgatgcataaacctaca

SEQ ID NO: 60601 - DNA, 457 bp, Zea mays
  unsure (1)..(457): unsure at all n locations
agcttgtcaagcatattttggtccccatcgcttgatgggtccatcanagntagtcaacaaagatctaggaacccaaatgtcatttgtgttagcactctttctagcacaagttgcaattttgggttgcctaattgcatgagaattaattgacaagctagaagtgggatagttaccaatgggacaatccttgcattgatgtcccttctttcaacatatgtagcatacgcgatcttcgagtcttgaagatttcttctttccttgtttcttgctcgctacatggttagtgaatattntcttttctaacactatgcctttttgttttaaatggggacaagacctaattaagtgtcccttctttgagaatttaaaacaaagtttatcngtcttgttaatcaagccatttttaatatagggacatgacctaatcgagtgtcccttttcaaagcattcactacac

SEQ ID NO: 60602 - DNA, 384 bp, Zea mays
caatcatgccttaaacagcgtgcaatctattttgtactaagtttttctagaatagcgaaaataaacctgccaaagttttagcttacatgtggtcatcctcaagctttcctacattgtcacaattttcacacttggacaataaatggtttattaaaggatttttttttaaaaaagtaaagagtcagtactacaattatcagcatcaaagtaaagttacggcttttaaaaatggagaagaataataaagtagaaatctgaaaatatatgaattacctttttgctgttagcaacatctattgcttacatgtggtcatcctgcgaggctgcagttactttggactcaccgattcttcgcatttacaagaaaccctttttgtgcccatc

SEQ ID NO: 60603 - DNA, 367 bp, Zea mays
  unsure (1)..(367): unsure at all n locations
agctagaaccgacgacccgcgtttttttatttctgtactgngctcgccggagttctttccctcgccggcgcacgtggaccgggtaagcctctgcaccatttcccaattcagtgcgcgcatggcctctacatcaccccgtggagctccttgtgcaccttaattgagctataccgtcgtgatttggccggaccaggaaccgccgacgacccccgccgcctgtgctagtggccatggtatctacattcacctataacctcgaatctttctactgattctaatattagtgattaactagctattcttaatcatttaatctagaacgattattatcaggcttattcaataacatatattatcttttttctaa

SEQ ID NO: 60604 - DNA, 455 bp, Zea mays
  unsure (1)..(455): unsure at all n locations
agcttgggtgtctcctccatgcgcctaggggtcccttttatagccccaaggcagctaggagccgttggaggccagcaaggaaggccatccttgccttctgtcgagtggcgcaccggacagtccggtgcgccaccggacagtcactgtagatggtccggtgccgatctccttccttttctagcatagacaaccgttgcagctccgggccagttggcgcaccggacactgtccggtgccccctgccgaccgttggcgcgggccacgcgtcgcccgcggattgcgtggccggccgttgcggtggcgacgattggctcaccggacaatccgatgcaccactggatagttcggtgaattatagccgtacgccgccaaactnttcccgagagcggccttttcacgagagaccagcctggcgcaccggacactatccggtgcaccaccggacagtcctgtgt

SEQ ID NO: 60605 - DNA, 444 bp, Zea mays
  unsure (1)..(444): unsure at all n locations
accggactagcacgagctgcactacctttggccttctccttgactgaacaattgagcttgatgcaccctctgtgaaaagtcgcacttggttgattcctcgggagaatcctgatgatgaacggcaagtttacttagaagtgcctctgaaccctagcgatgcagacataaatgacatgcttgatctgctagctgaggattcatctgatgctgttcctgatggtacgctagcagcggtgcccctttcagatgttgacacagctttggatggcccgatacctgtgtgttctcgcccgaagcgccctatccgaactagtcagcctgagccttctgctgatgagcagtataagatgaaaataagcctccggctagtatccagctttgaccgaggaccctgtactttatctcctgctcgtgagaaangactgcaactggcttgctgacatt

SEQ ID NO: 60606 - DNA, 438 bp, Zea mays
agcttgttagcaacatgagagcatataacgattcttggtttgcagagtttttgctgcgcgtaggcggtggaactgaggaaacaaatagtgacggcgacattcgtcttcctgatgatgtgtgtgtgccttacagtgggagtgacaacgatcttgacaacctaatagactttgctttcccaaatctcaacgaaaatatgtctgattccacctacatcacttcaagggcgatactgtcaacacggaacgactgggttgatatgataaatgttaagatgattgatcgctttcaaggggagcatatggtgtatcatagtttcgatagcgccatggatgatcctcacaactactacccacccgagttcctaaacacattgacgcctaatgggctaccacctcatgttttaagctcagattggatgcctgtatattgtccgaata

SEQ ID NO: 60607 - DNA, 232 bp, Zea mays
  unsure (1)..(232): unsure at all n locations
agcttgtgccgatggagaatacaaaattctttgtatctnggctggcaaactggcttaccgtgtcaactgttagctcggacggtactccgaagcggcaaacaatgttttgccagaagaatttttgggcagcctttgatgttattgtagaaacagccctcgcttcaatccatttggtgaagtattcgacggctacgaaggcgaacttgaggttcccctgagcggtgggcagggg

SEQ ID NO: 60608 - DNA, 443 bp, Zea mays
agcttgaaggactgcttcggcaggagagctttcgaacgtgatgactcgtttggtccacggagtcgctttatccgagcgcaagttacttatcgcagaaggggacgagtgaggtatccgtatcccggaggcgtaggagtccctcggctcggtcagccttggctgcttacgtgtacctcgtcgtttccaggatccgctttccaaagtagtcaagaagcacagaagaaatcctgctaaaaagaggtcctttttcgaggaaaaaattcgacgcagagggggtctccccccttttagcccccgagggagggtcgggctttgccgaggctaggccgacccttccttgacaactaaactttgcgtaggtgcgaggtatgtgaacaacttgaaaacatcttaagggtagaagcgacgtagctgtttgatgttccaagcgttgtcgtagatct

SEQ ID NO: 60609 - DNA, 437 bp, Zea mays
  unsure (1)..(437): unsure at all n locations
agcttctaaagggagagcacnatttaggattaacaaatgttcattttgagaaagacagganttgtagcgcatgccaagcagggaagcaagttggtactcaccatccacacaagaacataatgacgactgacaggccactggagctcctacacatggattcattcggcccgatagcttatataagcatcgacgagagtaagtactgtctaantattgtggatgattattctcgcttcacttgggtgttctttttgcatgaaagatctcacacccaagagaccttaaagggattattgagacacgctcaaaatgatgtcggctttacgatttagatatattaaagcctacatctgatcggagttcaagaactctcaaatgaacgcttccttgatgaggacggcataaagcatgagttctcttgttcctacacgccacaa

SEQ ID NO: 60610 - DNA, 435 bp, Zea mays
  unsure (1)..(435): unsure at all n locations
agctttaccttgattcccaanagccagcatattcttgattattctttccttagacgggtaagacttgcgaaagtacacttcgtacttagggttttcgaacccatgttgttgcaggtactagaattgtgctgctgtggatggtgttaagcgccggtgggcacgaccttcttataagtctaagtactttttctatacttcttattgaggattgtcattgagctagcatatatatcaaaactataaataatttataacagttcaaagttatttttgaatcacatttgtaatcactccgatcatgtacattgtaaacttgatgtaacttgtagaattcgcgaataatatttccgctgcaaaaatggtggtgtgtgattcgtgtttacttaatcctgcgatcctggttgtaagtaggttatccggggtctctggacactc

SEQ ID NO: 60611 - DNA, 261 bp, Zea mays
  unsure (1)..(261): unsure at all n locations
ctgcngcatgcacctcggcctattccaactacacatatatgtttttcttcaaacctctgaaggatattatgaggaaccgatatgctactggaaagattggaaaatgggctgccgagctcaatgaattntgtattgaatatgttcacagatcttcgattcagtcccaagcattggcagacttcattgctgactggacgccacgggctcatgatgatgaaactaataaaaacatgaaccctgacagggtattgtgatgatcct

SEQ ID NO: 60612 - DNA, 418 bp, Zea mays
  unsure (1)..(418): unsure at all n locations
cagctngcacctanncacaccatcataccaagttttatctttctgatgtggtagttcgtgtgcggctggtcgttgacatagattagatccctctactgatcccattcatcaatataatcatggtggcgggtctcaaagtctgtaaccttcttctgtctttgtctatcgaacctgcaacagttatacacatctattagtaactcattgcatatctgaaataatagtcagaataacaagtggacaaagtcacacacttgtggagttctattgaagtcgagaagggctccatcacatactcttgttgcgatccgaactgtcgagccactctgtggtgcaagtggtactcaaccggatataaacaaatgagggggcacctcattaagtaaatgttttccctatgtccacatgcttcttaact

SEQ ID NO: 60613 - DNA, 345 bp, Zea mays
  unsure (1)..(345): unsure at all n locations
ctccttctttgccttccaacttcttccttgagctctttattttcttgtgtgatagaaatatcactagttcctgaaatttctagctcaatggacgattggctttcttgagagcaacatttgtaacacatgataataatagttctacttgaatacatgtgcctatgtgagggtggtatgatttcaaattagttaacacaacctcatgaaccatttctaacatgatatgtgaatccataaatttattatgagagcccacagcctatcatgtttttcttgcanagctagattctcaatatttaacccttctatcgtgttcttgaacatagcatttttattttctaattg

SEQ ID NO: 60614 - DNA, 467 bp, Zea mays
  unsure (1)..(467): unsure at all n locations
acctcanatcnacctgcagcctgcaagctcctaaagggagagcagcattttagactttctaatgtncatcttgagagagacaggatttgtagcgcatgccaagccgggaagcaagttggcatccatcatccacacaagaacatcatgactagtgacaggccactggagcttctacacatggatctattcggcccgatcgcttacataagcatcggcgggagtaagtactgcctagttattgtggatgattattatcgcttcacttgggtgttctttttacaggaaaaatctcaaacccaagagaccttaaagggatcttcgagaccggctcaaaatgagttcggcttatggatcaagataatatgaagcgactacgggacggaggttaagaactctcaaattgaaagctttcttgaggaagaaggcatcaagcatgagttctcttctcctacacccctcaacaaaat

SEQ ID NO: 60615 - DNA, 456 bp, Zea mays
  unsure (1)..(456): unsure at all n locations
agcttgttcactcccgcagtggcattatcatgatgtggttggatttctttggctttgcctttcttgtcatacaaggccctcccaaggcgagccacctcttgctttaattgctcattctccattgcaatctcgtctgaacatgtttctataacaagattcttaaatgaacttgattgaaggggttagaatcatcaattaaatcaaagcaagaagtagaagaatctttcttaataattctaagtatttcaactaaatatacttatggagtgctaccaatgttttctagcttagtagttagctcattattgtgtatgctaagaatttccattntccctagcaaattttcaatagcttcttgagagctagctaacttagccttaagtttttcattctttttcataaggccagcatcggtagctgtggatggaacactagactctaattgctcaattttag

SEQ ID NO: 60616 - DNA, 422 bp, Zea mays
  unsure (1)..(422): unsure at all n locations
agcttccctttaccctgaaacgtgtttactcttcatcggtgagactntgaggtagacataatccccaactagaaagtacaagggttttcgtcgcttgtctgcataactcttctgatgagcctgagcttctttcatattatgaattattcggtgaactttctcttctgtctcctttaccatatcaggcctgaagaaatttctttcacctggttcagaccagnttaatggagtacgacaccgtcgtccatacaaggcttcaaagggtgccattttgatgctttcttgatagctattattgtacgagaactccgctaatggtaaacaatcatcccatttctgtgggaattccagaacacatgctcgcaacatatcttcaagtatctgatttactctcttagtctgcccactgtgttggggatggt

SEQ ID NO: 60617 - DNA, 454 bp, Zea mays
agcttctcaaaaatcttattcatctgcctttgtctatctacaaaatgtctttgaaaagaatgtccacaagaatagcaaatacaaaactcacggtgcaagcgtggtccaaaatgtcaaaaacaaagaaaagcatccatgcatattttatgaaatgaatattggtttaattccaagcaatctttgcacctatcctatgcaaactagttcaattattctcttatatatttgctttggtttgtgttggcatcaatcaccaaaaagggggagattgaaagggaaataggctctaaaccttttcctaaatgattttggtggttgaatgtccaacacaaacaattggactaattagtttgctctagattacatgttctacacgggccgaagattcaactcataaccaataaatagaacaagacaaggttcataagaaaggagcaaagagaaaccgaattgc

SEQ ID NO: 60618 - DNA, 253 bp, Zea mays
agcttaaaaggaacaaaaccacaccgacagatatggacttgtgcgtaatgacttttgggtatgaattctttattggttttgttatgtttcttaatattgtaattctatgacttataccattgtatttgtattctttatgttgtagcttcgatatcggttgcctgacggagaggattacatggggcacgctgaacttgtgttccaaaacaatgcaaagaagctggtgaatgatgccatatactatgcaagaatt

SEQ ID NO: 60619 - DNA, 294 bp, Zea mays
  unsure (1)..(294): unsure at all n locations
cttcgcactaaaagacagtgccttgatgaagatattatttaantctccagtcatcactgtgaactggagaaatagtaagcactgccctcttcatgagctcaaccgaaggtgctnttattgcttcaaaaaatacttcggagggtagggggagcccctgagccgctgatttggctaacanatctgcatgcttattctcacctcttggaatattcttgcacgagaaactcttgcatgacatttccatcctacttatacttataatttctctatatcttacttatttctccaattttt

SEQ ID NO: 60620 - DNA, 224 bp, Zea mays
  unsure (1)..(224): unsure at all n locations
agcttctaaagggagagcacantttaggactatccaatgttcattntgagaaagacaggcgttgtagcgcatgccaagcaggaaagcaggttggtgcccatcattcacacaagaacatcatgacgaccgacaggccgcttgagttactccacatggatctattcggcccaattgcttacataagcatcggcgggagtaagtattgtcttgtaatattggatgat

SEQ ID NO: 60621 - DNA, 253 bp, Zea mays
tcatccacacaagaacatcatgacgaccgacaagccgcttgagccactccacatggaccgaatcggaccgaccgcgtacataagcaaccaccggaggaacgattgggctggaactgcggaagattattcacgcctcacttggggggtctttttgcaggaaaaaactcaaacccaagagacattaaagggattcttgagacgggctcaaaacgagttcggcttaaggaacaaaaagaatagaagcgaccacgga

SEQ ID NO: 60622 - DNA, 409 bp, Zea mays
actgacccgcgaccctcatcatcggaattttccaatcgtgctcaccggagttcaagaacccgccggcgcacgtggaccgggtaagcccctgcaccgttatccaattcgttgcgcgcatggcctctgtgtcaccccgtgaagctcctcgtgcaccctaattgaactataccgccgtggtttggccggagcaggagccgccgacgactccccgccgcctgtgctcgtggccagggtaacttcgaccacctccgacaccgacccgcacaccgacgtgaccggtttgatcttcctgacgtcactgaccatcttggcggagctttactgtcgacggtatacctatgtagtaatctatgcgcgatacttgttaatccgacaaggagtgctggtaaatttaaataaagacatgggc

SEQ ID NO: 60623 - DNA, 440 bp, Zea mays
  unsure (1)..(440): unsure at all n locations
agcttacctggtcggcacgtgatgccacagcttatgcttcccacgtcctcctacaatctttttttcttccttatcttattcttctcgctggtgatgatatcatcgttttttttctcctgtgatgcggtcgtctgggtcccttgctcaggaacggtagccatgcgggcctgcatggaaacaacccggtgttttctgagaccgacgcacggngcccacgatcggacgttccagaagcttctcccttgcgtgatcgtcggactctggtagttgatttccttggcagcagatcataacaaacataaccttgatcaccggatcctcacgtatctatctttgccagccgtcatctctttccctttggactatatatatccgaaccatggccatcacgttcttcttgtacgagcactaatagccgacgcgaggagaaacgacgagtc

SEQ ID NO: 60624 - DNA, 198 bp, Zea mays
agctttaacccctgcgagaccttttcccgtttctttctaaccataatgaatgcgatatcgaatgtcatacttgatgcatattcactatatttgttcccttgtatgatgtactgtttgtttcccaatttgaatggatgaatgtatgtatgcttgcaatcgcatagagaacgatccggtcgaagagcccgaagaactcgc

SEQ ID NO: 60625 - DNA, 372 bp, Zea mays
  unsure (1)..(372): unsure at all n locations
agctntacatcgacaggaaggcgcagcggttgtctgttgcggaggcgagcaaggacgtcgtggacttcctcttcgccatcctcgcgctgcccgtcgccacggaggttgaactggtcgggaaggaggccatggtcggctgtgtcggcaacctctacgccagcgttcagaagctcgactccacctacctgcaggccggcgtcgctaatgttgatctcctctggccgaccggtgtcttaccgtatgctattgtgaacaccatgagtatcctcctctgtctgccgaagtcaacaacctgttattatcggaagactgtgttggaacactttttgcgtactaccttacgggcattctataataaatgcccgggattgt

SEQ ID NO: 60626 - DNA, 437 bp, Zea mays
  unsure (1)..(437): unsure at all n locations
agctcataagggagaacacatgatatgtttactaacgtgcaaancgaaaaagatagaccttgtgcagctcgtcaagcaggtaaacaagtgggaggagcacatcacagcaagaatgtgatgaccacctcaagacctctggagctgctgcatatggacctcttcggacccgtcgcctatctgagcataagaggaagaaagcatggtttagatattgctgatgacttttaccgcttcacttgggtgttctttctacaggataagtctgaaacccaagggaccctcaagcgcttcctcaagagagctcaaaatgagtttgagctcaaggtgaagaaaataaggagcgacaacgggtccgagttcaagaaccttcaagtggaggagttccttgaggaggaagggatcaagcacgaagtctctgctccctacacaccacagca

SEQ ID NO: 60627 - DNA, 224 bp, Zea mays
aaaaagatagaccttgggccgcttggcagggcgggtaaccagggggaggagcacattacagcaagaatggtatggccacattaagaaccttggagctggtacatatggaccttttcggacccggcacctatctaagcataggagggagtaaggatgggctagttaatggtgatgactttcctggctcacttgggtggtctttttgcaagataagtctgaaaccc

SEQ ID NO: 60628 - DNA, 495 bp, Zea mays
  unsure (1)..(495): unsure at all n locations
aaaactaagctaagatatattcaaanattaagatacacaatgaataaagcttatcttgtagacagagagagtgtgtgtggcngggttgggttgggttgcgttggtctggtcaagcagcaccacatcatttgtcactcctgttatctgcctcctctcatgttgctcaccttgatgctatgttacctcctccatccatctcccctgccgctgtttaattccctttttcatccatacttctggaaaccctgtacctctgtatggacaggtcacaagtgggtgtgcttactaagtgtgttactaatataattaatatatgccttggatatgattggaccgntgggaccataattccatgtggagactaacttagtcttggattcgtgcatggatcatcagctcaaatactctggtatatngtagcctattactgttatcagtattccacgccctaattgttgataacaatgtttcaacgcacggagtgttacaatccta

SEQ ID NO: 60629 - DNA, 415 bp, Zea mays
  unsure (1)..(415): unsure at all n locations
ctcagcttatntaaggcttagacagaactaaagtagataaaatcaatgttttgtttgatgctcttaatgaaaagaatagactcttagaaaagcaagaggatattttatatgaagagcatgataagtttgtaagtgtgcaaaatcctcttgctttataggttaaaaggaatgaaatgcttttttggaattatatgcttgtcatgaaactgtgtctagcttaaagagtattaatgatgatttaaatgctaagctagaagtagttaataaatctagttcttgtgtagaacatgttgtcatttgtaataggtgtaaggatttttatgttgatgcatgtgttgagaaccttacttctattacaaaattaaatggtgaagtggcaagtcttaatgcccaacttaagacttgcaaaaatgac

SEQ ID NO: 60630 - DNA, 449 bp, Zea mays
actcaagcttatgagaatataatactaagttgaactttagttctgcctatcaccctcagactgatggacagactgaaaggactaatcaagtactgaaggatatgttgagagcttgtgctcttcagcatggaggaagttgggataaaagtctaccatatgcggagttctcatataataatagttatcaagccagtctgaagatgtcaccatttgaggttatgtacgacaggaagtgcaggactcctttatactagaattagactagagaaagacagttctttgggcctgaacttattcaagaggcagaagaacaagtccgtataatcagggaaaacctgagggtagctcagaccaggcaaaagagctatgctgataatagaagaagccactggaatttgacaaaggtgatcatgtgtacctcaaggtgtccccacttcgtggaatgagga

SEQ ID NO: 60631 - DNA, 369 bp, Zea mays
gagaaagcaagatggagttcatcatccccacaagaacataatgactgacggacatggccgttctgagctactccacatggatctatttggcccgatcgcttacataatcatcggcgggagtatagactatttacgtattggggatgattattctcgcctcacttgggtgttcttcttgcacgaaaaatcccagacccaacataccttacaaagaatcttgagacaagctcacaatgaggtcgaataaggatcaaaaagatagaagcgacatgggatggagtcaaaaattctcatatgaggaattcttgatgatgaagcatcaagatgaattccttctcctaacacctatcaaatggtgaatgggaggaa

SEQ ID NO: 60632 - DNA, 416 bp, Zea mays
tcttcattataactaagtcttttgctgttaccgttgttttttcaaattcaacatgactgggcttgctcgggctcaatatgccatcatcttcctcatcatcactaccatctttggcaacaacattttcagcttcggcattaacactatccgtctctggaaaaatccttcttcctcttgaacaatcaatctgaaatgtttcataacctctgaaattggagccgtctcggtggtctcggcctctccagcctcatttgtcagtctagcagtagacctaattctacctatctgagttcttaagacgaagctagctttcaattggtttgatgcttgtgtgaagatcagttaacaaacgcacatagcacaaacaacttcgacttcagtaaaaaagttagcagcacaacgatgcaatagcaatg

SEQ ID NO: 60633 - DNA, 484 bp, Zea mays
  unsure (1)..(484): unsure at all n locations
tctnctggacaagcgctgcacttaccgttgagtgcgaagctttcacatataataataaaggagcccctggcattggtggagtcaatgttgttagatctatcaaatactgtttcagttcttcgaaagccttctgctggattggtccccattgaaagacttcggctcacttcagcacttcgaagaatggtaagtttctctctgctgatctggatatgaatctattgagagatgccaatcttcctgtcaatctttgagcccccttctttgtagttggtggctccatccgaagtatagcttcaattttacttggattagcttcaattccttttgttgaaaccaagcatccaagaaatttccccttcttcactccgaagacgcattnttctggatgtaactntaaaccagcttgcctgatactggcgaaagtctnctgcagatcagcaatatgattcttctgcttcgtgccttttacaatgatgtcatc

SEQ ID NO: 60634 - DNA, 411 bp, Zea mays
tgacatcagcctctcccaaatctttcatctcgtatatgctctatagaagatatttaacttgctcaatcacattgagatttgatccaaagatcaaaatgtcatcaacataaaggcacaacataacagactcacccccaccataccgatagtatacacacgtgtcagattcatttacaacaaagccagctgctgtaagagtattatcaaatttttcatgccattgcttaagtgcttgttttatgccatacaatgattctatcaacctgcacaccttgttctcttgaccatctgcaataaacccttctggctgatccatatagatctcctcatccaactctccatttaggaaagctgtcttaacatccatctgatgaatgaatagaccataagaagcttgcatggctattaatg

SEQ ID NO: 60635 - DNA, 323 bp, Zea mays
  unsure (1)..(323): unsure at all n locations
gccgagatgagcgntgagaattaccctgtgttggagcaaccaatatatacccaaaaccacatgtatatcctgacccttcataacaatcatgttagcatgaaagagccgtccggccatagttaatggcactccataagccacttctctagtgaacatgtgtgacgcacgtgaatgaatatcaaatccctctattgattcatggcacgcactatgatgatgctccacaaatttcttgcgtatgaatgtatgtgaagcaccagaatcaaaaagaagaactgcagggtgactcgccacaggaaacgtacccataattaccggctctt

SEQ ID NO: 60636 - DNA, 475 bp, Zea mays
  unsure (1)..(475): unsure at all n locations
cgcacctataaaactcagctntccacgcttgccccagggataggctaagcatgtctgaatagctctctgatatgtcgctccagcgcttntgaggccgaacggcatggaggtatagcagatagctccgaatggagtgatgaatggtgttttttcctcgtctttttttgccagactaatctgatgatacccagaatagcaatccaagaaagacaacacagaacatccggcggtggaatctaccacctgatctatcctatgaagcccgaagggatcctttggacagtgtttgttgagatccgtatagtcgacgcacatgcgccaatccactttattcttttgtagtacaagaacaggattagctagccactcaggatgcaacacctctctaataaatcctgccgcgaccaagcgagctaactcagcacggatggcttctctcttgtctggcgtgaagcgacgtaacttctgtcggatc

SEQ ID NO: 60637 - DNA, 430 bp, Zea mays
ggagccttatgttcaaagttcactgtctcgacgttcttcccttattctatcctttagatattttgggtgcggtactattgtctccagaattggtactgttgcttacaagttgcttttgccagaatcatcctccattcacccgatgtttcatgtttcgcagctcaagccggcaaacaagcgccctgagcgggtcagtctagctctgctagatatttcacatgacttgcaggttccaatgcaggttcttctagaacaccacgtccgtcgcaacgacgacatggttcaggaagcactgatcgtctggtcacatcttccttgtgagctgaccacctgggaagatgttgctcgggttcgccaagaattccctgctgcacctgctttggggcaagcacgtatccaatgggagggggttgtacggtcactactcctg

SEQ ID NO: 60638 - DNA, 406 bp, Zea mays
  unsure (1)..(406): unsure at all n locations
tcaagcttatgatctctgatgctcgagtattaccaagtatcgcctgtttaacacatgcttattcatagaagaaggaacacatgaaatacatttcagntaatccaaaatagcatatgcattcatacctgagacacaaaattntcgcttgttgcttcttgggaatagaaatcacttgcagaagtgaatggaagtcggttgttccagtcttgcaactgcgatgaggtagcacttaaattaacataatgaactatatcttataattaaataatactccgtatatggagtagctgcacgttntaatcaaaacagacatataacagctatagtcaacagaaaccactctcagacagacagaattcatataatataactagaaatgactgcgtaacaaataatactaatgctc

SEQ ID NO: 60639 - DNA, 458 bp, Zea mays
  unsure (1)..(458): unsure at all n locations
actcagcttgagcaacacgactggattgctgatatccagtgtttttcatagtacaggngcttgttgaatacctgaggctctgggagtcagttgatggtgttaccttgcaaccttcagtttcagatcagcatgcgatgaaggacgattattgaagatgtggactggcaaggttaatgtaaaagaagaaggcagtactggttcagaagatagagagcggattgaaaatgtgggttgaaaatgtggtaaactgtgtcatatgatgtgcatctactgcgatatcatctattgtctatagacatgagctgcaactgcaaccatattaattatcagctgctagagggcaaactggcaagatagaacatataaacttaacacaatcatactaacagaaacatatagagctctctaagatctgtgactaccattgaatttagaacagggagacaattgcatcaatt

SEQ ID NO: 60640 - DNA, 482 bp, Zea mays
tgtcctccactgtcgaaccgctgctaatccataaatcgtgttatccgacctctctttctgcccctaatgtcctctgctctcgaccctatcgtcaaccaaatatgatgggagcaggcccgctcctctgccaccaagacagctctaacacatcgccagacgaccaagtcttttcctctgtagttgaactccttggtactcaaccccgccgccaagccaggtgtgacgccctgctaggtccaacgcgtcggctcaagattcgcctgctcctacattttcgatgtagtagataggtataaggggctaaccattactagctcctagaagacatcgaatgcagctatgagtagttccaacttattacgttcgatggagctgttgcaggctgtcgacgctcacgacgctgctagggaaaggaaggccgctagagagacgaagtcttgatctgatccttcgctaacgcatgtaactccgataaaattggg

SEQ ID NO: 60641 - DNA, 437 bp, Zea mays
  unsure (1)..(437): unsure at all n locations
gggcatacaactggcaatctcgtagcctctgaagttcctttctcanatgttcctcatgctcttactcattctgggaatatacgagaatatcatcaatgaacacttctacgaacttgtcgaggtagtccatgaacatgctattcatcagatacatgaagtaagctagcgtgttcgtcaatccgaatgacataatcatgaactcgtatagtccatacttgatgatgaatgttgtctttggtatgtctgaaggtcagattctgagctgatggtaacctgacctcagatctatctttgagaacacactgctcctctcaactgatcaaataagtcctcgattcgaggcaaggggtacttgttcttgacagtgacttcattcaaagctctgtaatcaatgcacatnctcttcgtaccatcctttctttncacaaatagcattg

SEQ ID NO: 60642 - DNA, 491 bp, Zea mays
  unsure (1)..(491): unsure at all n locations
ntgagctaaccaacaagaagcagaaggaggcccaaagaatgtgtacaacatgttggagtacaaggacactacatcaaatccaaatggtctcatgtcccaatcactttctctcaagatgatcttcagctcaaggactatcctcataatgatgccatactcatatcttgtgtcataaaaggatttatggtacacaatgttctagtggatacaggcagtgcaacagacatcatctttgcaaaggctttcatgcaaatgcaagaacaagaggatcaaatacatgatgcaacacatcctctgtgtggcttcggaggaaaatagatagcagcactcggaaagataacaatgccaattatcttcggctacatacacaacaccagaactgagcaagttgtatttgatattgtagacatagagtatccttacaatgcaatcattggaaaangaacattgaatgccttcaaagcagtgctacacccagcatacttgtgcat

SEQ ID NO: 60643 - DNA, 456 bp, Zea mays
  unsure (1)..(456): unsure at all n locations
ttcttctatagcaaaacatagaanactacttgttctttctgtctatagctttacatagcanaacataaaagactacttcttccttctgccgaagcttttacatatcaaaacataaaagactacttcttccttctgccgaagcttttacttttacacaacgattcataaaaaaccaattctcttttttgccgaagcaaccactttggtacataaatgctatgaatgaatgcttatgtatgcaaatgccatgatgtaatgtaatgtgcaaatgaatgtccgaagcgtatatccgaagccacactcatccatcattntcttaggagcanaacacacgtcagctctgcattcccttatgaacgactttggagcatcttttgcctttacttaagcagtatcagcgttgacttttcgctgtaagctctgcatccccctaaggacgtctttggagcttcttcg

SEQ ID NO: 60644 - DNA, 392 bp, Zea mays
  unsure (1)..(392): unsure at all n locations
tgtgcacgtaaacttaattataaggtgaactcatttctggctactgtagctaattcttctttaaatggggtactaaagccttgctacgactttattatgctcangtgtttgggaggtgaaccatcttgtagtggagaaaacaacaaagcaataaaagctgttgcacccgagataatttcgtaactgcagcaagtgcatgttaaagagggcatatctttcaactcccaaggttgtttaaagcaaacaagcacttgttggaaaggtctcttcgtctactttctagtggatcaagaatcaataagagatcacacactaagcgtccagaaactgctgagtgaactcctgctctacccaagtcaatttcataactgcagcatgcaccaaattaaatg

SEQ ID NO: 60645 - DNA, 287 bp, Zea mays
atgggtcaaattaaggcgatagagatcaaggagaccgcggattaagggagaaatacgaagagcgaaaccgcggaaaacaaaatgaacattaatcacggcttcgtgggtatgctctgttggaacaatgaccccgcggcttattcgccgagaacaaatctccttcggaggaacgaccccgatggacacgacatggagaatgtctcgctcagaaacaacagacaaatggttacctgcgataggcaactggctgttggggtcgatatggggaatcaccgcagcggatgaac

SEQ ID NO: 60646 - DNA, 394 bp, Zea mays
  unsure (1)..(394): unsure at all n locations
ttttgtgactagattggtacanaatacactttgtatcagttttacattcaggatcaaatggactcggagaaagagcaaatgggatcataataatatggataatgaagtcaatcttcaaccagcctagaggaaagtgaccagacgaattgataaaggtggtatggaaccacaacactgttgtctcaaggtcaacgggatttaccccgttcaagcttctgtttggggacaaagcaataacactggaagaagcaagaacgggttcaataaggaccttatctttggcagaagatgaagaggattacnaaataaccaaagacaccatggaagggactagactgcaagcaatcgagcacatcaataaataccaatctgaaacagtctaatgacaggatca

SEQ ID NO: 60647 - DNA, 430 bp, Zea mays
accatcaaactctgctgagacggaaaccgcacatgcttaaactctatatcattgatgttcctaacgcagtcaatgaagaaatctacatgagtaaggagaaacgttaacaatcaattactcatgttgtctgcactgagcatctctctatgtcatccaagagcacaaaggaagaggaaaaacgaggtgcttctagtgcaaggaattacgtcacttcattgcgtcttgtccacacaaagacaatgatgaaggaatgacgagatgttttggatgtgatgataaagaccatatgatcacttcatgtccgctcatgaagaatcaaagacatgtaccctccaagatgaccctcactaagaataaagacagacagcaagtgtcaagtcatgctgagcgacgcttctgctacatgtgtggcgagcatggtcatctacct

SEQ ID NO: 60648 - DNA, 318 bp, Zea mays
cacactatgttgaatgttgattcccttctctcatagaggcatgacttgatcacgggtgtcatgatcctgtgacgatacgtgtgaacaaaggacacacaggtccttccttcaggaccttgggtatgaattactgaacgattctgtatgagctctgagacgtgatagattattatatgccaacgcatattcgtattcttatattgtatcctacacactgcaatttctgagcattacatttattcacatttatacctgcggttcgtcactacgcaatcacgccagtgtaacggtcgattgagtactcgactgactcacatc

SEQ ID NO: 60649 - DNA, 400 bp, Zea mays
  unsure (1)..(400): unsure at all n locations
acattgctatganaaaactttagagaanattgtgaattatccttgtaaagaatattgtgatttaagaatcagataatactctatagatttgtccataccttgtaatatatttttacctttccagccatgtatcaactgctttgttgtggacgaaacttgtattttttgagccgaacgcgaaaaacaccttcccttcttttcctacacaacgaagcataaacctgcttcttttcctttcgccgaagccttatcattagagccgaaacaactgtctgtatttggatgatatgatgatgatcctatgtatgtctaaatgaatgtatatgaatgccatgaatgatgtgatgtattgtgcaaatgaatgtccatacacatgcttacgaagccacatcaggactct

SEQ ID NO: 60650 - DNA, 376 bp, Zea mays
  unsure (1)..(376): unsure at all n locations
ntatcaaatggacgtgaaaagtgccttcctcaacggacctatcaaggaagaggtctatgttgagcaacctcccggctttgaagatagtaagtaccctaaccatgtctataagctctctaaggcgctttatgggctcaagcaagccccaagagcatggtatgaatgccttagagatttccttatcgctaacggcttcaaagtcggcaaggccgatcctactctattcactaaaactcttgacaatgatttgtttgtatgccaaatttatgttgatgatatcatatttgggtctactaacgaatctacttgtgaggaatttagtaggatcatgacacagaaattcgagatgtctatgatgggggagtngaagtacttc

SEQ ID NO: 60651 - DNA, 487 bp, Zea mays
  unsure (1)..(487): unsure at all n locations
cgttagctgaacaagattagcaagagtgctcggaagtggaccttggaatgaattgccttgaaaccgcctgccatattagcgttgttgttacgtgtaaagaaagaaagaacagacccataagataaattctttggtgaaaataaactaaataaatctatatggctacaaatatgaagtatttcataaaggaaaaaagatattttgttatctagaaatatcacgagaacatcaaaaatactgaaaaatacattatttcataaaacacctggccttaaataactaatttaagaggacattaaaaaggtggattntgcaatcgtagaaaaacacatcatgccgtgtcttttacagaccacactgagccatgagggttcanaatgaagtccatactntagccacaccaaattgtactaaatggaagattgactttntaaattgtaataagtgtagatgaatgtacctttgaagggtgtcgacattatatgaa

SEQ ID NO: 60652 - DNA, 406 bp, Zea mays
tggaaccttaggcactagcacgataaatatggatgttatatcttcgtggatgaaggacgacgtcataggtgtgcagctatcgatgagctacacgcatgctctgaccgccggcattgactctgtgtacccgtggtcgcatagaactcgatcagatatatgcgtagggacgagaatataccatccaaagttggttcgcgtactcgtcttgtccactcttattatacatggtgtgaacaggtgtcagtcacaatccaaaggttgttacaccccggatcatgatgtgatgcggagccaggctcatttgaacgagttcaacgtacgatcgatccgatattctttaccttatctcatacgtactcggctatgcttagaacttatggatacttactcgtctatgcatagaact

SEQ ID NO: 60653 - DNA, 379 bp, Zea mays
  unsure (1)..(379): unsure at all n locations
tgagaaggttcttcatccccacatgtgctaagcggcgatgtctcagccagcccatgccagacttatcaattaaacatgcatgcagaccgacctcctcttgtgcaaaatcaactaaataaagcttgtcgtctaatacaccctttaatgctagtgaaccatcacttcttctaaagacagacacatctacatttgtaaatagacagatataccccatgttgcataattgactaacagatagcacattatatcccaaggactcaactaacaacacattacaaatcgagtgctcattngagattgcgactttacctaagccttttaccttgccttgattcccatcaccgaatataattgaatcttgagaatccttattcttgac

SEQ ID NO: 60654 - DNA, 448 bp, Zea mays
  unsure (1)..(448): unsure at all n locations
atattatacaaactaatggaggcgcagactcctcccgataagctataagcagaagatcctatgtggaggaccgagtccttccgtacttcagacttgatcttgttctttatgaaccaccttggcacagaagcagcataaatctgctacttgctcacctaaaaacaacgaagggataaaccctgagtatggaattactcagcaagtcttacccgactaaagaaaagactctcaatggtatgctggttatatgggagtcaaggtgagggcttttcgataatcaaagactctgttttgaaaaatgcttactacaatggatccttantaatccaatattattgtgccagttaagtacaattacctgcgactagagttctttctacccgtagtcaatcactggtcctgcactagccaatttcttatcttaagcccatcatctttagtggaatgg

SEQ ID NO: 60655 - DNA, 362 bp, Zea mays
atgttatgactggcagagggattgcgaatgatcccagcaaggtcaaggatattctggaatggaaatcacccacttgagtgcaccaaggtagaagtttccttggatcggctggttattaccgcacatttattccggatttctccaaaattgttaaacccattactgggctattgaaaatgatactaagtttgactggtcctctaaatgcaatgaggcctttgaacaactaaaagtattgttgaccactgcacccggtttggcccaaccggatattgaaaaaccatttgatgcttattgtgacgcatcatgcagtggacttggatgtgtcctgatgcaagagggacgagtaatagcctatgctt

SEQ ID NO: 60656 - DNA, 361 bp, Zea mays
  unsure (1)..(361): unsure at all n locations
attccttgtattgcatctaaggcttgtcttacctatttgagataaccgccaacaaagcgagtgaaaaagcttaactcggatcaaacttgacaagtcttagttntaagcttttagctcttaaattcttacttgttatgcaattgttggttcttgaaatatgcatgaggtactgcactaagggagagtattcaacactcaaatcactcatgaaaacccctagtgcaggccaaaatgcaaatttcaccatttgcctattttctctaaaaattatctagcctatggcaaaatattttgaaaagtatatgagggtgccaatacctgtcccaacaagtattattttgtgtgattataagttgggatt

SEQ ID NO: 60657 - DNA, 467 bp, Zea mays
  unsure (1)..(467): unsure at all n locations
tgtgaagattcttcatcccaacatgtgctagtcggcgatgtcttatccagcccatgttagtcttagcaattaagcatgtgtcgagttcagctctatcaaaatctaccaagtatagctgaccctctaacacacccttaaatgctattgaatcatcacttcttctaaagacagtgacaccaatatcagtgaagagacagttgtagcccattttgcataattgagaaactgaaagcaaattgtaatctaaagaatcaacaagaaaaacattggaaatggaatggtcaggagaaatagcaattttacccaatcctttgaccaaaccttggattccattcccgaatgtgatcgctcgttggggatcttggttcttctcatatgaagaaaacatctnntttttctcagtcatgtggttcgtgcacccgctgtcgagtatccaacttgagcccccggatgcataaacctacaaa

SEQ ID NO: 60658 - DNA, 485 bp, Zea mays
taatgcctctaagacatagtctaactatggtaatgtttagtctcccatggttcaagatagtgaaggctatattctatatcctgcaaactatcctgagcataaaattagatgaattcatgctacgaaacatcattatgtttttcatcatgcatttatgtataaaaatgaagcttctagttctaggcattccactcatgttaaaatgcctaaaaagaaaactcctaatgcatcaaatgagcataacatttcatttaaaacttttgatgcttcatatgcgctcactaacaaatcaggcaaagtagtgccaaatatgttgggggcaaacacaagagttcaaagactagtgtttgggtacccaatgtgcttgtttctaatgtaaaaggaccacttgggtacctaagaacaatgcctaaacttgttttgaggtttatgcatccggtggttcaagctggataatcaatagcgggtgcacaaaccacataaca

SEQ ID NO: 60659 - DNA, 489 bp, Zea mays
  unsure (1)..(489): unsure at all n locations
tatagccatgcgtagtagcatatgcaagtaatatacttattgactcaagcctagctacgggtgcataggtttcaccgaaatccaaaccttcgacttgtgaatatcctttagccacgagtcgggctttgttccttgtcaccacaccatgctcatcttgcttgttgcggaatacccacttggttcctacaacattttggttaggacatggaactaaatgccatacctcatttcttgtgaagttgttgagttccgcttgcattgccaacacccaatccaaatctcttaatgcatcttccaccttgtatggctcaatagaagacacaaaagagtaatgttcacaaaaatgagcgactcgagatcgagtngttacccncttatgaatgtcactgagaaatgagttcatggggtgatctcttcgaatcgcttggtggactctcgagtgtggcggtctttgaccctgtactttctgatcatcttccttgcttgaca

SEQ ID NO: 60660 - DNA, 391 bp, Zea mays
  unsure (1)..(391): unsure at all n locations
ctgattgtgtctctgaatggatagcttgctcttgtattgtatgtgaaagataggagcgctcggatgaagtgaatggaggtgattggggttgtatttgtagcccccaaccacttcctagccgttgctccctttctgctgaccacggacggtccgcgcccctggtccgaacggtccgcccctgcacatcaacggctacaatcgcaacggtcagtagtaacagctatatcaacggctactatgcattaaatgtgtcgccagatgttagataaagcagttgcggatggtccggtcgtgcaccccggacggtccgcgaggacgctaaaaatacantttaccgaacccgtcaccttcgggtttttctggttttcactgactggacagtccatgcctg

SEQ ID NO: 60661 - DNA, 483 bp, Zea mays
  unsure (1)..(483): unsure at all n locations
tgtncgagcggcgcggcgaagaaaggtgagggatatatctttcgtgttgtacccacgtggaagcaagactgcgttggcgtgctgtgcgcggtgagtggctgacccgccgggtccacagtcagggagaaacccgcgtatcgtgcgcgtgggatggatgcgcttacacgcgggccccacccgtcggtggcggggtgaaagagatgggctgcgcggtatggaattagaagtgggccgaaaacaggtttgttggcccacgtaagctcttttcccccttttctatatatttttctttgggtaatactatttccttggtatcttttctttttcaaatccaaacttcattccaaattcaaactttgtggcactttatatactggccacatctaaccactgtgatngaagtatttaaatgctaatctatttgtattgataatattcctttccgtctctatttcaagaattctttaggattgattttccttt

SEQ ID NO: 60662 - DNA, 461 bp, Zea mays
  unsure (1)..(461): unsure at all n locations
acacaggtgtttgacctacatacacatggtcatgtgagcccaagcactcagggacaaacggtgctcaagtgcacaacaaaatgttacgtanggaactgtattgtcttgttgtgcgtgtcccatccgtgtatagaacaggagtatttataagtaactacgggatggtaggtggacataagtaccattatgcccctggtcacctgccacatcggaatattccccacaatggggtcattacagtattgcaaaacccactaccttaactacacataanagtctaaccctcttgggggcctacaagtgggcccaagccatagctgagagaagtctgggccacatggagaatgcttaaggccttctctagatatgggaccctttgccttgtggtgaccgccgagggtgccttcgtcagaatcttgacttcgttgggtgaggaggccttcatccctcacgacgtaatc

SEQ ID NO: 60663 - DNA, 240 bp, Zea mays
  unsure (1)..(240): unsure at all n locations
cctctttcgccnggaatgcgagcggttgtgctctagccgaggaggggtcatctaccccaatgattgtcttggagcctacgatcatgcaactgaaagctcacacaattccctatcacttcctggggagacattagtggatatcggggagtacgcggaattaattgacacttgcgtccgagtaacactgaccagggagcatataatcaccttggcgggctcacggtcatgccatacggcgct

SEQ ID NO: 60664 - DNA, 276 bp, Zea mays
ggaacggagggaaaacgggaagaggcgcgcggcgacaggcggtatggctgttcggccttgcgtctgggctgaaaactaagtgttcgccatggtgcacgggccgaaaacggatgctcgggcacgaactctaaaataagctaagttcaagcatgtggaaagacaccgaacatacagtgtatgtctttggtgaagggcacagtggaacggagggaaaacgacactgaggcacgcggcgacgggcggcatggctgttctgccttgcatctgggctgaaaa

SEQ ID NO: 60665 - DNA, 351 bp, Zea mays
  unsure (1)..(351): unsure at all n locations
aacactcgaccggtctgtgngaccgattgagagatggaaagatgaacgggaaatatggtccaacctttttctaaatgattttggtggttgaattgcccaacacaaataattggactaactacgttgctctagattatacattctacatgtgtcaaagggtcaacacataccaataaaaagaacaagttatggttcaaaagaaaggagcataaaggaaactgaagtgttccctggtctggcgcaccggactgttccgtgcaccaaggtgaatcaactcanactcttcagcttcatgtttccaggcgcagctccgctataatttactggactgtccggtgtgccaccggactg

SEQ ID NO: 60666 - DNA, 168 bp, Zea mays
cttccttagaaagtatccttcccgaagcatgtcggaagatgtaatcaatgctctctttcaaagcttcgggagcacgagtggcaaccttctcacgcgaaatgtgctctgtggctgtatcttctggtgctctctattcaatacccgcaggatgtatgccagcgggctctg

SEQ ID NO: 60667 - DNA, 412 bp, Zea mays
  unsure (1)..(412): unsure at all n locations
ntatggacatgtttgtaactntacacgaagttgttctacgtcttataaatagatgaacaatgccctgcataaggtattttttggaagccaggggaaacagctatgtgtaatccttttcttctaagtaccttcatgttttctcctcgttaaaaagccaaaggtactattataaatttgtttcatacagagaaagaaattccgagttgtttgagatgagtgatcttatctagcttcatcataatcttgtgtgtaatctttatcttcatcctctaataatcctatagattatatataataaccttcgtacttgagttggatgtcccaaaggacgaacacttcaagtacgaaggataatatctttcttaatattgngnntgcttggtctttattggatacaacaattaaaaacaag

SEQ ID NO: 60668 - DNA, 369 bp, Zea mays
  unsure (1)..(369): unsure at all n locations
aagcctanctacgggtgcataggtttcaccgaaatctaaaccttcgacttgggagtatcccttggccacaagtcgagctttgttccttgtcaccacaccatgctcgtcttgcttgttgcggaagacccatttggttcctacaacattttgattaggacgtggaactaaatgccatacctcatttctagtgaagttgttgagctcctcttgcattgccaccacccaatccgaatcttggagtgcttcctctatcctgtgtggctcaatagaggaaacaaacgagtaatggtcacaaaaatgtgcaacccgagatcttgtagtaccccttatgaatgtcccgaggatggtgtcgacgggtgatctcgttga

SEQ ID NO: 60669 - DNA, 413 bp, Zea mays
  unsure (1)..(413): unsure at all n locations
actcgcaaatgttcatttttagttatacattatttgcagcgcatgtcaagcaggaaagcaagctggcacccatcatccacacaagaacataatgacaacggacaggccactagaactactccacatggatctattccgctcaatagcttacatacgcatatgcgggagtaagtactgtctagtaattgaggatgagtattctcgcttcacttgggtattctttttgctggaaaaatctcaaacccaagaaactctaaagggattcttgagacgggctcaaaatgagttcggattgagaatcaaacaaataagaagcgacaatgggacggagattaagaactctcaaatcataggctttcttgatgacgatggcatcaagcatgagttctcttctccctacacacnctaacaaa

SEQ ID NO: 60670 - DNA, 349 bp, Zea mays
  unsure (1)..(349): unsure at all n locations
aaattcatcgagccagtggtttaccccacgtggctctccaatgttgtgatggtgcagaaaaaaagcggaaaatggcgcatgtgcatatacttcaccagtctcaataagttctgcccaaaggacaatttcccgttgccgcggatcgacaaaatattctatagcgcggtcggatgcgatgtcatgtacctcctcgactgcttctccggctatcaccagatatacatgaatgaggaagacaaagccagcaccagctgtataacacacttcggcacctattgctttgtcagaatgccggacggtcttaagaatgncggatccaccttcttcagactcaccaaaacagtgctcg

SEQ ID NO: 60671 - DNA, 403 bp, Zea mays
  unsure (1)..(403): unsure at all n locations
tgacaatgaggagatggcgactcgcataagagcttncgctctattcttctacataggagggggagagactacaggtcccgctccaacaaggtttgctacaagtgtggtaagcccggccattntattgctaaatgtcctatatctaatgacagtgaccgatgtgacgaccagaaggggaggcgaaaggagaagaaaagatactacaagaagaagggcggcgatgcccatgtttgtctggaatgggactccgactaaagctcaagcgactcctccgacgacgaggacgccgccaacatcgtcgtcaccaagggactcctctttcccaacgtctgacacaagtgcctcatggccaaggacggcgaaaagaaagtttaatctaatcctccactaatatgatcctcta

SEQ ID NO: 60672 - DNA, 303 bp, Zea mays
  unsure (1)..(303): unsure at all n locations
ctacatcgcaatccgcataatcagaatacattccatttcttaaatgcactcgnaccatgtgtgttaccttaaccttgcatgagtcattgatccaccgaatgtggtatggatgtggtcgtgggcgtgtggtcaggccaaacttcttgaccaaatctgaactcaccaaattgttgcagcttccaccatcaataataacacgtgcacgccgattctggatggcgaagaaagtctggaacaaattatggcgttgctgcttctctaatgattcaagttgagaactataaacacgctgtaccatgatgc

SEQ ID NO: 60673 - DNA, 418 bp, Zea mays
  unsure (1)..(418): unsure at all n locations
ctatgtatactgngcattagggagccaggctgtcgttttttttttaganggacacacgtcctcatagatctttaccacgcgctactgcatagcaatagacacttaaccctgtgacagattgcgcaacacttgtattttgccctcaacatttcatctcttgaacttcgataacatctacgatgtcgctatgcctccttcattgataccggcttgcagttataacataatagacatacctaatacaacaactgtatgtcacttatatatcttcattgtattgtttcatcattaccatattgataagacatctaaaccactgtatgtatatgcaattacacatgctggttgaaagcgacaagctctactcaacaataacaacactactatgtttaccacgagttgaaaaggaaaaatattg

SEQ ID NO: 60674 - DNA, 420 bp, Zea mays
  unsure (1)..(420): unsure at all n locations
tagaaactaaccttacattaacatttctatgtgccttgtcttaattctatcttttgagaacaagtccccaacaggcgtatactgggcccagaaccatctggaggctcggtgctccagccagagagtgtcttcttcctatgatcgtggagcccctccaaacccctttctctatggatccgatgggcccatgaggaggtccgggttccacttgcaggaacctaggtctatagttgaagttactaattcatccctttatgtgtcttgtggtgatggcggtctagccctgtaaacgagcctggctaggccacgactctatatggtggaacttaaccctgcgtcgagctagccacctagaaattcttcccaatggtaatcattgaggtctcttcttgacctagaaggagtanggtaccccatatt

SEQ ID NO: 60675 - DNA, 175 bp, Zea mays
  unsure (1)..(175): unsure at all n locations
tatgggngcataggtgccaccgtagttcaaagcttcaacttggaaatccccggcctaagttagctcagtccttgatccacaccatgctcatattgcttggtgcggaatacccacttggctcctacaacattttggctatgacgaggaacaagatgccatacctcattcctcgtga

SEQ ID NO: 60676 - DNA, 310 bp, Zea mays
  unsure (1)..(310): unsure at all n locations
tatagaccttgagcagcttgtcaagcacgtcaacaagtgggaggagcgcatcacagcaagaatgtgatgaccacttcaagacccctggagctgctgcatatggacctcttcggacccgtcgcctatctaagcatatgagggagtaagtatggtctagttattgttgatgacttttcccgcttcacttgggtgctctttttgcacgataagtctgaaacccacaggaccctcaagcgcttcctcaagagaactcataatgagttngagctcaacgtgaacaagattacgagcgacaacgggtccgagttca

SEQ ID NO: 60677 - DNA, 386 bp, Zea mays
  unsure (1)..(386): unsure at all n locations
tgcttctgccatggttcaacggccgattagagccttctatttgcgtatcttggcaggtcactgtgtacggtcgcttctctgctccaaatcctatcttttcgctgtgagttccaagtcgagatatggtcggtgtagggagataaagaggggagaagtttgctgtgtcagctaatcccgaaccgagacaaaacgggtgtcaagtcgtgtctagcgccctatggtaggtgtcatctctttccagggtgttctagggttaatttggcgccattntgtcaattgtgtcgaaggggtttgaaaaggggattaacgtgaacatgtggagtctttgtgcaaaggttatgttttgtacttatgcaaaaactgaattctccttgtgctgaatctta

SEQ ID NO: 60678 - DNA, 472 bp, Zea mays
tcgtactcggctgcatagttagaggccgggaattcaactttagagcgtacttgaggtgctcgcctccaggtgcagtgaagagaatacctgctcctgctccctgcagcttcagcgagccatcgaaatacattcgccatacttctgcagtttctggattgtctggtacttgctgctctgtccactctgatacgaagtcaaccagtgcttgagttttgatggcagtgcgaggtcggaactcgatatcgtgagatcccaactcgcaggcccacttggctatccggccaatggcttccttgttgcgaagaatgtcccctattggaaaaccagtgactactatgactttgtggtcgtcaaagtagtgacgcagctcgcgggcagttagaagtactgcatataatagcttctgaacctgaggataccttttcttcgaggagcctagaacttcactgatgaagaaacaagatgttgactg

SEQ ID NO: 60679 - DNA, 464 bp, Zea mays
  unsure (1)..(464): unsure at all n locations
tgtgaagattctgcattcgcacatgtgctaatcggcgatgctagagccagcccatgttatgcttagcaattaagcaagtgtcgagtgcaactctattgaaatcaactaagtatagctgaccctctaacactcgcttaaatgctacagaatcatcacttcttctaaagacagtgacacctatattcgtaaaaagacagttgtatcccagtttacataatcgagaatcggacaggtaattgtcatctaaagaatctacaagaacaacattangattggaatggtcaggagataaagcaattctacctatggcgttgaccaaaccttgatttccatccctgaatgtgatggctcgatggggatcatgatttctcttgtaagacgagaacatctgtcttctcccactcatgtgagttgtgcacccgctatcgatgatccaacttgtacccccggatgcataaacctat

SEQ ID NO: 60680 - DNA, 332 bp, Zea mays
agaactgagaacggtagcagatgatctttattgcgcttttagggaacacggatcgacaccgcccgcctcagggagcgaagaggaacaaaaacaagatccagcgggagcgtagacaccagctaaggatacgaggcacactatcattaaagtgtaccgactagtcgcagcccaaatatgacacaagaaccaaagccctgacctacaggagtacacaaggattatgataagatcaaaagcaaattctagagagctcaataaatagcgacactggaaccaaccccagccacatgcatagtgggagcaaacacaaccccttgtagatgaacagagca

SEQ ID NO: 60681 - DNA, 407 bp, Zea mays
  unsure (1)..(407): unsure at all n locations
tggagagtgagctngctagatatggttggacaaagggttattcttctttatcactctctgatcggttgatggtgttagtaaacaaaataagagtgcttggaagtgaagattggagtgactccaaggtcacaagactattcatgagagcatacaaagaacaggacaagagtctatcaaggatgataagggatcgtgatgactatgaggaaatgacacctcatcaattatgtgcaaagattcaacaacatgaatcccaagaagccccaatcaaggcaagagactctcatgccttgatctcaaatgaacaagacacccccaagaagaacaaagaccacaaggcatagaaagtggtcgagacatcaagtgatgaagatagctcaagtgatgaagacacagttatgttcatc

SEQ ID NO: 60682 - DNA, 368 bp, Zea mays
  unsure (1)..(368): unsure at all n locations
gcactgcctggcacgggtgcactgttcgctatcaaacccatcatgcgcaccgcctgctggatgaccttgacgccgcctgcctgcttatgggacgagacgcattaaatgctgagaagaggcacgtctaccgtcagcgcagtggcatgcgacgcgtgctctccttaattaatgcacggactgcacagctgcacgtcaggctccagcccatagcttatgtcatgggccacaaacagcgggtctccacctgagcgggaagtggaggacaatgcctggacacgtgtcagcaccggatccctactcacgctaaggtcctcctctattccggaccttgctganggtcggacctactctgtggcttcggacttata

SEQ ID NO: 60683 - DNA, 409 bp, Zea mays
  unsure (1)..(409): unsure at all n locations
tatcaagtgtactntcatatggatccgaaattatagtcatatctgttctgaggccgccgnaatcattggtttcttaccgagacatttcctgccttttctgcccatggtgctgcgtcaccctattttggcccaatgggtcgcgtatcaagttaggtccattanggacgcatcctatggttgcagcacgaccccaatacccttgtggtcgtcctcccatgtttataaaccccctagccgccaccaagaacaacgggttttgtttagatcaagattaactctcgctacttgcttgtaagcgcgcgtgctagttcatccgcccgtctttttgtcttcggaaccccaccatattggagtttgaatttgaaacctacatttagatctggtgatttaggacttgttctacttggtc

SEQ ID NO: 60684 - DNA, 288 bp, Zea mays
  unsure (1)..(288): unsure at all n locations
tctgatgattttctttttacaagccagcaggctcataagctccaaagtggttgctgcatctatgagggagtctatcttggcaagggaaattcatccttcggacatgccttattgagatctgtgaaatcgatgcacattctccactttccattggccttctttaccatcactgtgttggctaaccattctaggtatgtcacctctctgattactccagcactaaggagtttgttaacttcgnttctttgacattccgctttgtcatctgacatcttttgaagcttctgc

SEQ ID NO: 60685 - DNA, 296 bp, Zea mays
cagggaacggaacgcagggcaagcacgacaagcagtaggggttcaccatccacacaggaacagtctgatgaccgacaggccgctcgagctacgccatatggacctatgcggcccgatcgcttacatagagcatcggcgggagtgagtactatctatgtactgcgaccacatcaacggcgagtatgtttgcaagagacgaacctcagtaaaacaaaacagcgggagatccgcatctattcgctcgagatgtgtatcgccctcttcttcagacttacatttaattgcaacgctgaccc

SEQ ID NO: 60686 - DNA, 347 bp, Zea mays
tcgccgtctgcatgagaaggatgggctctcgaggtatccttttcctgacacgcctgacgacgacgacgatgatgaatatgatgacgaagaacacgacatggctgaccgccttggcctcaaccctggcttgcggttaggcgaggggctgtcaaaccagcccccgagcgggctgatgccgacagtcccccgagtcgggacaccggggttccggcccaatgagcggtggcaatccgagagggtacttgacccctcggctggacgagttgaggcgaccactgtgaggcatgccgatgcgtttgctcccacagagcccgcatccacgctggcagcgcaggagagcgaccctc

SEQ ID NO: 60687 - DNA, 356 bp, Zea mays
tgacctgtaacgagaataagctgccttagtctcttatgtggatggtccttaagcctctttgaaatccttaaaggaaaatgcttaaaatatttgtaacatgctttcagtagtgcataaactgtcatgagcatcacacttatactatgacacaatgcacttctcaatctgtatgatatagatatgttctcattaacctaattatgtgcaattggcatttaaggccaaaatatgtgttcctctccatgcacatacttatggggagcaatctatgttatatagaactatgatcatgcttaatttgatatatcggcttgatcatatctcttttatatgctatgactaatatgttttcaagt

SEQ ID NO: 60688 - DNA, 262 bp, Zea mays
tgtgtgtgttgaatcaaaacaaccccgcaagccttacaaagctattgaggcaatagagtttggcaccctctagaacttgttcattatgaactgggccaaatgaatggaattttgaccaaaggcggtgaaagatactttcttacttttatagatgactccactacggtttgctatgcgtatttcttaaaacaaaagatgaagcgttccatcattttaagaactataaagctgaagttgacaaccaacttgagaggaaataaaa

SEQ ID NO: 60689 - DNA, 478 bp, Zea mays
  unsure (1)..(478): unsure at all n locations
tctanagggagagcacattntaggactaaccaatgttcattttgagaaagacaggatctgtagcgcatgccaagcaggaaagcaagttggtgcccatcatccgcataagaacataatgacgaccgacaggccactggagctcctacacatggatctatttggcccgatcgcttacataagcatcggcgggagtaagtactgtctagttattgtggatgattattctcgcttcacttgggtattctttttgtaggaaaaatctcaaacccaagagaccttaaagggattcttgagacgggctcaaaatgagttcggcttaaggatcaagaaaataagaagcgacaacgggacggagttcaagaactctcanatcgaaggcttccttgaggaggagggcatcaagcatgagttctcttcttcctacacgccacaacaaaatggtgtagtggagaggaagaaatcgactctattggacatg

SEQ ID NO: 60690 - DNA, 384 bp, Zea mays
acctaaaacccaaaaccctagtcttctagtggtgcctgccctaaagacttcactagtgactccagaaaccctagcttccgggagatccgtgaagaaaaattgtattctagacctaagataatgtactgttattatctatgcgtttgcataagcattacatgagcattcatgattatatatggttatctatagaaaacgaagaagagatagaagttgaagaagctaggactactccaccaccacctgaagaaccccaggccgggaagtgctttattttgacatatgtggagcagagcctaactcacctatcacacaatggcaagtctggtgcatttgccacctacttgatattttaaaatcttctcacttgcttgatgtattaag

SEQ ID NO: 60691 - DNA, 253 bp, Zea mays
  unsure (1)..(253): unsure at all n locations
tcctcaaccgcgttgacgcagatctcaacatccttgcggtacttctccaggtacttgtccacctcaacagctgagggtccgccgcggcggcccgcctccttggccttcttcttgatgaagttctcggcgagcttttctagatggcggnccccggcctctgcctttcatttctcgaggcggcgctcagcgttgacgtggcggaggcggcgaccgttgatgtcgcggcaagcgtcaaaagtgctaatctttttct

SEQ ID NO: 60692 - DNA, 426 bp, Zea mays
  unsure (1)..(426): unsure at all n locations
tcggaccataaaactaacctcattttctgccggtctnatatttttatgcgtctgtttttatcctgaacccttgtcgatatgacccgaatcaacctgggaatcagttctaagaatggcccttctgattcccattgcttttaacttccgaaggcccaaaagcagggcttcgtactcagtaatatttggtgtacaactaaaatcgagtcttgccgcataacaagatttaactttggatggtgagaccaacacagcggctgcttctgctccgaacgttccccagacccatcggaaaacactatccatacttcggcatctttatttgattcttcatactgagcccctggcgttcatccgggatgataactgccaacgcctgagactggatcgaagatctatgcacataatccatgcagaatttattgagct

SEQ ID NO: 60693 - DNA, 431 bp, Zea mays
  unsure (1)..(431): unsure at all n locations
tctaaagggagagcacattttaagactatcttatgttcatttcaagaaagacatgattagtagcgcatgccatacaggaaagcatgctggtgtccatcatccacacacgaacattatgacgaccgacaggccactggagctcctacacatggacctattcggcccgatagcttacataagcatcggcgggagtaagtattgtcttgtaataatggatgattattctcgcttcacttgggtgttctttttgcaggaaaaatctcaaacccaagagaccttaaagggattcttgagacgggctcacaatgagttccgcttaaggatcaagaaaataagaagcgacaacgggacggagttcaagaactctcatattgaaggcttccctgaggagganggcatcaacatgaggtctctctcctacacccacaaca

SEQ ID NO: 60694 - DNA, 393 bp, Zea mays
tggactagctgatccacgaggctataagaatagaatttcttacctctatctatactataatatgaacatgaccacattgaacactctctccgcttcaaaatataattcgtttgactttctcaaccccaacattgactactcgtcttattaaaaaattcatgagaaatgaaaaaaatttaagtcgtatgtaaagcatatgtgataataaacaaaaccacaacgaattttctattttttcacaatcttttgaataagacgagttggtcaaacttatgtcaaaaaagtcaaataaattataaattgagacggatggagtagaatgtaaacaatcgaaaacaacaaggtataaaaccatcttcaccatatcatctatgctcttgcccttacactatc

SEQ ID NO: 60695 - DNA, 422 bp, Zea mays
  unsure (1)..(422): unsure at all n locations
actcagcttnaggatactattcaactaaagtaagaagaagttgttnttatgccaatgtatgaaaacttcctctccttcagttgttttagtattctatccttagtgggatgtaccatagtataggttaaattccttgcaatatataatgttcaatagtgcatataactttgacatcaactatatgtgtgcactaatttaaaggaatctagtctatccttttgggtttcagtaatgatgattcattttccattcacatataaggatcatcatttgtgaaacccgctcttgtgtttctaatgctctctgttctaagtggttcaacaacgttcttccaagttctttgaagatgaattcaaaatctacaaatataagagtcttgggtgcttaatcattgagttcaattgatatcatatcaagatgat

SEQ ID NO: 60696 - DNA, 449 bp, Zea mays
  unsure (1)..(449): unsure at all n locations
acatgaattgacagctcaatcgatggccaaatcccgttcagcaagctcgtcttgcagatgtctgacgtcaactcttaactcatttatacgctgaccatcttctacccacaccctatttcggtgacgtagctctgtccgaagctgctccacttgggcttctatgtctccgatagggtcgttactgccgttgctgttctcctcatgtcttggagccaactggtgccgaggtacgccaatcggtccagtggacttacgcgcggttttcctcgtgcgtggcggcatatcttcataagagggaaaactttattagtataagttntaatatgatgcatgcataattacagaatcaactgttcgtgattcacaacctcctatacattgcactctgctacctggtcttataagataggtattcagaaagtagtaagatgaggatgaaagaaagtttc

SEQ ID NO: 60697 - DNA, 341 bp, Zea mays
ggagccgagaccttgcctcgccggacttcggccgtccgctttcgcgccgtgaccaggcgaccaggtaaaccattttccaattgcttgcgcctacaacctccctagcctcctgtggagctccctagctcactgtattggactatgtcgccgtgtttaggccggaatcctcgctgccgacgagttttcccgcctgcgcacgaggtccgaccaactctggccatcctcgacgacgacccgcacaccgacgtgaccgacgcgacgtcccccacgtcatcgaccacttcgctggagctatttcgccgccggtgagtctcgccacccgtatctttgtcgtgggtact

SEQ ID NO: 60698 - DNA, 363 bp, Zea mays
  unsure (1)..(363): unsure at all n locations
ggtattcatgagcaagtttgattaagatactttgtcctggtgttatggagatttacgagataaaggcgcctaaactatccctgtcagaaagaaggcaatggggcaaaaaactgaaactctggatcaggcaaacagaaatggtaactagattttgcagtcaacttttgaattccataaccgctattctagggggtttgggtccatgaaatctatagagacttggtagaccttggactaatgagcaagttctattaatggtgatctccctgttcttaatcaaaatatggagaaagggctgactgaatggnggagaatcaattatctgctgatgattcagaaaagctgaaatatctacccttgata

SEQ ID NO: 60699 - DNA, 387 bp, Zea mays
cttactgggagatttaaaggacagttagtagctgcttgtgcaatagatggacacaattggttgtttctggttgcttatggtgtgatagattcagaaaatgcagagagctagacatggctcttgaataatctgcgccaagctattgtgtttgcaaatggatttaccatacacactgatgcttgtaaaggtttggaagatgcggttgataacgcgtttcctggagtggaacacacgtaatgcatgagacacctagcgtcgaactttacacaatagtttagaggagatctattgagtaagcgcttccatgaccacgaaatcctttggaatttttatggtaaccttccatgacctaatatggaccacaccaaattcacgattttatgacat

SEQ ID NO: 60700 - DNA, 455 bp, Zea mays
ttggctccatctatatagtggattggctttgagtctgtcctatttccttcggcttatctagcggcttccagactcccatgaacagcaatgggtccttgttcccaaggtatcttcatgcatagatatgctggatgaagtattgcttccaaagcattgagtgtcccacgaccaatgattgcgatttaagggtattccatatcaacaatgtcaaacacaacctgttcagtccttgtgttgtggacgaagctgaatgtcactggcatcgtgattttacagagtgctgcaatttgccttccttcgaagccacaaagagggtgtgtagcatcatgaatcttgtcttctggctcttgcatctgtctgaagccttggcaaatatgatgtccactgcacttcctgtatcaaccacaacattcgggactatataatccttgatgacacaagatatgaccatagca

SEQ ID NO: 60701 - DNA, 423 bp, Zea mays
  unsure (1)..(423): unsure at all n locations
gagagcaccttntgggactgactaacgtccattttgtgattgactcgatcngnagcgcatgcctagctngaaagcttgatggcactcatcatccgcataagaacattatgacgaccgacatgccactagagctcctgcacatggatctattcggcccgatcgcttacatatgcatcggcaggagtaagtactgtctagttattgcggatgattattctcgcttcactcgggtattctctttacatgagaaatctcataccctagagaccttatagggattcttgagacgggctcaaaatgagttcggcttaaggatcaagataattataagcgactacgggacggagttcacgaactcttcaattgaaggcttccttgaggaggatggcatcaatcgttagtctcttctccctacacgcccaa

SEQ ID NO: 60702 - DNA, 409 bp, Zea mays
  unsure (1)..(409): unsure at all n locations
aaaagnggaagngaggggaccggaggggganannnanggtggggaattgnnntnaactgctttggcttaagaacaaggcaacatagaaaatgttaaagcgtaaagtccttcgnccgtcgaagcattatctcacttgggatataatgagttttggacgaaagttatggaggatataccctcataaacattacatatgataatgaagaaagaattacatggaatataaaagataacatacacagctatgtgttattattaactcatttctatttcattgctatggaacaatagaaatgatatctggttacaaatgtatctttgacttgaaagaatgtaaaagtacacgcgtgacgcaaaagcatatgccatagtcacgtgatcagtacgggagcactggtcacctatttat

SEQ ID NO: 60703 - DNA, 383 bp, Zea mays
ttaccaaatggacgtgaaaagtgccttcctcaatggtctcttcttagaagaagtccatgttgagcaacctcccggctttgaagatagagagtaccctaaccatgtttataaactctctaaagcgctttatgggctcaagccagccccacaagcatgttatgaatgccttagagattaccttatagataatggcttcaaagttggaatagccgatcctacactcttcactaaaactcttgaaaatgacttgtctgtatgccaaatttatgctgatgatattatatttgggtctactatcgaggctacatgtgaagaacttagtacgatcatgacacatatagtcatgatgtctatgatgggggagttgaagtatttcttatgat

SEQ ID NO: 60704 - DNA, 387 bp, Zea mays
tttgtttttgctctcctggcctaacatgcgttgttcgttttagctggctcctattccttctgagaaagcttctgtcagatatggccccagtggacttagcttgactggcagagatttatgcattacctctagaattttcttcacgtctgtggcaaacggtgatgcaacaaattcttcttcatcaattgccttttgcttctgagctgtatctttactcttattcaaagcatctgtaactggctcaggctttggctttatcttttataatatgtacttcatcattcttattcagagcaccagctactctctttatctttggcccttcagcatcacttgactaacacgctcgtatgccgggatacttcaagtccagagcatccatcactc

SEQ ID NO: 60705 - DNA, 465 bp, Zea mays
  unsure (1)..(465): unsure at all n locations
acctatgaaactcagctcttctgatcaaagtcccttgttggattatccccatgtttatcttttccatctcgtgacacanagaggtgtcagaggtcttcaccacaagacagtggcaggaagccttacggctcagtgcatctgccaccacattggctttgcctggatgataatggatctccagttcatagtccttaataagctcaagccatcgtncttgcctcatatttaattctgactgggtgaaaatgtacttcaaactcttatgatctgtatatatgtgacagatatttcccagcagatagtgacaccaaattttcaaggcatgaaccacagcagctagctccagatcatgagttgggtaatgctcctcatgtcggcgtaactgccttgaagcatatgcaattactcggccctcttgcattaatacacagccgagtccactgcctgacgcatcacaatatacat

SEQ ID NO: 60706 - DNA, 436 bp, Zea mays
  unsure (1)..(436): unsure at all n locations
gagctngacgatgagaagatcaaatattcatgaggtgcatatttggaatgggagacgcccagaactaaggatggtgttggcttctaaatgggaagcaaagaaaacaccaaaagtgaaaattaatgggcatgatttcccaaatttgtgaagtaaaagagcaaggcaaatattgttttaatgttcatattattaatgctaatgttcttatttcttatgctcatacctcacatgctcatacttcacatattatagcttcacatgtctcacatgctangcataatgtttctaatgttaaatttgctcgtgtgaatacaagcaatgcatcaaatggtccttntatgtcatatcatacttttgatgctatgtgttttcacgcaataatggtaaagttgttgcanaatatgtcagaactggcataagaacactaagtcttgtg

SEQ ID NO: 60707 - DNA, 452 bp, Zea mays
  unsure (1)..(452): unsure at all n locations
cagcttcaaagggagaacacattntataactaacaaatgctcattttgtgtattacaggatccgcaccgcatgccaagccaggaagcatattagagttcatcatccacacaagaacatcatgatgaccgacaggccgcttgagctactccacatggaccttntcagcctgatcgcttacataagcatcggcagaagtacagactgtcttataattgtggatgactattctcgcttcacttgggtattctttttgcagaaaaatctaaacccaagagatctatagagatcttgagacgagctcaaatgagttggattgagaattaaaaattaaagtgacatggacaacgtcagaatcacaaattgaggatttctgagaaaagtataagcatgagtctttctcctaacacctaataaatgcggtaggggagaagataaactcttggcatggaag

SEQ ID NO: 60708 - DNA, 438 bp, Zea mays
  unsure (1)..(438): unsure at all n locations
tggctctatgttattggtagaccatggcaatntgataaggacaccatgcatcatggtaaaacaaatcaatactcttttatgcataatgagaagaagcttgttttgcaccctatgtcccccgatgctatcttgaaagatgaagttgctagagcatgcaaagagaaaaacaaatctgttcataataaaaatctagatgttacaaaggaattggtacaacctaagagtgataattctaaatctgctcatgtaaggaaaaatgaaatacaactgaanagtgcttgtttccttgcttccaaatctgatttacttgaattaaacgattgtgatgcaatctgctatgtgtttatatgcaaggatgctttgntctcactttacaacataccatctactttgccttctactatcactaatcttttgcaggactatgctgatgtattt

SEQ ID NO: 60709 - DNA, 391 bp, Zea mays
  unsure (1)..(391): unsure at all n locations
accaaaaactaagctaacgagggaaaggaaaagggcgagcgactaatgttttcacaacggcaacaatgtttttctccgtccctcgcaatggcatagtatggnggcatttataagtaaccgagcatatccccatgatattcccccctacggggttaaggcgggtcattacatcataatcaactactaaagtgggcaaccctctataaacctgcggcctatgaccacagcgggatctgccatggccgaacatacatggcccccttacaaagtggaagatgaacgatggcttagggcctgaatgccatcccgaaccttatggcttccttgatggcacagcagaagtgctgatcttacgggcatcacctggcacttctggggccacctcaggctc

SEQ ID NO: 60710 - DNA, 262 bp, Zea mays
ctcctccatcaccacgaaagcgaccggctgcacctcgagagcgaatgtggcgccctgctccaactagacaaagtgtttggagcctccgaccattacatcaaacctcacgaacattcctattacctccttggtagacattagcttataactaggatcaccacgcatcaattgaactctgagctggacgatgacacaccagggaacgaaaaataacctcgaccatgtcatggtcaccccattttgagctcctgaggttgcgcac

SEQ ID NO: 60711 - DNA, 303 bp, Zea mays
ctataagaatgctaagggcgatgcgcatctaagattgaatgggattctgattgctcctcttccgactccgacaatgaatgactcaccgccaccgccttacacagtaatccctacttcccaacgaactgcacacatgccttatggcaatggacaagaaagtatgcactcgaaactctactatgcttcttcaagtgacgacgaatctagcgatcaagatgaaatacattattcatgtttatttaatggcctatacacaaccacagtacataaaaataatgaattgatagatgccatcgaatgata

SEQ ID NO: 60712 - DNA, 275 bp, Zea mays
atcgtaaatatatacatatactcatatctcaaacgatcataaatatcatcgttttctggataaatatcgtatctaactaagaatcaactcgatgatactatacaaacgataacaatgtactgttactaactagagaaacgacctctatgcctgtgtgtatatgaacaaacttgcaaagaatcacttgcttgtttcatatcatcttgtgtaggcacctgccatttactgactcttgcacatggcctctatatagtaagcatcaatgtacatgtcat

SEQ ID NO: 60713 - DNA, 443 bp, Zea mays
  unsure (1)..(443): unsure at all n locations
tgaatagttcttcagggtctcttcacactaatgaaatcttatctgcgaatccaatcatttgtacagataaggcgctcaaccattggtggggtgagtgaactcctaaactcatctagtgttctcccccctgcactaaaagctgactcaaaagtaactgatgagataggaattgctaagagatcacgagccatgtgagacattgttgacaacctagtagcattgtccttccagtacttaataatatcaaaaccctttctatcctcttcattgtcctctgaaagatatttatctaattcagacttgacggtactattgcaacccccatnattgctcatctattgagcaattatagacctcataagccttttgtcaatgccggcttatcttgagaatcagaaggttgtggtgtcttgncacttttgtcataacatttattatactca

SEQ ID NO: 60714 - DNA, 441 bp, Zea mays
  unsure (1)..(441): unsure at all n locations
acatgtgctaagcggcgatgtctctttcagcccatgctagtcttanctattatgcatgcatntagaccggcctcttcttttgcaaaatcaactaaataaacgttgccgtctaatacacccttaaaagctactgaaccatcacttcttctaaagacagacacatctacattngtaaatagacacgtatatcccatgttgcataattgactcacagatagcagattatatccaagagactcaactaataacacattagatatggagtgctcattacatattgcaattttacctaaaccttttaccttgccttgattcccatcaccgaatataattgaatcttgggaatctttattcttgacgtaggaggtgaacatacttctctccnccgccatatgtgtggtgcattcgctgtcgattattcaccttgaaccccccgatgca

SEQ ID NO: 60715 - DNA, 490 bp, Zea mays
  unsure (1)..(490): unsure at all n locations
tctanaggganagcacgttttaggattaacaaatgctcattttgataaagacaggatatgtagcgcatgccaagcatggaagcaagttggtgctcatcatccacataagaacatcatgacgactgacaggccactggagcttctacacatggacctattcggcccgattgcttacataagcatcggcgggagtaagtactgtctagttattgtggataattattctcgcttcacttggatgttctttntacaggaaaaatctcatacccaagagaccttaataggattcttgagatgggctcaaaacgagttcggcttaatgatcaagaaaattataagcgacaacgggacggagttcaagaactctcatatagaatgctttcttgaagaggatggcatcaagcatgagttctcttctccctacacgccacaacataatggtgtatgggagaggaagaatagaactctattggacatggcaagaaccatg

SEQ ID NO: 60716 - DNA, 391 bp, Zea mays
  unsure (1)..(391): unsure at all n locations
gtccttggcttgatcagttgtctccgagctacgcacccgagtatcacttttgcaatgtccatctaacttgtgatgcccattatctagtccttgggccatcacacttgttcacttgtgttgaaccctgtcagctttacactaagcacctgttcaacactcacacacttgttagtcctttaattgagttgtcatccaaacaccaaaactcacaagagagctntcacaagcgatggatgaaggagctcccctctgtggtctggagtctgaagacgatgccgagccaagccacgggcttcacaccgttctttctagtttatggggccgaggccgtcttgccatagacttacaatacgttccccgggacgagtgcctacccgaccaaagaatcaac

SEQ ID NO: 60717 - DNA, 431 bp, Zea mays
ccctgtgctgaccacacgttcacagccacatacataccattttctttggatcaatgattcacgcaatgttaatgtaacacacatggtacgagagcatttctccattggtatgtatttagataatgcggattgctatgtattacctatggaagctcgttctcttttgttgggtaaacctttagaatatgatactgttgcacgtcaccatggtaggagtaatacatacacttttatgcataaagataaaaacattactttgctacctttgactcttactgaaattgtacaagctgataaagataaaactgctagtacccataatgaaccaacttatgagacagaacatcaccaacttattaaattgaaagctcctgtcatgcttgctactaaatctgatcttcttgaactcatgctactgatgattgttgcta

SEQ ID NO: 60718 - DNA, 468 bp, Zea mays
cgttgtccttctccagggacttcatattccttacaacgagactactacatgaaatagacttgtaaacaggtattattctcaaagacttagattatagacgaatctccccctgaaagtgtgcatacaagctttgaatacttgtaggagacatgcactctgatttgatatcaagggggcagattatccataatccgagctttggcacatattagttaaatgataccaattgaatgatataagtttttgaagcattagtgtcatttacttaggaatgttaaataagctatgtgtcatgcttaattaaaactctttaaaccatgtaggtttgcttaagaatatgaaatgagaacgagcaatcctaccatgtgatttacctagtatgcatgcattgtaaatctaagcaagtaccaaatgagatactatgcctgataggtaaaactagatacacgaaattagatcacatatcta

SEQ ID NO: 60719 - DNA, 350 bp, Zea mays
cctgcattacggaccatccaaactcaacttataagattttctcccacaagtgcttttggttaatcgcagccaccccatgttagtcttaccatctaagcatgtgtcgagttcagctctatcaaaacttactaagtatagctgaccctctaacactcccttatatgctactgaatgatcacttcttctaaagacagtgacacctacatcagtaaatagacagttgtagcccatcttaaataattgagaaagcggaagcaaattgccatctaatgaatctacaacaccaacattggaaatagaatggtcaggagatatagcaattttacccaatccttcgaccaaaccttgat

SEQ ID NO: 60720 - DNA, 114 bp, Zea mays
actcagcttaaccgcataatccacggcaatggtgacttggcataagcacctgactgtcccgtgtgcaccagactgtccggtgcgccatctaacagatgctgccagcaactgtca

SEQ ID NO: 60721 - DNA, 287 bp, Zea mays
gacacctaaaactacccgcagcatcttgattatgactgcagcctccatctatattgttttcttacatgccgaatactgcgcaggcatcgtaacgctgcgctcaacaccatgatgtgcacatataagcttatgtctgaatgttcctgccacatcacaacactaacaccaatcttggctaatataatacctattgatgccattatcaatggactccggccatgacccaccacctggtatcactcatgtgagacactaactttggagaacctgctctcttcgacagatga

SEQ ID NO: 60722 - DNA, 457 bp, Zea mays
tgctctccccctaaatatcgtgcgatacgatgataaatcctctacattaggcgctcataatgccaaaatagcacatacctcaggcgatatggtgaagcattactatattttaacatgctgggggtgcattatgtcaggaatcagactgtgatgtgtatgacacacaattgcatacatataaaaaccatataagaagatataactcttggatattaacctatcactatacaccataaagataccatataaagcaccatatcacatcatgaatatctatcaacaatatatgccagagcactataataccaaatgatctacatcacaataacaactaaagacaagaataagctcttgatagcaacgacaactgcactattgtattatcatcacataatctataataaaaacatcatatagcttatctatgcctagaagcatattcccttaagatcaaaag

SEQ ID NO: 60723 - DNA, 292 bp, Zea mays
gacaaagcttatacgttctctgaaatgaccaccggctctggatgaagaatccaccccacgcatgtcagattaatccataactccaccttaagtgatgacagaggaagccagcctcatatgccataacataactcccaatcttcagggcaacaacaaagctctttaatgccaccagccccaacgagctaaggcggcatgggctctacagaaaagtacggggatcaagccagaaagctctattgcttattccgtggagaagacaaacgccatattacaagaacatgccgactta

SEQ ID NO: 60724 - DNA, 504 bp, Zea mays
  unsure (1)..(504): unsure at all n locations
tgaacacatggttaggtctttaggagtcctcacaaccgggaggttgttcaacatacactagttcactaatcttaccatttagaaaggcactctttacatccatttggtagagcttgatattgtgtgcacaagcataagacagtagaatccggattgcttctaatcttgctacgggagcaaatgtctccccaaaatccaatccttcaatttgagtatatccttgtgcaactaatcttgccttgtttcttactaccacaccatcttcattgtgcttgttgcgaaacacccattntgtaccaataacattgtggttctttggtctctcaacaagctcccaaacttcatttcgagcgaagttatttaattcttcatgcattgcattcacccaatcaacatcaagtagagcttcatctacacggttaggttccatacaagatacataagagaaatgttcacataatgaagctatgcgagagcgagtttgaacacccttactaatatcac

SEQ ID NO: 60725 - DNA, 392 bp, Zea mays
  unsure (1)..(392): unsure at all n locations
aactcaatcttactctccaacgccttttctcatttctttcttatcatggctagntcactaccgcacgcgatattctatgcatatctacattatttgaactctcacatggcgaactgtgcgtcttcccaatatgaatggacggatgtatgtatgcttgccatcccatatacaacgatcccgctgataagcctgaggaaactccatgagaagcccctgaacagcaatcatgtggtggaagcaagtgttccttgacctatctctgtcctattcattctttaatacacctcccgctatacacatttatgcctaaggattgactagctctgttatccatgtacttgactactatttaggctgcatattattgttagcttatgctctcgttaactcta

SEQ ID NO: 60726 - DNA, 397 bp, Zea mays
  unsure (1)..(397): unsure at all n locations
tcgtattcagttctgttatnttagcttccgcttccgctagtaaaccttcatttggtcggagttcgaactcttcttctcaaaagcagttgtttgatcttttatcttgttttctaagtattcaattataacctcgtgatttttatcttctaaatcttggtgcatcctcaaagctttgctcaataacatactgtgtacatgaacaaccttcgttagaaaacatattttatgaaaattaaaagttagagggagattgtttaccttgaaattggaataaaacaaactaccgacgatgtgctatcgccggtagcggctaatatcgactttgagcttcgggaaaccgatactctttgatagagtaccgataacctttgctccggtctgatctcggatgcagcct

SEQ ID NO: 60727 - DNA, 418 bp, Zea mays
  unsure (1)..(418): unsure at all n locations
ctgaatgcatcaaagctccttgttgctctatacacacaactattttctacatctcctgacataccgtggagacacgcaataccatatagagacaatgacatanagccctactacttatagtatcattcaccacacatatccttatcctgcgtgatcaatgaactatcctaagtcataatcctttgacagatcgagccaccttctctatctcaacgctaactcctactacgtgaaaaagtacttcaaactcttgagatgagtatacctatgacatacactatccttactatataacgaatgcccaatttaagggcactgactactttagccacttccgaacatccgctggatatgctccttatgcccgcgcacatcctgaagtaaacacacacttctcttgattaaacacaccaaccca

SEQ ID NO: 60728 - DNA, 382 bp, Zea mays
acctacatgtcaacgagatattttaccctctatgttgctcgagagacacacgactgttcagatcctactaactcacaacatcctttcacgaatgccaatgacaggcgtgcataattatatcaataacacatggatcgtctataattgaccaattcatactgcaaataaagcccccttacaaagggcaaatacccaaattcacatagtatgctatatcactactaaaaaggctatcaaccatcgaaggctacgaatgaggttgctaggatcgctacgttcttacactcatccaactaccaaatatccctgtcttccgtagctcttctaatggctacttctcatgtcggggagaacattcctaaaaccgtgtcatccttaccgc

SEQ ID NO: 60729 - DNA, 428 bp, Zea mays
  unsure (1)..(428): unsure at all n locations
actcaacntattgtccctaatagttngctaatttcgtcaaggtaacgctcccatggctcacgataaccaaggttacactctatactctgctggatatcttgagcacaagatcaagagaattcattccttgaagtctcatcttggctctcatcatgctcttatcgataagagagatgcacctatatctaagcantccacctatgttaaataggctacaaagaaatctcctatagtatcaaatgaacccattgtttcatctaagacgtctgatgcttcatatgttttactaacaaatcaggctaaatagctgccacatatgttatggccaaacacaacggctcaaagacttgcgttcgggtacccaaagtgcttgtctntaatgagaaaagacccaatagcgttcgtgtacttacgaacacagcctatac

SEQ ID NO: 60730 - DNA, 394 bp, Zea mays
  unsure (1)..(394): unsure at all n locations
tggccgcgcgatctngatcgggtggtcgaggattggaataatctttcgcataactctgacctactatctctgatccggtggcagtgcggttgtacctgctataaaacgaatgtgttaatcttggcggtccaatacagatcgaacggctctggttgcttcttacctcttcgccgctggcgtcttgcataataacccttcggatttttttataccaacccgcattccaccgcgggtaggttctgagtctgtggaacctctgcagtataaccccgaactctctgcaaattatgcacgccatccaggactcctaatatagataataatgaatatagacaatcgacttctaccggtaaaataatcctaataatgcttaattatacaaactcgtttaact

SEQ ID NO: 60731 - DNA, 444 bp, Zea mays
  unsure (1)..(444): unsure at all n locations
tactcagcttctaagggagagcacatttngcgactaaccaatgttcatttttagaaagacaggatntgtagcggatgtacagtatgaaagcatgttggaacccatcatccacacaaaaacatcatgacaatatgacaggccactggagctactccacatggatttatttggcccgatcgcttacataagcatcggtgggagtaagtattgtcttgtaattgtggatgattattctcgcttcacttgagtattctttttacacgaaaaatctcaaacccaagagatcttaaagggattcttaagacgggctcaaaacgagttcggattaaggatcaaaaagaaaataagcgacaatggaacggagttcaagaactctcaatntgaaggctttcttgaggatgatggcatcaagcatgagttctcttctcctacacacccaacaaa

SEQ ID NO: 60732 - DNA, 446 bp, Zea mays
  unsure (1)..(446): unsure at all n locations
cttgagtgaactcattaaaacagttntctcaatagtcttcattgtatgctctggagatcagcttcttgtcatcataccatgctttagaagtctgagagcacctagagggggggggtgaataagtgatcctgtcaaagttcaaaacttaagcctcaaaaacttgttaaaggttaacacaagtatggccaagtggctagagagaactcataacactattaccacaagaaagctatcacagagttgacacggtggttatcccgtggttcggccaagtacaaaacttgcctactccacgttgtggcgtcccaacggacgagagttgcactcaactcctctcagtgatccaatgatcaacttgaataccacggtgtttntctttactttgatcttcttccgattgcgaggaatctccacaacttggagtctctccccttacaataagatca

SEQ ID NO: 60733 - DNA, 408 bp, Zea mays
  unsure (1)..(408): unsure at all n locations
tgtgtcccccattcttctataaatatagcanatctctggactgtactcaatgatgagaacacatgtagccacactgtcatagttagaagagaaaataacaaaaaaaattaagaatattctaaatggtcttcacaattttacttacagtttgtagaacatctatagtaacagcatattgcatatactcaattgatgcaataagaacattgccttgagcctcccctttccttctgtcagctccaacagcaggctgtgccagaccatcaaaaggcaaaactgcaagttacataaaagagaaatacagataattgaaatactagaatgcccatggtcttctgaaaaagtaataaatacctgtaatgtaccatccatggcagaataattgattgtcggatatggatcattata

SEQ ID NO: 60734 - DNA, 337 bp, Zea mays
gcgtgcacaatgagtttgccgtatggccgtatctatacactcggagcgcagaaagttgaaagaccccacttgtcattgaatgttgatattctagcaaagggaaggttgtttttctgaccttctgcgtagagccttcatccatatcgcaatctcaaattattatttcaaataaatcaatattgcgaggggcttactgtggggaccttcctgtgttcgaacgtactcaaaaacataacttaacaatgtgtctggagtatactgtgtgaacacggatcttctgactcgtatcagataaggagaagctcacaagatactaaggttgacacagcgccgaatc

SEQ ID NO: 60735 - DNA, 473 bp, Zea mays
  unsure (1)..(473): unsure at all n locations
ttgaagaaacaataaactctattggagccaaaggattcatcttctatgaaacgaanactcttcatgatatcttctgtggagacgaaggtacatgatgtgccagagaagactatagttccttctttgccttctgctactgatattttagaatgttgaaggtaatgactgaacccatctcgttcacaatgctaagtcctctaaggttagatctgactagcctcttgcagtcataggaaactgctcagactactgacgggaaagccgaggggcagaagaaacgacggatgatgaatgtgatgcaagctattgaacagactctgcctccagcttcggcggataaagctattatgcctgttgatgctgaagatgccactggagccaaaaccgataatcttgcaaccacattgtctgaaatcgacagacttatatcagatgtggttgctgaataagatgtagccgcagcaccttctgat

SEQ ID NO: 60736 - DNA, 249 bp, Zea mays
tcctctattggtatgccatttgctcctcattcccctgatgttcctctctcaccatctcctccggaaatcaatgagaggcaccatcaggcatatggtgcgcctttcatgtcttcagatgatgaacaacaatatgaagaacgtcttgatgatccgtgacaatttgccctgcctccccaccagggggatctgggtcaatcctcttcttatccctcgcccacagatcctttaggaagctatcctctcccagct

SEQ ID NO: 60737 - DNA, 303 bp, Zea mays
aaaaatgactgcgaacaagctactgagggacgaagtgttgaagaaaaaaaactgtggatccttttatcgctgggtttggtgaatctatgtccaaaaccaaccccgacaagattactacagagattctagaacgattgtctgaagatactgatgatagtgatagttatgatgtggagagtggagacgaagattctaaagatcggccttggagaccaagccatacttgttttggaaaatcgactggttaacagaagtcatcttgacaacgtgagaggaacgtactttcgcgacatgtctattatg

SEQ ID NO: 60738 - DNA, 391 bp, Zea mays
  unsure (1)..(391): unsure at all n locations
ntgggacnaggagttcctntataggctagcgttcctccttctcaactttgggctctggtgatggtgccgagatggtccctgctggttcattgcaagctgctatgggtggcgaccttatgctcggtcatcaattgatctctcacgagttgtgagtcccttcgttcttctccaatctccaagtattgtgatatattctggcttggctgttacaccgtacgaactgctgtcaacatgctcatctgttctccatatcaggcattggtggatgggatggctagtcaactgatgtagcaaggagcttctgttccacaatgagcttcatctctggcacgatggaattcggagttgtccaacatcacgtctctaaattggaagcgaccaatgctggtta

SEQ ID NO: 60739 - DNA, 486 bp, Zea mays
  unsure (1)..(486): unsure at all n locations
ttgtgaagattcttcatcccaacatgggctattctgcgatgtcatnaccaacccatattagtcttagcaagtaagcatgtatcgagttcagctctattaaaatcaaccaagtatagctgaccctccaatactgccttaaatgctactgaatcatcacttcttctaaagacagtaacacctatatccatataaagacagttgtaacccattttacataattgagaaacagaaagcaagctatattctaaagaatctactagaaaaacattggagatagaatggtcaggtgatatagcatatttaccaagacctttgaccaaaccttgatttccatccctgaatgtgaaagctctctggggatcttcatttttctcgtaggaggagaacatacatattttccctatcatgtgcgttgcgccccagtatcattatccacttgagcctcagatgcttaacctacaaacaatttaggccttgtcttaggac

SEQ ID NO: 60740 - DNA, 320 bp, Zea mays
  unsure (1)..(320): unsure at all n locations
tactcnacttcttaaggataacatntataagtatgactcaacttcaatttctataacatagaccttgcgcatgcctgctaagcaagctaactagtaagaggagtccatctactgtagaatgtgatgaccacttctagatccttggagctgctgcatacggaccttctcttgactcgtcgacttatctgattataggatggagtaaagattggccttattattgaagatgacatttcccgcttaactagggtattctatttgcaggataagtctgagactcattggaccctctagcgtcttctcatgagagctcaacatga

SEQ ID NO: 60741 - DNA, 459 bp, Zea mays
  unsure (1)..(459): unsure at all n locations
tgccctccaccaactccatcttggtgagcaaggtgacgtcattctcctcatgagagatcttgagggtgtcccacatctgcttggcattgtccaagccgctcaccttatggtactcgtccctgcacaaagaggctaacaacacagtagtagcttgtgcatttttatgaatctgttcattaataaatataggactatccgagctatcaaatttcattccattctcaacaatttcccaaatgcttggatggagagagaacaagtgactacgcattntgtgactccaaaatccgtagtcctctccatcaaagtgtggcggcttgccaagagggatggaaagcatatgtgcattcgagctatgtgggatacgcgaataatcganagaaaagttgagttaaccgtctttcgtttgtcgtagtcattgtcgtcgttgtcctttcgggaagaagtggactcatcgct

SEQ ID NO: 60742 - DNA, 429 bp, Zea mays
  unsure (1)..(429): unsure at all n locations
cggacctataatactcagcttagtcttagcgntggtttcggtcttagctagtcttatttttacagggtagtttgctatatcctgtgcatctatgtttgtcatgatgaactatgtttggcttggatctttgtaatgattgtcaccagagtgtgggtatcccctgcattntggtttacctattatgttaatggagttagttatatagttgggaaaccccttctattccactttcctttctatctgagaagctgtgtggtctgtgttggagatcagtgaagatgctcatctgtccagtgctgttgaagaattctattctcttttcttatgctgcaagatttgccagatcagttctgatgtgtggttgcattctgcagatgtcatagaacaagcgcatacgaggaaggcgtgctcatcatgagcgagccgctc

SEQ ID NO: 60743 - DNA, 490 bp, Zea mays
  unsure (1)..(490): unsure at all n locations
ttcttcatnccaacatgagcaagtccgttatgttttattcatcccatattaaccttaacaattaagccagtgtctagatcagccttgttatcattaaaatcatctaacnatagctgaccatataacactcccttaaatgctactgaatcatcaccttcttctaatgacagaaacacccacatcagtgaatagacagttgtaacccattttcataattgagaaacaaatagtaagttgtaatctacagaatctacaataaaaacattggaaatggaatgtgcatgcgatatatcatatttacccaaacctttgaccaaaccttgatattcattcaccaatgtgatcgctctttggggatcatcatctatctcataagaagagaacattactttactccctgacatgtggttgtgcacccgctatcgattatcaacatgtctcgcgtgatgcataaacctacacaacaatatacgccttgttctatggactc

SEQ ID NO: 60744 - DNA, 467 bp, Zea mays
  unsure (1)..(467): unsure at all n locations
ttccacctctgaactaactcggctgcatcgctctttgntgttggccaactaaatcctgacctgaagaccttcccgactagtgttatggaagctgcatgtattccacattgcccagcatggacctcctccagaagttgcttcccagtggacgggaagatgcacttcatgatgacgcctgacgcaccccttctatacaatgtctccccaatgagtgtgtagtgagccgactgtctggcaatgcgctcggccgagttcttggcatctaggtcttcctcattctttatatacttgatgattggccttctccagtcatcagagtctgactcgggtagatctataatgttgcactcttctgtctgatccatagagatactcggttgtagtatttcttgcacaaagactccgggtgggacctgaactcgactggatccaacttggaagtcatcggctgcgtgttcgatctcttc

SEQ ID NO: 60745 - DNA, 386 bp, Zea mays
  unsure (1)..(386): unsure at all n locations
ataaaaccaacttatctctataccagaagaagggtctcccctgggctcggcttgcatggccggctcctcataacacggatgggagctcactgacccaatttgtgccatgcttttttaagcagtcataggtgcgtgtctcgagtcctctaaagatgttcgcatttgccctctacgactacccattacttctggggtgggccatggatgcgaatcagatctgggtgccgatgtcctcgcaatattcctgaaagatccgacttgtaaactatgtcccgttgtctataatgatacgacttgngacctcaaatctacagacgatcgacttgaggaatgcgacagcagcactctgcgtaatagcgaccacaggggtggtctttggccacttg

SEQ ID NO: 60746 - DNA, 392 bp, Zea mays
  unsure (1)..(392): unsure at all n locations
aaattgtaacccttcttactcttggtctataaaagggagaggagacccctaacaagaaaggagagaccacacagaaagttcgataggaactttcacacctcacagagacttggaaactctctttcttacccggttggaactccctactacaaacaatcaagtgttggtagcgcgagtcaccgaagactgaagtagggaaaaattcaatttgaacatgtataacctttgcgttcaccgcgcacaccatccagacctaaaacatgcatacacaaatttactgggtggtgcttattcgtaacaccggcaatgatcaattgtgaaatatngagcttctacttatgaatttcgcatcgtatactatctgtgtaattcaacgcccttggtaaatctgt

SEQ ID NO: 60747 - DNA, 394 bp, Zea mays
agcagctactacgacacccacggcgatttgtttccgaaccgaccatcaagcgggagccagctatcagcgggagagaagcaccgaagcatgacacaaggcccggcaaaggcgaagggagccggatcgagcggctatccacagacagacgtccgcgctggccgaaccgatcacgagcggcaggaagcaaagcaagggaggccgttgacccgcggcggagtggatcccgattggatcgggagctgagcctggactgacctaggcggaagggtccgccatctcagactagttgatgaagaggtcctcgcagtggaaggactctgccaactcgcggaggaagtcacggcggctggtggccagctcgtggtccaccaccaggaagccacggccacgcagc

SEQ ID NO: 60748 - DNA, 496 bp, Zea mays
  unsure (1)..(496): unsure at all n locations
tactaagctnggtcatcgcactgaaccgaagcaccactggtgactatgcttcttttctatatatagagctcnggaaaaatttaacaagtcagcaatntcatcaaaaattgtggaaaattcatcatcacatggaaagagttcattctacagctagggttatacgtgacggagaggaatccgaagctgctgaaaccgctccgatttccgaagtgatgaaacggtcaaggttggcagtaccggaagaagcttctaaaggtacccctgctgccgaagctgagcagattgatgttgaacaaagtgaaactgaagatgagtataacgccatgccatctaaacctagccacctagagtttggaaagtctactattaccgaaggtgatatgcctaacttgatgaagctcggttatatcagngaagccaagaggaagctagttcgttctggtggagaggaaattactctgaagccaaaagaggatgaagtggtagtctttaaaag

SEQ ID NO: 60749 - DNA, 475 bp, Zea mays
  unsure (1)..(475): unsure at all n locations
tctcctgtacaagcgccagactcactgtatagtgcgaagctgcctctttctttattatggagcccctggcgctggtggagttaatgctgttagatcaatcaaatactgcttcagctcttcgaaggctttttgttgaggtgggccccattgaaaaacttcggctgactttagtatttcaaagaatggcaagtttctttctgctgatctagatatatatctattcaatgaagccagtcttactgctaaccgttgagcccccttctttgtgcttggcggctccattcgaacgatagcttcgatcttgtttgggttagcttcaatccccttcgttgaaactagatagccaaggaacttacccttctttactccaaagacacanttttcaggatttaatttcaagccagcttgcctgaaattagcagatgtttcttgtagatcagcgatatgagtttcttgcttcgcgcttttactatga

SEQ ID NO: 60750 - DNA, 423 bp, Zea mays
  unsure (1)..(423): unsure at all n locations
gttgcaacttacatttgcactagcgggacaactgaacgcatcacgatgctagctcaggaccagaacaattgtacaaaaagcattgtcacacatacctacaccagttcaggcattcctctctgcaccttcagtataccacaccaccaagaccatatgaactcttgagctctttggcacataaattactatagcacaatcaaaacccagtccatccatctggttggtaggatccgtctttcttttcttctatattcagattactgagctgagaagtattccccatgtttgataacaggggaagtccagttccagaaggagcagccttaaaactatcttgaccaaacgcaaatggatcggtgctagaacttatatttgactgtcccaacgagctggctntgttgctggttgatgcacgcagagttc

SEQ ID NO: 60751 - DNA, 479 bp, Zea mays
  unsure (1)..(479): unsure at all n locations
ntccatanagtcctagnttactaattntcgatgcatattttgtgagttatgagcaaaacaattaactgctgtgctgctatctagaaatattcaagcattaagttgctctcttgaagttgctcttgtttggctaagtttggtttaggctataggaacattatatgccttgcattcatatatacattccttgaagtacttgcatatgtcaatgattgatttggtgtcaggaaagcttggtccgaggtatataggaccgtctactatcttggccgagttggcaactgggcttagtacatgtaattgtcggaatctatgatcagagtacaccaagtattccatgtctttatgttgaggaagtatttgcggaatccagactatcaaatcgagctagagccgattcctgtgtagcaagagcagactctagagtgtcgtctgctgcgtatcttaaaatcctangagctcgaggagctgatgcaaca

SEQ ID NO: 60752 - DNA, 476 bp, Zea mays
  unsure (1)..(476): unsure at all n locations
nttgtctgtacgagcaagtggcanagatgatagccgaagtctatttctttggatgtaagacagagggaagctatctaacaacaaagacgaaactcgcacgatcgaggatggagaaaatacgttgttgtcctgatgtcatttgtaaacaatgtgtgtaaaaccttgatgggcatgattgtaattctgtacaaaagcggttcacctttccgataaatagatgaccagtgccctgtataaagtaccttttcgaggccagtgtcacacccggattttatgggtccaaaacccgggcgcgaacataatcaccaggtgtgctgggaccaagtctcacacatatgatgaatcatggcacaggatcgaatgtcacatctttactatataataagagttatgtacaaaataaataattacattataaggagacaacggtccagcaacccanagttgactgggggacgacggcctagatctctcac

SEQ ID NO: 60753 - DNA, 463 bp, Zea mays
  unsure (1)..(463): unsure at all n locations
tggatgaagtgtcatcatcatcatcatccgagctatcatttctgttctattcaactaagtanggcttgccatctntcttcttgttataanatttctttttcttcttgtcactttcatctttgcccttcttcttcttgcttggacaattcatggcaatgtgaccgggttccccacactcaaaacattttctatcattgaaagcatttcttttatatgtttgacctcttctaggttgacctcttttcatcttcatgaatttattgaatttccttacaaataaagccatgtcaccatcactctcactttcattatcttcatcattgctatcttccttttcaattgcccttgaggccttggctttgagagcaatagattcattnttcaccttctttgccaaacttaaagcatcggcttgtgacttcttaaatatatcttgagtgagaatttctcccaatacttcggt

SEQ ID NO: 60754 - DNA, 448 bp, Zea mays
  unsure (1)..(448): unsure at all n locations
actcagcttctaagggaaacacgtgaaggtttgacaacgtcttttttataagatagaccttgtgcagcttgtcaagcaggtaaacaagtgggaggagcacatcacagcaagaatgtgatgaccacttcaagacccctggagctgctgcatatggacctcttcggacctgtcgcctatctgagcataggagggagtaagtatggtctagntattgttgatgacttttcccgcttcacttgggtgttctttttgcaggataagtctgaaacccaagggaccctcaagcgcttcctcaggagagctcanaatgagtttgagctcaaggtgaagaagataaggagcgacaacgggtccgagttcaagaaccttcaagtggaggagttccttgaggaggaagggatcaagcatgagttctccgctccctacacaccacagcataatggtgtgg

SEQ ID NO: 60755 - DNA, 473 bp, Zea mays
  unsure (1)..(473): unsure at all n locations
tcagctttaagagagagccatttcgactaccatgttattttgtattgacttgatntgtagcgcatgtcaagcaagaaagcaagttggtggtcatcatccacacaagaacatcatgacgaccgacaggccgcttgagctactccacatggatctattcggtccgatagcttacataagcatcggcaggagtaagtggtgtcttgtaattgtggatgattattctcgcttcacatgggtgttctttttgcaggaaaatctcaaacccaagagactntaaagggattcttgagacgggctcaaaatgagttcggcttaaggatcaaaaagattagaagcgacaacaggatggagttcaagaactcacaaatcgaaggctttcttgaggaggagggcatcaagcatgagttctcttctccctacacgccacaacaaaatggtgtagtggagaggaagaatagaactctattggacat

SEQ ID NO: 60756 - DNA, 484 bp, Zea mays
  unsure (1)..(484): unsure at all n locations
tgcttacttggtaagatgaccaaggcgcncttcacgggtttaccggttatgacgttagatttattggaactcatacatactgatgtgtgcggaccaatgagtacgacagctaggggaggattccaatacttcataaccttcactgatgattttagtagatatgggtatgtctacttaatgaaacacaagtctgaatccttagaanagttcaaagagtttcagaatgaagtagaaaatcagcgtgacaagaaaattaaagcactgcgatcagatcgtggtggtgaatatttgagtcatgagtttagcaatcatctaaagagttgtggaattgttccacagcttacgccgcctggaacgcctcagaggaatggcgtgtctgagcgacgtaatcggactttattggatatggttcgatcaatgatgagccagtcggacctacctttgtcgttttgggatacgctctatanacagcagcttacacact

SEQ ID NO: 60757 - DNA, 478 bp, Zea mays
  unsure (1)..(478): unsure at all n locations
ntggggggatgtaggatttcatagntatttgtctactcttctctcttttgtgttatcggaggtagataatggtaagcatgccaaagggtggaattcagtgtagttcggctacataaaccccaggtatgtgtccattcaggaccgacctttaccatttagtttacagtgtataccaaacttgtcaaaggaccatcctgagtcaatgtagcgactataagtatttacaattccgagagatgtatgcgacacaagcatagaggttctagatagaacgagtaaagtggttcgacgggaacacactatggttttcacaccaacatagtgaatattttttagaataacctctcggtatactcgcaacatcgtgttgctagcggttacatatccttttatctcatagtttgcttcatgtcattcagcgacaaagagagcaatgtgctaacatctggttgaacaatgtatgactgagattctgatc

SEQ ID NO: 60758 - DNA, 480 bp, Zea mays
  unsure (1)..(480): unsure at all n locations
tatatgatggtgaacanatctactaaagtgtctttgactcgattccttttataanatggaganaaacttgttcaaagttggactatntgtggctgaaactgaattgtattcagttactgaaaactgaatttcagtgaaagttgctgtttttggagcccatttgtgactaatccataaggttttaaactatggtttctatagaggaattgaataccataagttggngtacaaatgtctttgagggtgatggatatgatcctacacaaaaagtggagaataagtagactgatactggactgtcagtgtgcacaaactgaattnttgtgcagatcactaaaacctgaatntacagtttggtgctatngttggagctctatngtgccaaatcctggcagatttcgacagacaactntatagcanaatagaagaccatatataggagaacaaatttctttaagtgagtttggtttggtgctacac

SEQ ID NO: 60759 - DNA, 315 bp, Zea mays
  unsure (1)..(315): unsure at all n locations
cagccgagatcaagtcttgctgcataacaagttttgaccttggatggtgaaaccaacacaagagctgcacctgctccgaagattccccaagagccatcacaaaacactgtccacacttcggcatctttatttgcttcttcatcctgagcccctggcgtccagtcggcaatgaaatctgccaatgcttgagactggatcgaagatctatgcacataatcaatgganaattcgttgagctctgcagcccatttcccaatccggccgagagcttctctatttctcattatatccttcaacggctgcgaagaaggaaca

SEQ ID NO: 60760 - DNA, 452 bp, Zea mays
  unsure (1)..(452): unsure at all n locations
tctggttcttccccgcgatagccnctgaccacgccgcgctctgtattcttcccggcgggacccgtactggacatggccggcgaggactactcaagctaacggtcggagagtctctacggacctaaagcgacctaagaacggccctcaatttcgaacggtgctccaaaaaattgctctgcccacgctcagggcggaaacccgggcgtcaagctcacgttcccgtacaaccatggccggactgagcaaacggacgccaccgagagcatcacaagcatgcagaggcacgaaaacagtatacgaattggatggcgactcaccagaacgagctggccacgggagggctagttttcacggtgcggcggatggaattgggggaaacttggaattatagctcgtcggtgaaccactgggagcaatactggacgtcgaggtacttgactaccatacggagc

SEQ ID NO: 60761 - DNA, 448 bp, Zea mays
  unsure (1)..(448): unsure at all n locations
attattcccacggttatcttttcatttcctgacacacagtgttctcggaggtcttcgccataagacagtggcaggaagtcttacgactcaacgcatctgccaccacattggccttgcctgggtgataatggatctccagttcatagtctttaatgagctcaagccatcgtctttgcctcatatttaactctgactgggtgaagatgtacttcaaacttttatgatctgtatatatgtgacagatatttcccagcagatagtgacgccaaatctttagggcatgaaccacagcagctagctccagatcatgagttggatagtgctcttcatgtcggcgcaactgccttgaagcatacgcaatcactcggccctcttgcatcagtacacagccgagcccactgtcagatgcatcacaatatacatcangagggttagtgatgtccggttg

SEQ ID NO: 60762 - DNA, 473 bp, Zea mays
  unsure (1)..(473): unsure at all n locations
tctttgctcctcctcctcctcatttgagcttctgctattattntcattagccacacaacatatgtgggaatcgaaatgggaagacaaaccttttggagaggtggattcatcgtttggtctccatcgatcattttcttcttcttcctttaaagagttagtttcacaaataccaaaggaagtagaggcacaaaatgaactatcatgtttggacttatcacatgtgcgtttaattctacgtcaaatatcatgcgcatcatgaatggattcattataatttgatatgaaggcatgataatcttcaatgctaagtgtcggtgtttcgaccctgaggggtccctggaccgacgagtgaattgtcgacgcgtgtcccagcccagatgggtcggcgcgagacggagcacgaagggnggtagaagagaggggaaagcccgcggcctccgtgtttgtcctgcgcccaggtcgggtgtgcttgc

SEQ ID NO: 60763 - DNA, 479 bp, Zea mays
tctaaatggagagcacattttgggactaacaaatgtttattttgataaagacaagggttgtagcgcatgtcaagcagggaagcaagttggttctcatcatccacacaagaacatcatgacgaccgacaggccgcttgagttgctccacatggacttattcgacccgatagcttacataagcatcggcgggagtaagtactgtctagttattgtggatgattattctctcttcacttgggtattctttttgcaagaaaaatctcaaacccaagagactttgaaaggattcttgagacgggctcaaaatgagttcggcttaaggatcaaaaagataagaagcgacaatggaacggagttcaagaactctcaaattgaaggtttccttgaggaggagggcatcaagcatgagttctcttctccctacatgccacaacaaaatggtgtagtggagaggaagaatagaactctattggacatgg

SEQ ID NO: 60764 - DNA, 449 bp, Zea mays
  unsure (1)..(449): unsure at all n locations
ggatgacataacagtcgtggtctcatatgtgaaaagcgctggagtcttatgatctgagcctttcttttattagatgtaatgtacataaatcattgtcccgaactggcggcgtatgtatgcaccagggcatagaagcttattctcaaggtgtggaatcccctgatcctagaagcacctgtgctgggttcagtatgggtgcgctttagccctggaacatgttagcanaccattgcaccattntacttgtttgccactgtgagaaatcgttttctctaattatctgaactcttgaagccagggtgggtttgtttccccccttggagttggaggataatgaccagctggaaccaaattttgttgtaaacagcgttgattgccgaatgatagttatagacatcttggactaaatggtgaaccagcgatgctgtttgaaatgcctttntggtctc

SEQ ID NO: 60765 - DNA, 466 bp, Zea mays
  unsure (1)..(466): unsure at all n locations
cgatagaatgttctgctcgccggattgtgaacaactctctcctattttgtttctgcagagtgctagcactaacgggtctgaccattgccctctgctccttgngcttcatgatctatctcctgcgcgcaggaggttccattttgaatctcattggacaaaggcacctgattttctatcgacggtggaggccgcttggaactctgtttcctcctccccttgtccttttgtcaccctctccaaaaaattcagagccacggtcaaacatcttcagagctggtctcaaaaaaggacgggacatattacctctcaacttgngatggcaagggagattatgcataagttgcagtctgctcaagaattcagatccttgtcggtgttagaaaatnggttggtggaccagcttgatggtcgcattgtggccctctcatcactgcagcgttctatggctcggagtcgctccaggatc

SEQ ID NO: 60766 - DNA, 482 bp, Zea mays
  unsure (1)..(482): unsure at all n locations
tgtcgcgcaggagttggaggccgctcaactggctattaagaccttttatatttattgtgtcatcctgaaggctcagcgcgacagggccatggacaaggctgttcgcgctgggcggatcctgatgaggagacccgatgtcgtggtgcccgatgatatcgtcgctgatgttagggccgcgcctgatgccgcaagccgtccatcttcttctattgcccctgcanaggatgctatccgcagggatacttcaatgtagtgatttacctgtaaggcacttatttatcgagttagcatattttagagaaaagatgtaatatgaattctgtatgtgcacaacggttatgtttgaactgattgttccgtgggcagggtgttgaaaaacacccctggcatttgtaagcgagatatttcttttatcgaagtactcccaatttgagttggttattntgctactagggtttagtggtcaccctacatcatgtgag

SEQ ID NO: 60767 - DNA, 374 bp, Zea mays
gcgctcgtataggagcttcgcatttctcttcaaagagagggaagactcagtccgctccaaaaggttggtacagtgtgtagcccgcacttatactaatgtccatatcaaggatatgcagggcacacaaaagggaaaaaggaaaaaagtctacagaagaaggcgggagccatgttgtcggaatggactcgacgaagctcagcgactctccgacacaagaccccgcacatcgccgcacaaggactctcttccaacgtggcacaatgcccatggaaggcggaacagagaagtaaactactcctcataatatgagcttctatgagatatgctaggagaagagaaattgcgatctcttgcaactacatgagcaaagaaaa

SEQ ID NO: 60768 - DNA, 459 bp, Zea mays
  unsure (1)..(459): unsure at all n locations
cccacctatgaataaccatgtttttttttttagggaagttcgtgcttagtgaatttacactagcagagctcacagtgttgtaatcatgatgcatcatcatttataaaatcaaaatcttgtatcagcttgtgaaacaagctaatgtgcagattgaacaggggggaagtcacttgtggtaatagaaaagctgaagaggattaccgatctcagtgaaactaggttctatttttgcctggaaagatagggtgtccaccacttctttctggttcatatatagctgaaggcaacgctcgatgaggttctggacctgtaaaacaggttttttttccatgagtttaagtactgctgcaagagaaaagcggcacataatcctaccatgacagacgaacaactcanacacagctaaaagaacaaaaaacatatacagtgggcttttgctaattgagcgtagaatgtgat

SEQ ID NO: 60769 - DNA, 470 bp, Zea mays
  unsure (1)..(470): unsure at all n locations
tgtagtgaacacttagtttcaatttcaaaactaaatgattaatttcttttcttaatgctcaacttangactagcaaaagtgattntgaaaaactaaaatttgctagggatgcctacacggttggtagacacccctcaattaaggatggacttggcttcaagagggaagccaagaacttaacaagccataagactcctatctccaccaaggagaaagggaaggctcctatggctaatagtgttaagaagaatcatgctttcatgtaccatgataggagatactctagaaatgcttctagaagtaatgatgtatttgattcacatgcttatgactcttatgctatgactgcttctagttctcatgttatgcatggtagaaatgtgtttagaagaaatgttattcaccaaatgcctacgagaaatgtagttcataatgctcctaggaaagtagtgaatgaaccttctgaaatt

SEQ ID NO: 60770 - DNA, 469 bp, Zea mays
  unsure (1)..(469): unsure at all n locations
tgtgaagattcttcatcccaacatgggctagtcggcgatgctatattcttcccatattagtcttagcaattaagcaagtatcgagttcagctctattaaaatcaaccaagtatagctgaccctctaatactcccttaaatgctaataaatcatcactccttctaaagacagtaacacctatatccgtaaaaagacagttgtagcccattttacataattgagaaacagaaagtaaattataatctaaagaatctacaagaaaaacattggaaatggaatggtcaggtgatatagcaattttaccaagtcctttgaccaaaccttgatttccatccccgaatgtgatagctctttggggatcatcatttntctcgtaggaggagaacattcttttctcccctgtcatgtggtttgtgcacccgctatcaatgatccaacttgagcccncggatgcataaacctataaaac

SEQ ID NO: 60771 - DNA, 482 bp, Zea mays
  unsure (1)..(482): unsure at all n locations
tgtgtaggttcttcatccctacatgtgctaagcggcgatgtttatctagcccatgctagtcttagctattaagcatgcatctagaccggcctcctcttttgcaaaatcaactaaataaagtttgccgtctaatacacccttaaaagctagtgaaccatcacttcttctaaagacagacacatctacatttgtaaaaagacaattatatcccatattgcatagttggctaacagatagcaaattgtagccaagagactcaactaanaacacattagagatagagtgttcattagaaattgcaattttacctaacccttttaccttgccttgattcccatcaccgaatataattgaatcttgggaatatntattcttgacataggaggtgaacatcttcttctcccccgtcatatggtttgtgcatccgctgtcgataatccagctggaacccncggatgcataaacttgcaagggcaaattag

SEQ ID NO: 60772 - DNA, 483 bp, Zea mays
tgtgaagattcttcatcccaacatgggctagtcggcggtgttttattttacccatgttagtcttagcaattaagcatgtgtcgagttcagctctatcaaaatctactaagtatagctgaccctctaacacacccttaaatgctattgaatcatcacttcttctaaagacagtgacaccaatatcggtaaaaagacagttgtagcccatttgacataattgagatacagaaagcagattgtaatctaaagaatctacaagacaaacattagagatggaatggtcaggggatatagctattttacccaaacctttgaccaaaccttgatttccatccccgaatgtgatagctcgttggggatctttgattttctcataggaggagaacatccttttctcccctgtcatatggtatgagcacccgctgtcgagtatccaacttgagcctccggatgcataaacctacaaaacaagtttagttcttg

SEQ ID NO: 60773 - DNA, 404 bp, Zea mays
  unsure (1)..(404): unsure at all n locations
attgataaaatggcgtcatgaggcttggaggaagagcatgagatcgacatccgatacttgagaacgggttatagcagataaccagatgatggggcataatcattggatgatctagagatttggatgacaaggccacaacatgattcacaaggaaaatgattacctaattcggacaaaggagaggtaggcaaacatgatcagctaggatgatcaacagaaatgttatgaagctttagggacaaggatttatggaaagaaacatggccttgatagggtttgcgcgactagacanccaacaacaattttttgacactacaagtgcacaaggagacttgggttggtctagcggtcaagctatgaggttctataaactgcgcatgtgtaaattcaagtgtaaaacacac

SEQ ID NO: 60774 - DNA, 478 bp, Zea mays
  unsure (1)..(478): unsure at all n locations
ntatcaaatggacgtgaagagtgccttcctcaatggacctatcaatgaagaggtctatgttgagcaacctcccggctttgaagattgtgagtaccctaaccatgtttataaactctctaaggcgctttatgggctcaagcaagccccaagagcatggtatgaatgccttagagatttccttatcactaatggattcaaagtcggaaaggctgatcctacactctntaccaaaacacttgaaaatgatttgtttgtatgccaaatttatgttgatgatattatatttgggtctactaacgaatctacatgtgaagagtttagtaggatcatgacacaaaaaatcgagatgtctatgatgggagagttaaagtacttgggatttcaagtgaagcaactccaagagggcaccttcctaagccaaacgaagtatactcaagatattctaagcaacgttgggatgaaggatgctaagcccatc

SEQ ID NO: 60775 - DNA, 476 bp, Zea mays
  unsure (1)..(476): unsure at all n locations
tcggtattacagcatatccgaagatgaaaggtcgaactcttttttatatagaatgaccttatagtccataagggtctgagtcattgttgtaaacttctatgaggggcatgattgtaattcctcacaggctgtgtcctgtgcctataaatagtgaacagtattcctttactgttcacgcattcctgtaattgcaaacgcatcactcgggaattattgtttgtcaaggcaaaggtataaatgtatctaaacgttatattcaaacatcttagattcatataataagatatatgaatgatgtcatttattttcaatatatttatctttaatgtttcacgtcttacattactttgtattatctttataaatntgattacgaaggtgaaaccttcgtaatattatgctcatgaccttcgtccaaagttcattagatccttgtggaaataatgcttcagcggacgaagggcattgatgtttaa

SEQ ID NO: 60776 - DNA, 431 bp, Zea mays
  unsure (1)..(431): unsure at all n locations
gcataccgacttcaactccccgaaacattgtctgctgtgcataatgtgttccacgtgtcacaattgaagaagtgtcttcggattcctgatcgaaccattgaagtgactgatgttgtcctggaaccagatttaacctactcggaacatcctattcgagttctggatcaaaaggacaggatcacccgaagaaagactctcaagttctacaagatacagtggaaccagcattctgaagaggaggctacatgggaaacccaagacttcttgaataagaatttcccaggctttctaacctcatgtaatttgtaaagtgtatatagttntgcaataaaaaaaagtgacccccacatcacccctgccttgtaccataattaaggaaataanaatgtgatgtgtnttctttaccattatttaccctaggagttttaatc

SEQ ID NO: 60777 - DNA, 486 bp, Zea mays
  unsure (1)..(486): unsure at all n locations
ntagcaagcggctccactccttggcttcgaagagcatagattaaaattctgatcctaacgatggcgttaggagtcagctgatgaagataaatttcaaaatctttcaaaacatccccaatcatttcatgcaaaggaaacctcaatcctgctttgaagaagcttctgaaaactaccacctcatcattttctggcttcagagtggtttcttcctcaccaaaacgaatcagcttcttctcggcttccccgaagtagcctagctttatcatcaggggcatatcaacttcgaagacagtcgactntccaaagtccaagtggctgggtttggatggcataatagtgttataatctatctcttcttcaccagcatcaccctcttcaatatcagcttgttcagcttcggcagcagatgcaccttcgttagaagcaccctctgtcacaaccagtcccgactgactcattacttcagaaaaatgggcagtctcagta

SEQ ID NO: 60778 - DNA, 467 bp, Zea mays
tagtacccataagcctcatgagctcctgccagaacgtcgaagtgtttttgtgtctcggtcggagacgatggactgcggaacgccgtggaggcgcacaatgtctgtgaagaatgcctgtgccaccgtctctgtcgtgtacgggtgcgcgagtggaatgaagtggcagtacttgctgaagcggtcaaccacgaacaggatcaccgtcttcccgttcacgcggagtagcgcctccacaaagtccagcgcgatgtcggcccataccgccgagggcacgggtagaggcaagagcaaccctgctgaatggagatgctcggacttgtaccgctgacaagtggagcacgcccgcacatattcctgcaccaaacgccgcatgttggggaaatggaaatcacggcggagccggtgcagcgtacggtggacgccctcatgctcgtcgccgtggacggcctccaaaatttcttgcagta

SEQ ID NO: 60779 - DNA, 471 bp, Zea mays
cgaggaaatggcgctcatcatcaagagctttcgccaattctattgcaaggaatgggagagactacaaaccccgttccaagaaggtgtgctacaagtgtggtaagcccggtcactttatagcaaaatgtcctatttctagtgacagtgacaggggtgacgacaagaagggaaagaggaaggagaagaagagatattacaagaagaagggcggtgatgcccacatgtgtcgggagtgggattccgatgaaagcaccaccgactcctcctccgacgaggacgccaccaatatcgccgtcaacaagggcctcctcttccccaacgtcggccacaagtgcctcatggcaaaggacggcaaaaagaagaaggtaaaatctagagtttccactaaatatataacatctagtgaagatggtagctctagtgatgatgatgatgaattgcttgctctttttgccaacttaaacatgcaac

SEQ ID NO: 60780 - DNA, 346 bp, Zea mays
agaaaaacttcgagcttcagacaactgaaggcttattggcagaagccgaagctaaaatagtagaattgaatacgaagcttctctgccaatctgaacagtttgaacaagaaaagcaagaacttaatgcgaaacttgaagccgaagtccaacaaaattcagatttgaaaaaattattggcaagccttcaagacaaatgtttggagtttagcaataaatgtattcaacgactgagaaaaatcttccactcagtcggggctagcagtgggaagttcaccccgtcaactgaagatttaccaaagaccttcgaacatattgagggtgaaatcgatgagcttgacgaagttat

SEQ ID NO: 60781 - DNA, 462 bp, Zea mays
  unsure (1)..(462): unsure at all n locations
ccataaaactcagctgagcagcttacggcctaccggaagcatctgaggctttatctacggagaggacgggaaagggctggccggtggtgctctcggcggactggcgggtccggggaggcgccggactaatggctggctcggtaagtcaggcgagtacggaggaggcaacgggaaaggaagccgagcactgtggcgggctttatagccgtggcgcgggcgtggtcacgggcggccacaggtgcgcggaggttcgcgcacgggcgtgctctgagcgcgccaccggatgtcagctcgcgtcgaacacgtggaagctngcttctgccatggttcaacggccgattagagcaccatagcgtgcgtatcttggcaaagtcactgtgtacggtcgcttctctgctccatatcctaccttattgctgagagttccaagtcaagatatggtcggcgtatggagatacaggg

SEQ ID NO: 60782 - DNA, 468 bp, Zea mays
actcagcttttaaggatggctacgatttccttggcagtttgtcgttatatctgaagaatttgaaatctaccttcatcaacttacgcccgaagcaatcatgaggatgggcatttttgtgtgggccgtgaagagccaaggcttataaccaaatgcaaaaagtttctgcaacatacatgagctattgtacaagacgaaaccctgtggaaaagagcagtatcacaacaattttggctactacagcttcggcacccgaactgggtcaagttgtcccgtgccaacctttcgaaagaggtggcccggcgattggatgacggaatggttttatgtgaaaaatgacttgaaatcacgggaagatattaaaggtatcattatgcgccctatctggcaacgcttcggcctccggaggccgaaggtggagatggatgaagcaaccgaagaatgtcagagagccttcggcgcggtgtgctc

SEQ ID NO: 60783 - DNA, 477 bp, Zea mays
  unsure (1)..(477): unsure at all n locations
tctaaagggagagcacactttgtgactaacaaatgttcatttttttatagaaagggtttgtagcgcatgtcaagtanggaagcaagttggctcccaccatccacacaagaacatcatgacgactgacaggccgcttgagctactccacatggatctattcggcccgatagcttacataagcatcggcgggagtaagtattgtctagttattgtggatgattattctcgcttcacttgggtgttctttttgcaggaaaaatcacaaacccaagagaccttaaagggattcttgagacgggctcaaaataagttcggattaaggatcaagaaaataagaagcgacaacgggacggagttcaagaactctcaaattgaaggctntcttgaggaggagggcatcaagcatgagttctcttctccctacacacctcagcaaaatggtgtagtggagaggaagaatagaactctanttgacat

SEQ ID NO: 60784 - DNA, 479 bp, Zea mays
  unsure (1)..(479): unsure at all n locations
tcggagcaccgaaggtctaanaaacaccttccctgagctcgttgtctataaacgattcaattacccagcgcgtagcggccccaccttgcagagttactatttggtctctgcggtccaccacgcagcgagtgcgagcgggcgtccgcctggtgtaaaaatcctggcgcttcgccttcttacctgcagtactatataaacagacgagtaggtgtgaagttaccacaacattcattgctatttgcactgttttgctgccaaaatctttagccatcgccgaagcttgactctcgaaatcgaacgaagctccagcttgaagcctgcttcgtcagaagaaaaaacttcggaagaaaaaagtattaaatttccacaaattcataattaaatggccagagtgcgctctactgccagggttgagcgtgagggaggcgaaactgaagcttcggagatggttcccatctccgaagccatgcaacgatccg

SEQ ID NO: 60785 - DNA, 480 bp, Zea mays
  unsure (1)..(480): unsure at all n locations
ggacgtgttaatctcgatagtagctgattagttntaatacttgttccccaataagaaatgaacttgagacataaagaagcggcaagcgaaaagctagcagaattaaaatgtttggttgtagacatgctcgatcacaaaaccaaccaaaccatcaaccattaaacaacatatatagctagtacaccatcagagagagaaaaccttcgtacatgttcaaagttgtgttctccacgacaaatatttccgagacaccagatagcataaggaaacaatattaacagctttgtaactatataaaaattcctaacaaactaaaatacaataagtttaagaccactttagttacataaatatataaaatcaaattagataggaacatttggatagaatacaaagaanagatccctanaggcgcataaccaaagaatagatgaaccaaactactgcanatntatgactaanagctcactangattgact

SEQ ID NO: 60786 - DNA, 470 bp, Zea mays
ggaagctggcctctgcgctatgacaataaacgatcttgcttatattcttgcatataatagtctgaaggtacgaaaattgtatatttggaaatctataatttttaaattattcttttattcttatactaattcttttcatatagggtttaatacttagcaacgctttgagagcgcaaaagaatgctgaagacgagagctataatattgctttcaacaacctgcgaacagaggttattaagctgaggaacgaagctttggaaaaagataaaattctgcttacattggtggataagataaaggaagacgaagctacttctaaagctcaagctgaggctcagaagagcgaaattgaagatcttcgaaaacagttagtcagagctaaagaagagcgcatacttgaagagacgaaacgagaacttagcgatcagtgggcaaatcatttagaaggaaacgttgaagagcttcgagca

SEQ ID NO: 60787 - DNA, 342 bp, Zea mays
tagaccttcgctccgactatcatcagatcaagatacgaggcagggatattccgaagactgccttctcaaccacatatgggatggacgaaaatttggtaatgtcattagggctgactaatgcgccagcatacttcatgtatccgaagaatcctatcttcatgcttgaactgacaagatcgtggtggctttcatcgacgacatcttggcgtactcaaagaacgaacaagagcatgtcggtcatttgcatgtactgcttcaacagctgtgagagcaccttctttatgacaaattcgcaaaatgtgattctcggcaaaggaaatcacaccttgtgcacactatctc

SEQ ID NO: 60788 - DNA, 418 bp, Zea mays
ctaagctgcattgcatgtaaattcttgattgatcagggcttgctattcttttgagaaaccgccaacaaagcgagtgaaaaagcttactcggtcaaacttgcaagtcctattttaactttagcactaaattcaacttattatgcaattgttggtcttgaaatatgctgaagactgcacttatggggagattcaaaactatatcactctgaaaacccctatgcaagccaaaatgcaaatttcaccattgcttatttctctaaaatatctacctatggaaaatatttgaaagtatataggggccaatacctgtccacagtgtatttgcggatctaatgggattgttggtggaagtaataaaaatcaaatttccatcttccttgctagctcacgacagtcgggtgacagacatgactggcat

SEQ ID NO: 60789 - DNA, 470 bp, Zea mays
aactaagctgagctggcctattggatgactaatggtcaacatgcagattttcttgtttatttagcttgcagggccggataggcttatatccacctttactaatttttgttatgcgagctttcaacaaacaatttacgctgatgcttattaatagttggatatatattgttaactggttagggtcttatcctcagcagagctttgaaagcacaaatagatgccgaggaccacagcactcagattgcttatgggaacctccgctcagaagttataatgcttatgaatgaatctcttgagaaggataaaatcttgctatccttggttgaaaggatataatccaacgaagctaggttgtgtagctcttctgatgccgattgtaaaatctaggagcttgaaaagatcgtagatacacatgcatagcgtattgctgattacaatatgtcagtctactaggtggattgcacaaattc

SEQ ID NO: 60790 - DNA, 485 bp, Zea mays
  unsure (1)..(485): unsure at all n locations
taagcttccaagatgtcgatgaaagacagaagccgccaagcggatgtgtttttcttctggaggctaaattcatcgagccggtggcttaccccacgtggctctccaatgttgtgatggtgcagaagaaaagcggaaaatggcgcatgtgcatagacttcaccagtctcaataagtcctgcccaaaggacaatttcccgttgccacggatcgacaaaatagtcgatagcgcggccggatgcgaggtcatgtccctcctcgactgcttcttcggctatcaccagatatacatgaaggaggaagacaaggccagcaccagctttataacacccttcggcacttattgctttgtcagaatgccggagggtctcaagaatgccgggtccaccttctccagactcaccanaacggtgctcgaagggcaggtcggcagaaatgtattcacatatgtggacgacatcgtcgtcgccagcacatataatgaggac

SEQ ID NO: 60791 - DNA, 482 bp, Zea mays
  unsure (1)..(482): unsure at all n locations
tggcaagcatattttggtacccatcgcttgatgggtccatcactttttttcaacaaagatctaggaacccaaaagtcctctgtgttagcactaggtaaactcattacctttctagcacaagttgcaattttgggttgcctagttacatgaaaattaattgacaagctatgagtggaattgttaccaatgggacaatccttgcattgatgtcccttctttcggcatgtgtagcataggcgtttttcaagtttcgaagttttcttctttccttgtttgttgcctgctacatggttagtaaaaactttcttttctaaccctatgcctttttgttttaaatggngacaagatctaagcaaatgtcccttcttggagtatttaaaacaaagtatatcatccttgttaataatcaagccatntttaatgtanggacatgacctaatcaagtgcccctcttcatagcattcactacacctcttaatgcg

SEQ ID NO: 60792 - DNA, 473 bp, Zea mays
actcagcttcgcacaaccggttacgcggtggctggcaccaattgtttttttataaaccctgactatgactttagctgcaagactcccggtcctgaatgtgatccacatatacccctgtggacttcgcggagaagctttatgccttcagcttcagttatgcatttcaacatgggttagcttattcctttcttgtagagatggccgttgactacagcaaagtatatgcttctgtgttttagccttttggcttcgctgtgatcggatgggtggtagtggcgctgaagatataaggtgattggagcctgccagtcttcgaccattatcagattgactatctgatgtctgtcgacgacttgcgtctattgcagatcgtcggtgtttcttacggctggtgtgacgactatgtgataaaatacatcgaaaggcaagggttcgcccttcactgctgctttagctaatgtgtcagcctcttc

SEQ ID NO: 60793 - DNA, 475 bp, Zea mays
  unsure (1)..(475): unsure at all n locations
tactcagcttaatggtcagtgaaatgattgccccaccactttttttttattgtagatgtagataattcctgattgatacttgtaggattgaacactgttgcattagggtattgtattttgttttttatttcagatttccctctgttcgtaatcaaaggtgaacttcctctgtaccataacactctggttgttgcattgcatcttgatttaagaagataataatttatagctaaattgaaatcatccatcttttaatgattcctccacattcttaaacgtcatctaagactaatacttggcataatactagaactgcactgaactaatctgctttgtcgtttggttgtatttgtccttctgcctcaggtgtttcttgtgtttcaaaatcttcattntatgcatctaaatatgacaaggctattgacactttttgtccagattctttgataaaatactctgactcaccaattcctat

SEQ ID NO: 60794 - DNA, 481 bp, Zea mays
  unsure (1)..(481): unsure at all n locations
tctanagggagaacacgtgataagtctaaccaatgttcattncttataatatagaccttgtgcagcttgtcaagcagggaaacaggtgggaggctctcatcacaccaaaaatgtgatgacaacatcaagacccctggagctgctacatatggaccttttcggacccgtcgcctatctgagcataggaggaagtaagtatggtctagntatcgttgatgactnttcccgcttcacttgggtgttctttttgcaggataagtctaaaacccaagggaccctcaagcgcttcctcaggagagctcanaatgagtttgagctcaaggtgaagaagataaggagcgacaacgggtccgaattcaagaatcttcaagtggaggagttccttgaggaggaggggatcaagcatgagttctccgcttcctacacacctcagcaaaatggtgtggtagagaggaagaatnacgacgctatagatatggcg

SEQ ID NO: 60795 - DNA, 472 bp, Zea mays
tatatcctacaattggtatcatttaacttatatgttctttttctttattatggataatccacccctcttgatatcaaatcaaagtgcatgtctcctgcaagtattcaaaacttgtatgcacacttttagggggagattactctataatctaagtctttgagactactacctcttttcaagtctgtttcatgtagtagtctcatttgaaggaaaatgaagttcccggagaaagacaacaagcttccactgcaaatctacatgaattcttatttctcacaagcctgccattggtcttcaattggcccgccattgactttcaattggtatctttgagactacatttagtatcatttacatgtcttctccaatattttattagactatatttcatatcttatacttcccatgttgctataaatagcatatattgtgactcatatctctgtatctatgcataaaggaagttagtcta

SEQ ID NO: 60796 - DNA, 469 bp, Zea mays
  unsure (1)..(469): unsure at all n locations
gagtagcagccgtcctcgctactcatgctttctaccttagcaattcaagccaggtcaccagcaccagcattagcgtcagaaccacccgcagcaataacagaggcagtttccttagcagcagcagtaccgtcagaataaccagcagggaggaaatcaataccagcgtccaagcaaccaggcagctcgtcttcctgccccattaaccaaccagaacaatcaagcagcgccagctcaaggaggaagtcatgcatgtttccactgtggtgaacaaggccattangcaaaccattgcccgaagaaagcaactcagcagcagccagctctcaatgccccagttagacagaatgcaatgcagcanggaagcaacaatcgtgggcaacctcgtgcccagtatggaaaggtgaaccacttggaggccgacaaagtccaagagactccaggagtggcactaggtatgttntcagtcgag

SEQ ID NO: 60797 - DNA, 467 bp, Zea mays
  unsure (1)..(467): unsure at all n locations
nggcaattttctgcttatagtaggtcataacaccaaaatgaggttgattcgtagcacttatgggtggtctcttgaaccaatcagtcgacacttcaacgaagtgcttagagggattctatttttaagtcatgagttcatcaagcttcctaatccagaaaccactctacctgaggatccaaagtggaaatggtttgaggattgtctangtgcactagatggcacaagtatcgatgtgaatgttccattgactgaccaaggtaggtatagaaataggaagcaacgaatcaccactaatgtattaggggtttgtgatcgacaaatgaagtttttgtatgtcttggctggatgggaagggtcggcttcggattcacgcatactacgtgatgccatgtcacgggaggactcatttgttttcctagtggaaatactatctagtggatgctggaatacaaatggtccgggatttc

SEQ ID NO: 60798 - DNA, 482 bp, Zea mays
tctccctccctgcgcgtttctctgctcacggcgctccctgtccgttcttccaacagctgcccaagtccggcctctgcttggatcttgtctgtgccatggagctcgcccctgccgcgcccagtccaagctcctcccctgccggcgtccagcacccggccggatctctgatggcgcgcgtgcccttctcttggcggcgctcactttctgcttctctctctcaagctcgccgtagtgcttttcccttgatcccatggcgcgccggccgctcctctctgcccagcatagcagcttctttctctgcttctcccagtcggcggccgaggccccgcccgtccgtgctccttcttctagctccagctcgcggcgttccctctgctgagccatggctgtcgtgcctccgctcccttgttttccctgcgcgcagcaatgaggattctgccgcctagccttcgctctcttcaacctccagctcgccacggcgc

SEQ ID NO: 60799 - DNA, 481 bp, Zea mays
  unsure (1)..(481): unsure at all n locations
taagctgacacgagagatggcgctatcatcagagcttcaccaattctatttattaggaggggaaggatacaaaccccgctccaaaaggtgtgctacaaatgtggtaagcccggccattttattgctaaattcccaatgtctagagatactgacaggggcaaagacaagaaggggaagaagaaggagaagaagagatccgacgaggacgtcgccaacatcgccatcaacaagggcctcctcttccccaaagtcggccacaagtgtttcatggcaaaggacggcaagaaaaagaaggtacaatctagagccacccccaaatatacaacatctagtgataagggtagctctagtgaagatgaagatgatttacttactctttttgccaacctcaacatagaacanaaggacaaattaaatgaactattatgagctattcatgagaaggatgaactcttggatagtcaagaagaattccttatta

SEQ ID NO: 60800 - DNA, 460 bp, Zea mays
  unsure (1)..(460): unsure at all n locations
cagaccagncnaaaagcgagcgcatatgttttatattatacaaaccagggaggcgaaaactcctcccgagaagacaaaagcaacagatcctaggtggaggaccgagtcctcccgcacttcagacttgattttcttcttttggaaccaccttggcacagaagcagcataagtctgctacttcctcacctagaaacaacgaacggataaaccctgagcatggaatactcaccaagtcttacccgactaaagaaaagactctcaagggtatgctggccatatgggagtcaagggaaggcttaccaatattcaaagactctgtgtttgcagaaacgcttactaaagtggagccttaaaaatccagctctactatgcaaggcaagtgaaagtacctgcactagagttcattctaccctagtccaatcactgggcctgcactagccaagttcttaacaagagccca

SEQ ID NO: 60801 - DNA, 480 bp, Zea mays
  unsure (1)..(480): unsure at all n locations
tatttcatctagtggcacttaagtaagcttcttgaaccttgattttctctctntacagtacgactacttatcttaaatctgattacgaactctattgcgtcttgatcgataaaacaaaatcgttagcttatatctttgtcttgttcttgaaccattgcatttttcttctcctttctctttccatgttgagcatttgttcgtctttggggtcatcaccatcctcctcatagttctccatcttgctcaacctttggatattggacttaaacatatcttattcgcaacactcagagtagatattagtacattacttgtctcagttatcaagaccatatatggagctnttagccgggcagaggagcgcgcacaagaggaggttgcgagcaagcggccagtgcgcgatggggtggacgcgggtttagtggcatggngaaagatctaggcagaggccgagaggggaacgtagctgttaataccatg

SEQ ID NO: 60802 - DNA, 475 bp, Zea mays
  unsure (1)..(475): unsure at all n locations
cgaagccatggtaagtagcataggccaataatatacgaattgtctattcctagctacgggtgcataggtttcaccgaattccaaaccttcgacttgtgaatattccttggccacaaatcgggctttgttccttgtcaccacaccatgctcgtcttgcttgttgcggaacacccaattggttcctacaacatttntattaggacgtggaaccaaatgccatacctcattcctagtgaagttgttgagctcctcttgcatcgccaccacccaatctgaatattgtagtgcttcctctaccctgtgtggctcaatagaggaaacaaaagagtaatgctcacaaaaatgtgcaacacgagatctagtagttacccccttatgaatgtcgccgaggatggtgtcgatggggtgatctcgttggattgcttagtggactcttgggtgtggcggccttggttcttcatcctccttgtcttga

SEQ ID NO: 60803 - DNA, 479 bp, Zea mays
  unsure (1)..(479): unsure at all n locations
gcttaccaatcaaacctcggggctcaccaatatttatgccccttgttctttttatatgatagaagaatttctctcttgggtttccagcattgagattgatgataacaaattatggattttcctcggtgactttaatatgatcagatcccctgataactgcaacaaaccgggtggggatcacctcagaatgatgagttgtaatctggcaatcagtccactggtgctgcaggaaattccactcanaggacaagcctacacttggtcaaatatgcaacatcacccgcttctcgaaaaacttgattggtgctttgttcacaagcttggtcggtcacctttccagctacctctgcactctcgctntctagaggaacctcggatcatatcccttggatggtcaatgtccaaatcaatgtgcccaagccacccatctttagatntganaactattggcttcagctcgatgcgttccactctatctt

SEQ ID NO: 60804 - DNA, 474 bp, Zea mays
tcaagtcattaacacgttttggagctatatccttatctgttttctcaaatgaaaagaagaaacttcattcagcaaataagaacgacaggcatgggttgcagaacaaagatattgtacaggaaaagttctaacgcgtaggacaatatatgacaacacattaagtttcaagtataatcaactaagggtctcaggaacagaaaatacaatgtgctcttgcacaattcccagtttgatttgaaatgcagaattgagaaactgacaaagctagcagattagatgcaggcacccttcaaataaatgacaaaaaaggaataaatcatgttcttgatgtgtttgaacacacccaggcatgtgcaagtacacactgcttatgttgtgaatgcaggcaaaagcgtcaatatagtttccactctgcagatgttgattcagctagaaaggctcgaatttttacttgatctagttcagttctcatgt

SEQ ID NO: 60805 - DNA, 486 bp, Zea mays
  unsure (1)..(486): unsure at all n locations
tctttcttcctcctcatcctcattgatgctntccctatcattttcactagccacacaacatatgtgggaatcgaaatgggaaggcacaacctttggagaggtggattcatcgtttggtctccatcgttcattctcttccttttccttgcaagggttagtatcacaaataccaaaggaagtagaagcataaaatgaactatcatgtttggacccatcaaatntgcttttaattctagtccaaatatcatgcgcatcatgaataggttcatcatattttgatatgaaggcacaataatcttcattgctaagagaattagttaagatgtcaaaagctagatagtttaagcgataacatctttgatcctcctcggaattaattnttccattgaaattagagggaaaaatactcttgtctataattngttctaatcgtggatctatggttctaaaagcatttatcacactagtagaccatgagtcataatt

SEQ ID NO: 60806 - DNA, 459 bp, Zea mays
  unsure (1)..(459): unsure at all n locations
cttgagcggtggacaaaagccgaaggttacccaaagccgaagggtggtcttaagttgaacttgtgcaaagccgaagcttgcatggagctaaaggcaagggaaagtgaggcttcgacgtcttcaaaagaggcttcaaagaaagaagacagagaagttcactaaggagaagaanaggtgtgaacgacacataagaactttaaaatgagttaaatgacgtaattgtactcccttgacaacataggactatggtgtaataacaaaggcaaaattataatttcgaacgaagaagtatacttgcttatccctataaataaatgaacaatgtcataatcatatttttcanatatgcttaccttaggtaggtcgcatgttttcagttntcacgttatactactatttttggtgtacccttttcaccgttatttctgtgaacaggcccggccccgagtccttgcaaca

SEQ ID NO: 60807 - DNA, 480 bp, Zea mays
  unsure (1)..(480): unsure at all n locations
gggcgactgtcagttcgacctctggaagcagtcctacgtggcctatgcattcctgtgtacggcaagcttcagcgcagccgccgcttggacgcggtccagagcggctgcatcgcgctgtccatcgtcaaacaggggacctcatggtcgtcaccaataccaacgactctcgggttgttctgggcaccgcaaccgacgacgacgccatcacgccgtccagctcatcatccacctgaagcccaacctgccacgtaagtcgctactgaccggccaagaattcttgtgcgctgagatgacgaccattgttgttgttgtgtgagtgtcctcaaacaagatgtatgtaaaggagtagcacatccggtggtgcaacgactaggtgtactacctcgctgatgagcctgnggtgcactntatttggcagcccagccaagagtcatcggtactcaccatgtcgcgcacgttcgacgactactatatcaagga

SEQ ID NO: 60808 - DNA, 481 bp, Zea mays
  unsure (1)..(481): unsure at all n locations
agctctggctgtcttatgcggntagcacatataaatataattcctaaatttttttggtcaaaaagnctaagggtcatgtgtgtgttgaatcaaaacaaccccgcaagccacacaaggctactgaggcgaggagtttggcacctctagaacttgttcattctgatctgtgcgagatgaatggaattttgaccaaaggtggtaaaagatactttctcacttttatagatgactccactagattccgttatgtgtatctcttanaaacaaagatgaagcgttcaattattttaacgcctataaagctgaagttgagaaccaacttgagaggaaaataaaacgtttaacgtccgaccgaggtggagaatatatctctaatggtgtggataatttctgcgtggaacatggtattattcatgagaggacaccaccattctcaccacaatccaatgggattgctgaaaggaaaaaccgcactctaaca

SEQ ID NO: 60809 - DNA, 482 bp, Zea mays
  unsure (1)..(482): unsure at all n locations
ctgcaatgaacaaggagaagtctatgagaacgctcggaacatctatcatctatgtcgctnttacctttagatttccacgttgttgtgtattccatatcattatgaataaaaggtctaacatttaagtgaggctcgtccctgttttcaccaaatcgaccctccctcaagggctagaagggggaaaccccctatgtgccactttttctcgganaagatatttcctaanaaacgagcttcgcactttcggcctagtcgaanaacagaatcctaaaggaacaagggacatcctgataggagagggtggccgagccacggaactcctacgcctctgggatacggtttcctcactcaccatccttcgcctaagaaggtaagtcacgtttcgataggaacttcgtanaaagacaagccaacaaaagcgaaacacgagaaaaagtgcacgccaaagcgtaaagaataaacaaaagtcttggagcttccat

SEQ ID NO: 60810 - DNA, 348 bp, Zea mays
  unsure (1)..(348): unsure at all n locations
aattttgatcttggggtcctctgataatatggccatgtgctcgtgaatttcttgcaatagttcaactgcttcacaattcattagcattctagaanttggagggatatctacaagcaaatacatttgtgttcgcatgagaagctagcaggattattttgtatggttcatttagtgataataatggctcatggaaatcagattattgcggaattcagattggcttatataccacttagaacatcaaactccttttataatttacacaacatttcacttaataatcataatattaccatataccacttacaaactcagaatacgtggtgagagtgggacgcacanatatat

SEQ ID NO: 60811 - DNA, 363 bp, Zea mays
  unsure (1)..(363): unsure at all n locations
aaacaggaaagcaggtgggaactgctcaaccaggcaaaaatgtgatgacaatgtcaagaccactggaactcctccacatggatctcttcgagcccgctgcttatcttagcatcagaggaagtaagtatggtcttggcattggtgagtatttttcccgcttcacttgggtattctttttgcaagataaaacagaaacccaaggtactctgaagcacttcctaaggagagctcaaaatgagtttaagctcaaggggatgaagatcaggagcgacaatggatctgaatntaagaatcttcaagtagaagagtttcttgaggaagaaggcatcaagcacgaagtcttcgctccctacacaccacaac

SEQ ID NO: 60812 - DNA, 402 bp, Zea mays
atgacaagagagcgtgcttaatgagattgcggtatgaccgtatttatactcccagagcgctgaatattgaaagaccccgcttgtcagtgaatgttgctattctagcagagggaaggtgtttattcagaccttccaccgaaagacttgatccatatcgcgatctagatatattgatataaacaaattaatattgcgaggggctactggtgggggcctacggcttacgaaggtcctcaaaaacaggatttaacagtatttctggagtttaatgtgtgaacaggtatcttcggactcaagtcggtatcacagcagaccagaataatacgaaggttgatacagcgccgaatgtgtgagcatgaaagcttccgcatgatatcaacaaaatgaaaccgactgaaagat

SEQ ID NO: 60813 - DNA, 477 bp, Zea mays
  unsure (1)..(477): unsure at all n locations
tctaaagggagagcacattntaggattaacaaatgttcatttttagaaagacaggatttgtagcgcatgccaagcaggaaagcaagtcggtgctcatcatccacataagaacatcatgactactgacaggccactggaactcctacacatggacctattcggcccgatagcttacataagcatcggcgggagtaagtactgtctagttattgtggatgattattctcgcttcacttgggtattctttttgcaggaaaagtctcatacccaagagaccttatagggattcttgagacaggctcaaaatgagttcggcttgaggatcataaagattagaagcgacaacgggacggagttcaagaactcacaaatcgaaggcttccttgaggaggagggcatcaagcatgagttctcttctccctacactccacaacanaatggtgtagtggagaggaagaatagaactctattggacat

SEQ ID NO: 60814 - DNA, 402 bp, Zea mays
  unsure (1)..(402): unsure at all n locations
gacactatcttcttcggcacgccatgaaggcagactatccgcgacatgtataactcaactaacgttgctccggtgtatgtcgtcttcacaggtatgaaatgggccacctttgttaagcggtccacgaccacccagatggaatcataaccggcccgggtacgaggtaggccaactataaaatccatcccaatctcatcccacttccactgaggaatccgcagaggctgcaacaatccggcgggcctctgatgctctgctttggttctctgacagctatcacagagggcgacatattctgcgatctcccttttcataccataccaccaaaacctcctttgtaaatcctggtacattttctcactccctgngtgtatcgagtaagctgtctcatgagcttccttg

SEQ ID NO: 60815 - DNA, 485 bp, Zea mays
  unsure (1)..(485): unsure at all n locations
tctaaagggagagcacattntaggattaacaaatgttcattntgagaatgacaggtattgtagcgcatgccaagcagggaagcaagttggtgctcatcatccacataagaacatcatgacgactgataggccactggaactcctacacatggatctattcggcccgatagcttacattagcatcggcgggagtaagtactgtctagttattgtggatgactattctcgcttcacttgggtattctttttgcagganaaatctcatacccaagaaaccttgaagggattcttgagacgggctcaaaatgagttcggcttaaggatcaaaaagattagaagcgacaacgggacggagttcaagaactcacaaattgaaggcttccttgaggaggagggcatcaagcatgagttctcttctccatacatccacaacaaaatggtgtagtggagaggaagaatagaactctattggacatggcaagaac

SEQ ID NO: 60816 - DNA, 291 bp, Zea mays
tagtgcgagactgtgcatacgaaacggaaaacaatgtatcgcccgaacaatctatgggcagccttcgatgttatcgttgaaacatacacacacctctggccatatagagaaggactctactgataggaatgcgaacataatgatacccttagcggtgggcaagggaccgactatgtgcatacctcttggctggacatgccttgtatgggcgatcagatctgaatactgagaggcgctggctgaaccatgacaaaacatatggctagctcactatgaccttgcgagctgttt

SEQ ID NO: 60817 - DNA, 468 bp, Zea mays
actaagcttgccctcagttcgatcatattgtgatggagcagagattttctttttgtgtactctacctaagattcccttatctttcttattgaaagactgtctcaacatggattgaagtttatttaaaaaatcacaagcttgcagtttccataatttttatgtatactgtaatctatccttcataggacttgtggtaggcaaagaaaacaaaggtaactgtatagaacgaaagttgtgaattgtctttaaatctgagtgatgttgacctttgtgagtcttatatgtgcctggaagataaatagacattgttgccatgcgaattagattcatttttgcagctgacctagatcttgatgctgaacttttcttctcttggcatggttccatggtggtactggtagccaaaggagtaaagagattcaagggagatcgattccatttatttcttgtggcctgtggatacaagac

SEQ ID NO: 60818 - DNA, 332 bp, Zea mays
taaccatttatctattttgttgtttgcgacgatgaacatgattctactatcattgactacaaaattcatgttgagacatgtagacatgtatttttgtcatgttgagaatgttgcttattgaaggacatgtatatttgcttaaatttttattaaattttaagttgtgtatgatgttgaattgagaagaaatttgattaattattgtcggggaccataattaggggtaccctcaaggctcctaattctcagctggtaacccccattagcataaagctgcgaaggcctgatgggtgcgattaagtcagggatcagtccattctagggactcgatc

SEQ ID NO: 60819 - DNA, 359 bp, Zea mays
  unsure (1)..(359): unsure at all n locations
tcatgacgactgacaggccactggagctcctacacatggatctattcggcccgattgcttacataagcatcagcgggagtaagtactgtctagttattgtggatgattattctcgcttcacttgggtgttctttttgcaggaaaaatcacaaacccaagagactttaaagggattcttgagacgagctcanaatgagttcggcttaaggatcaagaaaataagaagcgacaacgggacggagttcaagaactcacaaatcgaaggcttccttgaggaggagggcatcaagcatgagttctcttctccctacacgccacaacataatggtgtagtggagaggaagaatagaactctactg

SEQ ID NO: 60820 - DNA, 470 bp, Zea mays
aactcagcgtggaggagtctgagctcgctcgctctgtctagcgtgggcagatgtatatgtaccagcgagtaggcacttcttgtaaatgaaatgaggcgtatggagtgagatgagacaaagcgtcgagtgtgtcgaactcttaatcaatctttatgaaacattctgtgcgcatcatgttaccgggcattctgtgcgatcgagccgagttcgcaactgaaggtgctcatgaaccatggactatgcagagtttgctattcagatggcccattgctagtccaacctctatcggtgaacttggacgagctcctactaacaagtgttccaacatcccccacaatgcttgattactggaccagcagcactggaggtggcggtacatgagctctctccgagccgacagcaatccgtcactgattcgcagcgcatgcgctcgccagctctctagtacgtactcacgaccagcatatatc

SEQ ID NO: 60821 - DNA, 464 bp, Zea mays
  unsure (1)..(464): unsure at all n locations
tttaaactcagcttccagattgttaagaatgcattcatatgaattatgaaacactattttgtttgtttactctcggtgttcctgtttgcctgacaaaaatgagtgggtctgttcactagtaggtttcatcaggtaaatggccgaattggctcttccaactatggagacttctgtagagggatataagttcttactgctagtagaatttcatgattactggttgagtggtttgtgagatatcaaattttgaagttaactacgctgctgtctgaaacagattcagtaagttatcttgtcagatgttntagaacttatagatagaagaatttaattatccattgaataccgaagttgtagggtattttatttagatacttctagattatttgttcgatatcaccgctgttataattttaaagatacaaaattaacaaacaacactgctgttgtatggcatgtggttc

SEQ ID NO: 60822 - DNA, 407 bp, Zea mays
  unsure (1)..(407): unsure at all n locations
tttgaccgagatattgaatgcatctaccagttctttaacaaaaggttataagatatgcaagaaagcttcaaatgagcctaatttggtaggcttgttttcttattgtgatttcttttctttctgttagattcaatctgaggtcagtgaaaaatgaagaacaagctggatctgaaaatgatgatgaaggaaacagcagaccttcctttttgttcgtggaaaagggtgctggttccttggacaaggaactagctgccagtggatttaccaggaaagagcaagtggatatggagaaggtaggtcagatgttcctgcaaatttgttactcatgtatacatttatnagatggtttccggcttagttctcaggtaccctttnttggcnactctcttacagtacaccgaggaagt

SEQ ID NO: 60823 - DNA, 478 bp, Zea mays
tgttagggagagcacattttgggactaaccaatgttcatttttataaagatagggcttgtagcacatgtcaagcacggaagcaagttggtgttcatcatccacacaataacatcatgacgaccgacatgccgcttgagttactccacatggacctattcggcccgatagcttacataagcatcggcgggagtaagtattgtcttgtaattggggatgattattctcacttcacttgggtgttctttctgcaggaaaaatcacatacccaagagactttgaaaggattcttgagacgggctcaaaatgagttcagcttgaggatcaagagaataagaagcgacaacgggacggagttcaagaactctcaaatagaaggctttcttgaggaggagggcatcaagcatgagttctcttctccctacacaccataacaaaatggtgtagtggagaggaagaatagaactctattggacatgg

SEQ ID NO: 60824 - DNA, 385 bp, Zea mays
cttttcgatcaattggttggagccaaagtgttttccaagataaaccttcgctccggctatcattagatcaagatacgagcaagtgatattttgaagactgccttcacaaccagatatgggttgtatgaatatttggtgatgtcctttgggctgactaatgcaccagcatatttcatgtatttgatgaactatgtcttcatgcctaaattagacaagttcgtggtggttttcattgatgatatcttggtatactcaaagagcaaagaagaacatgtcggtcatttgcatgtagtgcttcaacgtctgcgagagcaccgtctttatgccaaattgtcaaaatgtgaattttggctaaaggaaatcaaattcttgggtcacactatct

SEQ ID NO: 60825 - DNA, 482 bp, Zea mays
  unsure (1)..(482): unsure at all n locations
gatccttgagtcacctgcngcatgcaagcttgagacagacattagccgctaccgacgacagtatatcatcggtagtttattctattctaatttcaaggtaaaaaacttttcttcaactttttattgtctttaacaacgaaggtgttttctaacgaaggttgttcctgcatagagtatgctattgagtaaagctttgaggatgcagcaagatcttgaagataaaaagcatgaagttataattgagggtttagaaagcaaaatgaaagatcaagcagctgctcttgaaaagaaggatttcgaacttcaaacaacagacggtttactggcagaggctgaagctaaaattgcaaagttaaatatggagcttctctcaaagtcagaaagcttcgaacaagaaaagtagaagtttgatgcaaaatttgaggctgaggccgaanaaagttcaaatttgcaaaaatcattgacagagcttcacaacaaat

SEQ ID NO: 60826 - DNA, 421 bp, Zea mays
  unsure (1)..(421): unsure at all n locations
agaacacgtgatacgtttgactatctttcttttctaaaaggatagaccttgtgcagcttgtcaagcaggtaaacaagtgggaggagcgcatcacagcaagaacgtgatgaccacttcaagacccctggagctgctacatatggacctcttcggacctgtcgcctatctgagcatatgagggagtaagtatggtctagttattgttgatgatttttcccgcttcacttgggtgttctttttgcacgataagtctgaaacccaagggaccctcaagcgcttcctcaagagagctcaaaatgagttngagctcaacgtgaagaagataaggagcgacaacgggtccgaattcaagaaccttcaagnggaggaattccttgaggagtaagggatcaagcacgagttctccgctctctaacaccac

SEQ ID NO: 60827 - DNA, 433 bp, Zea mays
agcttagaacttcgaagacaaaatatactggtgcttgttttttgacctggccatcttgcttctcctgtaccattgccgcactaattgcaaagtgagaagctgccacatacaggagtaacggagcccttggtgaaggtggagttagagttgtcaagtcgatcaagtattgctttaactcttcgaaagcccattgctgagtcggaccccactggaaaacttcggctgacttcaatatttcaaagaatggtagattcctttctgctaatctggaaataaatctatttaacaatgccagccttcctactaaccgttgggcccctttcttcgtatttggcggctccatccaaaaggatagcttcgatcttatttggattagcttatattccctttggtgatactagacaaccaaggaacttgccctttttactccaaa

SEQ ID NO: 60828 - DNA, 304 bp, Zea mays
  unsure (1)..(304): unsure at all n locations
gcttagaaaagagagaaaggggtagattatttttaaatgattcaaagcatggtgattgtttccacttatagtgtgacaaattaggtagcgaaccaaacatgcctttaactggataaccatagtcgtgtaggcattctgtcacccaacacttcaaaagcttagaaaaagagagaaaagaggttagatgaaattaaaatgattcaaagcatggtgattgtttccacttatgctccttagagttaccaccgcgcgcacgtcattntattaagaaaaagaatgtacatagagtggtaagacacatggt

SEQ ID NO: 60829 - DNA, 407 bp, Zea mays
  unsure (1)..(407): unsure at all n locations
ccgtacactaccctaaagatagaccttgggcagatagtcttgcatcgaaacatgtgtgaggagcgcatcacagccagaatgtgatgaccacatnaacacccctcgagctgctacatatggacctcttcggagcccgcgcctatcttagcatatgacgaacgaagtatggtttagatattgttgatgacttttcccgcttcacttgggcgttctttttgcacgataagtctgaaacccaagggaccctcaagcgcttcctcatgagagcttcaaatgagtttgagctcaaggtgaagaatataaggagcgacaacgggtccgagttaagaaccttcagtggatgagtcctttagttggatggatcaagaccaattctccctccctaccaccacagnaaatggtgtgga

SEQ ID NO: 60830 - DNA, 408 bp, Zea mays
  unsure (1)..(408): unsure at all n locations
agcttatgtggatgacgtggtgatcaagacataaaactcataanatttcattgaagatttacagctggtcttcaacagtctgcggagatatcgatggaagcttaatcctgaaaagtgtgtcttcggagtaccaccaaaaaaattgctcggggttattgtcagccactgcggaattgaggctaatccagaaaatatcgaggctatcatgagaatggaggtgccacgatcacagaagaaagtacaaagacttactagatgcatggcagctctaagcaggttcatatcaaggatgggagaaaaaggcctaccgttctacaagttgctcaagaaggtagacaagttctagtggacttcacaggctcaggaaactctagatgccctgaagaaattcctgacaacaccaccagt

SEQ ID NO: 60831 - DNA, 453 bp, Zea mays
agcttcgcacctctgaactaactcggctgtgtcatctttcactggtggccaataaaatcctgacctgaagaccttcccgactagcgtcttggatgctgcgtgtattccacattgcccggcgtggacctcatctagaagttgcttcccagtagatgagagaatgcacttcatgaggacgcctgatgcaccccttctgtataatgtctccccaatgagtgtgtagtgagctgactgtctagcgatgcgctcggctgcatttttgtcatctggttcctcttcattctttatatatctgatgatcggccttctctagtcatccgagtctgattctggttgattcacgatattacactcttctgcatgatccattgagatgcttggttgtggtatttcttgtacaaaggctccaggtgggacctgagttcgactggaccctagcttggacagtacatc

SEQ ID NO: 60832 - DNA, 433 bp, Zea mays
atgtgctaagccgcgatgccacagccagctgatgctagtcttaactattaagcatgcatctagaccggcctctccttttgcaaaatcaactaaataaaggttggcgtctaatacacccttaacagctaacgaaccatcgcttcttctaaagacagacacatctatatttgtaaatagacaattatatcccatatgacataattgactcacagatagcagattgtatcccagactctctactaaaaatacattagagatagaatgctcattacaaattgcaatgctacctaacccttttaccttgccttgattcccatcaccgaatataattgaatcttgcgaatccttattttttacggaggaggtgaacatcttcttctccccggccatatggtttgtgcatccgcctgtcataatacaccttgaacccccg

SEQ ID NO: 60833 - DNA, 356 bp, Zea mays
  unsure (1)..(356): unsure at all n locations
agctgactcaggtatccacactttattccttaattcctttntcccgtctcatggacaaggcatcctccctggatccaagtccatagactaacatatatcccattatcaagatgaatacaatcaattcctgacctcgcgcgagtgctagaaaaatcactcgacttctaccgagatcctgattagcaagcagctactcgacctagcatactagtattcatctcaaaaaggaatcctaagttcatgcaactagaggtttcaagcaactcctacacttaagggcacattacaatcctacaagcattaagtggtagaaagtagcatataataataccggtatgcataaaaccgaggcttgc

SEQ ID NO: 60834 - DNA, 395 bp, Zea mays
agctgcttgtgttagtgaaacgtgtgttgtttacgttacacgcaaaattccacaggtagagtcatgcgtatgtggtacaacatggtcgtaagagccgaatgggattcagcactttctgttgtaactgaaaaatgaaccgtactttttatcgttaatcctcggattccacaaatcacgatcgaatctaggctaaggaagatcctggctgcaaacggagggaagacacacgggacgggagctactccaggcagtcacggcaggcaacgctcgctttgtcttgaaccgaagacaccgcaccatagaggcgctaggtacggagcacggtctacgcataacaagagcagagcagcagcgaacaatgagcaaggcgggtgcacggatcacctacgtggagt

SEQ ID NO: 60835 - DNA, 389 bp, Zea mays
agcttctatctggtcttctttgagggcggatgtaccacaagagcagctcgacgggcctttatctccgttgtttcttttttttccttgtaatccgtgtccatctttccgtgtatgaggtggacaacggggttcttcggataaacaaattctctgctcctggcttgcagggggtagtcttcccctggagcgctggaggttgcgctatttcctgcttcattcttgctttcccggagattttcgaggaaggcttcttctccggtggatccactacgcgatgcagaattccttcttcgtctgccacgtatgagatagttccaaagcagaacacggatccacggcggagagtgatcttgtgctggaaagtgatggccattgagctagcttggatc

SEQ ID NO: 60836 - DNA, 464 bp, Zea mays
  unsure (1)..(464): unsure at all n locations
agctntccaaccaaatttggagcaccctttttggtggtctagagaccaagttacagctgcttgaactatagagtttgaatctgtcaaaatctggacagcaatgtttgtttgtattaactgacttcgatacacattgaatcaccctgagatgtttataaataaattgtagacaattctactagctttctaaaaagtctagaatcacctgattcggatgactgaaactccagttatggatttttaaagtgagtagtcaaattctgtccaaatctggatagaatttatgtttagttctgtttgacctttctacaggtcgaatcatgttgtgatgataatacgaaagttatagaggactttataagctttctagaaagtcttaggtcaatatttttggattaagatcttttgagttatgagcaaaacaattgactgctgagtgctgtccaaaaaaaaatctgtaatta

SEQ ID NO: 60837 - DNA, 463 bp, Zea mays
agctcgttcaaaggtttagatagaactaatgtatactaaatcaatgaatcgattgatgctttaaatgaaaagaatagacttttagaaaagcaagaggatcttttatatgaagagcatgataaatttttaagtgtgcaaaagtctcttgctttacaggttaaaaggaatgaaatgctttcgtctgaattatctacttgtcatgaaactgtgtctagcttaaagagtattaatgatgatttaaatgctaagctagaagtagttaataaatctaattcttatgtagagtatgttgtcatttgtaataggtgtaaggattttaatgttgatgcatgtgttgagcaccttacttctattacaaaattaaatagtgaagtggcaagtcttaatgcccaacttaagacttgcaaaaatgaatttgataagctaaaatttgctagggatgcctacaccgctggtagacatc

SEQ ID NO: 60838 - DNA, 454 bp, Zea mays
  unsure (1)..(454): unsure at all n locations
agcttctaaagggagagcacattttaggattatcaaatgttcattttgagaaagacaggatttgtagcgcatgccaggcaaggaagcaagttggagtccatcatccacacaagaacatcatgacgaccgacaggccgcttgagctgctccacatggatctattcggcccgattgcttacataagcatcggcgggagtaagtattgtcttgtaatagtggatgattattctcgcttcacttgggtattctttttacaggaaaaatctcaaacccaagagactttaaagggattcttgagacgggctcaaaatgagttcggcttgaggatcaagaaaataagaagcgacaacgggacggagttcaagaactctcaaattgaaggcttccttgaggagganggcatcaagcatgagttctcttcntcctacacacctcaacaaaatggtgtagtgga

SEQ ID NO: 60839 - DNA, 442 bp, Zea mays
  unsure (1)..(442): unsure at all n locations
agctcttctgcacatagcttcgtgatcaccttatccttcgtcatgatcgccttccgccccgcccaagcttcgtcttgacaagacacttgtatacccgcaacctgattccgaagataccagttcacatatttcacttggaaaacattgtcaaatcatgtttttcaggaccttctaaagccgaatgcccccaacatcaaccgtcccttcgattccccgttcgcggccagggctcactgccttggcatacaatgctccactgaccccggctgccgccatgcagtgaccgcacttatacccaccatagctagcatgggagactcagtctcangacgagtgagggacanagtccgcgctcggcttcactcangtactaggtttaccggttaccatatttcccgacatgtgcttagtacgttctaacgcttgactcaggtatccacac

SEQ ID NO: 60840 - DNA, 457 bp, Zea mays
  unsure (1)..(457): unsure at all n locations
agctttaagctctntgacaataatattacttcatccagttttaacaaagatgcataaatgcaggaatgaaatatttgagaggataaactacgtatgaagcagggaaaaatgcatggacatgctttctcttccttttatacaagatatgtaaggaaagtatagaaaaggaagattttaggtacaagtttgaatgaaaggaagtagttttacccttttgtaccttcaaatagagatgctctcttcattgtactttgtccttagtcttagttgcttaagacctatactcaagacaatatatggaaatatttgcacaagagagagttctacaactagtgatccttttccaagttaatgttagattaaattaaatggatcacgaattgtataaaggcaacatgaattcttctttcaacttagtgcatatcaagagaatatgatngattntatatgaggcact

SEQ ID NO: 60841 - DNA, 457 bp, Zea mays
  unsure (1)..(457): unsure at all n locations
agcttctaaagggagaacatattttaggattaacaaatgttcattttgagaaagacaggatttgtagcgcatgccaagcagggaagcaagttggctctcatcatccgcataagaacataatgacgaccgacaggctactagagctcctgcacatggatctattcggcccgatcgcttacataagcatcggcgggagtaagtactgtcttgttattgtggatgattattctcgcttcacttgggtattctttctacaggaaaaatctcaaacccaagagaccttaaagggattcttaagacgggctcaaaatgagttcggcttaaggatcaagaaaataagaagcgacaacgggacggagttcaagaactctcaaatcgaaggctttcttgaggaggagggcatcaagcatgagttctcttctccctacacgccacaacanaatggtgtagtggagag

SEQ ID NO: 60842 - DNA, 456 bp, Zea mays
  unsure (1)..(456): unsure at all n locations
agctttcttggcacttctcatcccacttgtattctcttcctttntccaaaatcgatgtcataggcttagcaattttagagaacccttcaataaatctccgataatatcctgcgagtcccaagaaactccgaatctcggtaactgtggtgggcactatccactccattatctccttcactttagcaggatccactgatattccaccattagaaatgatatgaccaagatatggcaccttgccaatccaaaacttgcatttgctatacttggcatagagttgattatctcatagcttctgtagcaccaatctcagatgttcctcatgatcactatcactcttggaataattaaaaatatcgtcgatgaaaaccacgacgaatttgtccaaatcatgaacaccttattcttcagatccataaaataggctggtgcattagttagtccaaatgacataac

SEQ ID NO: 60843 - DNA, 429 bp, Zea mays
  unsure (1)..(429): unsure at all n locations
agcttgctaaacatcttgatccttctcattatgcataagccaacagaacagccaaggcaacccacaatatcaagagtgggagtgtcaatgcttgttttgttagagggcttgcattccgcagccatggataattttcacgagatggcatgacacaattatcaccattgaagtacactcggcgtgggaaggcccatcccttttcgaatgtgaaagtccgtgagtccttgcggagaagcagttctgattgcacattcccaagtttgcccgcttgcatcagcaaatcattgtagaactttacaccccacaacattgccgtatcatctgaaacgggacagacaaactacatcaggagaggctgggaggtacgttgcgttatttctattcttctctataagacaagtntacttacttatngccaccccatatgga

SEQ ID NO: 60844 - DNA, 353 bp, Zea mays
atgttaattttaacaattaagcaagtgtcgagttcaactctatcaaaatctactatgtgtagctgaccttctaacactcccttaaaggctactgaatcgtcacttcttataaatacagtaacacatgtatctagtaaaagacagttggaacccatgttacataatcgtgaaactgatagcgagttgttatctaaagaatctactagaaaaacattggacatggaatggtcatgtgatatagctattttacccaatgctttgaccaaaccttgattaccatcctcgaatgtgatagatcgatgaggatcttggttttactcgtacgaggagaacatgttcttctccctgtcata

SEQ ID NO: 60845 - DNA, 469 bp, Zea mays
ggatacttaaggcacctgcagcatgcaagcttaatgccggaattttcatttttttttctccctcactcttctcatccccccattgcctaatggccaagggagatgctcaggtaaaaatcatcaccgatttaaatgatataaatgatgatgacgatatcgatgatgttgatgatgatggctattcatatgatgatcttgttacaatgctaagtgaggccgatgactacatgcacaaagaaaaagacaaatttaaggccttgaacgaattgtataaaaacctccaagtgtcttttgaggagctcaagacctcttacaatgacctccaagaaaattgtgagaagcttgcggatgctcaaaaatcatctattgtgcatgaagtcgaggcggtcactaaggatgttggagtcacttgtgacttacttgatagtcttacaagtgaaccactacctactaactctatttgtgataa

SEQ ID NO: 60846 - DNA, 422 bp, Zea mays
agctctcatagaggcatgtaccaaccctccggtgtaccatatgcggtcgccctgggacagactgacggccatctcgacctacggaccctcgggttccgaggaagatgacgagcccgacttttgttgggatttctccaagctcggtaaccccagtgccatgcgggacttcatgactgcatgcaactactgcctctccgattgttccgatggtagccgcagctttggcgacgaggactgcggcccaagtcgtgaatgtttccacgtcgatctagggggttccggcgaaggcaaccatcttggtatgtcagaaaacggcgatccccctaggcctacgcctcgcgttgacatccttcgggagctagctgtggtctcagtccctgccgggggtcaggacgcacagctcgagcaaatccgtgagatgc

SEQ ID NO: 60847 - DNA, 454 bp, Zea mays
agcttctaattaaatcatgactgcgcctatttttctgttttataagagtgaagggggatgtgctgctacttcccacttcccttgatgagcaacaagcacctgcattgagtaatgcaagagtgagatgaaacatctcagcaagcgaataattttgacgagatatttaaaccacaaattgaattcatcaacattttaaaagagtcacaattaaaataaaaaatacttgtagatatggaactcagtagtcccactataaccaataccatctcatttcctcgaacaaccacaataggttctataacacttccctgcgtcaacaatacctgcaaatatcacttcaatgtatgcataggaatgcaatgtgtaggtactctatcttcatacctctgagagtataaaaccacatcatctgcaaatatcacttcaatgaatgcatatgaatgcaatgcatatg

SEQ ID NO: 60848 - DNA, 432 bp, Zea mays
  unsure (1)..(432): unsure at all n locations
agctngggcctgtgcgtaggctagccaggttgtacctcttccactatcgggaagcggcaagccaagaaatatcacacggaccaccatattcccgtacatagtttttcttcttcttcttcaggggagggactcggcaccaaatccaatccacaacgacatgcacgcctaaaagtctaagacacttcatctcggctatcttgtttgaagtcgggattatggctattggcatgtatgaacttgggagcatggtcgctcatctatatattctgatataaaaccatttctcatgccatactttcaaggaagttttaaagggacaaccgacgtattgataggcaaatattgtggtatgaaggagggagttgggattctgtaacaccacacaaccatcaacaaaaaaaataatgcatttagattattagtggtaattat

SEQ ID NO: 60849 - DNA, 403 bp, Zea mays
tgatggtggagtaactttgttacaatcccattatgcggaaaaggtactgagtcgctttggttttagtgactgtgatcctgctccaacaccttatgaccccagtgtgctattaagaaagaatcatagaatagcaagggatcaattgacatactcccaaatcattggctcgctcatgtaccttgcagtgcaacaaggccagacatctcttatgctgtgagtaagctaagtcggtctgtgtcgaaaccagtagatgatcactggcgtgcccttgagagagtgttgccgtatttgacaggtactatcacatactgtattctttataccggaaacacaaaagtgctggaaggctttgtgatgcccactggattattgatgctgatgagctttatgccacacgcggata

SEQ ID NO: 60850 - DNA, 454 bp, Zea mays
agcttaatcccgaaaaatgtgtcttctgtgtactagcaggaaagttactcgggtttattgtcagccaccggggaattgaagctaatccacaaaagatcgaagctatcatgaagatagaggcaccgcgatcacaaaagacagttcaaagacttaccggatgtatggcagccctgagcagattcatatgcaggctgggagaaaaaggcctaccattttataagttactcaagaaggtggacaagtttcagtagacttcataagcacaggaagccctagacgcattgaaaaagttcttgacaacaccaccagtgctgataccgccacgacgggccacgtcgactcaaccagctgaagaattgttgctatatatctcttgcacgactcacgtggtgagcacccgcgttggtagtcgagcgagcagaggaaggacatgtctactcagtgcaacatccta

SEQ ID NO: 60851 - DNA, 460 bp, Zea mays
  unsure (1)..(460): unsure at all n locations
agcttgtgattcatccaatttaaaacaagctccatctcttaacatagattntctatggataaactcaacacaagagatggcatcagtagcacaagcactagtttcttatttagcaatcctttatatgnggaaggcaagcgagttgctaaaatagagaaacctcataatatggactaaatttcccttgagcccttatgcacaatatattttgaatgacatggataatatgcatggttgttcaatgaagtctaaagggctgacttaatccatannanggccagtgtgtaataaagaagaatcaaatccaaattaactagatagagaatatgtcacataattttggattgttgaccatatgataatattcattcatcttccaattggacctctatttcataatcaacaactgatgtatatccttaagtggcttcttttccttagtggctacacaagtcacaaa

SEQ ID NO: 60852 - DNA, 372 bp, Zea mays
  unsure (1)..(372): unsure at all n locations
agcttagtcggcggaaagaacttactgactantttaaacaggcggccgcagggtggctcacgagataattaagaagagcgaacaatatactcacgatgctaaagaagcgaccaaagcggctgaaaaagctgcataactcgaaagacggattggcattgctcaatagctcttaaccttcttttttgtgacttccaacttatctatgtttcctaccacaaccgaactatctcctccccccgagcccttcgagtcattggacaacccacaagccaagaatgaagatgaaattactagtatggccgaagctattatggacgaagctgctactccactgctaaacgaagctgctgaatcatttttaaaaagaagaat

SEQ ID NO: 60853 - DNA, 469 bp, Zea mays
  unsure (1)..(469): unsure at all n locations
agcttctaaccaatccattcccaaaatggcatcatagcatggaagaggaataagcttgaatgtagacttgaaggagagcccttgaacttcccagtcggtatctggcagttcactggagcattgtaacttgttgccattagctactgtgatggacagtggctgcgccagagactaaaccccaggaatagcatcaacgacattagcattcaagaaaaaatgcgaacttccagaatccagtagcatcaatagtttccgaccatggatagtacccaaaaacctgaaggtggactgagctgacttatgagacaccgcttcagtggataagaggatcataaagttctctgttgagtcctcaaattccgtttcagactcctaagaatctggtggtagtaaataccaaagttccagcatgacgtggagttgaacagttggggagcacttgtggccttttacccatntgtcagcataa

SEQ ID NO: 60854 - DNA, 452 bp, Zea mays
  unsure (1)..(452): unsure at all n locations
agctntatgggctcatacgatatctaaacatatggctactaaagtatctccttttgagcttgtctatgggcaggaagcagtgttgcctgtggaaataagtttgaatgctgtcaggttcgccagacaaaatgatctaactgctactgattattatgattcaatgattgataatattgatgaggtgaccgacaagaggatgatagctttgggagcaatagcaaaggacaagatcatggtagccagggcctacaacaagaaggtcaaagcaaaatcatttcaagtaggggacctggtgtggaagaccattctgcctctaaagaataaagaccggaagttcggaaaatggtcaccaagctgggaaggtccttataaagtaaaacaggtgatgtctggtaacgcctatttgctacaaacattacaaggcaaggacttgcctaaggctttgaatgggc

SEQ ID NO: 60855 - DNA, 465 bp, Zea mays
  unsure (1)..(465): unsure at all n locations
cctgaggcatgcaagcttatctaanaagtttgatgaattttggaattattaattactttctaaaattccagaagtatggattttggctattttaaatacctcataattccctatttgaactaaaaatcatgaaactatttttattaaatactatagaaaattagtagcctagcaaaattggtctagtatttttagcatttttctactattttctaggaattctctaactctagtagaaaaggaaaaagattctacagtgttgggatggaaccggcccactctagcccatgcccaggcaaagtcgcgcgcgcctgcgcccacgctgccggtcttgcgaaaaggcccttgacgttttaaataacttgaacagcgtccaacagactattccctgtgtcactaacaccttacaaaaccccccttctagttctgtttcttctctaactcgaccncatgggcacgacgcgc

SEQ ID NO: 60856 - DNA, 448 bp, Zea mays
  unsure (1)..(448): unsure at all n locations
gctggaggcgtcgattggntgtctacttggtgtagactcctccttcttttcttccgtcgccttgaatgcgacgggttgagcttcngatgtagatggatcatcaagctcgttgatcttccttgagccttcgatcatgcactcaaaacttacaaaatgcccgattacttcctcgggggtcattttagtatatctaggattaccacgaattaattgaacttgagtggggttaaggaaaatgagagatcttanaataaccttaaccatttcgtggtcgtcccacttgacgctcccgaggttgcgcacttggttcaccaaagtcttgagccggttgtacatgtgttgtggctctttccctttgcgaagtcggaaccgaccgagctcccnctcgatcngttcccgcttggtgatctttgtgagctcatctccctcgtgcgcggttntgagcaca

SEQ ID NO: 60857 - DNA, 352 bp, Zea mays
  unsure (1)..(352): unsure at all n locations
agcttctaaagggagagcacattntgggactaacaaatgtgcattntgagaaagacaggatttgtagcgcatgccaagcagggaagcaagttggtgctcatcatccacataagaacatcttgacgactgacaggccactcgagctcctccacatggacctattcggcccgatcgcttacataagcatcggcgggagtaagtactgtctagttattgtggatgactattctcgcttcacttgggtattctttttacaggaaaaatctcaaaccccagagaccttatagggattctcgagacgggctcaaaatgagtttggcttgaggatcaagaaaattatacgcgataatgg

SEQ ID NO: 60858 - DNA, 395 bp, Zea mays
ttctagaggggggggtgaatacggcgaaactgaaatttacaaaaataatcacaactacaagccgggttagcgttagaaatataaacgagtccgcaagagagggcgcaaaacaaatcgtaagcaaataagagtgtgacacgcggatttgttttaccgaggttcggttctcgcaaacctactccccgttgaggaggccactaaggccgggtctttttcaaccctttgcctctctcaaacgatcccacggatcgagtgagctttctcttcttctcaatcaaccgggaacaaaacttctccgaagggccaccacacaattggtgcctcttgccttggtacaattgagtgtgatcccagaatacatgagaaagaaaagaatgcgatccaagcgcacgagc

SEQ ID NO: 60859 - DNA, 345 bp, Zea mays
aactatgaaacttcagagctgttcgtcgtactgaggctatttctgttggcactgacataaatgagcgggtctgagcactggtagagattcatcaggtaaatggccgagttggctctccacagctatggagactcctgtttagggatatcagttcttacctacagcagaattgcatgagatgtggttgagtacctcgtgacatacccaatttttaatgttaactatgctgcgtgactaagacagatgtagatacttatctccgccgatgcttcagaacttatagacggcccaatttaagtatccatagaataccgaagggctgagatattgtggcatactcgtaca

SEQ ID NO: 60860 - DNA, 408 bp, Zea mays
gaaactcccctacggctggtatactcgggctatatctgccggcctgacagaaatgagcgggtctgttatctggtttgcttcatcaagtaaatggtccaattggctctcccacctatggagactcttgtagagggatataagtttttaccttcaacagacattcatgactttcgtgtgagcagtttgtgagatatccgatttttaatgataactatgctgctgcctaaaacacactcagacacttatcttgtccgatgctttagaacttatagatggcagaatttaattattcattggatacccaagctgtatacgatattgggtacaacctatagactatctgcctgatatcccactgatatattttaaagatcaacattaacaacagctttgctgctgatgacatgt

SEQ ID NO: 60861 - DNA, 448 bp, Zea mays
agcctgacaacagcagttgagatcttaaatataatctctaagatcaagtctcggcaattgaatgctaaacatgcagaagcgggtgttataaagaggcttagcgaaaatatccgctcatggatcttccgacctcactccttataaaaagatatctcctttcgcaacatgatctctaaggaagggatgacggagatcaccgcgttcggtgcgacagcgttggacagggatattaacgattatacagcactctcattgtcccacaacagaggtacctttttctagaactacgccatagtctagaagagtatcgttcacgtataaacattgtgcgcaacaagcacccgcggcaatgtgattcgcctcagcagtcgacaatgcaacactattttgctcttggatggactgatactagtgaactccaagcaaatgcacccccagaagtactttt

SEQ ID NO: 60862 - DNA, 415 bp, Zea mays
  unsure (1)..(415): unsure at all n locations
agctctaagctctttgacaataaaattactttacccagtattaatcaaagatgtaagaatgaatgtttgagaagttgaactaggtatgaagcagggctaatgcatgaacatgctttctcttccttttatacaagatatgcaaagaaagtatgaaaaggaagatttatgtacatgtaaaactgagaggaagcagttttaccatcttgtaccttcacatagagatgctctcttcattgtgctttgtccttagtcttagttgcttaagacttatactcaagacaatatatggaaatattntgcacaagagagagttctacaactagtgctcccttttaagtcattgctattgtatatcaagtggatcacaaattgcataaatatatcgtgaattctnncgtttaacttagcacatatc

SEQ ID NO: 60863 - DNA, 381 bp, Zea mays
gcttcggctcaatcgtcttatatagaacctacttaaagggaaaaaggctctcccatccttatagattcttccataagcccataataaatgtgaagggcgtggctgtaatttctcatacgatgtgtcctgcgcctataaataaatgaacagtatctctgtactattcacgctgacttgtactcgcttctacgtcacacttgtactttcttgccttctatcaagccgaagggacttttgtaattcactattggtcctgcctttccatgattatataattaagaatgaataatatgatatgattgtttatgttcgttcctataagccatatagttcttctcttatttaacatatactgccatgatgaaggtatgtccttcatga

SEQ ID NO: 60864 - DNA, 405 bp, Zea mays
  unsure (1)..(405): unsure at all n locations
cagcttgatcggtggaccacttgatatggattgagtgcaatccttgaccgaacgaggtcaccacaacatggagtaggcattggccgaaccataaaataaaatcaccgtgtcacttgcgcatctttttctatggatggtttcttccatagagctctcatatattcacttgcgctattgttcctaagttcaatacatatcgtagaggaacaatcaaatgaagagttctctcctctctatccatatcatcttggttgtgatctcactaacatttattataaaccaagtttgtgttggttagactttatttttacaggatcacctattcacccncctctagatgctctcacaaagatatgcggcacactctgtggaactaccgatatttcaagaactcttgtcggcatg

SEQ ID NO: 60865 - DNA, 466 bp, Zea mays
  unsure (1)..(466): unsure at all n locations
agctnggaaaaatctggaataaatcggcggttataaccagctagtccaaggaaacttangacttgatgtacagtggttggtggtttccactccaaaatatccttgactttgctaggatcaaccgcaatccccttggcagacaatacgtgtcccaaaaattgaatctcctcaagccaaaatgcgcatttactaaatttagcatataattgatgctcccttaagcgtgttaatacgatccgcaaatgccgagcatgctcttcttcattcttggaatatatcaagatatcatcaatgaagaccaccacgaatttatccaactcgagcatttgttaatctgaaagacataaccagatattcaaataatccataccgcgtagtgaatgcggtcttaggtatatcttcgagtcagatacagatctgatggtaacctgacctgaggtcaatcttggaaaatacccgagctccg

SEQ ID NO: 60866 - DNA, 467 bp, Zea mays
  unsure (1)..(467): unsure at all n locations
agctggaaaagggtaatgtcactatagcagtgaccggcataccacgtatgcccaacaataatttgttgaatgactcggccatgttactacactggaactcatatctccatccacctaagtcgtgagctctcgtccacttctccaaatccggcatcaatccattcaaccaatctctaccttcggcatttgttgcgactntgagcttttctaacttttctctaaagaacttgtcttccagctgtcgacatgtctcctggaaaagctcaaagttatccttgacaccatccttacgcagaagattctcagcaaggtgtcgagtacaccacctgtgatgcaaaggagggtacccatcgatctgctcacggaccgcgttgagtattccctggtgccgatctgatattacaccaacttcccgtcctgggccaaccacatgtattcggaccagtcgcaggaaccagccccaactg

SEQ ID NO: 60867 - DNA, 425 bp, Zea mays
agcttagcttattcctgtacataatttgttatatcttatgcagttaatactttcacaaattaacaagtttaagttaacttctacgcctgcgagtatggtgtcaactattcacatcacaacagacccatattatggtctgtgtgtttcataactactactaaacagagtaactttatggtgtgtctgcagaaacccaaaatcatggcacgtcatgcagtgttctcacaagtcaaaaaagaaatataatttgacaaaagaagatagccatcatgcttacaggtgctgatccttctaaagaagctcttgcccttgagaatgacaaattcccagctaagaatgagccacccttttggaaaaccttttggggtgtgagcccttcaactggccatccatatacagaagagataagtgtttgcacccatatt

SEQ ID NO: 60868 - DNA, 407 bp, Zea mays
  unsure (1)..(407): unsure at all n locations
agctngaagccatggtaagtagcataggcattttatatacgaattgactcaagcctagctacgggtgcataggtttcattgaaatccaaaccttcgacttgtgaatatctcttggccacaagtcgggctttgttccttgtcaccacaccatgctcatcttgcttgttgtggaagacccacttggttcctacaacattttggttaggacgtggaacaagatgccatacctcattccttgtgaagttgttgagttcctcttgcattgccaacacccaatccgaatcccttaatgcatcttccaccctgtatggctcaatagaagacacaaaggagtaatgttcacaaaaatgagcaacacgagatcgagtggttacccccctttgaatatcgccgaggatggtgttcac

SEQ ID NO: 60869 - DNA, 374 bp, Zea mays
  unsure (1)..(374): unsure at all n locations
agcttggcatacagctgacaatctcgtagcctctgaagtactttcctcanatgctcctcatgctcttgctcattctgggaatatataagaatatcatcaatgaacactactacgaacttgttgaggtagtccatgaacacactgttcatcaagtacatgaagtaggctggcgcattcatcaaaccaaatgacataaccgtgaactcatatagtccatacttggtgatgaatgctatcttcagtatatccgaaggtcggattctaagctgatggtagcctgacctcagatctatcttccagaacacactggctcctcttaactgatcaaataaatcttcaattctatgcagggggtacttgttcttgatagtaac

SEQ ID NO: 60870 - DNA, 459 bp, Zea mays
  unsure (1)..(459): unsure at all n locations
agcttctagaggttcttctgctttgatgaatagtgcgggtcgagtctcacagaattctgaatatgtagtatcatgcagtccttggggaggagctctgcctccatgctgttgaaactgattgcccgccatctcacgcaggaagcgtgtattatctgcagtggcattgaccagggcagcgatagcctcagccaaagtcggtggtactagtggcgggttaggagtatcctccctaccgcgggaggtgcccgcaccatcatgtgcgcgagtccgtgatggcatctgaggcaaagaaacatttggaaaaaaaacatgccagcatacaccatcatattacattaccaaaatgtaataattatacagactatattgtagaactagacttcattacttantttacataagtaaaacatctaaactatactccatctgtagcaactcaccaatccatctatagtaaag

SEQ ID NO: 60871 - DNA, 360 bp, Zea mays
atgatgagggaaggaagcacatgcctgagaaaatagaagctggtcaagccgactgcttcagaagagacgatcaaggtgttgtatggttgaacaactgcatacgcgtgcctaaaagtaatgagaaccgcccgcaaattctgcatgaagcacatctgaatcgctattctattcatccagaagcactaacatgtatcatgagctaaaacaacactattgcgggacaaagatgaagatcgaaatcgcacgacagtggcaagatgtgacacttgtagacgtgtcaaggccatacacatgaaagctgctgcgccattacaatctgtacctataccaacatggaaatgggaggatataaccacggac

SEQ ID NO: 60872 - DNA, 388 bp, Zea mays
gaatgccagaaagcatgggaagtcaaaaagcattttatctgtcttattttagcacactgcgttcaagttagaagaacaaagaaagcataatttcccaattatgaagtcattagtctgatctcattacacagcattggcatggtttttctcagtatttcaatacgtaatggagcatacctttaatgtgtagaccgaggtggttgttgttttcaacaatcacgcgctcagggtcacgtacctgttaatgagataaatcatattgctagttaattcttttcatatgcagaggaagctggtagctactgtcattggttctgcattacccaacaataacattgggtctctctcttgttggatcataccgtagctgctaagatgagtaaacctc

SEQ ID NO: 60873 - DNA, 434 bp, Zea mays
agcttgcccttcaagcgacccgtttaggcttttgttgagtcctcccttctaaggatcttcacatccacatcagaaaataagcaattataacccattccacaaagatgtgaaacatacatcaaattgtagcttaaagaatctaccaataaaacatttgaaagtgattgttggccagagataggaattttaccaataccaatcaccttactcttgccactatctccaaacacaatttcttgtgcttcttgagttagttgcaaggaatgaaacatgtcttcctccctggtcatgtgatttgtacatccactgtcaagcacccaacttgacccaccagaggagtagacctgcaaaacaaatttaggctatgcttttacgtacccacaatggaatgggtcctacagtgttagttatagccttgggtcccacacacttat

SEQ ID NO: 60874 - DNA, 401 bp, Zea mays
agcttgaaccgaggacccgcgttatcggaatagcgcaatcgtgctcgccggagttcaagaacccgctggcgcacgtggaccgcgtaagcctctgcaccatttcccaattcgttgcgcgcatggcctctacatcaccccgtggagctcctcgtgtaccttaattgaactataccgtcgtggtttggccggaacaggagccgccgatgacccccgccgcctgtgctcgtggccagggtagcttcgaccacctccgacgccaacccgcacaccgacgtgaccgtcgtgacctcccggacgtcactgaccaccccgccggagctctaccgccgccggtaagcctccgcggcgtaatctatgccgcgggtactggttaagtcagccagggagcgcgggttatattt

SEQ ID NO: 60875 - DNA, 376 bp, Zea mays
  unsure (1)..(376): unsure at all n locations
ccattgtctcatggcaaagggagatgctaagggtaaaatcatcaccgatttaaatgatataaatgatgatgatgatatcgatgatgttgatgatgatggctattcatatgatgatcttgttagaatgttaggtgaggccgatgactacatgcacaaagaaaaagaaaaatgtaaggctgtaacaccctaaatctagcaaatgcaaacaaacctatttgaattattaaatttcagtacaaaggaaaaatacttatgatttctaataatataatcggaatatatataaatcgaacaatttcttgattagataaaatattgtcacaatgttgatgtattcatgtcgagacataaattntgtttgatgtatctaattttc

SEQ ID NO: 60876 - DNA, 399 bp, Zea mays
  unsure (1)..(399): unsure at all n locations
agcttcttggtgtttagttaaacccaccattatggtccttcccggatctttccactctgggcatgtcaatttagatagtattaacagatcatatatcgccctactcccaaaaaacaagatgcccttgcggtgggagacttccgccccatctgcctctaggactgctccatcaagctcctatacaaaatcctcacaaatcgcctgaaaattatcattgcctcccttatcaaccttgaccaaactggcttcctcaaagggagatccatctcagagaacttcatccacgcacttgaactagtcaagtgctgccacaaaagaaaagcctccatccttgtcctcaaactcaacttcaccaaagccttcgacactgtcacctangaagctttgtctttgatcctc

SEQ ID NO: 60877 - DNA, 328 bp, Zea mays
ggaaaaaacaatatcacaacagctttgggtgcttcagcctcgctgcccgctccgggtcaagctgccctgtgccaactttttggaaaagatacgcccgagcctggatgactgaatggttctatgtcaagaatgacctgacaacgcatgaagattgtaagagtatcattatgcgccccatctggcaacgctttggacttcgaaggccgaaaggtaaaaaggatgaaacagccgaggaatgccaaacagcctttcgcgtactctgttcttttattgggacaagggacttgatttaagaacacattgccttcatggtgtggccacttgcatg

SEQ ID NO: 60878 - DNA, 464 bp, Zea mays
agcttatgacatttgaaatgaacgactgattatatattcttataacttcacgttgcatacgaatagtgatttacgatttgcattaagcatcatattggagttgatctataggaggttatcaactttatacttggatactaattatgttcataattatgagtatatatgtagcccgtcaataattttttttcacacacatcaactgaacaatcattgcaagggcactcacaggctagctatagtggtgtgactatttttatagttgacctacctagtagaaggggggaaaaaagaggaaaaatctagaactgtgcgctacccctattagtcccacttggtttcattatcttacatgaatgactcattggtgccttgcttgacaaagggccgcgcgttggctcatgaaaatacgagtttttttcttctttcttccatgcaccgaagtgacaatttgtttaacttgg

SEQ ID NO: 60879 - DNA, 469 bp, Zea mays
  unsure (1)..(469): unsure at all n locations
agcttgtggaggttcttcatccncacatgtgctaagcgtcgatgccacaaccagcccatgcaagtcttagccattaagcatgcatctagaccgacctcttcttttgcaaaatcaactaagtaaagtttgccgtctagtacacccttaaaagctagtgaaccatcacatcttctaaagacagacacatctacatttgtaaataaacagttatatcccatattacataattgactaacagatagtaaattatatccaagactctccactaaaaacacattagagatagaatgctcatttgatattgcaatcttgcctaaacctttcaccttgccttggttcccatcaccgaatatgattgaatcttgggaatccttattcttgacgtaggaggtgaacatcttcttcntccncgtcatatgggttgtgcatccgctgtcgataatccagcttgaacccccggatgcataaa

SEQ ID NO: 60880 - DNA, 439 bp, Zea mays
  unsure (1)..(439): unsure at all n locations
agctttcaagataacatgggtgctctctctattcttttgataatctttctacaactgacaacatgcatgatatcagtcagaggcagcagcagctccagcaggactttgaccagttctcctccctgtttgacaccttcagcactcattattacaacatgcatcctccgccgagtgatcagtaaggcctctcctttgtggcaattgatgccaaagggggagagaagtgatgagaagttgtcaggcgtctccttcagggggagttggtggttctatgtggacactaagaccatgcatatgcattttatcttttttgtggccgtttagtttatgtcttatgcatttggaacttggttcgatctattaactctatgtcgtatgtctgtggattattatctggaatattctgtgggatgaactatgttntagttcacattactct

SEQ ID NO: 60881 - DNA, 398 bp, Zea mays
gggatgtgtcaaaaacattcctcgaggagaaaatgaacatgctgatttgctagccaagtcagcagcacaggggctgaccataccttcggaagtattttttgaaacaataaaagcaccttctgtggaactccttgaaagagcagccctcaatatatctcctgttcatagtgaagattggagaactgagatcatttctttccttcacggtaatttactttcagatgatgaagcttataacaaaagaatagaggcaagagctcgaccatatgttataatagaaggggagctgtacaagcgtggagtctgctctgcactactcgaatgtttatccagagccgaatgtgtacaattgatgaacgaaatacacgcacgactgtgtggatctcacattggatcta

SEQ ID NO: 60882 - DNA, 445 bp, Zea mays
  unsure (1)..(445): unsure at all n locations
gcttcgtagaaacatgcttcaatgctatatcttataaatcaatattgctgctccttgtgacttggcatgatatgtccctttttcaaagcgttttcccgaagattgatatcatatttctttcttatgccacatgcagnatgatgtatgatgcttatgttatgcaaagatgatgtgatgatgttatgctatgtaaggtgatactccgaagatacacgcatatttgcgcgataaaacacataatctttttgtgaatcagcattgacttttcgctataagcctcccttaggagcttcttcgccttttactttagcggaatcagcgttgacttttcgctgtaagctctgcattcccttatgaacgtctttggagcttcttcgcctcttacttaggcggtataagctctgcattcccttatgaacgtctctggagcttcttcgccttttac

SEQ ID NO: 60883 - DNA, 374 bp, Zea mays
  unsure (1)..(374): unsure at all n locations
taagccacatgcctttatgttaaancggatcaaatccaaccaagtctcatcttatcctgaacattttgaccaggcagacacaacagaattccggcccagcttcttctgaaagataccgattttggctgggtatgaaaatattcttgttttgaatctcataaccctggtgaggattgctaccggtattgctaattatgggtctctcgaggtgatgatgaattcgacattctttatattaacacaaggattggtgcaatgacgagaatacatagacaatgaaagggcacataacagtcacgactcangagacggaggaacacctatgatccctccaaaagctgtgataatggtagtttgggattacaacagtcgta

SEQ ID NO: 60884 - DNA, 410 bp, Zea mays
  unsure (1)..(410): unsure at all n locations
agcttctaaagggagagcgatatttgcgactaaccaatgttcattntgagaaaaacagggtttgtagcgcatgtcaagcangaaagcaagttggtgctcatcattcacacaagaacattatgacgaccgtcaggccgcttgagctactccacatggacctattcggcccgatagcttacataagcatcagcgggagtaagtattgtcttgtaatagtggactattattctcgcttcacttgggtgttcttttgcaggaaaaatcacanacccaagagacattaaagggattcttgagatgggctcaaaatgagttccgcttaacgataaaaaagaataaaaacaacaacgggacggagttcaagaactctcaaattgaggctttcttgaggaggaaggcataaacatgag

SEQ ID NO: 60885 - DNA, 428 bp, Zea mays
  unsure (1)..(428): unsure at all n locations
attttattgctaactgtcctgataatgatagcgaccaggaaaaggggaacaagagggaaaagaagaagcattacaagaaggcaaagggcgaggcgcatctatgcaaggagtgggactcggattgctcctcgtccgactccgacaatgaaggactcgccgccaccgccttcaacaaatcaaccctcttcctcaacgagcgtcacacatgccttatggcaagagagaagaaggtatgtactcgcaactctacctatgcttcttcaagtgaggacgaatctagtgatgaggatgaagtagattatttatgtttgttcaagggcttagatagatctaagatagacaaaattaatgaactaattgatgccttgaatgacaagaatatacttttataanagcaagaggatctgttgtatgaagagcatgataaa

SEQ ID NO: 60886 - DNA, 419 bp, Zea mays
  unsure (1)..(419): unsure at all n locations
agcgatcccttcacgctaaggatatgcatatctcngatggcaacgcgcgagaagattgctcgagcggcgaacattagtaaccacaagtgatatatccgttatgtccatgggcccatatgtcggggctcagtacctttgtgcatgccccctttcagctataaaaggggaggcatactacgttacaaagggaggctcacttacacccaagtgattcaagacaactcaaactctcaagcaatacatcaaacagtggagtagggtattacgctccggcggcccgaaccactctaaatccttgtgtgttctcgtgttctttccattttccaactaacaagcaaaacgcttatgcccctcctcatcttaggatttaggacgggtgcactccgtcacccggccggagatattctctccgacatttg

SEQ ID NO: 60887 - DNA, 464 bp, Zea mays
  unsure (1)..(464): unsure at all n locations
agcttcggctatttntcctgaagtagagctttaagtctttatttcttccagtacatccaatacgtggaccattcttttcctcttagaggtaattgcaagatatttttgtgccttcggcacggatacttctgccgaaggacttgtaatttctgatatctttgttctctcgacctctggctcatccaatttgaccaatggtgctttcggcgttgtagccagcccttcaattttctgcattagcgcagtttctttggctttgttagccgaagaggtctcaccaccaaattcaggcacctgtagccgtttcaatgtatcacggccggtgagtaagaaccttcaccttcttccttttcagcgcgggcccgcttggagcagccgaagcaacatccttcacaggtgccacacctttccttttctgacctcgtagcgggtagcggtagtcagggtacacgaacccaatagca

SEQ ID NO: 60888 - DNA, 464 bp, Zea mays
  unsure (1)..(464): unsure at all n locations
agcttgtctttggctcatcctctntcttcatccaaatttggggatagctcgagtagcagtccaataggctcatgagttccgaagaagctgctgcatctacaagggagtctattcttggtaaagggaactcgtccttcggacatgccttgttgagatatgtgaaatcaatacacattctccatttcccattagccttcttcaccataacagtgttagctagccactctggatatgttacttctctgataacaccaacactaagaagtctctttacttcatttcgagcaccttcggctttatcctcatacattttccgaagtctttgcttccttggcctgaaagatggatccacgttgtgaatgctcaatgacatctctattaacaccacaaagattgttagctgtccaagcgaagacatctttgntggtgaacgaanatcttagtagagtcttttcttgttcatc

SEQ ID NO: 60889 - DNA, 455 bp, Zea mays
  unsure (1)..(455): unsure at all n locations
agctntaccaaatggacgtgaagagtgcctttctcaatgggccaatcaaggaagaagactatgttgagcaacctcccggctttaaagatagtgagtatcctaactatgtatataaactctctaaggcgctttatgggctcaagcaagccccacgagcatggtatgaatgcctaagagattttcttatcactaatggcttcaaagtccaaaaggccgatcctactttatctactaaaactcttaacaatgatttgtttgtatgccaaatttatgttgatgatatcatatttgggtctactaacgaatctacatgtgaggaatttagtacgatcatgacacaaaaattctagatgtcgatgatgggggagttgaagtacttcttgggatttaagtgaagcaacttcaagagggaccttcattagccaaacaaatatactcaaacattctaaacaagt

SEQ ID NO: 60890 - DNA, 353 bp, Zea mays
gcttcgtctgaatacgagagtcaagcttctgctatggttaaaatttttggcagcaaaacagtgcaatagcaatgaatgctgtggtaacttcacacctacctgtctgtttatatagtgctgcaggtaaaaaggtgaatcgtcaggatttttacaccaggcaaacagcttctcgcacccgctgtgcggtgggccgcaaagaccaaaatagtgaacctgcatggtgggaccgctacgcgctcggaaactgtatcgtttctcgacaacgagctcagggaaggtgtttttcggaccttcggcttcctgaagcctaagagacttttttcacggatcaagctcgttacgaaaaacgatct

SEQ ID NO: 60891 - DNA, 461 bp, Zea mays
  unsure (1)..(461): unsure at all n locations
agcttggtcctaaactaacgatggaaattcagactcatccacttttgaaaactgggaaaaatttcagggaattaacatcgatttgggtcatggctcctagatgaggacatggccaaatttttagtttacacaaacataccaccaacattctaccggcacaaacacaagttggactagtggtcaaattaagaacatacgccacataaacacatatctaaaggacacaacaaataaaactagaaatttcttatagaacagtaatacttcatacaattntcaattatttattatcggaataaagatgagaaaagcatgttcgttcacaatcaccaattattagaataaaggtgagggaagcatttttgtgcgcanacaaacacaatgcaacaatcaggatgcatgtttgtcctattcgtcctcacgaatttcaccaacataatgtggcaatagcgttctatatc

SEQ ID NO: 60892 - DNA, 400 bp, Zea mays
  unsure (1)..(400): unsure at all n locations
agcttgaagccacggtcagtagtttatgcttataatatacgaanggactcacgcctagctgcgggtgcatatgtttcaccgaaatccaaacctttgacttgggagtatcccttggacacaagtcgggctttgttcctactcaccacaccatgctcgacttgcttgtcgcggaacacccacttggttcctacaacattctgactaggacgcggaactaaatgccatacctcatttctagggaaattgctgagctcctattgcatcgtcaccacccaatacgaatcttgtagtgcttcctctaccctgtgcggctcaataaaggaaacaaaagagtaatgctcacacaaatgtgcaacactagatctagtggttacccacttatgaatgtcgtctatgatgg

SEQ ID NO: 60893 - DNA, 411 bp, Zea mays
gacaaacagattgccgttgccgactgttacttcggaccgtactaccaaccggccaacaatagttatggcaaaagaatatttgtgcagactttgatgatattgaggaaacggacctcacttctatccatttggtaaagtattcgacagcgaccaaggcgaacttaacgttcctctgagacctatgcaagggcccgacaatgatcagtcctccacactgaagaggccatgtgtgggcgatcaatcttgtgaattgcgaggggctgacagatcgatgacaaaatttctggcatgcttaacacgaccttgcaacctgatttgcatcgcagatcattgcaggccaatagaagccttggctgatcacttatacagctacggcccttgatcctgcgtgagaaccgcaaataccactgt

SEQ ID NO: 60894 - DNA, 298 bp, Zea mays
  unsure (1)..(298): unsure at all n locations
agcttgtgcgtctcaagtacctggcctctgcctcatgggggacttcgctgacgtaatagactggcttctggatggttcggacccctgtggttggtctcgagccctcaaactcttgaccttccatcaccatcatggtggtcggaccatcaccttctcctaggggaactttntgactcccctagggatgttgtgccgcccttttgacgatcagcaccatgctcaccacctctgtagccgctgcaatgtataagtacaacggctcccctggctctggagctactagtattggtagggacac

SEQ ID NO: 60895 - DNA, 442 bp, Zea mays
  unsure (1)..(442): unsure at all n locations
cgactgnaggcatgcaagcttggacgatattctatgatggctcttgttgaacctcccgcgcaggagcacctgctggtttagtaacaccctctatagttagaacatgttatgccgtacagttagactttagctgcacaaataacattgccgagtacaaagctcttcttttagggcttctgaaactaaaggcaatgggaataagaagggcaatcctcataaccgattcacaagttatttctggccacgtggacaaaagtagcaaggcaagggatccgaagcttgaaaaatatttggatgcagtccgaagattggaagctctgtttgagggactttctgctaaaaaatatcccaatgcgggagaatgagcatgcagatttgtagctaatcagcggacacgggcttctttgctctgaagtatttttgaaacaataaacaccttcgt

SEQ ID NO: 60896 - DNA, 464 bp, Zea mays
agcttctaaagggagaacacattctaggattaacaaatgttcattttgagaaagacaggatttgtagcgcatgccaggcagggaagcaagttggagtccatcatccacacaagaacatcatgacgaccgacaggccgcttgagctactccacatggatctattcggcccgattgcttacataagcatcggcgggagtaagtattgtcttgtaatagtggatgattatactcgcttcacttgggtattctttttacaggaaaaatctcaaacccaagagaccttaaagggattcttgagacgggctcaaaatgagttcggattaaggatcaagaaaataagaagcgacaacgggacggagttcaagaactctcaaattgaaggcttccttgaggaggagggcatcaagcatgagttctcttctccctacacacctcaacaaaatggtgtagtggagaggaagaat

SEQ ID NO: 60897 - DNA, 433 bp, Zea mays
agcttctaaagggagaacacgtaataggtctaacaaatgttactttcgaaaaagatagaccttgtgcagcttgtcaagcaggtaaacaggtgggaagctctcatcataccaaaaatgtgatgaccacatcaagacctctggagttgcttcatatggatctcttcggacccgtcgcctatctaagcataggaggaagtaagtatggtcttgttatagttgatgatttttcccgcttcacttgggtattctttttgcaggataagtctgaaacccaagggaccctcaagcgcttcctaaggagagctcaaaatgagtttgagcttaaggtgaagaagataaggagcgacaacgggtccgagttcaagaaccttcaagtggaggagtaccttgaggaggaaggaatcaagcacgagttctatgctccctacacacc

SEQ ID NO: 60898 - DNA, 345 bp, Zea mays
gccaacatgggtctagttgcaggggcagagccctcccatgttattcttatccattaagcatgtggcgagctcatctctatcacaatctacttagcatacttgaccctctgacacacccttaaatgctcttgaactattactttttctcaagacagttactcctctatcagatgaaagacagttgtaaccaatttgacacaattgggatgccgtaagcagactgtaatctagataatctacgagaacaacattagagatggaatggtcatgggatataacacttgtacacgcacctttgaccaaaccttgtgttccattctctaatgttatcgctcgatggggatc

SEQ ID NO: 60899 - DNA, 374 bp, Zea mays
  unsure (1)..(374): unsure at all n locations
tgaccaagccgtatgtgcactaaacncaatcaaacagcttctgagtcccggagtaatcatacaggtaacaaatccacagtggctatccaatactgtgatggtgaagaaagctaatggaaaatggtgaatgcacattgatcttacaaatctcaataaagcatgttcaaaggatgagttccctttgccaacaatagactctcttgtggatgcaacagctacctcagagctcatgagtctattggactgctattcacgctaccatcaaatttggatgaagaaagaagaccagcccacaacaagcttcataaccctctagtgggacctactgctaccttcggatgcctgaggggctcaagaatgctggacgaagcttc

SEQ ID NO: 60900 - DNA, 296 bp, Zea mays
  unsure (1)..(296): unsure at all n locations
ggacttaatcactgcagctgactttaggagactcttttgactacaagtatttgaaagacagattgtccgctgcacataaacagtgggtatatcaccaaacatatgacacgacagcgcagagaactatgtcttgtattgcggaagatattcttgcttcactggcgtattctttcttgcggagaaatctcatacccnagagaccctaaagagatacttgagacacgctcacaatgagtttggattgggaatcaaaaagattataagcgataatggaacacagttcaagaactctcaaa

SEQ ID NO: 60901 - DNA, 444 bp, Zea mays
  unsure (1)..(444): unsure at all n locations
agctgctaacaggagagcacgttttatgattatcaaatgttcactttgagaaagacaggatctgtttcgcatgccaagcacggaagcaagttggtgctcatcatccacacaagaatatcatgacgactgacaggccactagagcttntacacatggatctattcggcccgatagcttacataagcatcggcgggagtaagcactgtctagttattgaggatgattattctcgcttcacttgggtgttctttttgcaggaaaaatctcatacccaacaaaccttgaagggattcttgagacgggctcaaaatgagttcggcttaaggatcaaaaagattataagcgacaatgggatggagttcaacaactctcacattgaatgcttccctgaggaggaaggcatcaagcatgagttctcttctccctacacgccacaacaaaatg

SEQ ID NO: 60902 - DNA, 374 bp, Zea mays
ggatgggctcccgatggagccgtcgccggacacgcctgacgacgaccacgacgacgatgatgatgatgatgatgatgatgacaaagacgatgacatggcggcctggcttggtctcaatccggatccgaggctaggccatatgtcctcgagccaaccttcacgtgggctggcgtcaccaacattcggggccgggatgccatggtccctatcctaggagcggacgtgggccgagggggtacttgaccccttggcccagataattggggtgactccaggaggtcagaacgaaccgcatgtccaccatgagcaggtgcctgtgccgaccgtacgagaagttgagtccccggctgtcatgatgtcagctgagcacgccg

SEQ ID NO: 60903 - DNA, 305 bp, Zea mays
  unsure (1)..(305): unsure at all n locations
cttaagggattatcgaccactgctccgcgattggctcaaccggacattgcaaagccttttgatgtgtattgtgacgcattcggcagtggcctcgggtgtgtcttaatgcaagagggangaattatagcatatgccttaagacagttgcgcccacatgaggaacattattcaactcatgacttataaatagctgttgtggctcatgcccttaaaatatggcgtattatctgctgaacaattcctgccatatatatacagatcataaaagttcgaagtacatttgtacctcaccagacactaacatg

SEQ ID NO: 60904 - DNA, 388 bp, Zea mays
  unsure (1)..(388): unsure at all n locations
agctttgaccctaatttgctaagtataccacaagaatcttcagtagcaagattaagctctaccttattaatttgatcattcaccatcaaagtttaattgctaaattgcatatcataccatacatgtatcttactcattgcattcattagattgcaatctcgctgacggagagtacgtgctcattcctgagcctggagctatccacgaggaagatcaggagcaagctcccgaaactgccatcgaggatctccccgcagcctcagtatttgaaggcaagccccggttttatgcataaccgtatctatatatgctactttactacacttattggttgtanggttgcaatgtgcacttaagtgtaggaagtgcttgacaaccctatttgcat

SEQ ID NO: 60905 - DNA, 389 bp, Zea mays
  unsure (1)..(389): unsure at all n locations
aatacttgttacaacttctacatntgccagcacagcaactgcagaccataccagcaacttggccttttgcatgctggggactggatatgatcggacctttcaagaaagctcacagaggatacactcatgtattggtagcgatcgacaaattcactaaatggatagagttcaagcccatcgcttcttaacctcacctaaggccgtggaattcatacaagacataatattcagattcgggataccaaacagcatcataactgacatatgatccaacttcacaaggtcagagatcttcgacttctgcgagcaaaaaacattcaaatcaagtatgcgtctgtagcacatccaagaagccacaggcatgttgagcgaaccaacgggatgatact

SEQ ID NO: 60906 - DNA, 431 bp, Zea mays
  unsure (1)..(431): unsure at all n locations
agcttctaaagggggaacacattntacgactaacaaacggtcatcttgacaaagataggatctgttacgtatgtcaagcacggaagcaagttggagctcatcatccacacaagaacgtcatgacgaccgacaggccgcttgagctactccacatggatttatttggctcgatcgcttacataagcataagcgggagtaagtattgtcttgttattggggatgattattctcgcttcacttgggtattcttttttgtacgaaaaatctcacacccaagagaccttgaagagattcttaagacaggctcaaaatgagtttggattgagaataataagattagaagcgacaatggaaccgagttcaagaactctcacattgaaggatttcttgaggaggagggcatctaccntgagttcttttttccatacaca

SEQ ID NO: 60907 - DNA, 383 bp, Zea mays
attacacctttgatgtcttctcgtgctgacaggttattctttacataaaaccattctgtaatccaaactccgggccatctcttacggaaggttggcacaggacactttgacccaccattataaacgaagctgtatcaaccaaaattattgtgaaattgttccttaccacacggttctggttcatatgacagatcgtgtatattgcagaagctctttgcatcacgcttcataccttggctcctccacggccatacgaagatattcaaccttatgattgcctccgcggtaagttggtgtatatagacttcgaaaattttagcacctccacaacgaatctactctactgaaatcctagccccgcttttaaaaagcttcggatacta

SEQ ID NO: 60908 - DNA, 452 bp, Zea mays
  unsure (1)..(452): unsure at all n locations
aaaactaagcttggcggattgaacaccacgctctcaacatgaaggatgaataatccttcttaacacggncgccgggtgtgggtcatcgataatacaggagtcacgcaccagctgttcggcgatagctcttgaccacgcatgcgccggaatacccctaatctccacatccagtagcactggtaaagatgccgtagacgcattcgcacagcgcgtccacctcttgaacaccagataaaactggggacctctaaagatctttcctccattgagcacccttgaaaatgtatcttcatcgggaaaaaacaccaagaaatcttccggcaaggtccgatgaatagacatcgtagctctattgacgttaaactgtgagctatttcttcatgatgcaactgctagacctccgcctggtacagaactggactaacaggcttcgagcgcagctcttcttgcat

SEQ ID NO: 60909 - DNA, 427 bp, Zea mays
gcttcagcggaaggtttggagaccagccaagaaatatatattgcttattctgcggtgaagacaacggccatactaccaggatgtgccatgttaccatccacaagcacaaagaaatagctgaagcagcagcgcaacacagtcagccgaagcaggtcatgcataccgcttcgtatcactcaccttatattccagaatatgtatgcaaccaccctgcagcttctgttgcttcggtgagtcaatcccaagcatcctgtcagcaaccttcaccgccactcgcgatccagcgaggacaatagccagaagggagtcagcacaatcatcatcagagggatttcagagaggaatctgaagctcgcacagtcaacagcactgtgccagagtcgaagcacatttattgacaaatatcctacttcaacagcaagtcttt

SEQ ID NO: 60910 - DNA, 478 bp, Zea mays
  unsure (1)..(478): unsure at all n locations
ggcacttcacatntntagaactatattgcttgtgcaacctaccaactttctgcatatattttcagtgtcgaaaagaagttcttctttatagaaaatgatctctagattgacacctcacatgcatatgtttctgacaggaaacaggcgagcttgagagctgtagacattcagcaaagataacgccacacaaactctacaggtanggtaaaaatgcactttatgtgctcaaatgacttagtcaatctaacgtcaccatgaaactacaagaactgaggctctttcgttctaaagtggtaatccattagcattttattgtacagactacagaatacacacaaaanagcgttctttgttntgcgagaacaaaattaaagtgatatgttcatggaatactcttgagtntagtnttcatggntcactaatataagcagatagtgccacacacttttaatttgctaatgacaggttaaaccatact

SEQ ID NO: 60911 - DNA, 482 bp, Zea mays
  unsure (1)..(482): unsure at all n locations
gggcaaatntgtcttgccgttaccttaccagtattaaatatttatttcttgatatggtagtggtcctacgagttacacaagccgacatgcagtacactgcgatctgttagaatttgctgagactatctccaacagcttatccatcctcatcttcatattcaaactctactcagcgaatagtgcagtctacagtgcataacaatgtaaaacagtggtttggataatcatatgaaaaagctgctggacacggtctgagatactgacaaaagtaacgataacccatatgcatggaagatactaagttcttgacttacaacttgtagtgcatgcatcagcgaagacgaacatagtgtgttagatgtgaagtgacagcttcattgtattttggctgtcccactccaatcttgctgagttgcagctcttgtatctgaaacaaggattaaatgagtaagaagtggcagcgcagcaaccaagcaatgatg

SEQ ID NO: 60912 - DNA, 270 bp, Zea mays
  unsure (1)..(270): unsure at all n locations
gaaggccgatgccgctaataaagaaaggagtgttaaccactgacttcgtgggtatctttctgttgagacagtagtcnccgtggcaaagcacgccaaagaacagaatttcccgtggagtggagaatccccgatggagaacaacgcggagaagctcaacttccaaaatcacagacatattggtacctggcgaaggtaactgactgttggtgtcgatggcagcgatcactgctgcagacgagtttccagtctttctcttgggcgccatctttg

SEQ ID NO: 60913 - DNA, 501 bp, Zea mays
  unsure (1)..(501): unsure at all n locations
acctataaaactcagctttccgtgtcgtcatcaaccttgacatagaaccactcatatttctcttctgctgcccatttgcttcggtagctagtgacaggaaactatgtagttctccgataagcgaagttataacaaccaaaattgtcgtgcaatccatcctttctagccttcgtttgataatgcaactcgtgaacccggcaaaagctgtccgcaaatggttccactgcttggcttcggagtgcccagatataaacaataagcctaacgatagcgttaggggtcagttgatgaaaatagataccgaacctattcagtacctctgcaataatcccatgtagggggaaccttaatccagcctttaaaagcttttgaaaataacaatttcatccttctccggctntggggtagtctcttctcccccgaagcgcaatagcttcttctgattntcagtaaaaaaagcccgattntaccatcttggacagatcagccttcgaaacagta

SEQ ID NO: 60914 - DNA, 484 bp, Zea mays
  unsure (1)..(484): unsure at all n locations
tcagtcatcgcgcgcatcatcttcttcaattccagctgagagattcactcatcgtcgntaagcttaagccccttgtccttgtccatttgattctttggtcctgccattgttagcacaaaatagagacaaaaaggcaacaaacaatgtgaaccctacaactatctctcaaggtggtggtggcggtggaatacacattatgaagcgtcttaccccgctcttacaaggttcttaccagcactgcaggtggcaaacggtggccggtgtgactgtccaacgagcgtgggtgtgattgcaaaggagtacttgttctgctcgagagaaagctggagctctggaaaggctgactaaatatatatatatatatggcacacaagtcagctacagatagcaatgctgaataagtgttccaagtactcgacctagttgctggcctagagaatataatagaacagttggaccaacgcacaagagatgaggtacaagt

SEQ ID NO: 60915 - DNA, 468 bp, Zea mays
tatccgatatgcatccggctcgcatagcgtgagaagtgagatcttttatcttaatgctcacatgaaacagggtagcggcgatattctgccgccggtacctgctgaggtctgcctcaaccttcgggaggccaacactcttcgatagagtgccgacaaccttcgccccaatgtgatcccgaaggcatcctaagctttcttcgttgactcccccgaagagtaacacacctggtctgtacccgcaagatatagcatactctatcagttcttctttttcagcctttgacaattcttgcccaagtatatcttggaaattaaagtcctcttctttcgaagtatactcggctttctcctttccttttctagccagtgtgcccgggatctcttcagtggctgcaacagctatttccgcggccgcatccagaagcatggtatcaaatttagagagtgtggcctctagatgtacatctt

SEQ ID NO: 60916 - DNA, 481 bp, Zea mays
  unsure (1)..(481): unsure at all n locations
ntgcagaaagaaggagatgatatgaagtctttggggtgcttgatggagttaattcaattcttatcaactcatgctatcaatcttcaaatgatctacatattcaagattgacccaaggttacttcaatttattcaaaactcatatcatctcgggaagatattaacgttgtaggaaataaagaatcatcatgtgcganatatcaaagcctacaacatggaggaaagtcaaaggatggtaacttttatattcttaagtgcaattatcttaaattgtcgtgtgtcttgtgtagtcacatagaaatagaaagcacttaagcatgtcttanaattatgtcatcattctttgaagaaattcctctcatacggtagattgtgtatttatcatttctatattatgacaatctacatgctntanagttgttgctatntctcatggcatgttttttcattaattattctattattgccatgttctagatata

SEQ ID NO: 60917 - DNA, 469 bp, Zea mays
actcagctggggcgccctcgcgtcttgcacagccgatttatctttctctcacttggaagcctcgggccgaacaggtcgggcgtggtagcgccccaaggactgctgataccgcgcctaatgtaataaggccacgttccgagcctcttccagctgatccaacaagtcttctcggttggtctggttgctttggtcgtcctaagcctctgtcctcggggaactggtttctaagttcgtgggtaggatgacctcgtgcccatagacaagaaagaacagcgagaaactcgtggctcggctcggcttcctcctcagactccagaccaccgaagggagttcctttatccactgcttgccgaacttattgaggtcgctgcatatcctcggcttaagtacctgcaatatcataccgttggcgcgctgcacctgtccatttgtcatcggatgagctacggtgggtcaggccacacggatg

SEQ ID NO: 60918 - DNA, 483 bp, Zea mays
  unsure (1)..(483): unsure at all n locations
tgtagagggagaacacattntaggactaacaaatgttcgtttttataaagacagggtttgtagcgcatgccaagcaggaaagcaagttggtgcccatcatccacacaagaacatcatgacgaccgacaggccgcttgagctacccacatggatctattcggcccaattgcttacataagcatcggcgggagtaagtattgtcttgtaatagtggatgattattctcgcttcacttgggtattctttntgcaggaaaaatctcaaacccaagagaccttanagggattcttgagacgggctcaaaatgagttcgacttaaggatcaagaaaattagaagcgacaacggtacggagttcaagaactctcaaatcgaaggcttccttgaggaggagggcatcaagcatgagttctcttctccctacacgccacaacanaatggtgtagtggagaggaagaatcgaactctattggacatggcaagg

SEQ ID NO: 60919 - DNA, 471 bp, Zea mays
  unsure (1)..(471): unsure at all n locations
tggtcacatgttatccgaagacacattttatgtcatcatatagatgcaccaaagaaccatatgaagacttcaatgcctaatggaccacactcgttcttttgaaacaattcanaggacttaactcgttcagatcagattntaagataagagggacttaaaatctcattcccgatgatactcatcaagtatccatcttatgggaaaaacatgaccaatagaattggtcataacttttcatttcattccaacaatggaatgaccaattcagtcttacccagcatagtaagtatcatcacatgataagttataacanatgcaacacattgtatgggaggatgtatntagcatacaatccataagatatatntcccagaaacaaatacaatatccatcactatcaccttgtgtttgcccacgattgaaattatatgggtatctctataatttggtaagataaaactangatatatc

SEQ ID NO: 60920 - DNA, 477 bp, Zea mays
  unsure (1)..(477): unsure at all n locations
ctggtggtggagtggacccatgcacactggcaattcgtattgtatttggaatcggattacagaggcatacaactctcgcagaggatcaatgccagagaggtctacaaaatctctcatgagcaggtgggacagtatcaaaactcaatgttctacatttgctggatacatgatggctgtgcttcgacaaaacccaagtggcatgactgatgcaaataatgtaagtgtatgtactattatgcatatgttcttcatcaatgtacttaactacatcccangggttcattatatgcatntatatgtttgcagacatctcttgcggctactcggtttgctgctgttgaaaagaagcccttccatttcttacattgttggtccatattgaaggatcaaccataatggatggaccagcacatgggtaaccataatcctccacccaacccaattggtacccaatcaaatactattgacttagatgct

SEQ ID NO: 60921 - DNA, 406 bp, Zea mays
gattggggtgcattgaaagggatcgagataaatattgacttgctatggatttaaaccggcacaataccactcaatccacatggattaacggtgaaacgaacacgcccttaagtgactgcaaagtgtttgtcctaagggcaatcttaacctacaaactagagatggtttctatacttaccaaattatgtagatactttatatagaaaccatattttccacgaatagtttcttcaataagttattatccaaccacatgtcttctctctacatgatctacatatcacatcttggttcccgtgcagacattagtttttatctaaggttattcctaacccattggttcttgtcacgaagtctaaagttgccacattatatgttactatagaagatataatggtcacgatgt

SEQ ID NO: 60922 - DNA, 486 bp, Zea mays
  unsure (1)..(486): unsure at all n locations
tcagaagatatggacgttgatggngataccgaggctagcttatatgaatcccaagataatgaatatgctgatgatacaagatcaagcggagcttaaaatcagagttttttttgtttgagcaatctttgttgttgtgaatctgcagaattatatagatagcttactgctggcaacaaaagaaatcagggtgtcatggtttgatgttgcatccatatattccctgcaattggntgtgttctaaggtccccagagaataattctcatatacgacaaggccatctctgcattgccaaatggtcatccagccccctgacgccatgcttctagcacacgtagtttcccaagtactacatcatatatacacaactttttcgacgtaaaaaaaataattgttattcagctgaatgtgaattgaattggacactgctagctgtggtgcggtgaaccagtacaggaaagggttgactgttatcgcaataacaacac

SEQ ID NO: 60923 - DNA, 468 bp, Zea mays
  unsure (1)..(468): unsure at all n locations
tcaagtcttcgaactgtatctaaatatatctcaagctttggatctcttgctttgcaactnttgtcaacatggctagaaataacttgagaatcagttttgagaaccgcccttcttatccccattgccttcaactttcgaagacccaaaagcaaagcttcgtattcagcaatattaattgtacaactaaaatcaagtttcactacgtagcatgttctgactntggaaggtgcaattaaaacggcagttgcacctgccccgaaggttgcccaggaaccatcacagaatattgtgcaagcttcggcatctttacttgcttcttcttcttgagcccctggcgtccagtcagcgatgaaatctgctagcgcctgggactgaatcgaagatctatgcacataatcaatgcagaactcattgagcttcgcagcccacttttcaataccttcagtagcttctctgtttctcataata

SEQ ID NO: 60924 - DNA, 407 bp, Zea mays
attatgcgcccaggctaaaactaacatgccttcatgagcatctcatgtattaagtcttagactgaaagggaaatggagtattccgcaaaaacatcgcttccactctacatcttcgtgccggtattccgccagccctccaatttggtataatcttcactcatatattgattgccacagggggagagaaagtataagggcctacatttcactctaagtatccgtctttggcgattcatgccaaagggggagaaagtattacgcccacagcataaggaccgcaccactaatatcataactaatgattctcaattggtaaattccaaattgatatcttaatgtgttcaaatcggggagagagtagcatcttcacaattgatatcttataacccttcttgacactaagagga

SEQ ID NO: 60925 - DNA, 471 bp, Zea mays
  unsure (1)..(471): unsure at all n locations
tgagtcaatcatcttgcaaagaataattgatgctcaaatagattatctgggtatgaagcacatacgagagaagataagggctggagtagccaaatgttctaaggaagacgatcaacgtgtgatatggtttaaaaaccacatagtagtgccaaagaatgaagaactccgccaacaaattcttgatgaagcacatcttagtcgttattctattcatcccggaagcactaagatgtaccaagacttatagcaacattactggtggacaaagatgaagatcgaaattgcacgctatgtggctaagtgtgacacttgtagacgtgtcaaggccatacacatganaactgctggtccattacaatctttgccaatcccaacatggaaatgggaagatataagtatggactctattgtgggactgcccaggacggccaaagggtatgattctatttgggttatcgttgatcgactcac

SEQ ID NO: 60926 - DNA, 406 bp, Zea mays
  unsure (1)..(406): unsure at all n locations
tcctccgcagccacattcagcgccgcanaataatctaagtccttattcaaagactcctccgtccacacaaccgaatccctagaatcaccagacccaataaacttagacacggaatcatctgagacatcttcaccaaccacggtcgaagccaccgcaaaattaccactgtcagtagcggttgcgtgcgcangcccataaccttgaacctgcgcagcaaccgaggttcagtaagatgcagacaaaacttacacactcccctgcacctatttagctacttatccacctgcgagggcccggccgcggccgaggggtctttggctggcggctcatccgccacctccagggaaccttcaattgtcggcgcatgggccgacagagggtcttctccgccggtcatggcaagaac

SEQ ID NO: 60927 - DNA, 461 bp, Zea mays
  unsure (1)..(461): unsure at all n locations
gggccactgggctcacacagaagaggcacaagtccagatattcttgcagctgggattaatatgcctgccaggacggctgtaatttcttctctcagcaaaagaatagatgttgctcgccctctccttccagcacgacctgccagcagccggcgcgggcgcaggcagcagccgaggagcagcaagaagggattggcggcggctgggcggatgcggccgagcagcagccggcgcgggcgcagctgcgggccacgctgcagaaggcagccgtgtcggctgacgcgcggcggctctactcgagatcctgngggccaaggcggcggtcaaccaggcaccatatgtcgtacgtaggtccccgacagcggcgccaggcagcgttctccctcacacgcagtgacggcggcggcgacacgagaggccaaccctagctctgtataccatgggtgttttggtggttactcatg

SEQ ID NO: 60928 - DNA, 315 bp, Zea mays
ctccaacttatattaaaggctactatcttttatgtatctgttatagggctcctatcacattaaatttatactcttgattcaccactttattggacatcggaacagcacgtgtacattgcgtcaacacacatatcattctcttatgatgcattgtgcctctgaagcaccttatttggagctcatatgggtcagttatgtattttaccacgttacgggttaaagatctaccctatagagctattttgctggtggtcacaggtcagaagacctaactgcgccaattcgtgactgcggcacagattacataaacagggg

SEQ ID NO: 60929 - DNA, 482 bp, Zea mays
  unsure (1)..(482): unsure at all n locations
ctataataatgctaccttgaccaaagtgaaactcttatttatattcaagatatgaggtttgacctttaataaatattatagaacctgtgttatacaacaaattttatatttaaaccaagccttgattcaatttctaagtatctcaaacagtgacatcaagacagaataaaaatctgatttctgaattcgaattcttctaagtctgaaatcagcatcgttcgggtcgacgtctcgcgttcccaaatttttgttgaacaactcaagtttccccaaatataanagntgttaataactaataggggcacaacatattaaaagatggcattcatccgattccgtttgacatgctttgacattcagttttcacgagtttccactgttttctaatccactgacaaatcagttttcgtgggtctataactttctaaccagtgcccgaatcacctcaagtcctatacaagatttgtagagtatacatcaag

SEQ ID NO: 60930 - DNA, 491 bp, Zea mays
  unsure (1)..(491): unsure at all n locations
tanagccatggtaagtagcatacgtcaatagtatacgaattgactcaagcctatctacaggtgcataggtttcaccgaagtccaaaccttcgacttgagagtatcccttggccacaagtcgagctttgttccttgtcaccacaccatgctcatcttgcttgttgcggaagacccatttggttcctaccaacatttggttaggacgtggaactaaatgccatacctcattcctagtgaagttgttgagctcctcttgcatcgccaccacccaatccgaatcttgaagtgcttcctctaccctatgtggctcaatagaggaaacaaaagagtaatgttcacaaaaatgtgcaacacgagatctagtagttacccncttatgaatgtcgccgaggatggtgtcgacggggtgatctcgttggattgcttggtggactcttgggtgtggcggcctttggtcttcatcctccttggcttgatcatttgtatctccc

SEQ ID NO: 60931 - DNA, 492 bp, Zea mays
  unsure (1)..(492): unsure at all n locations
actaagctttggtctctggtaatataatatcgatgataacgctctttagttattaattaatttaatcctggtgcgtgaagagccacgcagtatgcttcaaagccacaagcaacgcaactgtattggttttcaaaaacgcgaatgaacgaaaaanagatgaacagggagggagagaggaaaaagatgaacaggacatgaactcgtcgctaataccccaacgcaacggcgcgggagcagatgcaccttgcccttctcatctaccgcattcgcctcttgccgaccgccatgcccagcacccgttccgcctccgcctccaggctgctggtccgcgctgacaacaagccaggtgaagtgaaagcccgcttttctgcccctatcgtctacgcgtatctttctcccctttatagagctcctttgctaagtagcaagttccgctctgccttgttgtgctatttacttcaccagctgctccagaggatcaaatttcgttgt

SEQ ID NO: 60932 - DNA, 459 bp, Zea mays
  unsure (1)..(459): unsure at all n locations
ctaagctttgcaggcagttcatattanaatctgccacgaaatcatacgacttttacatggtctggcctcaagcatctaattcactttcatcataaaacagaagagaaaacagggtgaatacattaagcgagtgacatgactttgcattgaatatgctgcttctatccacccagtgcaacctataaaaggctgaaatgcgagcccaatggaatcgacacgagtcagttggcatgagatattcatgggcttatgcaaactatatgactatagtccaggtttaactaagagcagagatggttcccaatactgtggcagtggggtcatacaagatcctcacaagaactttacatgcacaccattttttaagacatgaagttttaccacatataacaatgtggactataataatataatgggcaggctgaagacatctaatagtcagggcaacagcagaatatc

SEQ ID NO: 60933 - DNA, 486 bp, Zea mays
  unsure (1)..(486): unsure at all n locations
ntcctgcgcacagcttcgtgatcaccttgtccttcgtcataatcatctttcgtctggctcaagcttcgtcttaaccatgctctgtatgctcatgatccgaatccgaagatacctgttcacatatttcacttggaaaacattgtcaaatcatgtttttgaggaccttcgggagccgaaggcccccaacactaaataactccagaaattcataatttctttgttctaactccgatttgatccattcaagttgcgttagcttcataaaaatattgtctacgcagtggcaacattaattataccatagaacatatttttataattagatatttgtttagcctatgtttagtagaatataccttntaaccaaagttaaactagaccatgatagttatntgactataatatgatttctaaacaagttataatctggattaaagtttaacttaactattggagtatatttcctcatatgatgtatattaacca

SEQ ID NO: 60934 - DNA, 443 bp, Zea mays
  unsure (1)..(443): unsure at all n locations
tgccgaaatatcctctgagaagacgaacacacaagatgtgttgatactaactgcaagccttcgtcttctactgcggaggtctcagaaatattgaaagtaatgaccgagtccttcccattcacaccgctaagtactctgggtttggaactgacgagcctcttacagaaaaaagaaatctcttcggctgctgatgggagagacggtggccagaagaagcgacacatgatgaatatactgcaagcaattgagcaaaccctgcccctagcttcggtagataaaggtatcaaaccgactgatgctgaaactcccgttgcagccgaagacgaanacctcacaaccactctgtccaaaattgacaaacttatatcagatgtggttgcggagaatgaggtggccgcagtagtctcagacaaacgaaaaaaagattgatgaaacctcttcag

SEQ ID NO: 60935 - DNA, 465 bp, Zea mays
  unsure (1)..(465): unsure at all n locations
tgcatctnntctatgccctctgatttgactactccatattgtcttatgattatcattggatcaacattttccagacgtctactccatggaattctttagttattccaagatttcgtccacttgttttaaaggttttaggcgaattcattgaatttataggctctgattttgatgtccagttcgctgattggatttcaaatcggttgtaaatctcagcctatctgatgaggagatgcagctgtaggcgttggatttcgagagttgatttatcagacttttgttattttttaaaaaaatgcgatctcggttcgccttcctttgcacttttgttagttgttaaactgatctacaaggttgtccgttcgaaaactgtaattntgatttttgtcctaagagggatatttacgtgatagaatggtttagtagtgctcatgtcacttgtctgtcttacattttcatcatagt

SEQ ID NO: 60936 - DNA, 461 bp, Zea mays
  unsure (1)..(461): unsure at all n locations
tnngcaaattgtgctactgctcaacttaatgaattttgatgtctctcattaattggtattaatggtctaaaaatttaattagcaattatgacattaacccgatggttaaaacaatattattacatattaattggaacatggagtgaccacccaggataacagtgcaaccatgagtgttatcatggctctggctntggtaattagctntatatgcttagtgcctggcaaccttacctgaaatatgggcaagagggggagcggtggtgttggcagcccatgttatcatggggacgtattcttggctaaggtacctcacccagggggtcaccaccatcggctttagaaaccttagcgggttgcttcgtattaagtgtaatntgtgaaagcctcatagtggatctctagccattcacctcggcagtgtttaagagtccgatcaacccgggctagatgagatacat

SEQ ID NO: 60937 - DNA, 482 bp, Zea mays
  unsure (1)..(482): unsure at all n locations
tcggcatgatagcaacaaaatgaaaccgacttagagatgaaatggctattcagacctcgacagattacaatagaattattatcaaatgtaaagggcatgaatgtaattttgcataggttgtgtcctgtgcctataaataggtgaacagtacccccgtactgttcacgctgatctggcattcgcttttgcgtcacgcttgtactttcatctccttcaagttgaaggtacatttgtaattcaacgttatttctgttcatacatgacaataatatataattgtttatgttgtcttttatatttcttacaattcatccttcgtcactgtgtagtgtatctatgaaggtacgcattttataaccttcgtccgaaaagtattatatcctaaggtgaataatgctccgaatgacgaaggacttaatcgactaacatntttatgttgccttgttcttaactcatagcatttgagaacaagtctccaacac

SEQ ID NO: 60938 - DNA, 95 bp, Zea mays
gtgatagtgtcttgtagaggatcgctaactcttgattgaatgtaatagtggaaagctttgtgaaggaatggcgtggttgtatatcctcatcctat

SEQ ID NO: 60939 - DNA, 466 bp, Zea mays
tctcgtagctagtttcatcagagcggttcaccaccctgagtggttatccaaccccatgttggttcgaaagagaagcgggaaatggagaatgtgcatcgattacaccgacatatacaaggcatgcacaaaagatccaccccccgcacattgatctagcggtcgattccaccataagttgcgaagatatgagtttcctcgatgcttactcgggctatcactagatcacgatgaaggaatcctaccaaccgacaacaactgtaatcaccccttttggctcgactactacatgacgatgttgtttcgcttgaagaacgcggcggccacatgccaatggtgcatggtcaaatgttttgtcaaccttgtcaggagaactatagaagtgtatgtcattgacatcgcggtcaagatcacgcagtcaactgagttgagcttcttcagctgagtggagctatctcaattgagttga

SEQ ID NO: 60940 - DNA, 383 bp, Zea mays
  unsure (1)..(383): unsure at all n locations
cagggacaacagggtgttaaggaggaaaaacgactatcaagactcccccttacttattgaacatatgcactatcaacatttacgtaagatacatatatgcaaaaagattaatactcccttggtacctttaccatgttgtagtgtacttcccatcttgacagtatctaatctttcaagagctttttcacacttgtgcctgattctttatccttactttttcttgttgctaagacatcaaacttagaacaagttatagtattgggcacaagaagaaacttctattctcatgattatcacaagatgtcaattgaagcgaactattacggctaccaatngagagataccaacttatagataccaattggcaagtgatttattatcat

SEQ ID NO: 60941 - DNA, 468 bp, Zea mays
  unsure (1)..(468): unsure at all n locations
tatgaaggttcttcatcccaacatgtgccagacggtgatgcctatagccagcccatttcgtcttagctattaagcatgcatctagatcggcattctctttcgagaaatcaactaagtagagcttgccatctaatacacccttaaaagctaatgaaccatcactccttctaaagacagatacatctacatttgtgaataaacaattataacccatgttacataattgactcacagataacaaattatacctgagcgattcaactaaaaacacattagagatggaatgcttggatgtgatggctatctttcccaatcctttgatgttgccttggttcccatctccaaagatgatcgaatcctgggaatccttggttttgacgtaggaggtgaacattntcttctcccccgtcatgtgtgtcgtgcatncgttgtcgataatctagctggagcccccggatgcataaacct

SEQ ID NO: 60942 - DNA, 479 bp, Zea mays
  unsure (1)..(479): unsure at all n locations
ntctcaatctatcttggtgcttatcaaatatactntaacttatataattggctcaactcanaattntaaacttttcattcccttttgcttattttcttgaattttgttcatggggttcacttanggttcttaattagggttgcacattcttatcctttaagagactcaattgtcttgatcatgacactnttaagcatatacttggtgaattctttcttacttaagttattttgatgctcatgcttactttggttcacataaaataatggttcttggtttggctttttaagagaaaccctangtgacactggggtgtcacagccttccccccttaaaggaatctcatcccgagattcgggccagagtcctttcgaggtgaagcgaagggtgagactgataggaaaagggtggngattgttattattanggcaaaactgctcttcgaatgtcattctctttgcaacttcagaaggaagtcc

SEQ ID NO: 60943 - DNA, 490 bp, Zea mays
  unsure (1)..(490): unsure at all n locations
ntagggtaaaagtcataaaatgaccccaaaaatgaacttgaatcttctttataccctngggataccagaaaccctaattaaaaccctggaaaaccctaaaaccaaaccctaggggcttatatgcaaaattagtccacttttggactaaagtgcaaaaaccaagccaaataagtatcttaagtcctttggatcacaaatatgtgaatttacaagccaaaccctaagttttggacttaaatgcaaaatggacctcatttgagttctataccaagtctgaaattcagttttattggttcaactttggagctttgcatctttcaagatataggaaatttgcccaaagtgaccacaacaagtttgaagaccaaacataggagaataactntgtttaagggttcaagccatgatcttatgagaaaatgngagaanaacccaattaatgttggactgtcaggctggttctgtctgaacatcagactaacagattcat

SEQ ID NO: 60944 - DNA, 485 bp, Zea mays
  unsure (1)..(485): unsure at all n locations
tctcgtataagggatgatgagcacagtgcgccgcatggcacggtcgctctgtttgacaacacactggacaggcgcgccgtctacaggatgactctgatgtcgtctgccagcggagtggacaggacacattaaatgctgagagggcacatcgtttgtcagcattgtggcaggcggcgcgtcccctccgcaataaatgcagagaccgcgtggctttagaggccttacgtcaggctccgcccgttggcttatgtcacgggccacaagccacggtgcagcagcgggactccgcctgagcggngagcgcatggcaaggcctggacacgtgccagcaccggacccttactcatgccggngttccccctgtcctgngaccttgctgtggtccggaccttactcggagggacctgnggcccatccgagggacccgacatgccttcttggcagtcccggactgtaatcganggtccgggctgtgcgtacagggg

SEQ ID NO: 60945 - DNA, 225 bp, Zea mays
tcttgaccacctcagcgttcaccaagttgttgcagctaccaccgtcaatgatggtatgtacacgacagtccttgacgatgaggaacatgttgaagatgttgtggcgctgtctgttgtcgtcgacactagccgcggtactcatagctcgttgacaatcaaagacttatatgtcttcgtcgctggtggaccaagaacctcttcatcaccatcataagtctctgcaat

SEQ ID NO: 60946 - DNA, 488 bp, Zea mays
aactcagctactacttggagctcctacattctgaatggacttaatttagtctggatctatctctatgccatgatcatgaataatgaatcctaagaacttgtcaaccaacaccccaaaagcatatttacgaggattcattctgaaaccataccaacacatcttatcaaaagcttttcacaaatcagctatatgagaaccaaattcagtcgatttgactattgtatcatcaatgtaatctctatagtgtttcctaacaactcatgaaagatcaaattcataaccatttgataagtggcactggcatttttaaaccgaatgtcgtgacaacccattcaattaacccaataaagcctggacatataaagattgttttatatggatattcattggccatgaacatctgattatatccagcattatcatcaagaaaacttataactctagtcctcgacccgtttagtttgagggactaaggattagtccctcca

SEQ ID NO: 60947 - DNA, 482 bp, Zea mays
  unsure (1)..(482): unsure at all n locations
tccggaagccgatactcttcgataaagtaccgacaaccttcttactcagttggtctcgtatacagcttaacccttcatcatcaataccaccaaagagaagcgcccccggccgatatccacaagatatagcatactctttcaattcctctntttcagcttcagttagctcctggccaactaagtttcggaagtcaaaagtttcatcttccaaggtatcttcggttattcctcctttctcgggtttggcagtcgtggtctcttcggtggctgcagcagtttcctcagtggccatgtttagcagcattgtatctatatcagcggctatgctctctaaattaataccttcggagttagcatcttcagctctggcctcttctgcggcagcctccgaaggtacagcttcagtagatgtcatgatttcaatcgccgacatcttcagagntggagcccttggtggtgttggttcaatcacttcagtcacg

SEQ ID NO: 60948 - DNA, 456 bp, Zea mays
  unsure (1)..(456): unsure at all n locations
ggacagtgactgacaagggctacctcgaacaccatggagctctgtccatggccgacgcattaagtcttggcgccacccttgaaagccaaccggtgtgcgtggtgggcccccatgccccccagggctagcaagccacctccggggaggtcatgttgacgaaggcgtagccattgttggcctccctcctaaaatccattagcatgtagagaaagtcatagtgcgactttgccctaccattgaatggggaagaaaagaggaccaactcagaccaggaggcggaatgcatttgctccatgcccaccgaatatcatagaaggaacttcatcggtaggctgggtggatcatactccggattccccctacatggcacgccaaatttaggctctgatcctgagaacggngccgacgggctaggatttggctaatgatgatggacgaacacaagaacacataagt

SEQ ID NO: 60949 - DNA, 420 bp, Zea mays
  unsure (1)..(420): unsure at all n locations
tctncaccatgtcgctgctagccaagttgttgcagctacctctatctatgatcaaacgacatgaacgctccttaatgacacactttgtttgaaacaatgtatgtcgctgattctgctctgccttctccatttgtgcactaagcacacgctgtacaatgaggctctcataatgctctgcatcatctgcaccaatctgatcttcgggtggttccttagtgcctgcatcatcagccgcaagcaaagcaagtgtagcttcatccaaatcactagcagaagaatacccaccatcgtcttttaccaccaaaacacgctgattaggacaatcacgctgcacgtgtccatagcccttgcatcgataacacagaacatctcttgttctacccgtggaggctactgaagaggcactacctgctggtttct

SEQ ID NO: 60950 - DNA, 456 bp, Zea mays
  unsure (1)..(456): unsure at all n locations
ntaccaaaacgctatctccaatctgaaactctctgtcagatctatgcttatcagcctggagtttcatcctattntgagcagctgccaacttctccttcagcatggtagcatgtaactgtctgtccgccaacacctcagtcacagaactaggagcaaccccagaaagcataggagcagcagcaaacacagggtcataaccataccaggccttgaatggagaacaccccanagctgtgtgatatgaagtattgtaccaaaactcagcaagggccaaccatttcttccaagtattaggtgcctcatgaatagaacagcgaagatacatttccaaacactgattcactcgctctgattgcccatcagtttgagggtgatatgcagtagtaagagccaattngatccccanagcctgaaacanagaaattcaaatatactagtgaacactttgtctctatc

SEQ ID NO: 60951 - DNA, 469 bp, Zea mays
  unsure (1)..(469): unsure at all n locations
tgaagccgaagtcgagaaaagttcgaatctgcaaaaattcttataagagcttcagaacatatgcttgaacttcggcaaccggtgcgtgcaacggctgaaacaggtcttcaactcagtgggagccagctctaaaaaatttgaaccttccgttgaagacctgccaagcaccttcgaacatattgagagcgaagttgaggcgcttgacgaagtaatagctgggcatggcgatttctgtgccctgctggcttctcgcggcacagctatagctnttatgaaggctgattgcacgcatggaaagattgtcaacagaccaaacttcagcttatcaccagcagacctagctgatatcctcagcctagcccaaagtattgggaatagattcataactcatnattggacgaagggtgggcgagacttatctggtaacgacgcacgaagtcatcttaagccggtataatacttatacatg

SEQ ID NO: 60952 - DNA, 333 bp, Zea mays
tacggacctataaatctcagctttgggcctgcgcacgcaaccgccactacttaatttttggcggcttcgaccgtggatgatggtaataaatcggatgggtctgcatctaagttttctgattttggtgactctgggagctcggttgagtggactgatgagtcgtcggatgaggacttggactactttgcggccttggatgtggcagcggcggaggcttcaccgcacgctgcggatgcagaagatgtgcctggtccgagtactgggcgtaagcggcgaagggcggttgcgaagcgtatagtgagtggggcggacggcggtcggcttcatgtgagt

SEQ ID NO: 60953 - DNA, 428 bp, Zea mays
acttagttgattttgcaaaagaagaggctcgtctagatgcatgtttatttctaagactagcatgggctggctgtggcatcgccgcttagcacatgtaaggatgaagaaccttcacaagcttctaatggagaccacgtgactggattaactaatgtgcaactccgagaaagatagaccttgtgcagcatgtcaagcatggtaacatgtgggaggagcacatcacagcaagaatgtgatgaccacatcaagggctcctggagctgctacatatggacctcttctgacccgtcacctatctaagcatatgatgaagtaagtatggtctatttattgttgatgactattccgcttcacttgggtgttccttttacaggatatgtctgaaacccacgggaccctcaatcgcttcctaaggagagctcaatatg

SEQ ID NO: 60954 - DNA, 481 bp, Zea mays
  unsure (1)..(481): unsure at all n locations
tggctcgagcagccaaagtctgctcgtcaggtgcccgttagtgttctgtggtgcaccaaacagtgtccggtgcgccaggctggctctggcgaactggctgctctcacgacttctacagcggcgtacggctataaatcaccagactgttcggtggtgcaccggactagtcggtgagccaacagtcagtcaggccaatggtcggccgcggaatccgcgcgtgacgcgttgcaagagccaacggtcagaaggggcaccagactgtacggtgtgcaccggacagtgtccggtgcgccaacggctccatagcgccaacggtcggcttcgccaaagaaggaaagaaatccgcaccggacagtgtcccgtggtgcaccggatagtgtccggtgtgccaagcgacagaaggcaagatatgccttcttgaaatgctctcaacggcttctagctgccttggggctatataatggaccnctatgcacatgga

SEQ ID NO: 60955 - DNA, 477 bp, Zea mays
  unsure (1)..(477): unsure at all n locations
tctacagggagagcacattntaggactaaccaatgttcatcttgtgatagacaggatttgtagcgcatgccaagcaggaaagcaagttggcactcatcatccacacaagaacataatgacgactgacaggccactggagctcctacacatggatctattcggcccgatcacttacataagcatcggcgggagtaagtactgtctagttattgtggatgaatattctcgcttcacttgggtattctttttacaggaaaaatctcaaacccaagagactataaaaggattcttgagacgggctcaaactgagttcggcttaatgatcaagaaaataataagcgacaatgggacggagttcaagaattctcaaattgaaggcttccttgaggaggagggcatcaagcatgagttctcttctccctacacacctcaacaaaatggtgtagtggagaggaagaatcgaactctattggacat

SEQ ID NO: 60956 - DNA, 486 bp, Zea mays
  unsure (1)..(486): unsure at all n locations
tgtatctcagtgcctaaacactgaatggacagctaccatacggcttagtgaataaacggaagagttgagcaagatcacattanagaataaggatattcagcttgatatcaatataagaggtgaagagtttttactgttttagtgaatgatttcttgctctgatgcaattttgtgacaattttattctttcaacagaagaatctcggagttcttcacaacaagggaactttgacacagaaggtaccagctccagtgaggctttcttgcttggaacggtaaggaatgaacatatttatttcattcttctcagccactaaccaaatcagctccagtgaggttagtttacagcaatgttcttgtatggttctcaaggatgagtttccattctatttatgtagccaaagtagatgtattatgcatgtcgtcgtttggaaacttgacaaaccgattatacttgtttanggtgcttcagaaaagatgcttgag

SEQ ID NO: 60957 - DNA, 460 bp, Zea mays
aggatattcttcatcagagcactatgggtattggtgtgataaatgattattcttcttcacgaagcatgaaaagaagggaaggtgtcttttcgtcaaagactcaataacggaacgtatgtaaaattccatgcatcgtatagaattgaaccatataaacaagtatattacattcatggttacaagatattacacatattacatctcataagtctttacaatagcacgtagtcttccctaagtacaacttccgcagcttcagtcaggagtcgattaacaacttgatccatgatagcttcagccatctttataatttcgtcgacttctttcaggtgagggctcggagacgctctagtaggatctgaaagacgacaggatatggctacattgctattacaaattgcgaacgaagtttataatcatagattacaacacaatagagaccattagttaatacctattt

SEQ ID NO: 60958 - DNA, 242 bp, Zea mays
ctggggacagccttgctcgcgccctcgacatccgaagatctgcgtaccataagcgggcagggaaactccctgtataaaggacgatgagcacagtgcaccgcgcaacacggacgcactgtttgacaatggataggacaagagtgcgccgtctacaggataggcctggcgctgcctgccagacgagtggacaggacgcattagatgccgatggggcacatcgctagacaacacggcggacaggc

SEQ ID NO: 60959 - DNA, 468 bp, Zea mays
  unsure (1)..(468): unsure at all n locations
tatgccttataacaagaggatacaagaagttggagtgtttttgttattgctnttgcgaatcacttgaagcgttggtacttttgtgaatgattntgtaaagtgtttgcaaatatgtgcaaaacataataacatgtgtaggtgttgtgaatgattttgttgtggtgcttgttgatggtttatgtgatgtggatctatcattgtgcaatactaattaaatttgtatatctatgtgattatgtgtataaaaattggtgatttgtgatgcttttgtatatataacagttgttgaatgctaattaatggtatattatcattattaacgactataactaggggcaactttctgttggttgctaaatgtatagtataacggctcacgattggttgtaaatctatttacaacaacctcacggtggtcgctaatatacaatattagcaacggacggtcggtcgctaaaaagatgtcag

SEQ ID NO: 60960 - DNA, 461 bp, Zea mays
  unsure (1)..(461): unsure at all n locations
ntgttgccctgtctcagaccaantgaatgatgtacctcttttattatgtctganaagataggtactttagatgacacatccttcacaggaacatcatcataatctgcaaaataaaggaatgcttgacatttcatgaaccatattgagagaacttcaattacatataaacacattataccggaggcaaactgcaaatgtgactttttgcatatttttttgtccatataaacttgagcactgtatcattatctaagtgctttgacatcaatggaatgaatgacagagcaacaacttttgtcctatctaaaacattcaagataaaccataacaaatcatgttctttgtctcacctgaacaccttggaagatggtactggattctcaagaatgtagaggcaattatatccttcttatgacacataactcgaagaatggtgttggcatcatgtacatatcttcttc

SEQ ID NO: 60961 - DNA, 469 bp, Zea mays
  unsure (1)..(469): unsure at all n locations
gaccttagaaactcagctngccatacctgtcanagcaacaacacatgccagcacatcagctactaaccataccagtaacttggcctttcgcatgctggggattggatatgattggacctttcaagaaagctcaaggaggatacacccatgtattagtggcaattgacaaattcactaaatggatagagttctagcccattgcctctttaacctctgctaaagccgtggaattcatacaaagcataatattcagatttgggataccaaacagtatcatcactgacttgggatccaacttcaccagttcagaattctttgacttctgcgagcaaaaaggcattcagatcaagtatgcatctgtagcccatccaagagccaacgggcaggttgagcgagccaacggaatgatattggaggcacttagaanaagggtctttgataaaaatgaaaaattcgcaggaaaatggat

SEQ ID NO: 60962 - DNA, 477 bp, Zea mays
  unsure (1)..(477): unsure at all n locations
ttntggaggccattaacacaacatatagcaccttctccaattctgtataatttttatttgacagacttagaacttcagagacgaagtacactggagcttgctttttgacttggccatctagcttctcctgtacaagtgccgcactcactgcagaatgcgaagctgcaacatataagatcaatggagcccctggcgaaggtggagttaatgttgttaaatcaattaaatattgtttcaactcttcgaaggctttttgctgagctgggccccattgaaagacttcggctgacttcagtatttcaaagaatggcagatttctttctgcggatctggatatgaatctgtttaatgatgctaatctacctgccagccgttgagcccctttctttgtacttggcggttccatccgaaggatagcttcaatcttgcttgggttagctncaattcccttcgttgatactagacagtcaacgaact

SEQ ID NO: 60963 - DNA, 468 bp, Zea mays
  unsure (1)..(468): unsure at all n locations
tcgcacctctgaactaactcggntgcatcattctttgctgttggccaatagaatcctgacctgaagaccttcccgactagtgttctggaggctgcatgtattccacattgcccagcatggacctcctccagaagttgcttcccagtagacggaagaatgcacttcatgaggacgcctgatgcaccccttctgtacaatgtctccccaatgagtgtgtagtgagccgactgtctagcaatgcgctcggctgagttcttgtcatctggttcttcttcattctttatatacttgatgattggccttctccagtcatcagagtctgactcggattgatctataatgttgcactcttctgtttgatccattgagatactcggctgtagtatttcttgcgcanagactccgggtgggacctgangtcgactggatcctagcttggacagtacatcggctgctgtgttccgatct

SEQ ID NO: 60964 - DNA, 485 bp, Zea mays
  unsure (1)..(485): unsure at all n locations
tatgaagattcttcatcccaacatgggctagtcggcggggccagagccaacccatgttagtcttagcaattaagcatgtgtcgagttcagctctatcaaaatctactaagtatagttgaccctctaacacacccttaaatgctattgaatcatcactttntctaaagacagttacacctacctcagtaaaaagacagttgtagcccatctgacataattgtgaaacggaaagcaaattgtaatctaatgaatctacaagaaaaacattggaaatggaatggtcaggtgatatagcaattttacctaatcctttgaccaaaccttgatttccatccccgaatgtgaatagctcgtggggatcttggtttttctcataggaggagaacattntcttctccccagtcgtgtggtttgtgcacccgctgtcgatgatccaacttgagcccncggatgcataaacctacaaaacnaatttagttcttgac

SEQ ID NO: 60965 - DNA, 483 bp, Zea mays
  unsure (1)..(483): unsure at all n locations
tgccagtacctgtncaaacaacagcacatgccagcacagcagctactaaccataccagtaacttggccttttgcatgctggggattggatatgattggaccttctaagaaagctcacagaggatacacccatgtattggtggcaattgacaagttcactaaatggatagagtttcagcccattgcctccttaacctctgctaaagccgtggaattcatacaaagcataatattcagatttgggataccgaacagcatcatcactgacttgtgatccaacttcaccagttcagaattctttgacttctgcgagcaaaaaagcattcagatcaagtatgcatctgtagcccatccgagagccaacgggcaggttgagcgagccaacggaatgatattggaagcacttagaataagggtctntgataacaatgataaattcacaggacaatggataagagaattgccttatgctgtttggagcttg

SEQ ID NO: 60966 - DNA, 493 bp, Zea mays
  unsure (1)..(493): unsure at all n locations
tatanatactcaacctatatattcagaattgcctattcacccactctaggcgacttatctatgtgaatcatattacatgaatatgagatctatcgaatgtgatatatggaatatatgcccaatgtggagtcttggagtatttcgatctttcggtcatatacatataggcctgagtcagacatcaaatagctcatcccttgcgattaaacagagtagtacaccagatgaacaaatgcgagaagaaagacctagtactataataaatggctgtgtcactacggtaatccaagctagagacacgttatattgtccatgtctaatctgttctagacggggagaatacgtacaactcctttggatagacataaaagagatttatggaccatatgttagaactctcactataaccacgagagaatggagagctaaccatgcatgatggttagtctatatgcaccttgtatctttctttatgtgtcatcaatcccacata

SEQ ID NO: 60967 - DNA, 439 bp, Zea mays
  unsure (1)..(439): unsure at all n locations
tatgaagattcttcattccaacatgggcaagtcggcgatgccagagctagcccatattagtcttagcaattaagcaagtgtctagttcaaccttgttatcattaaaatcaactagatatagttgaccatctaacactcccttaaatgctattgaatcatcacttcttctaaagacagtaacacctatatcnagtaatagacagttgtagcccatcttgcataattgagaaacagaaagcacattgtaatctaaagaatctacgagaaaaacattataaatggaatggtcatgggatatagcaattntgcccatacctttgaccaaaccttgatttccattcccgaatgtaatagctcgtttgggatcttcatttttcttcatatgaagagaacatccntttctcccctgtcatgtggtttgtgcacccgctatcgatta

SEQ ID NO: 60968 - DNA, 468 bp, Zea mays
  unsure (1)..(468): unsure at all n locations
tatttagaagccttgcgaaagtttgtatgatttgtccatgtttggtacctagaacccagaaccctagtcttctgccctatgaacttcactattgactctgaaaaccctagtttcctagagatccgtgaaggaaaattgtattcaagacctaagataatgtatttttattttctatgcatttcatgagaattacatgagcattcatgactatatatggctatataaagaaaacgaagaagagatagaagttgaagaaccaaggactcaaccaccaccacctgaagaaccctaggccatgaactgctnttattttgacatctgtggagtagagcctgactcacctataacacaaagcaagccttggtgcatntgccacctccttgctatttcanaatctttctcacttgcttgatgcattangtaataagagttgcgtgctaaacaaattgatgcatttccttccttgag

SEQ ID NO: 60969 - DNA, 433 bp, Zea mays
  unsure (1)..(433): unsure at all n locations
gacaggatctgtatcgcatgccacgcatggaagcaagttggagtcaatcatccacacaagaacatcatgactaccgacaggccgcttgagctactccacatggatctattcggcccgattgcttacataagcatcggcgggagtaagtattgtcttgttattgtggatgattattctcgcttcacttgggtattcnttttgcaggaaaaatctcaaacccaagagaccttaaagggattcttgagacgggctcaaaatgagttcggcttgaggatcaagacaatnagaagcgacaacgggacggagttcaagaactctcatattgaaggcttccttgaggaggagggcatcaagcatgagttctcttctncctacactccacaacaaaatggtgtagtggagaggaagaatcgaactctattggacatggcaa

SEQ ID NO: 60970 - DNA, 474 bp, Zea mays
  unsure (1)..(474): unsure at all n locations
tctgatctcttgcttacaactcttgtcaacatgaccagaaatatcttgngaatcggttttgagaaccgcccttcttatccccattgccttcaacttccgaagccccaaaagcaaagcttcgtattcagcaatattatttgtgcaactgaaatcaagtttcacaacataacatgttctaactttggaaggtgcaactaaattagcagccgcacctaccctgaaggttccccaggaaccgtcgcagaacactagccaagcttcgacatctttacttgcttctttctcctgagcccctggcgtccagtcagcgatgaagtctgctaacatctgggactgaatcgaagatctatgcacataatcaatgctgaattcgttgagttccgcagcccactttccaatccttccagtagcttctttggtcctcataatatccttcacaggctgtaatcaaagaacaattatatggtatgcttg

SEQ ID NO: 60971 - DNA, 476 bp, Zea mays
  unsure (1)..(476): unsure at all n locations
actcagcttcgcatggccctccttctagntggaatatttgtaagtcataattcttgcactaagtccctagtgccaatgtgctctgcgataatcctgaattcaaccagcgcagtttgggttggaccctctggtgtcatattacattggggtctggtctctccgaagatcagctctagcgggctctggaccagcttctccctatcatcgtcaaattggatgtagaaccattccgatttccagtctgccggccacttgcttcggtagctgatcacaggaaatnttgtagtcttctggtaagcaaaattgtaacagccaaagttttcatgtaatccatcctttctggcctaggtttggtaatgcagctcgtgcacccggcagatacctttcgcatatggttccacccactggcttcggagagcccaaatataaacactaagcctaacgatagcgttaggagttagctgatgaatgtggat

SEQ ID NO: 60972 - DNA, 486 bp, Zea mays
  unsure (1)..(486): unsure at all n locations
accttagatactagctctggatattattctcttcttcttgatctttgtacgtgtntctcatagttgagtatgactcttgagtctgtctttctcttccagaaactattcaaaattcatgtccaggttctatttgtcctcaactgtgtagtatatattatagtagtgcacatgaaaaagtctcatattctttcggaacatacttcataatcacatatgcactacanattcctcaggtagagactgtccaatgtacttgttgagcttagctatatagtggacgtcattttctgaatgtagtaggcacgcacccccattgccatcatatcttatgttaatgaaatcactcattatagtcctagtataagctctcaatgacccggngaactggacagccactctgctcagagataatctctggctggttcgcactctagtatagaccctggaatcggaactcttctgacgctcttgattatcattaaacac

SEQ ID NO: 60973 - DNA, 410 bp, Zea mays
  unsure (1)..(410): unsure at all n locations
ggtgccgatggaganacaaaatccttgaagtcttggttgtcaaactgcttgccattgtcaactgttagttcggacgacactccgaagcggcaaacaatgttttgccagaagaatttctgggcagtctttgacgttattgtagagacagccctcgcctcgatccatttggtgaagtattcgacggcgacgaaagcgaactttaaagttcccctgagcggtgggcaggggcccgacaatgtccaagccccaacgctggagaggccatgtgtgggcgatcatctttgtatactgcgaggggcttgctgaccgaagagaaaatntctggcaggcttcgcaggaacttgagacccgatttgcggcgcagatcatttgctggccaagtaaaaccctggcggatcactttggcagct

SEQ ID NO: 60974 - DNA, 480 bp, Zea mays
  unsure (1)..(480): unsure at all n locations
ntggctgtcttatgcgggtagcanatataaatctaattcctatatttaacttggtcaaaaagtctaagtgccatgtgtgtgttgaatcaaaataaccccgcaagcctcacaaggctgctgatgcgaggagtttggcacctctagaacttgttcattctgatttgtgcgagatgaatggaattttgaccaaaggtggtaaaagatactttctcacttttatagatgactccactagattttgctatgtgtatctcttaaaaacaaaagatgaagcgttcgattattttaagacttataaagctgaagttgagaaccaacttgagaggaaaataaaacggttaaggtctgatcgaggtggagaatatttctctaatgtgttcgatgagttctgcgtggaacatggtattattcatgagaggacaccgccattctcaccacaatccaatgggattgctgataggaanaaccacactctaacat

SEQ ID NO: 60975 - DNA, 475 bp, Zea mays
  unsure (1)..(475): unsure at all n locations
ntgngaactatgcccgtatccaatctgcctgagccggaactataagagcttgccagatgcccncgttcctgtcgaccacgaccagcacccaacataagacttccctagttatttagccaagaccagagccatgatagttctcatggtagcactgttttcccgggtggtcactccatgttccaattaatatgcaataatcttgtttaaccatcgggttaacaacaataatgtaaacttaccatttggaacattaatatcataaacatgagtgactgcataaagtttaagttgtagcaatagcatagctactaaggtaaagtataatacccaggtttgatcaaggaataagattggaaaggttatctaaataggtaacccatcaagttatgcatatatatccaaaagagtaaactttattaaatgtatcgtttgggatcaaacagagtatgcagagggagaagtccacttgccttgc

SEQ ID NO: 60976 - DNA, 479 bp, Zea mays
  unsure (1)..(479): unsure at all n locations
tctaaagggagaacacgtaatntgtctaacaaatggtactttctaaaaggatagaccttgtgcagcttgtcaagcaggtcaacaggtgggaagctctcatcataccacaaatgtgatgaccacatcaagacctttggagttgcttcatatggacctcttcggacccgtcgcctatctaagcataggaggaagtaagtatggtcttgttatagttgatgatttttcccgcttcacttgggtattctttttgcatgataagtctgaaacccaaaggacnctcaagcgcttcctaatgagagctcaaaatgagtttgagctcaacgtgaagaagataaggagtgancaacgggtccgagttcaagaaccttcaagtgaacgagtaccttgaggatgaaagaatcaagcacgagttctccgctccctacacaccacaaacaaatggtgtggtagagaggaagaataggacacttatagacatg

SEQ ID NO: 60977 - DNA, 365 bp, Zea mays
  unsure (1)..(365): unsure at all n locations
ctaagcttgacaanggacttgcgtatcaacttgttagtcaattctcttcgtgtatctccatatcaaaacatgattgatcagctttgtacgacaaagatagcacaaataaagggtggtaaagctcactggcagatggattgcatcatagtgttaggcacgcgccattgaattcactgggatttggtcgtcagtgttagttgcggcaccctgtacgtcttctcagacaggaggagcagtagcccgacatgcgtgggattagcatggtngtttgatctctgagcagtatgcatngagcaagcaagagttntcatggtgcgacagttgcgcttcgtgtccctagactagagagcagacacgcatgataa

SEQ ID NO: 60978 - DNA, 482 bp, Zea mays
ggagtcactcattgtgcatagaataactgatgctcaaaatgatattctgtgtttgaagcacatacaagagaagataaaggctggagtcgccaattgtttcacggaagaccatcaatgtgtgatatggtttaaaaaccgcatagtagtgccaaagaacgaagaactccgtcagcagattctcggtgaagcacatcttactcgctattctattcatcccggaagcactaagatgtttcaagacttagagcatcattactggtggacaaagatgaagatcgaaattgctcgctatgtggctaagcgcgacacttgcaaacgtgtcaaggccatacacatgcaaactgctggccattacaatctttgccaatcccaacatggaaatgagaagacattagcatggactttattgtgcgattgcgacagaccgcaaaagggatgactctatctgggtatcattgatcgactcacgaagatcgcccact

SEQ ID NO: 60979 - DNA, 473 bp, Zea mays
  unsure (1)..(473): unsure at all n locations
ngccgaccatcgagtacgggttgcatcattgcgacgagtgagcttgttggatggtgttggagtcttcatcttccgaaggttctcataaatacggctaacatgtttttcaagtataatatactgtcacaggaaccttcggccttgagatgaaggtgcgcatggtatgaaaggcgcaatctggtagaaggacgaaccagttccgaagctacggatggagaagcttcggcttaacagtggaaaatgaaaccgacctaaacacttgcacttttctttttctttcttcttcttcttgcagtgcttgcattntttcctgtagtattctttctcgttctgcaacctcacacgcaagtttttgatttaacaactggacctgactntcgagttcaatgttcttttggttggttgcaaccgtggcacgagcttgttcgaggaactttgattccatcacttgacttcttgttggatatcttgat

SEQ ID NO: 60980 - DNA, 505 bp, Zea mays
  unsure (1)..(505): unsure at all n locations
tactgacctaagaaactaagcttatcaccttgcatttgcccctaatttcctagcaactatcttcctattctttctacaaatagcaaaggaagcatttaaagcatgataaattgtagagggaccattcataacttttctggtcacatgaacaatattcttcctaggcacatgattaatagcatttctcctagctacgtttctgccatgcatataggaagaactagaagcaaacatagcataagagtcaaaagcatcattacaactcctataagtatttctaggttgtctcctatcatggtacataaaagcatggttcttttgcacactactagccataggagccttccctttctccttggcggagatgggagtcttatgacttgttaagttcttggcttccctcttgaagccaagaccatccttaattgagggatgtcttccaattgtgtaggcatcccnttgcaatttaacttatcaaattcacttttgctagtcttaagttggg

SEQ ID NO: 60981 - DNA, 476 bp, Zea mays
  unsure (1)..(476): unsure at all n locations
tcacaactgtntctacaaaggttcaagaacttcaggatcaattgtagtatgagaggcaagataaagatgcactttgtgaggaagtccaaaccttacaggctcaggcgcatgcctcacaggagactatggacagtataaagagatcgatggaagataataatgttctcctccaccaactgttaagcttcaatcgaagccaagtgcctccatcttaagtctactacaattttataaatttgaaatatgttcgacgattcatactttgaattgaagttttaggactttctttggattgaaaattacaggatctacagtcatacaattgtatgttatagaattatctcttggatgaatcgtgtgaatgttgaactaattaatgcatcngtntgctattagcatgtgaattcataatattacatgacgatatgaattcatcaagtcttatgattgaaaaatcgtcacatatatactaccac

SEQ ID NO: 60982 - DNA, 455 bp, Zea mays
tatcaccacagtcaatgcaagataaaataacacagctgtttcttgatattgcattcatgaattggtccttacctcaagaattgcatcaatttctacatcatcacaagaactttccttttcagattgccttgatgacgctgaagcagatgctggtctttgctgctgttgcagctgctttgcctgctgcatcttatacccaacccgacttgcctcaggaccattatccttcttcatatagttgctctgcctatcagatttgtcttctctataagcctttctccgaggaggtgagactttcgtgactatctcctcctcctgtgtgtttgctgaattctgaaccaactgtggcttactagtgtatgcaggatggctggacttcaaatcatagctctccctgtcattaccagatgctgcaccattttcttctctccctctattggaataatatggaatcg

SEQ ID NO: 60983 - DNA, 474 bp, Zea mays
tgacaatgaggagatggcgctcgtcatcaagagcttccgccttatcctcaaacaaaggagggggaaagactacaagtcccgctccaagaaggtttgctacaaatgtgtgaagcccggtcattttattgctgaatgtcctatatcaagtgacagtgaccgaggcaacgacaagaaggggagaagaaaggagaaaaagaagtactacaagatgaagggcggcgatgcccatgtttgtcgggagtgggattccgacgaaagctcaagcgactcctccgacgacgaggacgccgccaacatcgccgtcaccaagggacttcttttccccaacgtcggccacaagtgcctcatggcaaaggatggcaaacggaagaaggttaaatctaactcctccactaaatatgagtcttctagtgatgataatggtagtgatgaggaggataacttgcgtgttctctctgtcaatcttaacatgga

SEQ ID NO: 60984 - DNA, 495 bp, Zea mays
  unsure (1)..(495): unsure at all n locations
ttacggaactataaaactcaacttctacacagtangaagatgaaagagtcaaaagaatcagtgtgtatcatggtgagtacaaaatgttatgaagtatatttatatattaatataagtgtcatacaatctgaattatatacaaaacagggtcaaaaggaaacaaacacgctatatatgtttgagataagggttgcaagagcatacacaagggttgtgatgaatataatctangagtctttgaaatatgaaactgcgttcaagataatgcatgatcaagaaggggggtgcaaatgattgggtagtgcaacatactacaagatcgaagaaaattgtgtggggacaacaccaattcaaagtgacagctcatgaagaatccggacagtatacgtgtgaatgcaaacattgggaacatacaggtatggagtacgaaatagtaattatatacatttatatgacaaacatatataaaaattcttatgatcgctatttgtttat

SEQ ID NO: 60985 - DNA, 433 bp, Zea mays
  unsure (1)..(433): unsure at all n locations
agttataaataagctccctatgcgttggacctcgctgggaatgacaaccaaatccgttgaagataggctaacagatggtctattgacaatctatctgtgcgtacagccagctttcagaaatgctgcagttgtgccgcgagaagctagcacggtacagaagtcactgtgcctcgctattacttcgtcaagcgcctcaacttcgcctttaatgtgttcgaaggtgcttgatatgttttcgaccgaaagggtaaacttttcagcgctggctccaactgagttgaaaaccttcttcaatcgttgaacgcagtggctgccaaaacccagacacatgttccgaagctctttcacagaatggctcagttacgtattctctacagcttttagttcgtatattgtctgcaagttttatctttcttgtntgaagctctctgat

SEQ ID NO: 60986 - DNA, 477 bp, Zea mays
cgctttactccataccatatattgaattatgctaatcacaatttataattggtctttattccaaatggctagggaatgttaaaataaaatcatattgtatcttaagcatgatccttcattcgacttgatggagtgaccttggaaatggttctattaagtactaagttcaaccctcaattgctaaataatattaggtggtcgacttttttgttccaacaaccaagtccaatttttttaaagatgtttctaattcttacaatttgattattattttagctattgttgtataacaaatttcccatgaatatattagatttaagtctttgctaatatatttatgaaacatatatgaatactatatatttaagtctgtactaatatatctatgaaaaatatatgtacgaaaattaactttaattcattcttatttacaccagaattaatatctaaacttggttcattacccattttatttat

SEQ ID NO: 60987 - DNA, 445 bp, Zea mays
  unsure (1)..(445): unsure at all n locations
tgtgaagattcttcatcccaacatgtgctagtcggcgatgccagagccagcccatgttagtcttagcaattaagcatgtgtcgagttcagctctatcaaaatctactaagtatagctgaccctctaacacacccttaaatgctattgaatcatcacttcttctaaagacaatgacacctacatcagtaaagagacagttgtagcccattttgcataattgagatacagaaagcaaatggtatctaaagaatctatangaaaaacatgnaaacagaatgtcaggagaatagctatttaccaagaccttgaccaaacttgattccatcccgaatgtgatactcgtggagatcttggtttctcgaggagagacatctttctccctgctatggtgggcaccgatcagatccactgaccccgatgctaacctacaacagtagtctgatta

SEQ ID NO: 60988 - DNA, 456 bp, Zea mays
  unsure (1)..(456): unsure at all n locations
atgttcattttattatatacaggatttgtagcgcatgccaggcaggatagcaagttggtgctcatcatccacataagaacataatgatgaccgacagccactggagctcctacacatagatctattcggcccgattgcttacataagcatnggcgggagtaagtactgtctagttattgtggataattattctcgcttcacttgngtgttctttttacaggaaaaatctcaaacccaagagaccttaaagggattcttgagacgggctcaaaatgagttcggcttaaggatcaagaaaataagaagcgacaacgggacggagttcaagaattctcanattgaaggcttccttgaggaggagggcatcaagcatgagttctcttctccctacacgctacaacaaaatggtgtagtggagaggaagaatagaactctattagacatggcaaggaccat

SEQ ID NO: 60989 - DNA, 406 bp, Zea mays
tttaatttctactacatgtcatcctcaaactgatggtcaaactgtagtttttaatagaactttgtctactatgttaagggcggttctaaagaagaatattaatatgtgggaggactgtctgcctcatgttgaatttgcttataatcgatcattgcattctactacaaagatgtgcccatttcagaatgtatatggtttgttgcctcctgctcctattgatttaatgcctttgccatcttctgaaaaactaaattttgatgctactaagcgtgctgaattaatgttaaaactgcatgaaactactaaagaaaacatatagcgcttgaatgctagatataaatttgctagtgataaaggtagaaaggaaataaatattgaacctgcacatttaacttggttgcatttg

SEQ ID NO: 60990 - DNA, 486 bp, Zea mays
  unsure (1)..(486): unsure at all n locations
tctatagggagagcacattntaggactaaccaatgttcattntgagatttacagggtctgtagcgcatgtcaagcaggaaagcaagttggaacccaccatccacacaagaacatcatgacgaccgacaggccgcttgagctactccacatggatntattcggcccagtcgcttacataagcatcggcaggagtaagtattgtcttgtaatagtggatgactattcttgcttcacttggatgttctttntataggaaaaatctcanacccaagagactntgaagggattcttgagacgagctcaaaatgagttcggattgagaatcaaaaagataagaagcaacaatgggacgaagttcaagaactcacaagtagaaggctttcttgaggaagagggcatcaagcatgagttctcttctccctacacacctcaccaaaatggtgtaatggagaggaagaatagaactctacttgacatggcgaggac

SEQ ID NO: 60991 - DNA, 315 bp, Zea mays
  unsure (1)..(315): unsure at all n locations
tggtcattntattgctaactgtcccgacaatgatagtgatcaggatcaagggaacacgagggagaagaagaataactattagaaggcaaagggcgaggctcatcttggcaaggagtgggattcggattgctcctcgtccgactccgacaatgaaggactcgccgncaccgccttcaacaagtcatccctcttccccaacgaacgtcacacatgccttatggcaagggagaagaaagtatgtactcgagactctacttatgcttcttcaagtgaggatgaatctagtgatgaggatgaaatagattattcatgtct

SEQ ID NO: 60992 - DNA, 466 bp, Zea mays
  unsure (1)..(466): unsure at all n locations
cctatanaaactcagctcggagcatcactcggaagccttatggctggagtatgttctttcttctttgcttccattgacttaaatgcaatgggttgcacctcgagtgtggaagtggcaccttgctatcaagaccactatgcgcacgaagtctttgaccataattacaaagctcacaaactagccagtcacctactcaagagacatatgcttatacctaacattctcgtgaattagatgcacttgagtggcgttacaaaaaaacaagagatcttagaataaccttgccattacatggtcatacaacttggagctccccaagatgcggactcgattcatcatggtcttgagccgagtgtacatggcttgtggctcttctccttttctgaggacgaaccgacatagctctccctcaactgatatctgctttgcgaccttggttacttcatccccttgatgtgccatcttg

SEQ ID NO: 60993 - DNA, 448 bp, Zea mays
  unsure (1)..(448): unsure at all n locations
cggacctatnatactcagcttctctagtgtcngctttatcctcagactgatggtctgtctgagctaacgatccaaaccttggaagatatgttgtgtgcttgtgttctgtcttggaagggtagctgggaagatcatcttgcattggcagagtttgcttataacaacaactactgtacgaaacgggtgatgcctaagagggggggtgaattangaacttctaaacttttactaaactaggccacaattaaatccctagagcaaaacctatgcaagtaatcaaactagaatgtgcaaactangttttgtctaagtgttgctatctctaccgcaatagctaagtttcaatctacactagatangtatgaatacaagattgaaacttatatgcttaatgtaaatgcggaaacttacagagaaaagtagagaagcatactctcgtggatgatgc

SEQ ID NO: 60994 - DNA, 473 bp, Zea mays
ctcagctcgaggcgtcgattggttgtcgactcggtgtagactcctccttcttctcctccgttgctttgaatgcaacgggttgagcttcggatgtggtggcatcatcaagctcgttgatcttcctcgagccttcgatcatgcattcaaaactcacaaaattcccgataacttcctcgggggtcattttagtatatctaggattaccacggattaattgaacttgagtagggttaacgaaaataagagatcttagaataaccttaaccatctcgtggtcatcccattttacgctcccgaggttgcgcacttgattcaccaaggtcttgagccggttgtacatgtgttgtggctcctcccctttgcgaagccggaaccgaccgagctccccctcgatcgtttcccgcttggtgatcttggtgagctcgtctccctcgtgcgcggttttgagcacatcccaaatctccttggcactc

SEQ ID NO: 60995 - DNA, 425 bp, Zea mays
  unsure (1)..(425): unsure at all n locations
tacgtcccatcctggggcagtgaganaaccctctctcacggtgtgttgacggcacgcccgtgttccgttcctcgaacggctcgtgcacttgcaacggccgccccgcgaaccgcacgccccgtcgcattaacttcgcggcgggaaaggcggcgcctctggcaggggaagcgagcaacgcttcgccttcgccataatgaccgcgtcaaaaaaggtacgccacgtcattcgatttcgtatccttttcctttttcctctntctctctcttacaacagggactgggaaagggggataccccgaanaggatccttctccgtgaaggaaacaggctccgagcctccctacagatcaagggttcgaaggctggcccctcggaggggttcgacagccgcctcagagcgcgtgggctccacacncactactggtc

SEQ ID NO: 60996 - DNA, 441 bp, Zea mays
  unsure (1)..(441): unsure at all n locations
ntagtgattagagagagtgattnttgtgttcatttgagctcttgcgcttggattgcttctttctttctcattctttcttgagattcattcacttataaccaaagcaagagacaccaattgtgtggtggtccttgtggggactttgtgtcccgtgtgattgagaagaagaagctcactcggtccgagggaccgtttgagagagggaaagggttgaaagagacccggtctttgtgaccacctcaacggggagtaggtttgcaagaatcgaacctcggtaaaacaaatccttgtgtttcacttctctattcgcttgcgatttgtttttacgccctctctcggactcgtttatatttctaacgctaacccggcttgtagttgtgattaatnnttgtaatttcagtttcgccctatttcaccccccctctaagcgactttcacata

SEQ ID NO: 60997 - DNA, 408 bp, Zea mays
  unsure (1)..(408): unsure at all n locations
aattccacacggaccatacgtgttaccttaagcttaccactggccgtgaaccattggatgtaataagggtgtggatgtggaaaccttttcaacccaaacttctctaccatggtggagcttgctaaagtggtgcagctttcttcatcaattataatacgacnagatcgttccaaaactacacatttagtttggaacaaaatgtgtcgctggttttgttcagctttaataatttgggcactcaagacacgtcttacaacgaggctctcatagtgttcaacatgttcaagcccaatatgctcttcatcatcattcttcttttcaacatcttgggcagcaagcattgcatatgtatcattatctaaatcgctggctgatgagtactcaccattttctcttataattaacaca

SEQ ID NO: 60998 - DNA, 472 bp, Zea mays
tccgcctgcgcttcaaggcaagatgtttgccctttctttcatatcttgccctgctgtcagaatggtagccaaagtttgctgatcaacttcgtcttcaggcatggcagccttcgtctcactaagtatttagggctcagcttcggcttcggcttgcccagcttcggcttctgctttcccagctttggcttctgcttggtgcttggcagcttcagcaattttctttgtaggagcaaggctcaaggcctttgtagtctccagcacaacatccagcacgttggccatcctccttctcttgggagttgccgcaaaagtttattgtaccttcggcagttttgcctctttcggagggctcagaatgtctggtattttcattatttcttcaacccttggctcttcaggcttatcatccttagcttcgaccgtaggcgtcttcgatattacagatggttcttcaacgctctgtgcaattgga

SEQ ID NO: 60999 - DNA, 397 bp, Zea mays
  unsure (1)..(397): unsure at all n locations
nagcttaaaaatataaaattacatatgttgattactaactagttccaaccaagagcaagagttgtggcaagttcatcccgaaaagtatccatgcaatgttccccgacttccatagtagatgtatctgatgcgttagccggaacggcaaatcgtttataccgattcgggattgtaggcataaaattaggatcacgatcaaaccgagcaaagtcggcatcgtcactgttatgctcgcgaatgaaatngtggaggaccatacaagccacaactatcactttttgctttcacatggngtatttcttanatccggatagaaattcccacttcattttcagtaacccaaaggatctctcgatcacattgcgaatagatgaatgtttgcgattgatacttttct

SEQ ID NO: 61000 - DNA, 380 bp, Zea mays
tacagccacagtgaatgtttggataagctacatattgatgccctgctacgccacctaagctatggtcaatggggattagctctctctgtgcataatgggaatcacagctagtgggtgaagtgcacaacctctgctgagtgtttgaatactgatatatccgccatgctcgtggttatgaacggccaaaggagctccattgattaattgtacttgattaaatacattttcgtttacaggtgacaatgagactgatgagtgtgtgatgactatggtgcatggaatggtattattacttctggaaaggtacatcggctaataatagagtaacgttaaccctgcttttattagtaataataatctgccactaaaacactgctgat

SEQ ID NO: 61001 - DNA, 296 bp, Zea mays
  unsure (1)..(296): unsure at all n locations
tcaccatataactagcttttgatgaagcaaatgatgatatctgcttggcaagaacgaaacaagaccggtatccatctgggaccagaccttaacaacagattatactgctctcatacgaagaaatcatcaggagtagagaggatacaataggtctctacaatatcttcatatttctatcacaaattaccaacaccaacaacttagtggtcaagaattatggatctttcggtgccaagggccagtgacaaattaatgcccaatttcgcttcaagctctatggtgatgtgggatntcat

SEQ ID NO: 61002 - DNA, 248 bp, Zea mays
  unsure (1)..(248): unsure at all n locations
taatgcattcgaccatctgcangatttttcacaacagcctccattgcaagagctggtcgcaagatatctgcatgataatgaatggaaatatcctcatatctcttcgcggtatgtacttaaattatggtcgcaaaatggagaaatgacgcattttgattattgaacaattggaatggatacttagtatcaaatacaatggagaacaaatgtttctgtgcatgagcggcgttcactatctcaactgtctg

SEQ ID NO: 61003 - DNA, 377 bp, Zea mays
  unsure (1)..(377): unsure at all n locations
ccttatgactttcganaggactgagcattgggtccacgaggatactgatcgtgatggtgtccacaatggcgacacaacgttccggggatcctgctatggtagagttcaaccgggcgggtcgatgaacatctcgacacgtaagagaactcaaaacactctcaagctcgaccggctttacctcatagagctctatccatggcgagaagtcttgcggcgatgcatatgaccgatttgggggtttacgaatttctggctacaatggatggcagggtggtggtggggttgtgttgcgttcatgacacggggcagaggaaggggaacactcaacttatagaagccagccttagntgctccaaatttgaacgaaggtacgatca

SEQ ID NO: 61004 - DNA, 371 bp, Zea mays
ttcttctaaacaacaaatagtcgttctaaggaacgcaaagtaagtttgctgaagtcacaaaaagccgttcctaatggagcgcaatgtaatgatttctgcttcaaagtcgttccatagggaatgcagagcctacatcgaaaagtcaatgctgataccgcctaaatttaatgcgaatcgtgaaaagtcaacgcgaataccgctgaaagtaaatgcgaataactcctaaggaggcttacatgataataatcctattccgctgaatatatgcgaaaatctctatggggctattcaagagtaacctgatcaaaaatatggttttatccaggtgtgcggttttctgataatccatttcatactactatacatatttc

SEQ ID NO: 61005 - DNA, 453 bp, Zea mays
  unsure (1)..(453): unsure at all n locations
agctagaaagntcaaagtctaagtctaaggtctgtctgttctgttccctccctttatagcttgaaggcgggcacgtacaaaggtgctgggccccgacatgtgggcccatgggcaaaacggagggaactcatatcgaactatatcatgccatttgctgaaacaagatctcctagtgtcataatgcccgtaacgtatacagtattgatatcttcggcttgttcctccggaacgcgcgagttatgatgagaccgtccatgttgtaacacgggcacactaccgaccatggaatggacaggcacgccgtctacaagatggtttggtcgcctcccgtcagaggaatggacagggcgcatttaatactgaggtatcacagcgcctgtcactgaatgacagggcttattaatgcgaggcggccatcactcgccatgaatagacggcggtgtgccaaattat

SEQ ID NO: 61006 - DNA, 401 bp, Zea mays
cgcggtgttctaagcagtatatacaagtgtctcatccttactaccgggccttagtttaccgataccatatcttctattgtgatccccttggctacaagttagcttgttcttgtaccacacctgctcatatgcttgttgggaagaaccacttgggtcctcaacattctgggtggacgtggatcttatgcatacctcattcctcggaagatgttgattcctcttgcttgtcacacccaatcgaaactctgaatgggttttacctgttggtcaattaatacctaagagtatgttacaaaatgagcgacacaaatcagtggtgtgcacctatggtacttttgcgtatgtcggagatatcctattcgatgctcgtaaaattctattctcatcgtgcatcttgttat

SEQ ID NO: 61007 - DNA, 479 bp, Zea mays
  unsure (1)..(479): unsure at all n locations
agcttcaatcttgggcaccctatcttgcatagggcccataacttttttaattaaggactcggcaacccaactttgtctagatctactcttgtttggtggacctaaatttttttcttttaccttcccatttgcaacttttctaagcacatagtgagcgttgaatgcaaaaggtcttaagtgctttggcaagggagttggtggtgtggctttgcaattgtgagcaaagtgtcattctccacactcataacacttgatgggcttaggattntgcttagccttgttttggtttgttgctttcttttgcacaattgaattgtatccaataccactcttgttatttttcatgactatgttcatgaggagctatattttgaggtattggcccttgttgaatttttgcacactagtggcaaggtgatctntctcaagactcagcttcttgatctcttccttaagcctctcattgccatcaccaactc

SEQ ID NO: 61008 - DNA, 460 bp, Zea mays
catttatgactaaccaatgttcactttgagaaagacaggatttgtatcgcatgccaagcatgaatacaagttggagcccatcatccacacaataacatcatgacgaccgacaggccgcttgagctactccacatggatctattctgcccgattgcttacataagcatcggcgggagtaagtattgtcttgtaatagtggatgattattctcgcttcacttgggtgttctttttgcacgaaaatctcatacccaagataccttatagggattcttgagacgagctcaaaacgagttctgcttaatgatcaagataattagaagcgacaacgggacggagttcaagaactctcaaatctaaggcttccttgaggatgatggcatcaagcatgagttctcttctccctacacgccacaacataatggtgtagtggagaagaagaatcgaactctactggacat

SEQ ID NO: 61009 - DNA, 431 bp, Zea mays
  unsure (1)..(431): unsure at all n locations
agcttgagcaagctcacggcttcaccaggattctacctgggggcttgaatcgaacggagggggactggagaggggttggccacngtggtggctctcgggcggcactggcgggtcgcggggaggtcgccggaggcaatggctggctcgggcgagtccggcgaggtacggaggaagcaatggggaaggcaaccgagcgctatggcgggttttataagcacggacgcggtcggggcgccggctcaaccgtttggcgcgacgcgggcacgcggtgcgcgcgcgcgggcgtgctctggcgagctcagagcgtgtcgaacacgtggcgcgttgcttctgcccgtgttctttgctctgctgagcggncangcgtacgaatctttgccttaccgcctgtggagatctcttccctgcacctagagctacctagttcatgt

SEQ ID NO: 61010 - DNA, 434 bp, Zea mays
gatgcttctccgctctgcctcttggagctggtggcctgtaataaccttattgtgcacctgatgattgggagctatgttgttgtccttgggtatgattccacctgtcgtcgcttgagctgggattatggatggagcttacatgcctatggtggagtcttactccgaagccactggtcatctcagaatatctgtatgcttcttaccttcttttccgaaagtcattgtcggctctgatgtactcatccattttctatagaagcttctctaaggtgtgcggtggttccttacaatataattgtgtcgttggtcctaatctgagccccttgatcatggcttcaatgacaatctcattggacactatatgagcctgagctctcattcacaaataacctattgacgtacgcctgcaggtacttctcatggtactgcgtgca

SEQ ID NO: 61011 - DNA, 440 bp, Zea mays
  unsure (1)..(440): unsure at all n locations
agctngangaaagagaaaccgcaccaatggtcatactccatgagaaggatgttccanaagcaataaataaagaaatcaacatgaacaaggaaaaaggtaaaaattcaactaatcatgttgtttgcactgatcatctctccatgtcatttaagtacaaaaagggaaaagaaaaaaggaggtgcttcaagtgcaagaagttaggccacctcatcgcgtcttgtccgtaccaagacaagaatgaagggacaaggagttgttttggatgcaacaatcaggaccacacgatcacttcatgtccggtcatgaagaatcaagggtgtgcatcctccaaggtgaccctcaccaangaaaatgacaaacagcaagcgtcatgtcaggttgagcgacgcttctgctacaagtgtggtgagcanggtcattctatcaagtattgtataaag

SEQ ID NO: 61012 - DNA, 468 bp, Zea mays
  unsure (1)..(468): unsure at all n locations
cggacacttaaatactcagcttccacaattctatttataatggtgtgagaggtcttgagctcctcaaaatacacttggaggttgtatacaattccttcaaggtcttaaacttttctttttctttgtgcatgtagtcatcggcctcacataatattctaacaagatcatcatatgaatatccatcatcatcaacatcatcatcatgatctacattatttaaaccggttatgaattttaccttatcatctccctttgccatgagacaatgagggggatgagaaagtgatagggcttccttgatggcaattccgacattaagactggatgatgtgcatcatcatcatccgagctatcatctgaatcccattcaactaggtaggctntgccatctttcttggtattggataatttcttcttcttcttatcatctacatctttgcccttcttcctcttgttatggcaattcat

SEQ ID NO: 61013 - DNA, 439 bp, Zea mays
  unsure (1)..(439): unsure at all n locations
agctngtgggcatgttatatggcanagtatctaatgcacatagctaagaaatgcacatgtgcacaagtaacatccagatcgtacatattgaatcgaacggtacctgactattttgcaaaaaacacctcccgcactccacgatctttgtttctttaccttgtcttccaacagagaacaagcttctcacgtaagcttccttgtctcataagcttccaggccacgagctgttcgtattctcccgatggtggatgctcctgcgatgcagctcgatggccagctgccggcgtcaccgtgtgccaacgccaagactccaactccgcactccgacacctcggctacagctccacgtcccgacacctcgactacaggtctgtgtcccgacgcctcgaccacgatggaccatagctcgccgccgcaccccaatgtacagacaccatcg

SEQ ID NO: 61014 - DNA, 482 bp, Zea mays
actcaagcttgtggcttcattaacttgtactcactatagtctaacataatttcattttgaaggttgatcagtattatagcgagtattggatagaactcttgtaagtaatgactgcccgaagtttcactaatttggaagcattgttatgttaaactattggaaaaccttggaaaattatggtagtcacaccggtggtgcatctttatttagtggaacttatctgtatatgtaaatatattttcatgtgttgtgtcattctgatggtgtgatagtaatagctgtacccagttgcaatcctgtgcacttgtgccaattcatgaagatgctagtctcctgtttgatccttgaatgatagcacaatgcacaatcctgttggttgacaattgacattgacttgtcccatttcactataaattgttctcattgacttggccattttactataattgtactccctccgtccaaatatgtagactcttttt

SEQ ID NO: 61015 - DNA, 447 bp, Zea mays
  unsure (1)..(447): unsure at all n locations
agcttatgactgtacagcggtgataattatatcataaacttgagagacaacaagcataacgcgaagttgntgacagcataaaattgtacagtcatgcttaacacgaggttgttgacatcataaaattgtacaggaaattggcagaattaaatgcatgaaacacacatgaagatcaataacatggggtacaatattccagtttagacatcgctgatccccaaggtgtcattgacataacataagaaacgtctaccgtctttgcccatattatacacacatgactcatctgaagtttatggaaccattgtatacacaatatattacatatctaaactaaactgcatccattaggccttgaaactttggatgtcttcaagcagcgataatgctttgttcttcggatggaatgtgatataatgcagcgcaagagaccgtatctcactagtg

SEQ ID NO: 61016 - DNA, 261 bp, Zea mays
  unsure (1)..(261): unsure at all n locations
attcatggatggcgaacaaataccacacgtatgtgcgcctagaggacatcttccagatctgcgccatctggctttgacaaccacgtccattctccaaagaagtaccttantgacacaacatggaatcaatgatttgcaatgcacagggtgcacatatctgaagatgcggtgagcctgggcacttatttacattatcgcaagaactttcgtgagtgtacgtagtgcgcgggcctcatccaaccaccgcaaggtcgggttcac

SEQ ID NO: 61017 - DNA, 434 bp, Zea mays
  unsure (1)..(434): unsure at all n locations
agcttataaaggttcttcacccaacatgtgctatatggcggtgccagagccaacccatattagtcttagcaattaagcatgcatctagataggcattctcttttgagaaatcaactaaatagagcttgtcgtctaatacacccttaaaagctaatgaaccatcacttctaaagacagatacatcgatatttgtaaataagcaattataacccatatgacttaattggcttacagacaacaaattgtacccgagcgattgtgatatcctggcccctgggatgggatatcctggcccaaggcttaatagaattaatagagtattcataccaataaggtgcatcttctttntcggaagtctatatcgaaagaacctncaagttaagcgtgcttggctgggagaaatttgggatgagtgaccgaccagaaagtttctc

SEQ ID NO: 61018 - DNA, 467 bp, Zea mays
  unsure (1)..(467): unsure at all n locations
ctattatcacggttatcttgagaatgttgagcatgacactttcccttcaaacgagttaagctccttcttatcattccgacttcttccttaagctctgtattttcttgtgtgatagaaatatcactaattcctgaaatttctatctcaatggaagattggctttcttgagagcaacatttgttagcacatgataatatagtttctacttgagtacatgtgcatatgtgaggttggtatgatttcaaattagttaacacaacctcatgagccatttctaacatgatatgtgaatccatcaatttaatatgagagcacacaagcatatcatgtttttcttgtaaagctagaatttcaatatttagctgttctattgtgttcttgagcatatcatttctactttctaattgagcaatatatgatgaatgattaacagcntgtaattgctcaatngaaatgtcttcatacct

SEQ ID NO: 61019 - DNA, 427 bp, Zea mays
  unsure (1)..(427): unsure at all n locations
nagcttgtgtttcggattacataattgatccaggcctcgccctggcacacgtggtaataaacacatggcagttcacttcgagacgacatcgccaccancacccacctcgagacacaaccgaaacacaccggtagtcctctcctcttttttttcccccgcctttttgtcaggctaacgtgtgccactccaggggacatggatgctatcttcggcggtatggacagtagccatttgcagggccgacgcttaactcgcatcgcctcctctctgaacccaacttgactgcctcgagtgcatgccagttcgcccttccacaaactctggtgggagatctctgctcagatctggggatgcgtgggctactctgccctctntctcgtcaaacatgccnccgaaccctgcttncangtccctgatatcaactgcc

SEQ ID NO: 61020 - DNA, 335 bp, Zea mays
cacaataagttaagtgacgcctgagacttgtttagtggcaaagtccgacaatggttggctttggcatcaccggctatcccatgtcggtatgagggaattggccaaacttcaaaaggataatcacatcattggactaacaaatgttgtatttgagaaagatagggtttgtggcgcatgccaagcatgaaagcaacatggagtcccacatcaatcaaagaatgtggtcacaacaaagatgccattggagcttcttcacatggacctcttcggacctgtggcctacattagcattggtggtagtaagtatgggttaattattgtcgatgatatttctc

SEQ ID NO: 61021 - DNA, 374 bp, Zea mays
  unsure (1)..(374): unsure at all n locations
agcttcgatattatagcgtatccgaaggtgaatggtctaaccgacttanagatggaatgactttntagtccataagggtctgagtcataattgtaatcttttgtaaggggtatgattgtaatttcttacaggctgtgtcctgtgcctataaatagtgaacagtactcctctactgttcacggaatcctgtaactgctaacgcattactctggaattattgntctttgtcaaggcaaaggtataaatgtaaccaaacaccatgttttaatatctcaatctatgttataaaatgagcaaatgatgttacttattcttgatattctttaatgttntatactntatatttcatttcgcattaatttatttctgattac

SEQ ID NO: 61022 - DNA, 420 bp, Zea mays
  unsure (1)..(420): unsure at all n locations
ttgcttgaccaccgacagcatcctcacccttatcacattcaatggtttaacaacagcggtaagttcaatgtaacaaatacagcaagggtgcatttttctattggctcttaccatgactntgctgatttcgatgtggtgagtatggatgcttgctctcttttactgtgacatccttgggagtttgataatgatgctattcacaatgtagatctaataaatatactttcatgcataagggaaagaaaattgtgttgcttcctttgactcccacttaaatggtccactntgaacatgagaaaaagactaatgctaagcanaaagatgttgtgaactctgaaaatcagcaacctatgtagttaaaaactcctactttgctagccactaaatatgatcttgatgagttacatgcactctgtggac

SEQ ID NO: 61023 - DNA, 390 bp, Zea mays
  unsure (1)..(390): unsure at all n locations
atggacgtgaagagtgccttcctcatctgacctattacggaagaggtctatgttgagcaacctcccggctttgaagatagtgagtatcctaacaatgtttacaaactctctaaggcgctttatgggctcaagcaagccccaagagcatgatatgaatgcctaagagattttcttatcactaatggcttcaaagtcagaaaagccgatcctactttattcactaaaaccatngagaatgatttgtttgtatggccaaattatgttgatgatatcatatttgggtctactaacaaatctatttgtgaagagttagtaggatcatgattcaaaaattcgagatgtctatgatgggggagtngaagtatttcttaggaattcaagtcaagcaac

SEQ ID NO: 61024 - DNA, 367 bp, Zea mays
ctatccacacatgtgctaagcggcgatgcctctgccagcccatgctagtcttagctattaagcatgcatctagaccggcctcttcttttgcaaaatcaactaaataaagtttgccgtctaatacacccttaaaagctagtgaaccatcacttcttctaaagacagacacatctacatttgtaaatagacagttatatcccatattgcataattgactaaccgatagcatattatatccaagagactctactaaaaacacattagagatagagtgctcattagaaattgcaattttacctaacccttttaccttggcttgattcccatcaccgaatataattgaatcttgggaatccttattcttgac

SEQ ID NO: 61025 - DNA, 391 bp, Zea mays
tccttaagcaccgcggctgcagcttgggccatggataactaaatcctttatatttggctcgtcaactgcttgccgttgtcaactgttagctcggacggtactccgaatcggacaacaatgttttgccagatgaatttctgggcagtctttgatgttatttgagacatagccctcgcttcgatccatttggtgaagtattctacggctacgaatgcgaacttaaagttcctctgagcggggtgcagtgtccctataatgtccatgcctcatcgcttgagatgccatgtatgggcaatcagcctatgttactgcgaggggttgcctgaccgatgagaaaacttctggcaggcttcgcaagaccttgaaacccgatttgcggcgcagatcattg

SEQ ID NO: 61026 - DNA, 406 bp, Zea mays
  unsure (1)..(406): unsure at all n locations
tgtggacccgtagctatcaagtggaattgccacctcacatgtctgcagttcataatgtgttccatgtatctcagctgcggaaatgcgttcgtctacccactgaagtactcccggaaccagacatngagatagaaccagacttgtcctatcaagagtaccccgtcaaggtgttagatcaaaaggagagatcaactctggcaaggtcggtcaaaatgtataatgttcagtggagtcaccattcagcagaagatactacatgggagactgaggattntctacgctctcgctttcccgactttctacccaaaggagtctgtatgtaaccncagaaccccacccccacctgtcactttgatccaattatgaaaaaaacgtagataacaagggtagtctatgatgtggatta

SEQ ID NO: 61027 - DNA, 485 bp, Zea mays
  unsure (1)..(485): unsure at all n locations
agctntatgggctcatagaatatctaaacatagtgcaactaaagtatctccctttgagcttgtctatgggcaggaagcagtattgcctatggaaataagtttgaatgctgtcaggttcgccagacaaaacgatctaactgtcactgattatttgttgggaccatgcttcgtcgccgaaggtccagcaagaagaaacagcttcggctgaagctgtccgcatgtgatgaccgaatgttcctcttcatgaagcttcngaactacgaatcgacttataagtagaatgaccttttagtccatanatgtttgagtcgttgttgtaaacttttatgaggggcatgattgtaattcctcacaggctgtgttctgtgcctataaatagtgaacagtactcctttactgttcacgcattcttgtaattgcaattgcatcactcangaatcaatctttgccaaggcatangtatatatgtatctaatattcgaata

SEQ ID NO: 61028 - DNA, 485 bp, Zea mays
  unsure (1)..(485): unsure at all n locations
acctagtcagaactaaatatgaggtagaggagatggcttgagctgattaaggactatgaattggaaattcactatcacccacgcaaggccaatgtggtggcagatgcactaagtcgcaaggcttcctgccattgtcttacgatgaatacttctgacatcacattatgccaagaaaatggagaaattaaacctgggaatgattcaacatgaaacattaaatcaattgaagcttgagtcggttcttctgcaaagaataattaatgcacaaagaagtgatgagggtatgaaacacattcatgagaaaataaaggctggtaaagcaaactgtttcagaaaggatgatcaaggcattgtatggtttaacaaccgcatagttgtgcctaagaatgatgaagtccgctagtaaattttggatgaagctcatcttatccactaatccattcattccagaagcactangatgtatcatgatctaaagcaacatt

SEQ ID NO: 61029 - DNA, 491 bp, Zea mays
  unsure (1)..(491): unsure at all n locations
ggatcttaagtcacctgangcatgcagcttcaaaggtgacatcttcagactggcttgatagctattattgtatgagaattcagcataaggtagactcttatcccaacttcctccatgctgaagggcacaagctctcaacatgtcctccaatacttgattagccccttnttgtttgtccatcagtctgaaggtgataggttgtactaaaattcaacttcgtatccatgttctcatgaaaacttttccaagatctggaggtaaattgtgatcctctatccgaaacgatcttcttaggtactttgtgtagagacataatccaaaccacatatactctaccaattgagataccttataagttgtcttgaccggaatgaaatgagccactttggtcagtctatccacaataacccatatagaatcgtatccggcagacgtgcggngtaatccaacaatgaagtccatgccaatctcttctcacttttcactcggta

SEQ ID NO: 61030 - DNA, 366 bp, Zea mays
  unsure (1)..(366): unsure at all n locations
gacaacacgcaatgggagtggagagatggcgagagtagcgtgtaccctccgtggcatgatgctggacggtggtgtatctctgctctcggatggcgtgaacctgatctggtcttaaaaaccccagtggcgagtngacatatgcaaaggttaagtgctacatatgtcgtgtgattggagatccccatctgggtattaatcaattcggatcgccgttacttctcgaacatgaagacttggtcactgccctgcaatctaagtcatggatggaatcttaatgagcanaaatcatgttggattgattaatgtgatggtgaaattacactatatgcaaacaaggtctanttatacttaatctagcattataat

SEQ ID NO: 61031 - DNA, 439 bp, Zea mays
  unsure (1)..(439): unsure at all n locations
agcttcgaccaagtgtgcgaatggcgaatgtgcgagccaaagccgctagcttcggcacgggtgagacttcagatgcaaagataccaagttcaagacttgtgcagtaagaaaggagaaaactcatcaatgtccctgcatcatttgtaaaatatgtgtgtagactttatgagcatgtttgtaattttccacgaagatgtttatcttccctataaatagatgaacagtgacatgcataaattaaccttttgaaggccatagcttcgtatcgcttagtcttcgaagaaccttcgtgccaccttgtgttaaggagccgaaggtatgttngtaaactcatttgatatgaaggaagatggaatanaaatgtcaaggcatatgagatgagtnnttaactcaatcactcgtgggctttcatttatatggtctaatacatcccttttaa

SEQ ID NO: 61032 - DNA, 394 bp, Zea mays
acatgtgctaagcggcgatgccacagccagcccatgctagtgttagctattaagcatgcatctagaccgacttcttcttttgcaaaatcaactaaataaagtttgacgtctaatacacccttaaaagctagtgaaccatcacttcttctaaagacagacacatctacatttgtaaatagacagttatatcccatattgcataattgactaaccgatagcaaattatatccaagagactctactaaaaacacattagagatagagtgctcattagaaattgcaattgtacctaacccttttaccttgccttgattcccatcaccgaatataattgaatcttgggaatccttattcttgacgtaagaggtgaacatcttcttctcctctgtcatat

SEQ ID NO: 61033 - DNA, 378 bp, Zea mays
  unsure (1)..(378): unsure at all n locations
agcttagcaagtgtgagttctggatcagcgaatttctattcttgggtcatattataaaccgagatggactagctgtggatccaaagaaggtagcagcaattctggactggaaagcaccaaaagatgtccgaggaatcaagagtttcattggaatggtcgattattatcggcgtttcattgaaggtttctccaagattgccagaccaatgacagccttgctagcanagaagggtgagttcaagtggactccagcgtgccaagaatcatttgagatgttgaagcagatgttgacaacagcaccagtggtagttctgccagatgttcacaacccattctcagtatattgtgatgttcatacaccgactgngatgtgtgtaa

SEQ ID NO: 61034 - DNA, 403 bp, Zea mays
atgaatgtggacatgtatcaccgatatgttacactatattccaagtgatcccacaggcatgcactgtcatgcacggcagccatcaccttccgttgaagaacacgatcgatacccaaccacaccttgctcttgtgtcgaatcactccatttgtcaatgtaaaagaatccaaccctccaccgtgggaaagagagtgatattcttttggactcttcgatcaatatcgtatactttggtcacttataaaaaccacttgggactgccgacgagttgccaggatgttaactgaaatattgagcatctttggcaaaatcaatggtcgctgagatgggccaccactcggttctgctgtatgaaatggaccgaaccattggctaagaattgggttgagataaagcgctaagg

SEQ ID NO: 61035 - DNA, 480 bp, Zea mays
  unsure (1)..(480): unsure at all n locations
agcttcggcattggttaatattntggcagcaaatcagagcaatagcaatgaatgctgtggtaacttcacacctacccgtctatttatatagtgccgcaagtgggaaggtgaatcgtcaaggtcttcggcaccggacaaacagccacccgcactcactgaacggtgggccatagggtccgagaaggtgaatcgccagggcgcgcataactgctgcaagatggggccacctcacgcgcgcattagtttaatcatttctcgccaacgagctcatggaaggtgtttttcggatcttcggcatcccgaagcctataatactttntcacggatctagctcgttacgaataacgatctagcaccgcgaaggggctactgttgtgggtatgcttcgtagccgaagatcctaaagaaagaaaacaccttcggcagatcctctcataagcagcgccgaagctatcgcctatanagcttccgcacagtgac

SEQ ID NO: 61036 - DNA, 416 bp, Zea mays
gacacttaatactcagcttctagtaagtttgtcaggcattatggtgctattgccaatccattgaccactctacttcaaggaataaggatatgtgtatggacagaataagcacgacaagcattttaaaactgaagcatgctatgactcagaccccagtgttggccttaccatactttgagttgccatttgtggtggagactgatgcttgtgagagtggaattggggttgttcttatgcaaaaaataaacatgtggcttttttgagcaatgctttagcagttaataaaataaccaactgtctaaatatgaggaagttttggtagtggataggtggaggccatatcttcagagatctcagtttgtgataaaaacatatcaccaatccctaactgtcttgggagaacaacaattgcaatc

SEQ ID NO: 61037 - DNA, 416 bp, Zea mays
  unsure (1)..(416): unsure at all n locations
agctntgtctctattcacgagtgagggttcggtgtgccggcaagtcgtttcgtgtaggcgattctgcacttctacggggtggagctgcacaatctcagccccaactccatcgcgcaagcagccatcttcgcgacgggttgcgaagggtttttggggattgcccccactgggacctgtggacccatctcttctctgcggagctnnttgcctcgacgacgggggaaagaaaagtcccatggcggtgccggccgatggctgcatcctccagttgaggcaggcgcgggcgcaacagtacatccttgccatcctcgtgtcttcgaacaaggggtggcagcactggtggttntatctccggaatgacgatgggaggctcccgtcgttntctcaacgagtggtgaccaccgccggcagtaact

SEQ ID NO: 61038 - DNA, 395 bp, Zea mays
tatgacatgctagtcactagttttcaagggtttcagacgaatccagtcactgctcatgccttgttccagtgcactcaagaccatgatgagtaccttcatgcatatgtccgaatgttcctgcgtctgagagcacaagcgcctacagtggccaatgaaatcgtcattgatgccatgatcaaaggtcttcggcagggcctacagctcaatacttcgccaggaaacccccagactctggagaagctacctcataaatggatgagtacatccgggctgacaatgacttccaccaaagaatggaggaagcttacagattttctgagatgactatgggcttcggaggaagaatccaccctatgcatgtcagatcaatccacagctctatctataacgatgac

SEQ ID NO: 61039 - DNA, 468 bp, Zea mays
  unsure (1)..(468): unsure at all n locations
agcttgagtcagttattcaacacaatattattgttgctcaaaggactgactaaggtatgaaacatattcatgagaaaatggaagccggcaaagctacttgtttttggaaagataaccaaagagtgttatggtttaaagactgcatagtggtgcctaaggatgctgaactccgttaacaaatcttggatgaagcccaccttagtcggttttctattcatcctgnaagtactaagatgtaccaagacttgaaacaacattattggtggactaagatgaagattgaaatcgcttgctatgtggcaaaatgtgacacttgtagacgagtcaaggcggtgcatatgaaaactggtggacctctataatcattgcctatcccaacgtgcaaatgggaggatataagcatggattttgttgtatgactacccaagccatctaaaggatatgactctanttgggtcatagtggacc

SEQ ID NO: 61040 - DNA, 463 bp, Zea mays
  unsure (1)..(463): unsure at all n locations
ctcatcggtgctcatactaacatttaatgactcatgatcaggttgatatctttatggatgtggcctttgatagtttgcatgaagatgtgaggctgttaagtattagattatcatcaatgggctttggtttctttcctgttggttctttggaatctcgtcttgctcacttcatctgatcaaagaaaaaattgacaacacttgatgctaaagatgttatgcataaattgttataaaccagatatatacatgtgcacaacattttccgttgtcaatcaactgacatccaaaataaacaagaatgcaatcacatttcccaataaccaatgtagttctcagtggttatatgcaaagctaaacctactcttacatgcatgcatagtttttggccacggtgatattacaaagattcatttctataaccatacagcangttcttcttgcagtagtgtcatgacacatcaac

SEQ ID NO: 61041 - DNA, 333 bp, Zea mays
agcttctactgaagcttcggctcaacaagctgaagctgaagctgggccttcagagccctacaaggagcaaccttttgaagccgaagcaataaaaattccagaaccagtattagttgaagaaactgacaccgccatccccgaagcacctgccagcatgcgtgattacatgatacgacatgcttcggggaagaagctatctgaagaagaaactcatgaagccatccattatgcaaaggaactaaaatatccgaagggggcagtaatattcaatggaacgaatgaagatgacttcttatactggcctgctgacaacaaagagctatctgtctgccg

SEQ ID NO: 61042 - DNA, 331 bp, Zea mays
agcttctcgcagaacaatacgggaacaacccggttgatacgtgtccaacgtaatggttggcacaattacgcacgcactacaagacttgtatgctatcaaaagcccaagcatattgttatatcatgggcgtccactggatgcccgagacatgcacaacaccctactcgcatgtgagtgcctctatgaacgacccaatgtgtagcacgctagttatccctaacgcagcgggcgctacgacaatggtgatgaccggagctcgagccccgaccgcttatgtgctgaaacagtcgatcgacctcacaacaagtttaatatcaggaggattctcgat

SEQ ID NO: 61043 - DNA, 403 bp, Zea mays
cagccttggacgctcagatgtctgacaatgttctcccgaaacgttctcgccgagccgatcagcccacttttcctgctgaggggtagaaaaagaagaagagacgtcttcgtcgagtgtctaacttggatcagggtgctggtccttctattcctgttgctgaggaagtgccaatgcctgaatttgctgaagctgaccccaatgggtgtgacccatctgatgctgaccccattggtgtgatcctgctgaagctgacccaatgggtgtgctgtccgtgtttgtgatgaaaatgatgaagatgaggatgaaatccctctgattcggaagaacaaccgacattacatagctagtggggaaagtagtggtgtccttcttctgctttgctgcctcattgtctgcaaaatta

SEQ ID NO: 61044 - DNA, 352 bp, Zea mays
atcgacctcttaatgcggtacgtatcaagaacaaatatcctttgcctcgtattgatgttctttgtgaccagttggtccgggccaatgtgttttgcataatagaccttcgctccggctgccatcatatcatgatacgagcaagcgatattccaaagacgacattctctaccagatatgggctatatgaatttttggtgatgtcattcgggctgacaaatgcaccagcatatctgatgtatctgatgaactctgttctcatgcctgaattggataaattcatactggtggtcatcgatgatattttggtgtactcaaagaacgaacaataacatgtcgggcatttgcatgtaat

SEQ ID NO: 61045 - DNA, 352 bp, Zea mays
  unsure (1)..(352): unsure at all n locations
agctngaacctcaaggatggtgctaacgctcacccagcccccgagggtgttgctgagggtgttgtcggagacgatccggctcaagtgggcagcgcgagctatgacctatcccccaagggtgtccgagcggagtctccctcttgtacttccatggatgttcacgtcagatctcctccacactctagtggcatggtgatggcccaagtttctggtcagggagtcgccttagaggctagcgttcccgctgaccaagttttgggttccattgacggtactgagttggtccctgctggttcattgcaagctgcgtcgggtggcgactntatgccaggccatcaattgatttctcacg

SEQ ID NO: 61046 - DNA, 471 bp, Zea mays
  unsure (1)..(471): unsure at all n locations
tcttccagccacagttccaagatgcagatgcgccagtggcttctgcggaagaattggagatcaaccaaggagaatattntgcttgttttgtggtgaaaacaagggccataccaccaggatgtgccatgttaccatccagaagcaaaaggagatagccgaagctgcagcacaacatgctcagccgaagcatgtcatgcatactgcttcgtaccattcgccttacatcctataatacgtatgcaaccaccctgcagtttctgttgcttcggcgagtcaacctcaagcttcctggcaacagcctccgcctccaccaccgttgcaacaaggtcaacagccagaatgtggtcaatatgctccacatcatagggacttcagagaataatccgaagctcgcacagtcaatatcactgtgccagagtctaagcacatctattgacaaatatcctactttgacagcaagcttttccattc

SEQ ID NO: 61047 - DNA, 320 bp, Zea mays
  unsure (1)..(320): unsure at all n locations
agcttctncaaagttgaagaggcttcctggcgaagtactgagctgacggacctggccgaagccccttgatcatggcctcgatgacaatttcattgggcaccgttggtgcttgtgccctcagacgcaagaaccttcggacatatgcctgaaggtattcttcgtggtcctgagtgcactggaacagagcctgagcagtgaccggtttcgtctgaaatccttgaaagctggttaacaacaaatccttcagcttctgccatgaagtgatcgttcctggtcgaagggaggaataccaggtttgagcaacacttctgacagccata

SEQ ID NO: 61048 - DNA, 466 bp, Zea mays
  unsure (1)..(466): unsure at all n locations
tcttatatgctggctacgatttccctggagcagttgtggtgtgggaaatttgaagatattngaaatctaccttcatcaacttactcctgaagcaatcataaggatgggcatctttgtgtgggccgtgatgatccaatgtttataaccaaatgcaaaaagtttctgcaacatacatgagctattgtacgagacaaaaccctgtggtaaagagcagtatcacaacatatttggctgctacaacttctgcgcccgatctgggtcaagctgtctgttggtgactngttctcaaatgctaagagttaagaacaaggcaacatataaagtgttaaatgttaaagtccttcgtccttcaagacattatgtcccttctgatataatgaattccggacgaaggttatgaatgaagagaccttcgtaactcgacagatgattaagaagaatgcgtatatgaaatacaaataataat

SEQ ID NO: 61049 - DNA, 455 bp, Zea mays
  unsure (1)..(455): unsure at all n locations
agcttgtgaaaccaatcacgagtntattgaagaatgatattaaattcaattgggcttcaaaatgtaatgaagcttttgaacaattgaaagtattattaaccactgctccggtattggctcaaccgaatattaataagccctttgatgtgtattgtgacgcatcatgcaatggtctcggctgtgcattaatgcaagaaggccgagttatagcttatgcttcacggcagttacgccgacatgaggaacattatgcgactcatgatctggagctagctgcagtggttcatgccctcaaaatatggtgtcattatctgctgggaaatgtctgtcatacttatacagatcataagaagttaaagtacacctttacccagtcagaactcaatatgagacaaaggagatggctcgagcctatcaagcgagtatgaatagagattcactatcacccatgcaaa

SEQ ID NO: 61050 - DNA, 445 bp, Zea mays
  unsure (1)..(445): unsure at all n locations
tggcttccttggccaagcaagtgaacgtgagttaacagccctatcgagcgctaaatcttgttcagcaagttggtcttgcaagtggcggatgtcagttctcaactcgtttattcgctgaccatcctcgacccatactccgttcctatgacggagctctgatcaaagctgttctacttgggcttccagatctccaataggatcattgctaccactactactgtcctcatgccttggagctagttgatggcgatgtacgccaatgggccggtagacttgcgcgcggttnttcttgtgcgcggcggcatatctccatgagggggaaaatcttattagcataagttttagtatgatgcatgtataattaccgaatcaaccttagttgattcacaaccttctatatattgcactctactatctggtctttaaaataagtacttcagaagat

SEQ ID NO: 61051 - DNA, 192 bp, Zea mays
  unsure (1)..(192): unsure at all n locations
agcttcacgggctactagcggagctagccgaagcactgtcttgcccagaggatggctggggtgggctggccacggtggccgaagctctggcggcaatggcgggcggaattaagctcgccggagctaangggaagtggttggccggtgagggtgagtgcggagcgaaatggggcgcgcctgtgaaggctttat

SEQ ID NO: 61052 - DNA, 407 bp, Zea mays
tatgaagattctattccaacatgggctagtctgcggtgcctgatccaacccaagttagtcttatcaattaagcaagtgtcgagttcagctctatcaaaatctaccaagtatggctgaccctctaatactcccttaaatgctattgaatcatcacttcttctaaagacagtgacacctacatcagttaagagacagttgtagcccatttgacataattgggatacggaaagcaaatggtaatctaaagagtctacaagaaaaacattggtaatagtatggtcaggagatatagcaattttacccaatcctttgaccaaaccttgatttccatccccgaatgtgatagctcgttggggatcttggtttttctcaaatgaagagaacatcttcttctcccctgtcatgtg

SEQ ID NO: 61053 - DNA, 475 bp, Zea mays
  unsure (1)..(475): unsure at all n locations
agcttggctngaccacacgagagcatccccacccttatcacattcaatggtttaacaacagcggtaagttcaaggtaataaaaacagcaagggtgccattttctatcggctcttaccatgactntgttgatttcgatgtggtgagtatggatgcttgctctcttttactaggacgtccttgggagtttgatactgatgctattcaccatggtagatctaataaatatacttttatgcataagggaaagaaaattgtgttgcttcctatgactcccactgaaatggtccacttagaacatgagataaagattaatgctaagcaaaaaggtgttgtgaactctgaaaatcagcaacctactaagttaaaaattcctactttgctagccactaaatccgatcttgatgagttacatgcctctgttggctttgctatgccttagtgtacaaaaatgtttctattcattgatgaacgcta

SEQ ID NO: 61054 - DNA, 382 bp, Zea mays
  unsure (1)..(382): unsure at all n locations
tcggcgctgtgtcaaccttcgtatcttttgagcttctccctttctgatacgagtccgaagatacctgttcagacatttatactccagaaacattgttaaattatgtttttgaggaccttctgacgccgtaggtccccaacagtatcccctcgcaatattaatttgttagaaataataaatttagattgcgatatggacgaatggcttacgccgaatgtgcgataaaacaccttccctatgctagaatagcaacattcaatgacaagtggngtctttcaactttcaacgcaccgagcgtattaatactggcataccgcanactcattgtgcacgctttctggccaaccactcccgcttactcagtntttatctcttgtgcact

SEQ ID NO: 61055 - DNA, 354 bp, Zea mays
  unsure (1)..(354): unsure at all n locations
agctnntttcactgatactttggtgaacataacgtagctctgtattcccttaagaacgacttcggagctttttcaccgttactttggtgaacaaattggtgaacgaaacgtctcattactatactcaaaggtaccaacttacttaatacattaatttgcggaatgtaaaagagtttctcgaatatgtaaatgcagagtagcttcttcttaatatcttcgagtgttcactaccaaattataaggacatcactcccgtacaaataatgcatggaccgacaacacatgtacatgcacgacaacaaaatctctagattcattcttacctagtgaaattgaatttagaacttatgcttt

SEQ ID NO: 61056 - DNA, 418 bp, Zea mays
ctgagcattgtattcaccaagtgctcgaacaagtcatcgagcatcatcctcgtctacgccaagcccccaagccgtgatgacactctggtgttagccacgcgtcaccagctcgacaaaataaatcccatgggtgtctgatcgagaagtgaagttgtgtacatcactcgccagacatgtgtgatcaaagacgtcaaccggaaaccatcgtcgtgcttgcgactatatcgtcgaattagtgagggtaagttgattcgtattcccgttaactatgtctataaatagattaaatagaattgttggtcacagtaaatattaataatttatcatgcgtatattgtgatgatcacattagatagctcgctatatcaagtaattaagttacacaatttagagagttaataaatagctagggaataaa

SEQ ID NO: 61057 - DNA, 293 bp, Zea mays
  unsure (1)..(293): unsure at all n locations
ctgcaagctttacagcctaatggtcactaatatttggtcgagtgagttcaattntcccttctctagtattaatgaatttaatcgcaagggcaggggggatgagttttaattaatggaacattaacatatatactatagctatgaaagcgtctacttatcttgttatggaacaaaccggttaagtatcagttcgagagaacacctgttacctgtgtggctgttgacgctggccctcgggaacttgcacctgttgttggtggtggcagcataactgttaagatttatgggcttgg

SEQ ID NO: 61058 - DNA, 350 bp, Zea mays
ctgcttgacaccatggtccacatcgttgatcactatgatttcatgcctgaggacttcatattggaggcggcggctgcgtcttccacaccgcgggccaccaaccttcctgcgcctggtgcatacgctgttgtgcactctacgcggcagcacactctcgcgcaaacgtctatggtgtctatggctgcgcctggggcgctgtctgcggtcaaagaattgctgcgccaccccctaactacacagtctcgccgggggccatgaaacagtgacatgacgatgtcgaccgtctactcgtcatggcacactctggctcatccaggcccatgcctcagtcagtccgcgcgccaacatga

SEQ ID NO: 61059 - DNA, 457 bp, Zea mays
  unsure (1)..(457): unsure at all n locations
agcttatgaagattcttcatcccaacatgggtctagtctgcggtgccagagccaacctatggcggaactgcctgaattattccgacttaagtgcccaagtcccaccttagaggctagaccacacttaaatgggaataacccgtcaatccctcggatcttgtccgacaaggccactgacaggatcaagtaccacaatctcactcgatggtgagtcacagagcanatacaataaaacgtaaaacattaaggagtattatattattacatcaccatcggagttntgcaaaagtagtcatcattgttcgaaatgcagtggaataaaactaacggtaaataaacagagagatggagaagcctgtcccatcactcctcatgctcctcctcagccgaggtanggtcccactcgacagtccaacccggtggcaagatggacggccaagtcactctagcaaccatg

SEQ ID NO: 61060 - DNA, 387 bp, Zea mays
  unsure (1)..(387): unsure at all n locations
atctctacatctagtgcaaatagaaacatgttcaatagtagatgtggatggtttgcaaacattcaattcatcaatgttagcatttacattagcattctcatctctaagacatgaaattgaatcattgcaaatgctaagctctttagacaaatgttcacatttttctacctctagagcataagcatttttcaatttaacaaattttttgttttccttaacgagcaagtcctcttggcattccaagagatcatccttcttgttaatggtttataataattcattcattcttttcttttggtccatgttaaggttggcaaaaacaaggtgattctcatttctggaaaanatcctgagtcagcgtgatannattttacaaatttggtaaac

SEQ ID NO: 61061 - DNA, 208 bp, Zea mays
catgtggtattgacacatctcaacaagtaatccatgaccacttcgtgacctctggtgctgttgcatatggacctcattcgacctgccgcctatctgatcataggaggaatgtaatcccgcctacttatttgtgatgacttatgaccattaactcgggtgttctttttgaatgataagtctgaaaccctatgggccctcaaacgccctc

SEQ ID NO: 61062 - DNA, 481 bp, Zea mays
  unsure (1)..(481): unsure at all n locations
agcttatgaagattcttcatcccaacatgggctattcggcggtgccagagccaacccatgttagtcttagcaattaagcaagtgtcgagttcagctctatcaaaatctaccaagtatagttgaccctctaacactcccttaaatgctactgaatcatcacttcttctaaagacagtgacacctacatcagtgaaaagacagttgtagcccattntgcataattgagaaacggaaagcaaattgtaatctaaagagtctacaagaaaaacattggaaattgaatggtcaggagatatagcaattntacccaatcctttgaccaaaccttggttttcatccccgaatgtgatagctcgttggggatcttgattnttctcgtaggaggagaacatcttcttctcccctgtcatgtggtttgtgcacccgctgtcgattatccaacttgagcctcctgatgcataaacctacaaaaacaagttag

SEQ ID NO: 61063 - DNA, 412 bp, Zea mays
  unsure (1)..(412): unsure at all n locations
ctgtgtagtggtatgctatgtaatgtaatggcttgatgtaatgaataaaataactagctaacaaaaatggcatgtgcataatagtgactctcttcccatggcagatggcttcggatagaaccacgcctaccgcctccgggattggagcaagacttcctctangagctgagggagaggctggtggagaatggggtgaaacccacctccccgcacctccagaactaccactagacctagcccatattctggccaatcataccagactcattgaagtcctcactcgaagtctggagaaccagcgcccaggcggtggaaggccccacgacaggatgggagaattcctgagactgaagccgcccacgttcgcggtgtccatcaatcccctcgatgcagatgactggattcacacaat

SEQ ID NO: 61064 - DNA, 341 bp, Zea mays
  unsure (1)..(341): unsure at all n locations
agcttcaactccatctatattatggattgccttggaatcagtccagcttccttcggcccttctggcagcttcctgactcccatgaatagcaataggcccttggtccgaaggtatcttcatgcagagataagctgggtgaagaattgcttcaaaagcatttagagtaccacgaccaatgatggcgttgtaagggtattccatgtcaacaatatcaaacacaatttgctcagtccttgtgttattaacaaatccgaagttaccggcatggtaatctntccgagtgccacaatctgccgccctccgaagccacaaagagggtgcgtagcatcatgaatcttgtc

SEQ ID NO: 61065 - DNA, 400 bp, Zea mays
  unsure (1)..(400): unsure at all n locations
tcttcaccatgtgatcacggttatcttgagaatgttgagcaatgcacttcccttttagttgtgtcaagctcatttttagcctctcattttcttctttgagcttttgatatttatcatcttttgttcctgcaaattctatctcaaaggaagatttgcttgtcgacggacaacaagcattagcacatggtaatatagtttcaatttgaatacatgtgcatgagtgaggttgttggaattntaagttntctattacaacctcatgagcaatatttaatatgacatgatcatccataagaatttcatgataatatagaagcatatcatatttatcttgaaaagctagaatttcaaattttaactcttctacttggtccttaagtaaggcattcctatttactaa

SEQ ID NO: 61066 - DNA, 454 bp, Zea mays
  unsure (1)..(454): unsure at all n locations
agcttcgggataccaatactcttcgacagagtactgataaccttcgctccagtccggtctcggaggcaacctaagctttcatcgtcaatgctgccgaagagcagagctcctggtttgtaaccacaggatataacataatctttcaactcttctttctcagcttgagataactcctgaccaattgtgtnttggaaattgaagtccttttcctccgaagtatcttcggctatctccttttctttaccagtcactgtggccagggtctcttcagcggctgtagcagcttcttccgtggccatattcaggagcantttgtcaatatcagaaattgtgctctctaaatntgtatcttcggccgttgaagcttcggtagtcccagcttcgacagttgcggcttcagtaggtgcagctatgatagctgtagcgctctcgatagctggtgtcttcgatgtct

SEQ ID NO: 61067 - DNA, 410 bp, Zea mays
tccacgatttcataatgtccaatgtatcgaggggctaacttgcctttgatcccaaaccgttgcactccttgtgtgggtgatacttttagatatacgaaatctcccacttcaaactggaggggttttcttctcttgtcatgctagctcttctatctggcctgagcagcttctatattcttcctggtcactctgactttcctttcggcttcagtcactaagtcaggtccaaagatttctctttctctatgctgagacccgttgatgggcgttcgacacctccttccatatatggcttcgaagggtgccatctttatgctggattgataactgttgttataagcaatctctgccaaagagaggtagttatcctaattcttgccgcaatcgattgcacaagcccttggcatatc

SEQ ID NO: 61068 - DNA, 373 bp, Zea mays
  unsure (1)..(373): unsure at all n locations
agcttgtgaagattcttcatcccaacatgggctagtcggcggtgccagagccaacccatgttagtcttagcaattaagcaagtatcgagttcagctctattgaaatcaactaagtatagctgaccctttaatactcccttaaaagctactgaatcatcacttcttctaaagacagtaacacctgtatccgtaaagagacagttgtagcccattttacataattgagaaacagaaaagcagttgaatctagagaatctacaagaaaaacattggaaatagaatgggcaggtaatatagcaattttacccaattctntgaccaaaccttgatttccatccncgaatgtaaaatgctcttggggatcttggttttc

SEQ ID NO: 61069 - DNA, 362 bp, Zea mays
  unsure (1)..(362): unsure at all n locations
ctcagctaatgccctaaaattgtctaactctgttaagggcaaagctcccatggctcatgataatgagggttacattntatatcctatcaattatcctgagcacaagattaggagaattcatgctaggaagtctcattctattttccatcatgcttttatgtacaagaatgaggcatctagctctatgcattctacccatgttaaaatgcctaataagaaaactcctacaacatcaaacgaacctaatgtttcatttaaaacttttgatgcttcatatgttcttactaacaaatcaggcaaagtagttgccatatatgtcgggggcaaacacaagggctccaagacttgtgtttgggtaccca

SEQ ID NO: 61070 - DNA, 357 bp, Zea mays
  unsure (1)..(357): unsure at all n locations
cttttactgggtgattgccatggntatctaaacatacatatcatgttattggaagatataattggaaaggagaatatatggtacatcgagtatatatttgttcaaatatgaaatctcctttnttccatgaaaaaatatgatcgattagagggctatgttaaagctaaccatgtcacgtccagtttcacttgtccttctttgcatgttntacaataacaaggtcaacttcaagaaggggagcaaagttggacgacatcaagcactacatcaacaccttatgcagacaccaacgactntgagtcgaggatgactcanaatcaagaaggggagaatgatgagtacatggacgtcaactat

SEQ ID NO: 61071 - DNA, 462 bp, Zea mays
  unsure (1)..(462): unsure at all n locations
tctccttgtcgttcaaccttgacgtagaaccattccgatttccagcctgccggccacttgcttcgatagctgatgacatgaaactttgtggttttccgataggcaaaattatagcaaccaaagntatcatgcaatccatcttttctagccttcgtctgataatgcagctcatgaactcgacaaaagctgtcggcaaacggctccaccgcctggcttctgagggcccatatatagacgctaagcctaacgatagcgttaggagtcagctgatgaaagtagatcccaaacctcttcaatacatctgcaataatcccatgcagggggaatctcaacccagcctttagaaagctcttgaaaatgactatttcatccttctctggcttcngggtagtttcttcccccaccgaagcgtagtagcttcttctgactttcattgaaataacccgacttcaccatcttgga

SEQ ID NO: 61072 - DNA, 479 bp, Zea mays
  unsure (1)..(479): unsure at all n locations
cttgaagttatntcttgactntntccatgtttctcttttcgnttcttggtcctgatacgaccacgaggctgaaactgtgtgcaagtaatagtccatccatcaatgtaacactcatgtgtttcttcttggggctgggcatccttgtgatgtttcctttntggaatactttgcaattcatcaactgacagtgcattangtatgagagaatctactattagttgttcagggggagacatctgtcnttttatgcaagaaaataaaatctggttcttctgttttgtagtttcactttcattngcattgatttggcgacaaggaattccatagtactcacaacaacaacatgttccaaggtcacttgtctgttggtttagttgtgcatccctttgtgtcttgaatgtctgttcatcggctgttttatttatagtgttgtttntacttgccaacacaccacattctntgcacttagtgacatcact

SEQ ID NO: 61073 - DNA, 507 bp, Zea mays
  unsure (1)..(507): unsure at all n locations
tctcctgtacaaggctacacttaccgctgagtgcgaagctgccacatataataacatatgagcccctggtgttggtggagttaatgctgttaaatctatcaaatattgcttcagttcctcgaaggctttttgttggcttggtccccattgaaagacttcggctgatttcagcacttcgaagaatggtaaatttctctctgctgatgtggatatgaatctattgagagatgccagcctccccgtcagtctttgggccccctttnttgtatttggtggctccattcgaagtatagcttcaattttacttggattagcttcaattccctttgttgaaaccaaacatccaagaaatttccccttctttactccaaagacacattnttctggattcagcttcagaccagcttggttaatactggcgaatgtctcctgcaaatcagcaatgtgattttcttgtttcgtgccttttacaatgatatcatcaacatttgttagcacatttctgcc

SEQ ID NO: 61074 - DNA, 483 bp, Zea mays
  unsure (1)..(483): unsure at all n locations
agcttatgaagattcttcatcccaacatgggctattctgcggtgccagagccaacccatgttagtcttagcaattaagcatgtgtcaagttcagctttatcaaaatctactaagtatagctgaccctctaacacacccttgaatgctattgaatcatcacttcttctaaagacagtgacacctgtatcagtataaagacagctgtagcccatttgacataattgtgaaacagaaagcaagttgtaatctanagaatcaacaagataaacattggaaatagaatggtcaggagatatagcaattttaccaagtcctttgaccaaaccttgatttccatccccgaatgtgatagctcgttggagatctnggttnttctcatatgaagagaacatccttttctccccggtcatgtggtttgtgcacccgctgtcgagtatccaactagagcccccggatgcataaacctacaaaacaactttagtt

SEQ ID NO: 61075 - DNA, 416 bp, Zea mays
  unsure (1)..(416): unsure at all n locations
agcttcatactcggctgcagtggtagaggcctgtaatagcagctggagagcatatttgaggtgttcgcctccaggtgcggtgaagagaatccctgctcctgctccttgcagcttcagcgagccatcaaaatacattcgccatacttcttgcggttctggattatccggtacttgctgttctgtccattctgatacgaaatcaaccagtgcttgagttttgatggcagtgcgaggtcggaactcgatatcatgggatcccaactcacaagcccacttggctattcggccaatgggcttccttgtgtgaagaatatcccctattgganaaccagtgactactatgactntgtggtcgcgaagtagtgcgccactgcgtgcagtagaagactgatatatacctctgactgaggaacttt

SEQ ID NO: 61076 - DNA, 463 bp, Zea mays
acttaatggtcatgtgttgtccttatgacacacttgatgtcatcatatatatgcaccaaagaaccatattaagccttcaatgtccatacaatctctgtaatggaccacactcgttcctttgaaacaattcaaagaacttaaccaattcagatcagattttaagataagagggacttaaaatctcatttccgatgatactcaagtatccatcttatgggaaaaacatgaccaatagaattgttcataacttttcatttcatcccaacaatgggatgaccaattcaatcttacccagcatggtatgtatcatcacttgaaaagttataacatatgcaacactctgtatgggaggatgtatgtagaatacagtccataagaaatgtttctgagaaacatatgcaatatccatcactatcaccctgtgtttgcacatgatagaaattatatggatatctctacaata

SEQ ID NO: 61077 - DNA, 350 bp, Zea mays
  unsure (1)..(350): unsure at all n locations
gcttgatagcacanaanatatttttatcccaaccctcatatatatatacaaagcaccactgcatggtgtgccccacgatataaaatgtttcgttattctagcgaagggaaggtgttttttcggaccttcggctaaaggctttcgttcgtttcacagtctgaatttgttacaaggaaacaaactaatactgcgatgggctactgttgagggctgtcgtcttccgaaacttctcaaaaacacggctaaccacatgttatcagcatgttacanagtgttacangagcttcgttaccagaaaagcttcgacacagaacactggaagtgcaacgaagcaagcttcgttacattga

SEQ ID NO: 61078 - DNA, 369 bp, Zea mays
tcggacggtctgtgacctgtctacttattatgccacagcactgaccaagttgtatttcatatgtggaccatccgccctacatggccggacagttcgcccttgggagttagtactgtctgggctaaaacctcggacggttcgtatttcaaatgtgcaaacacacacagtccctgcccaaatccaatttggcacctaatgatagtccaccgaccctggccggacggtccgcacaatgacacggatgcatgtgcatctatggacccctttggatggatcgtatacagtctggcctcctggcccggatggtccgacgaccccaaaacttatatgcttgttatacacgctctcaaaaagatttaactcttgaat

SEQ ID NO: 61079 - DNA, 423 bp, Zea mays
  unsure (1)..(423): unsure at all n locations
agcttagaaaaatctggtatgaatctgcgataatacccagctagtccaagaaaactccggacttggtgaacagttgttgggggtttccactccagaatatctttgaccttgctaggatctaccgcaatccctttagctgataatacgtgccccaaaaattgaatttcttccagccagaacgcgcacttaccgaacttggcatatagttggtgttccctgaggcgcgtcaatacaatccgtaaatgctgagcatggtcctcttcattcttagaatatatcaagatatcgtcgatgaagactaccacgaatttgtccaactcgggcatgaacaccgagttcatcaaataggtgaaatgggcaggagcatttgtgagcccganagacattaccaagtattcaaataatccataccgcgtagtaaac

SEQ ID NO: 61080 - DNA, 501 bp, Zea mays
ggacactttatactaagcttcgtcctcatcaaagttcttttctgccgccatcgccaatgtgcatatgcgcacagggcttcggaagaaggtttggagaccacccaagataaatttattgcctattctgtggtgaagacaagggccataccaccatgatgtgccatgttaccatccataaacagaatgagatagcataagcaatatcgcaacaaagtcagccgaagcaggtcatgcatactgcttcgtatcactcgccttatattccagaatacgtatgcaaccactctgcggcttctgttgcttctgcgagccaaccccaatcatcttggcagcatcccccaccgccaccgccgatccatcgagggcagcagccataatggagtcagcacagtcaccttcagcgggatttcagagaggagtctgaagctcgcacagtcaacagcactgtgccagagtcgaagcacatttattgacaaatattctacctcaacagcagttctt

SEQ ID NO: 61081 - DNA, 475 bp, Zea mays
  unsure (1)..(475): unsure at all n locations
agctttaactatgtcaaagatctgtgttgtatctttcccaggttcaactcttccatttcttggcataaggtggtgtcaggtgtcctgactgtaaaacaatgacaggaagccttgcgactcaatgcatctaccaccacattggctcttcctgngttataatggatttccaaatcataatctttaattagctcaagccatcttcgttgtctcatattcaggtctaactaagtgaaaatatattttagaagttgtgcggtctgtatataaatgacacacattccccagcagataatgacgccatatcttgagggcatgaacaaccacagctagttccaaatcatgagttgggtagtgctcttcataccggcgcagttgtcttgaagaataagctatgactcggccctcttgcattatgacacatccgcgtccactgcctgatgcgtcacaatacacatcaaacatgctttcaatatct

SEQ ID NO: 61082 - DNA, 417 bp, Zea mays
atctcactatgaatatccctagatgatatgttcatcattagaatgaggaactcatgtttttgcaggttagagatatctggtggcaatggtccaatcaaagaattgttggacagatcaacaatcctgagacccgattgagatgaaagaagtattgattccattgaatgggtgctctgtaatggaatatttctagaaaatttatttctagaaagatttaacacagtcaaagttggtgacatgaagaaagtatgcaacacaattccctcgagtgtgttatgactgagatcaagggcagataacttttggtatgtacctatcaccgaatggagagaccctaacaattaattgttctgtaatttcagtgacattatagtctgatactatgaggcatcatttgggtagctttccatcaatttg

SEQ ID NO: 61083 - DNA, 457 bp, Zea mays
  unsure (1)..(457): unsure at all n locations
agcttcgtactcagcaatgttatntgtgcaactganatcaagccttgctgcatagcaagttttgactttggagggtgcgaccaacacagcggctactcctgccccgaaggttccccaagaaccatcgcagaatactgtccagacttcggcatctttactcgcttcctcttcctgagcccctggcgtccagtcagcaatgaagtctgctaacgcttgggactgaatcgaagatctatgcacatagtcaatgcaaaattcattgagttccgcagcccattttccaacccttccagtagcttctctatttcttataatatccttcaatggttgtgaagaaggaacaattatattgtatgcttganaatagtgccgaagcttcctggaagccatcanaacaacatacagcaccttctccaattctgtatanattttctttgataaactaagaacttcggat

SEQ ID NO: 61084 - DNA, 374 bp, Zea mays
tcacaagttcattgaagaacgatactaaatttaattggtcttcaagatgcaatgaagccttcgagcagttgaaagtgttattaaccactcctccggtattagctcaaccggacattgaaaagccatttgatgtgtattgtgacacatcagacagtggtttaggttgagtcttgatgcaagaaggccgagtcatatcatacgcctcatgacagttacgccagcatgatgaacattatccaactcatgacctggaattagccgatgtggttcatgccttgaaaatatggcgtcattatctgttggggaatgtctttcatatctatacagatcataaaagtttgaagtacatctttacccaggtaaagctgaatatg

SEQ ID NO: 61085 - DNA, 156 bp, Zea mays
agcttttgtcttgactatgaaggtgccctctctcttgggctccagcttgcccttggactccgtccgaactgttcggacgagtacgaggtccccttcgttgaactccctcgggatgactgtgtggttgcgccatgctttggtctgcgcttggtattt

SEQ ID NO: 61086 - DNA, 438 bp, Zea mays
atgcttcatgaacttcatcttgaacatgatagaagagccgcatatcttctagatcctctaaaccaatgctcacacagagaccagaccactaccaccgtcgacacatgttagaaacaagacatagcagcactgtgttgcaatcaccatgaagtgtcgaagatgacatagcagaagcactctgatcctaccatttacaagggacatactgttgagtctgttgatcatatgaataccaaattctagagttgcagtcaaagtaaagacctgcatcatacaagattacatgttaaaacataaatggaataacgatccataaccataatattaccaacaaaattagtcatggtgttaagttttaatgagatcttgatgcaagagactcagacttaccagtagttccatcataatagaatccaactgcggaatcatagtagtaac

SEQ ID NO: 61087 - DNA, 438 bp, Zea mays
  unsure (1)..(438): unsure at all n locations
agcttctatagggagaacatgtgttatgtctaacaaatgtaactttcgaaaaagatagaccttgtgcagcttgtcaagcaggtaaacaggtgggaagctctcatcatagcataaatgtgatgaccacatcaagacctttggagctacttcatatggacctcttcggacccgtcgactacctcagcatcgggggaagtaagtatagtcttgtataagtgatgatttntccccgctccttggggattctnttcgcaggataagtcnaaacccaatgtaccctcaagcgcttcctaatgagagctcanaatgaatttgagctcaaggtgaagaagataangagcgacaacgggtccgagttcacgaaccttcaagtggaagagtatcttgaggaggaaagagtcaagcacgagttcttctgtcctacacanacaacaaaac

SEQ ID NO: 61088 - DNA, 413 bp, Zea mays
tgtcaagcacatgttggtacccatcgcttgatgggtccgttttgttaatcgacaaagatctatgaacccaaaagtcctttgtgttagcactatgtaaactcattacctttctagcacaagttgcaattttgggttgcctatttacatgcgaaatgattgacaagctataggtggggttgttaccaatgggacaatccttgcattgatgtccctctttccgacatgtgtagcataagcgtttttgaagtcttgataatttcttctttcctttgttgttgcttgctacatggttagtaaaaactttcttttctaaccctatgccttcttgtttcaaatggggacaagatttgattaagtgtcccttctttgagcacttaatacaacgtctatcatccttggtaataatcaagcaa

SEQ ID NO: 61089 - DNA, 400 bp, Zea mays
  unsure (1)..(400): unsure at all n locations
agcttaaccacatcgctcggcgctacaacgagactgcggacgagctggcaaaaatagcctcggggcgaacgacggttcccccggacgtcttctcccgggatctgcatcaaccctccgtcaagatcgacgacacgcccgagcccgaggcaccctcggtccagcccgaggtaccctcggctcagctcgaggcaccctcagctcggtccgaggcgccctcggntcaccccgaggtacccttcgcccccgagggcgaggcactgcacgtcgaggaggagcagagcggngccacgcctgatcgaaattggcagaccccgtacctgcaatatctccgccaaggagagctacccctcgaccgagccgaggctcggcgggtagcacgaggcgccaagtcgttcgtact

SEQ ID NO: 61090 - DNA, 378 bp, Zea mays
gctgatatcgatcacgaacccgccgatggtgggcgccatggccacgccgggcatagagaagaaattgagatggggtttagacgatggggattctcgtctcgaccgatggcgcggcgcatggctcatacgactgacagattcttgcctcggccaatggtgatgcccatggctcggacgactgatggattcttgcctcggctgatggcgtggcgcggtgctcatatggttgtcggattctcgcctcgaccgatagcatggcgcatggctcatactgctaacgagcatgtgccatgggcacggacgctggtgcgggcactgtggctgggccatcagatctcaggtggacagttatgattaggctcaggttaattaaaatat

SEQ ID NO: 61091 - DNA, 499 bp, Zea mays
  unsure (1)..(499): unsure at all n locations
atccttaagtcacctgtgctgcagctcgcttggtaaaatttggcactattcttttcaaatagcaatgaatgctgtggtaacttcacacctactcgtctgtttatatagtactgcaggtaagaaggcgaagcgctatggattttacaccangcggacagccgcttgcactcgctgcgcggtggaccgcatagaccaaacagtaactctgcaaggtgggaccgctatgcgctgggatactgaatcgttcctcgataacgagctcatggaaggtgttntntggaccttctgcttcctgacacttaggggacttatttcacggatcaagctagttacgaataacgatctatcaccgcgaaaggggctactgttggcaccatgcttcttcgacgaaagtcttgtaagaagaaacagttttcagctgaagccgcttgtatgagatgaccgaacgttcctcttcgtgaagcttcggaatttacatacctacataaaagtataatga

SEQ ID NO: 61092 - DNA, 282 bp, Zea mays
ggttatgcctgatctacataaaggatttgacatttattgggatgcatgtggtcaacgacttggatgtgtgcttatgcaaaatggtcatgtgattgcctatgcatctcgtcagttgcggaatcatgaattgaactaccccactcatgacttggaattggcaacggttgtgcatgcacttaaaattttgagacactacattatgggaactaattgccaagtatacacggaccataagagcttgagtacatattcactcagaatgatctcaatctatgcaacgcc

SEQ ID NO: 61093 - DNA, 471 bp, Zea mays
  unsure (1)..(471): unsure at all n locations
agcttgtccaaattatacatactcaacccatacaactcattttccttatttagactacataaggaaacaaacctactactacaataatctagtcctccacatccttggttgttctagatccgctgctagcttcgggagggtgattattcgtgcgttcataggaggaggggctctgtcgctctgaagatgtcccaacttccataaggtcctccttcatctgctcctgatgcaccaactnccatctctgcaacttttggtggcacgtttgggtgtagctggtcatacaacatatgtacctcctcgtgcangacattgttgtatgcttgcagattntccaaggccatgctcagctcttccattccggctcaagcagttgcctcgcaatcccaggctatggatcgcgaatcacagcccagtcatagcccaatacgttctcaatctacactgtagtgctctactttttgatactca

SEQ ID NO: 61094 - DNA, 483 bp, Zea mays
gctcttgaataaaattacttcacccggttgtaacaattatgcaagaatgaatgtttgagaagttaaactaggtatgaagcagggttaatgcatgaacatgctttctcttccttttatacaagatatgcaaagaaggtatgaaaaaggaagatttatgtacaagtaaaaatgaaaggaagttgttttacccttttgtaccttcaattagagatgctctctttattgtgctttgtccttagtcttaatcgcttaagacctatactcaagacaatacatggaaatattgtgcacaagagagggttctacaactagtgatccttttataagtcattgttattatatatcaagtagatcacaaattgcataaatgtatcatgaattctccttttaacttagtgcacaagagagatattgattgagaatacatggtgcactaagaagcataagtggtaattgaagctattcaatgatcaaacacacaac

SEQ ID NO: 61095 - DNA, 399 bp, Zea mays
agcttccatctataccgtctcagactgttgaaaaccatctgtaagtcttcgatgaagtcttccgaattctccgttttgattaccacatcatctacgtaggcctccacacgcttgccccagtgatcggctaagcatgtttgaatggctctctgataagtcgctccagcgtttttgaggccgaacggcatagaggtataacagaaagcaccaaacggagtgatgaacgctgtttattactcgtcttccttcgccaagctaatctgatgatacccggaatagcaatctaagaaagacagcatagaacatccagcggtggagtccaccacctgatctatccttgggagcccgaaaggatccttcggacagtgtttgttgagatcagtatagtcgacgcacatg

SEQ ID NO: 61096 - DNA, 448 bp, Zea mays
acttcaatactaagcttggaagattctattccaagatgagctagtctgcgatgccatagccaacccatattattcttagcaattaaacaagtgttgagttcagctgtgttctcattaaaatcaactaaatatagctgaccctctaacactcccttaaatgctattgaatcgtcacttcttctaaagatagtaacacctacatctgtaaaaagaacagtgtagcccattttgcataattgagaaacagaaagcaaattgtaatctaaattgtaaggaaatggaccccgggccatttggtaattgagttttggtgtttgatgatcaacacaatccgtgaactaataagttttctagtggttgtgtttgtagttcacacgatgcaagattaacttggactaatgaattgatgaaagcaacacctcataagaatgcattataaagatccaag

SEQ ID NO: 61097 - DNA, 384 bp, Zea mays
  unsure (1)..(384): unsure at all n locations
agctngaagctgtgcatagattaccgtcctcttaatgcggngactatcaagaacaagtatcatttgcctcgtattgatgttcttttcgatcagttggtcagagccaaagtgttttctaagatagaccttcgctccggctatcatcagatcaagatacgggcaagtgatattccgaagacagctttctcgaccagaatatgggtgtatgaattcttggtgatgtcttttgggctgactaaggcgccagcatanttcatgtatctgatgaattctggtttcatgcctgaattggataaattcgtggtggttctcatcgatgatatcccggtgtactcaatgagcgaagaagaaacatgctggcatngcatgtagtgcttcacctct

SEQ ID NO: 61098 - DNA, 480 bp, Zea mays
  unsure (1)..(480): unsure at all n locations
tgtgcattatatttctcgacccatagacccatacttacattcttcatcttaaacaactgcgagacaggccgatttttacatcaagaattcaaggttgtgaaaagtattctggataaggaagcagctcaaacttactcttaagctctgattaacatgctgtgacacaatgaantttgctatgtcaccagaaatcacatatcctggtccatttgcatatggtgggttgatatcctcaagccactcctgtggtaatttattgataggagtcaggacgggcaatgaagataatgacgtatgtgacggtggcacaagatgtgctgtaatttacacagatataaactgagtaggatatgaatggcatatgttgccattttgcaatgttggcaactcctaaactgaaatgagattacctcgtttgtaactgcacattttccagttctcaatggtctatgcaagatgttaagaattcccatatataat

SEQ ID NO: 61099 - DNA, 397 bp, Zea mays
  unsure (1)..(397): unsure at all n locations
agcttcttggaacagcctccgcctccaccttctgtgcaacaaggccagcagccagaaaggagccagtatgctccacaccagagggacttcagagagcagtccgaagctcgtacagtcaatagcactgtgccagagtcaaagcacatctattgacaaatatcctaccttgatagcaatatnnttcattcagtcttattntctgtaataaaggacatttgttanaattcatgtaattaggttcgttgaatcctacaaggaaaatatattttcttctcaagcttatgataacaaagaggaccttcgaactatcgaatatgctncgaagcaacataaaagtcgttctaaggaacgcagagtaagttgggccgagtcacataaagtcgttcaaagagagcgc

SEQ ID NO: 61100 - DNA, 434 bp, Zea mays
  unsure (1)..(434): unsure at all n locations
agctntaacattctgtgctgccttgttctttattcgtagcatttgagaacaagtccccaacaacccctaactctagctctatacatagaagactccacctaagcgagaaggataagagggggctaagaacttacctgagagccccttggtcaacgttgaggtcgacgagaaagtccaccaccgcccacttggagaccaccacaagaacccatgacatcgttgtgaggcccctcaaagcaatatgctcacctatagaaaagcgtgcatgctgacgagaggtgatgtgggtggcatcgccaggcaggacactcaatgatctcatcacaggttgngaagaagaacggagaagggagatcacacaactagagaagagagaaatgagctaggtcgatgtagcataaattcttccttttatacctcaatcagtcgaccac

SEQ ID NO: 61101 - DNA, 361 bp, Zea mays
  unsure (1)..(361): unsure at all n locations
tacggacacatgaatatcagcttacttatctgcacatatatatgttgacacccttgcctcccctcnctcagtccctnccctataataaacgggcgccacgcacgccacagacgcggtccgcgagcgaggcatacacatccacgggccacgcccaccggcatctcacggcggaagcagccaagcaaccggccgggcgcctcccgtgccgccgatgagcatggtcgctgctaccgtgggcgctcagaatcgatgcgtcttcggtacgccttcgacaacctcgggtacgttacctgaccggcgtgacccggaagctcggaggcattgggtccacttggacgggccgaagggggaagagaaccac

SEQ ID NO: 61102 - DNA, 349 bp, Zea mays
aaatggaagtgagttcaccggaggtgggcgccaatgttggggaccatgtctcaaatgctatgaatcaagaacaaggcgacacaaaatgttaaatgttaatatccttcgtccttcttagcattatatccttaaggatataatgatcttcggacgaaggttatgaaagacataccctcatctgtatcaaatataccaatgaagaaaggatcatatgaatcataaagataacataaacagctgcgtattactgacgaatcatatccattctattatgatgaaaagggtaagataatattaaattataaatgtaccttcagctcgtaagaaggtataagcacaagtgtgatgc

SEQ ID NO: 61103 - DNA, 382 bp, Zea mays
cccgcgtcaccggagaagccctatcgcgctctccggagttcaagaactcgccggcgcacgtggaccgggttaaccccttcaccatttcccgattcgttgcgcgcatggcacttgtgtcataccgtgaagctcctcgtgcccattaattgaactctcccgccgtggtttggccggatcatgcgccgccgtcgatccccgccacctatgttcgtggccaggggagctccgaccacctctgacgccgacccgcacatcgacgtgaccgtcgcgacctcctgaacatcaccgaccacctctgcggaccttcctcgccgccggtaagccgcgccacccttttctttcacgcggctactggttcaattaagggagggactgcgggtga

SEQ ID NO: 61104 - DNA, 401 bp, Zea mays
cagctctataatactcttatattcattttatctttttaattttcgatcggacctctattgtttccaacgttatctcctgaaccagatacacgcgcgtctgttcctcgctttggtcgtcaccctcaccgctcaccggaactctaatcccattttagtccatctccagcaatatcatgcaaacagactgttttacattgtaggtacacagtttatacatctacaatgcaaaataatgttttgcacgtacgcttgtgctgagagctccaatagttctcttaaaaagaagtttctaaagacatgttgagcaagttgctaaatagttattatgcgtaaaaaaatagcttgggctctaatagttcctcatacttaggaagtagttcaattttaaatctagtcttgac

SEQ ID NO: 61105 - DNA, 438 bp, Zea mays
  unsure (1)..(438): unsure at all n locations
tctcttgtcgtcatcaaccttgacatagaaccactccgacttccatcctgctgaccatntgcttcggtagctgattacaggatactctgtggttttccggtaagcaaaattatatcaaccaaaattgtcatgcaatccatcttttctagcctttgtctgatagtgcagttcgtgaactcgacagaaactgtccgcaaacggctccaccgcttggcttctgagggcccagatataaacgctaagtctaacaatagcgttatgagtcagctgatgaaagtagataccaaacctcttcagtacctctgcaataatctcatgtagggggaatcttaatccagcctttagaaagctcttgaaaatgacaatttcatacttctctggctttggggtagtctcttctnccacgaagacgaatagactcttctgattctcattaaa

SEQ ID NO: 61106 - DNA, 329 bp, Zea mays
  unsure (1)..(329): unsure at all n locations
agctagagagttcanagtatgagttangtcttatccagcctgtnttgtaacgttgcatgcctccccttttatagccgaagggnggcatgcacaaagatactgagccccgacatgtgggcctaggaacataatagatgtagtactttggcgctactcatgtttgttgctggggcgatcttcttatgccctgacgtctgagatctgcgtancatcggcgtgcagggaagctctcgtttaaggatgatagcacatgcacccgcacacggtgcaatgttgacagtggactaacggtgcccgactgatgatggcctgcgctgctgccacgagtg

SEQ ID NO: 61107 - DNA, 323 bp, Zea mays
catatgttcattttgagaaagacaggatttgtatcgcatgccaagcatggaagcaagttcgagttcatcatccgcacaagaacattatgactactgacatgccactcgagctcctacacatggacctattctgcccgattgcttacataagcatcggcgggagtaagtactgtctagttattgtggatgattattctcgcttcacttgtgtattctttttcatgataaatctcatacccaagaaactttgaaaggattcttgagatgggctcataatgagttcggcttgaggatcaagaagataagaagcgacaacgggacag

SEQ ID NO: 61108 - DNA, 298 bp, Zea mays
tgtccgtagtgtagtaagaatggggtagtcatatcggaaaccttataatcaccgatttgacgtcgtgccatatccgcaagggaccaagatactggatttctctaaattttcgatgaatgtggaaaagcacgccagcacgtagccattcttagccactatgagaatggttatatggagcatccatgtcgtttattctcatgtccttatggaccaattccatggacataacctgcactacttattactttgggtatagagcaaatactgaacctttctcagaatatgagtaaatagctat

SEQ ID NO: 61109 - DNA, 396 bp, Zea mays
tacggaccttataatactagctgtggatgacgtgatcagaatggcgtattaatatctggaacataatgagcacgcattgaccgctggcgatactcccgaagaaccatcatagtggaatctctgtgggattccacgagagagaggaaagcgcgcacgcacccatgcttctatcgttagctcactgtcgataataagcttatagcgggacgatgaccgtccagttatcataaacgtcgcttgctgtgaccacactgatgctgctgataagcctgacaccgacgattactcacctccgcgaggagatgagcaagaatacatgacactgttgttacgatacccatatcccatctaagccaatatcttgacgacatcagtgtacggggagtcgattgtgac

SEQ ID NO: 61110 - DNA, 387 bp, Zea mays
  unsure (1)..(387): unsure at all n locations
agcttctccgagggcaagacggagttggagatggctctgctggccggtctacggtggcagaggggttgagcggccgcgggctcgctgcgcacgggcaaacggcgacgggctaactctggtgaggtgtggagggtgtgcggaaaggtgcagccgaagcctgggaggggattataagctcgggcgcgggccacngcgctgtgttggcttcggcgccgccccgggcgtgcaaaggccccgcaaacgtgctctggcccggcagaaggcgtcaacacgtggcagtgagtttcttccatgttcaacgcttcagagatcgcnacgtgcgaatctcgcatgaaccggccagacctcctctgcacctanggtatctacatgtggagttcaaggatg

SEQ ID NO: 61111 - DNA, 325 bp, Zea mays
  unsure (1)..(325): unsure at all n locations
gcttgtggctgcngtgtatcactcatttgngagatgggtctgatactctgttttggaaagatcgttggctgaatggcaaatgtattaaggaggtggcacctgctgtcttcngtatggtgcccaagcgtattgcttctatacgcctggtcaatgatgccttgcctgatctcaattggttggctgatctgagaggggctatttctgttacagcccttgctaatctcatggacctttgtgacttactcgatgggatggttctgcagccggatgttcctgatgtgcatacctggaggttcagtgaatcgggtgaatactcggctagttc

SEQ ID NO: 61112 - DNA, 492 bp, Zea mays
  unsure (1)..(492): unsure at all n locations
atcctctgagtcacctgcggcatgaagcttattcaaaggttagatagaactaanattgacattatcnatgaattaattgatgctttgaatgagaagaatagattgttagagaagcaagaggatcttctatatgaagagcatgataaattggttagtgcgcanaattctcttgatttagaagttaaaagaaatgaaatgctttcatatgaattatctacatgccatgaatctatttctagcttaaagagtattaatgatgaattaaatactaagttagaaatagctaataaatcaagctcttgtgtagaacatgttgtgattngcaataggtgtaaggattntaatgttgatgcttgtagtgaacacttaattntcatttccaaattaaacgatgaagtggctagtcttaatgcccaacttaagactagcangaatgacntttgataactaanatttgcagggatgactacactattggtagacacctctcaa

SEQ ID NO: 61113 - DNA, 379 bp, Zea mays
tgtgtcttattgcgagacatgatattttttaatactaaataataatatattaccttgcatcatgcagaagttttgagtgttcatttaaatgttgaattgaaatctggatttatgaatagaaaataagaaaaagataaacctgcgtcgtgggccaaatttcttcattcgaccaggaagcaatctcacgtcggcccatctctctccttcccttttctttgtttctccgcgtatcgatgacacgtgggccctacgagtcatgcaaactcgccactcatccgaatcatgcgtgctttgtgctctggcgccgatatgtggtgccgggttgtctgccgctcgtgcattactcccacattcccatgttgcgtcccggtgcgcatat

SEQ ID NO: 61114 - DNA, 377 bp, Zea mays
  unsure (1)..(377): unsure at all n locations
agcntatatcatagcatgatgcatatgcgagtatgataccgatggcttcaagtcgagcaaccggtgcataggtctctccaaaatctaagccttcaactcgagagaatccctttgcaacaagtcttgccttgttcctaacaatcacaccttgatcatcttgtttgtttctgaacacccactttagtccaatgattcttgcatcttgtggnggcttctncagggtcccaaacttggtatgggtgaagttgttatttcttcatgcatagcgttacctagtccggatcctgtagcgcctcatctatgcatgtatgctcaacacaagatacaaatgagtgatgttcaataaaagaagcatgtttatgtgatcgagtaataac

SEQ ID NO: 61115 - DNA, 460 bp, Zea mays
agagtgatttgccgtgttcatttgagctcttgtcgctggattgcttctttctctcattctttcttgcgaacaactcaattgttactaatgcaatagacaccaattgtgtggtggtccctgtggggaagtttgttcccgtctgattttgaagagaagctcactcggtccgatggaccgtttgagagaaggaaagggttgaatgagacccggtctttgtgaccacctcaatggggagtatgtgtgcaagaaccgaacctcgggtaaacaaatcatcgtgtctcgctctttatttgctcacgatttggtttgtgccctctctctcgaactcgtttatatttctaacgctaacccggcttgtaggtgtgattaagtttggtaatttcagattcgccctattcacccacctctatgcgactttcaattggtatcatagcctgtgcttcattatagcctaaccgct

SEQ ID NO: 61116 - DNA, 476 bp, Zea mays
  unsure (1)..(476): unsure at all n locations
aagcttataagggagatacacatttgagactatccaatgtttattttgagaaagacaaggtttgtagcgcatgtcatgcaagaaagcaagttggtacccatcatccacataaaaacatcatgacaacggacaggccactggagttactccacatggatttattcggcccgattgcttacataagcatcggcaggagtaagtactgtctagctattgtggatgactattctcgcttcacttgggtattctttttgcaggataaatcacaaaccaagagaccttatagggattcttgagacgggctcaaaatgagttcggattaaggatcaagaagataagaagcgacaacaggacgaagttcaagaactctcaaatagaaggctntcttgaggaagagggcatcaagcatgagttctcttctccctacacacctcaacaaaatggtgtagggagaggaaaaatagactctactgaca

SEQ ID NO: 61117 - DNA, 185 bp, Zea mays
tttctaaagcagcttctccagagtctgggggtatcctggcaaaatattgggccataagccctggccgaagacccttgatcatgggctcaatgaccatttcattgggcactatgggcgcttgtgctttgatacgcattaaccttcggacatacacctgaaagtattcctcatggtcttgtgtgcac

SEQ ID NO: 61118 - DNA, 481 bp, Zea mays
  unsure (1)..(481): unsure at all n locations
agcttctaagggagagcacattctaggactatcaaatgttcattntgagaaagacagagtttgtagcgcatgtcaagcaagaaagcaagttggcactcatcatccacacaagaacataatgacaacgaataggccactggagttactccacatggatctattcggcctgatagcttacataagcatcggcgggagtaagtattggctagtaattgtggatgactattctcgcttcacttgtgtattctttttgcaggaaaaatcacaaacccaagagactttaaagggattcttgagacaggctcaaaatgagttcggattgagaatcaagaagataagaagcgacaatgggacggagttcaagaactcacaaatagaaggatttcttgaggacgagggcatcaagcatgaagtctctntctcctacacacctcaacaaaatggtgtagtggagaggaagaatagaactctactggacatg

SEQ ID NO: 61119 - DNA, 441 bp, Zea mays
tgacaatgatgaatggcactcgtctcaagagctttcgccatatcctcattcaaggaggtggaaagactacaagtcccgctccaagaatgtttgctacaaatgtggttagcccggtcattatattgctaaatgtcctatgtctattgacagtgaccgacgcgacgacaagaatgggataagaaacgagaagaagatgtactacaggaagaatggcggtgatgcccactgttgtcgcgagtgggactacgacgatagctcaagcgactccttcgacgactaggacgccgccaacatcgccgtcaccaatggacttctctttacaacgtctgcactagtgcctcatggcatatgacggcaaatagaataatgctaaatccaactcctccactacatatgaatcctctagtgacgactatgcttgtgatgacgaggataatttgc

SEQ ID NO: 61120 - DNA, 193 bp, Zea mays
agctggggctttcttcatattatgaattattttctgaaccttttcttcaacctctgtcaccatatcaggcctgaagaagtacctttcaccaggtttagaccaatttagcggagtacgacatcgtcgtccatataaagcttcaaagggtgccatctcaatgctttcttgatagctattattatatgaaacctcc

SEQ ID NO: 61121 - DNA, 422 bp, Zea mays
acatgtgatatgtttaactatcgtgcaattcttataagatagaccttgtgcagcttgtcaagcatgtaaacaagtgggatgagcgcatcacagcaagaatgtgatgaccacttcaagacccctggagctactgcatatggacctcttcggacccgtcgcctatctgagcataggaggaagtaagtatggtctagttattgttgatgacttgtcccgcttcacttgggtgttctttttgcaggataagtctgaaacccaagggaccctcaagcgcttcctcaggagagctcataatgagtgtgagctcaacgtgaagaagataaggagtgacaacgggtccgagttcaagaaccttcacgtggaggagttccttgaggatgaatggatcaagcacgagttcttcgcttcctacacaccacaac

SEQ ID NO: 61122 - DNA, 387 bp, Zea mays
  unsure (1)..(387): unsure at all n locations
agctcaaaggatactattcaactaatgttagaataagttgattagaggccaaggtatgaaaacttcctctccttcagttattctagtattctatccttagtgggatgtaccatagtataggttaaattccttgcattataaaatgttcaatagtgcatataactttgacatcaactatatgtgtgcacttaattaaagggaattaatctaaccctttttgggttcaataatgataattcatttgccatccacatataaggatcatcatttgtgaaaccctctcttgtagttttaatgctctctnttctaagtgttacaacgaagtccttccaagagctttcaagatggattcaaaatctacaanaaatgaatgaagttcaagatcac

SEQ ID NO: 61123 - DNA, 378 bp, Zea mays
ctagatctctgatgctcgagtgactattattgtctgaaaatcacatgcatattcatagaagatgaaagacggttcaatttatccataaaagcataagcgctcatacttgagacacaaaatattcgctcatagcttcttaacaataaaaatcacttgcaacagtgaatgatagtcggtcgttccagacttgccactacaacgaagtatcattaaattaaccaaatgaactatatctgataaagggataattaaataatatatgggataatatatgttgtacatgcacattgtaatcataaccgacataaaacaatagtagtcagaaataaagatttaacaatccaaaataatattaaaatccatttatgttaccttgca

SEQ ID NO: 61124 - DNA, 401 bp, Zea mays
  unsure (1)..(401): unsure at all n locations
cactctctcgatagtggaaatactnttgaatccaaaaattcatgcactaagtccctagtgccttggcttctgatagcccatatgttaacgctaagcctaacgatagcgttaggagttatctgatgatagtagatcccacactttttcaacacatcagcaatcatcttattcaaagggaatctcataccagctttgaagaaactcttataaactactatttcatcttttcctggcttcggagtagtttcctctccaccaaagcgaatcaactctttcttgtcttcattgaaatagctcaatttcagcatcttaagaacgtcaccttcggagactgtggattttccaaaatccagatggctgtgtttgctcggcaccgcaatgttataatcattctcagaatc

SEQ ID NO: 61125 - DNA, 450 bp, Zea mays
  unsure (1)..(450): unsure at all n locations
agcttaaccgctcctttatggcctctagtattcgccacaggcctgatatnagcgcttactcgcttcgccttctacttagtctcccttggcttcgtcgaagtcaagtcggacatgtccctgtttatccctcggcacgatgacgacaccatctacctccagtcctgtcctagtgtccaatcctgtcctcctccagtgcatgatcacctccttgcagcctgagtgtactataaaggagttggccctactccacctcttcttggggtcaccatggaacgttgctctcagggcctcttccttcaccagcgccagtacacaactgacattctagagcggtctgacatgtacgattgcaaaccatgcggcacgcctgtcacacctggatggtctccaacgacgacagtgacctattcggtgatgtgacttgtgccctctccactagcaggacatcaa

SEQ ID NO: 61126 - DNA, 419 bp, Zea mays
tcacttcattctgatgaagaccaagcactttgatcacttcatcataaccaatgttccaactcggagatgcgtgcttcaacccataaatggatctctgaaagttgcatatctttccagcattgatcggatcgaccaaaccctcgtgctatatcatatacacgtgctcatctatgtttccattaatgaaagctgtttagacatccatctgccaaatctcataatcgaaatatgcggcaatagctataatgatccgaatagatttaagcatcgctactggcgagaatgtctcgtcatattctactccttgaactcgtcgaataccctttgcaacaagtcgagccgtatagatgtgaacatcttcatccatgtctgtcttcttctatataatcatttgcactctatgggtcttacaacatcat

SEQ ID NO: 61127 - DNA, 481 bp, Zea mays
  unsure (1)..(481): unsure at all n locations
agcttattagccagtgccattgtgctatactgcaacagagtaagattatgagatatcaactgataatacacatgtacaacagagggtgagtgatgtttcaataaagtacttgtactaagttcactatgaataaatgttataatcagacataactaaatgaatggctactttctaattggttgaagtgtatngactgcgagcaaaaactggtgtgcaatcaagcaccccatgcaatcaaactaccaaaagtcatgaaaaaatctaaaaaaatacgtatgtacttaattatttattgtaccaatatatcagatgtcagattctaatttatcttatgttagaaataanaaggagaaaattctatccaatatgaaagattaanaaaataatagtacttcctctntattatatctcttaacatagcatgaattaggagttaaaatttgatacacacacagctagagtaaataataaagtacattta

SEQ ID NO: 61128 - DNA, 400 bp, Zea mays
aacgtactatgcacatgccgggaaaatggtaaccggtttacctattacctgagtgaagccgggcgcgaactttatccctcatgcgacctgagactgggtctcccatgctatctatggtgggtacaagtgcggtcactgcacatcggcagccggggtcagtggagcattgtatgccaatgcggtgaggcctgtacgcgaacggtgaatcgatggggacggttgtcatgtgtggggtcggagtaccctgacatgccgtgtgtttatgtttaccttgcaaggttaaaactcgattcgaattgcctgcttcttgcagctaatgagactgcttgattccttgtactgcatcgagtaagaagtgaaatgtggttacatgagataactcgttgattgaactaaatgc

SEQ ID NO: 61129 - DNA, 352 bp, Zea mays
  unsure (1)..(352): unsure at all n locations
agcttatgaagattcttcatcccaacatgtgctattcggcgatgccagagccagcccatgttagtcttagcaattaagcatgtgtcgagttcagctctatcaaaatctaccaagtatagctgaccctctagcacacccttaaatgctatngaatcatcacttcttctaaagacagtgacacctacatcagtaaagagacagttgtagcccaatttgcataattgagattcggaaagcatatggaatctaatgaatcaacagaanaacattggaaatggatgatcangggatataagctatttacccaaaccttngaccaaaccttgatttccatcccaaatgtgatagctcg

SEQ ID NO: 61130 - DNA, 402 bp, Zea mays
  unsure (1)..(402): unsure at all n locations
tctctntatcatcatcaaccttaacatataaccattccgatttccaccctgctgcccatatgcttctgtagctgatcacaagacactatgtagttttccgataagcaaaattatagcaaccaaagttgtcatgtaatacatcctttctagcctttgtctgatagtgcagttcatgaactcagcaaaagctgtccgcaaacggttccaccgcctggcttcggagtgcccaaatataaacactaagcctaacgatagcgttaggggttagctggtgaaaatagattccaaaattattcaatatctctgcaataatcccatgaatggtgaatctcaacccaagccttaagaagctcttaaaaataacaatttcatctttctccggcttttgggtagtctcttctt

SEQ ID NO: 61131 - DNA, 411 bp, Zea mays
  unsure (1)..(411): unsure at all n locations
agcttaatgcccctaaggaatagtctaactntgttaagggcaaagctcccatggttcaggataatgagggatatattttatatcctgctaattatcctgagcacaaaattaggagaattcgtgctaggaaacctcatactatttctcaccatgcttttatgtataagaatgaggcttctagctctaggcattctactncatgtaaaatgcctaaaaagaaaacttctactgcttcanatgagcctaacatttcatttaagacttttgatgcatcatatgttntaactaacaaatcagacaaagtagttgccaaatattttgggggggcaaacacaagggctccaagacttgtgtttgggtacccaaggtgcttgtttctaacatcaaaggacccaagactgtttggtacct

SEQ ID NO: 61132 - DNA, 289 bp, Zea mays
tttgggactaaccaatgttcattttgagaaagacaaggtttgtagcgcatgtcaagcaaggaagcaagttggtgttcatcatccacataagaacatcatgacgactgacagaccgcttgagctgctccacattgacctattcgccccgatagcttacataagcatcggcgggagtaagtattgtctagttattggggatgattattctcgcttcactcgggtgttctttttgcacgataaatctcatacccaagagaccttatagggattcttaagacgggctcaaaac

SEQ ID NO: 61133 - DNA, 435 bp, Zea mays
  unsure (1)..(435): unsure at all n locations
agcttgtgagcaatacaagttcagaaaggaatatactgcttctgctgaccagccgaaacccatgctcttatgtgaggatatagcagagcagaaggtgctattaggatctcaattgtccgaagagcangacaaaaccttgatacggttttgctcaacaatacagatgtttttgcttgagcagctgatgatctttgcagagttaacacggatgtacttgagcactcgctcaatgttgatccatccttcagacccaggaaacagaggcttcggaagatgtctgatgaacaggcccgaggtgctcggaatgaagtgaaaagactcctcagtgccggagttattagagaggtaaaatacccagaatgtgtggctaacacttgtatggtgaataagccaacggtaaatggagaatgcgcatcgatcttactgatctcaata

SEQ ID NO: 61134 - DNA, 328 bp, Zea mays
acttcatactcagctgtgcgtctaggacctggcctcgcctatggatgacctctctgacgtattataccggcttctgtatggtccggacccctactgttggccccgggccctcatagtctgtggtggtcggaccaccaccttctcctatgggaacctcctgactcccctggttatgtggctccgtcctttcgacgaccatcaccatgctcaccgcctctgtagccgctgctatgtacaagtacaacgactcccctggcttctgagctaccagtatcggtagggacacaaagtgctgcttcaactcttggaatgctcgctctgtatccta

SEQ ID NO: 61135 - DNA, 482 bp, Zea mays
  unsure (1)..(482): unsure at all n locations
agcttgtgcttgccttgtcctcctctntcatgtaaatctggtggtagcccgagaagcaatctaggagggatatgacttcgcagcctgctgcgctatcgacatatttgtcgattcgtggcaggggaaaattgtccttggggcaagccttattgaggcttgtgaagtcgatgcacatgcgccatttgctgctcttcttctgcaccattaccacgttggcgagccatgttggatagcgattggctcgatgaatctgtcttccaacaggcgatgcacttaggccttggctgcctcagttttctcatcggacattttccgcagtcgctgctttttcgggcgcaccgaggggtcgatgcccaggctatgctcgatgatggagcggctgacccagaccagatcgaatgcggaccatgtgaagacatccttngtgcgggaaagacagganagggagttttcctcatctcgcgatgtcaggtcttcgctga

SEQ ID NO: 61136 - DNA, 462 bp, Zea mays
  unsure (1)..(462): unsure at all n locations
tcagcttacttctaaacttcttcacaaagcttcgctccttgcaatcttcatggctttgtgaaatggctagagaaggaaggagtgatgaactcgccctggtggcatactatgatgccgcagagaagaccgggattgaaaagattactggataaatcatggctgacttattttatgactctaacgatagtgaataatttgattttgaggaggaaaatggtgatgtcaaagatcggtcatcgaagccgagtcatgttatcttcggtaaatcaaggtaatgaaggacaactatattagtgatactttcattgtgaggcttggcgaagaggacactacaccccttcctgagaaagatgaagtggtggtgttccaaatcttcttatagacagggctccaattcccaccacataatatggtagttaaggtatttgaaatttttgatatatgccttcaacaatngatctc

SEQ ID NO: 61137 - DNA, 459 bp, Zea mays
  unsure (1)..(459): unsure at all n locations
agctngacgagtgggccccaccgaacagtgatggaaatgcatgcgcggcgtgaaatatgagataaatgggccggccagaaggggtagttgggccaagggagtgggaatcggcctgagctagttctggcgtttttttttctattttcttattctattttcaaattcaaaccaaactcaaatttaaattccgattagaacaccaacataaatgaaaaactttatatcattactattatttgctatatatttgttttaactattttatacatgattccattcataaaatagaaaatagttcatatcttatgaatnttagtgaaatataatttatgttgtagattatatattaagaaatagttntgatcataattcttatatacataatntcaacccaagaatactnntaattatctagaananattatattaattttggggtagtaactttgaaattatgaa

SEQ ID NO: 61138 - DNA, 450 bp, Zea mays
atttgtctactcttctcacttctggtagatcagaggtagataatagtaagcatgccaaagggtggaattcagtgtatttcagctacattaaccccacgtatgtgtccattcatgaccgacctttaccatttattttacagtgtataccaaacttgtcaaaggactatcccgagtcaattcagtgaatataagtatttacaattccaagagatgtatgtgacacaagcatagaggtcctatatagaacgagtaaagtggttcgacgggaacacactatggttgtcacaccaacatagtgaaaattttctcagaataacctctcggtatactcgcaacttcgtgttgctggcgattacatgtccttttatctcatgattgcttcatgtcattcagcgacaaagagagcaatgtgctaacatctggttgaacaatgtatgactgagaattctg

SEQ ID NO: 61139 - DNA, 475 bp, Zea mays
  unsure (1)..(475): unsure at all n locations
gcttgacaatgaagagatggcgctcgtcatcattagcttccgccaaatcctcaaacaaaggagggggaaagactacaagtcccgctccaagaaggtttgctacaaatgtggtaagcccggtcattttattgctaaatgtcctatgtctagngacagtgaccgaggcgacgacaagaaggggagaagaaaggagaagaaaaggtactacaggaggaagggcggcgatgcccatgtttgtcgggaatgggattccgacgaaagctcaagcgactcctccgacgacgaggacgccgccaacatcgccgtcaccaagggactcctcttccccaacgtcggccacaagtgcctcatggcanaggacggcaaacggaaaaaggttaaatccaactcctccactanatatgaatcttctagtgatgaanatgctagtgatgaagaggatantntgcgtattctctttgccaatcttaacatg

SEQ ID NO: 61140 - DNA, 460 bp, Zea mays
tcagcagaatgatgcgaaggttcttcattctcagataggcatatatgtgctaacttatgttgatgatatcattgtaaaaagcacgaagcaagataatcacattgctgatttgcatgagaccttcgctaattttagacatgctggtataaagttgaacccagaaaaatgtctcttcggagtgaagaaagggaaatttcttggctgtctagtctcaacaaaagggattgaagctaatccaaataaaatcgaagctatccttcgaatggagccaccaagtataaaaagggagctcaaagattgacaggaagactggcatctctcaacagatttatatctagatcagcagaaacaaatttaccatttttcatagtgctgaagttagctgaagttgttcaatggggaccagttcagcagatagccttcgaagagctgaagcaatatttgatagacctaacaacac

SEQ ID NO: 61141 - DNA, 460 bp, Zea mays
  unsure (1)..(460): unsure at all n locations
agcttagcaagtgttagttctggatcagtgaatttctgttcttgggtcatataataaaccgatatggactatctgtggatccaaagaaggtagcagcgattctggactataaagcaccaaaatatgtccgaggaatcaagagtttcattggaatgacggttactatcggcgtttcattgaagatttctccaagattaccagaccaatgatagccttgctagcaaagaaagttgagtttaagtggacccagcgtgccaagaatcatttgaaatgttgaagcagaagttgacaatagcaccggtattggttctgccagatgttcacaagacattctcagtatattgtgatgcttcgtacaccggactgggatgtgtctntatgcangaaaggaaagtagtggcatacttgtcccgacagttgaaagttcatgagaagaaataccccactcatgatctggagt

SEQ ID NO: 61142 - DNA, 390 bp, Zea mays
  unsure (1)..(390): unsure at all n locations
tgagctggccnttctgccatgtcgaaggatgacctcgcatattgccttgcgtataacaatctgattgtacggaagttgtggacttataaatagattatcttgtcttttattctcgtgctgatcctctatctcccatctttttgcagggcttaattcttatcaacgctttgagagcgcagaaaaatgctgaagacaaaagttgtcagatagcgcttatcaaccttcggtcgaatgttatcatattgaggaacgaagctgcagaaaaagacaaaattttgttgtccttattggacagagtgaagaaagacgtggcgaaattcaatgctcaatctgaagtccataaagccgaagttgagaatcttcacgccgaagttaatgaaaattttgaac

SEQ ID NO: 61143 - DNA, 424 bp, Zea mays
  unsure (1)..(424): unsure at all n locations
agctnttccttgtcgtcatcaactttgacatataaccactcagatttccagcctgctgcccatttgctacggtaactaattacaggaaacttagtagttttccgataggcgaagttataacaaccaaaattgtcgtgcagtccatctcttctagccttcgtttgataatgcaactcgtgaacccggcaaaagctgtccgcaaatgggtccacttgctggcttcggagtgcccagattataacaataggcctaacgatagcattaggggtcagctgatgaaaatagatgccgaaccttntcaacacctctgcaataatcccatgtagagggaaccttaatccagcctttagaaagcttttganaataacaatntcatctttctccggttntggggtagtctcttctcccccgaaagcgcaaagct

SEQ ID NO: 61144 - DNA, 234 bp, Zea mays
gttgcggagacccacttggttactacaacattttggtcatgacgtggaactaaatgccatacctcgttccctgtgaaattggtgagcttctcttgcatcgccatcacccaatccgcatcttggagtgcttgctctaccctgtgtggctcaatagacgatacaaaagagtaatgctcacaacaatgtgcaacccgagattgagtggttacccccttatgaatgtcgacgacgatg

SEQ ID NO: 61145 - DNA, 477 bp, Zea mays
  unsure (1)..(477): unsure at all n locations
agcttantccncaattgtgcccacatagtcctctagaaatgactaagaaatntagcatcacgatcagaaacgattgtgttgggcacaccatgcaagcgaacaatttcacgaaagaacaaatcagcaatatgagtagcatcgtcagttttatgacatggtatgaaatgtgccatcttagaaaatctatcaacaaccacaaacacactatcatgtcccttcctagttctaggcaatcccagcacaaaatccatagaaatatcttcccaaggagcactaggaatgggtagaggcaaatacaaaccatgtggatttaaccgtgactntgccttttgacatgtcgtgcaacgagcaaccaatctcaccacatctcttctcatcttgggccanaagaaatgaccagcaagtatgtcctccgttntctttgctccanaatgtcccattaagccaccttcattgtgcttctgtacaacaacaaac

SEQ ID NO: 61146 - DNA, 469 bp, Zea mays
  unsure (1)..(469): unsure at all n locations
tacggacactttaatctcagcttcctggcttatatgcgcgggcgcgggcatgtgacacantcgtggcttgtcgcggcgcggtgcgcgcggtgtctggcgctgggcgtgctctggcatgttcatggcgcgtctaacacgtggatgtgttcttctacccatgttcaacagctcgccgagatcgcaaacgtgtgaatcttggcaaaaatccggcgcatgcctcttcctggcacctatggctatctcttgtatgtgagttccaagggaagataagccctatgtcagaagattttcggacgccaaatcatgctagtcccactgtccacttcgcgataaaagtgatgccaaatcaagtcaaacgaatttggctcggtttcaaacttttccagtgggtgccttatgtggtttggcacctttttggtattcataccaagtggttttggcgccatttactaagtgaacacaactgatc

SEQ ID NO: 61147 - DNA, 438 bp, Zea mays
agcttctccgaaggagcttctctaaagaagcttcttcttttcattggacctaaaatgtattcaatgttaaaggatgtttagggtcttcggcaatagaggccccccaacagtaacacttctatccaacggctaaaggaagtcgttggatacagggacagatgacccgttatggagggtatggcgctagccatacctcgattccacttcagcgagtcatagtaatcagttcttgtctgtcttccaacttcctgcatcggtgttcatgttctccgttgcccactggatagaaaacggatgagggagaagctacacaatgaaccattatttgggccactattaataatgggctttaaggtgggctattgctggaagagtaactagcgctcgattccccatgcagatgtctacaggactagagcacgtattggtaatatctga

SEQ ID NO: 61148 - DNA, 417 bp, Zea mays
  unsure (1)..(417): unsure at all n locations
tatacaagatgatataggcaagagctcgaccatatgttatattataaggagagttgtacaagcatggggtctgttctccactactcaagngtttatccaaagccgaatgtatagaactgatgaacgaaatacacgcacgcctgtgtggatctcacattggatctacgcctttgcttggataagatntttgtcaaggattgtattatccaaaggcagcttctgatgcaacgatattattccataagtgcgatggctattataaatgtgcaatagatcataaacaaccttcgtctctaactcagttaatacaacccacttggccattgcaaatgtggggtcttgatttattatgtccgttaccaccagcacaacggaacttaagatatgttgtagtggcagtggaatattnttctaaat

SEQ ID NO: 61149 - DNA, 464 bp, Zea mays
  unsure (1)..(464): unsure at all n locations
agcttgtagcanaagagttgtcttgngacatgttttatatcatgctgcgcctgaatatttttgttcttgcaatagctntccaattttattgcttgttttgtctgtgatggggtctgttgcattgcaacttgcaacatgaaccttttttccctcaaacctttcgggttccagctattagtattttcaaatggaaacgagcagcaaacaatagaagcaagaaagcgatagaactcgtaaaagaaatgaaatgattcagttcatgaggtggtggtgtaagcctcactgagacaaattagtcgaacagataaggaagttgttttaagggttctctcttgaatccataggactgggaccgtatagaagaagcccacaacagccagcctangtggccataaaaaataagaaacctgtgttttgcttctgataaanaggaaagctctgtatgagtagggatgaaaacggac

SEQ ID NO: 61150 - DNA, 417 bp, Zea mays
  unsure (1)..(417): unsure at all n locations
tagcttctcgatcgctactgcgcatcaactgggaaaaaggatggaagtttctgtatacttgagggcctaatctaatctaacgcagcatgatcatacatacatgtctgaagcgcctttgagcgagagatacgtgttggtatccttttccactttcgccaagacccatgcaataatgataccccgcacggtataaagccgccgccgtcgtcgccgctttttccatggacagccagacaggaggggcaagtcaattctcctatcattttccacgctcgctgtaattgtttttcttctttcctcaagaaaattaagaagcgccaaggacctgtggtccgggactcctttntcatgtgcacgcaacatacgctacactaacactaataacactagtgcactgtctatatatcttgctgatcg

SEQ ID NO: 61151 - DNA, 465 bp, Zea mays
  unsure (1)..(465): unsure at all n locations
agctgtgttcgccccttgaggaggagtgcggtgcatttaggaaacctaacgggtggctatagccctgnggaatctttgtaaaggctacgtagtgatgccctgctgggtcaccttggtagtgatcaatggagagtcatgatctccgggcagaaagggaatcatgacttgtgggtaaagtgcacaacctctgcagagtgtttgacaactgatatatcagccgtgctcgcggntatgagcgcgcaagggagctccagtgattagtggtacttgatcagagaacatttggtttacaggtggcaatgagattgatggttctagttatgactatggtactggtaagtggtattctttccgtttggaaagggtacatcgggctaataacttgggttaatgttaaaacctggctttctactagcanataataatctgaccaactaaaagcaactgcttgacttatttccacat

SEQ ID NO: 61152 - DNA, 465 bp, Zea mays
  unsure (1)..(465): unsure at all n locations
agcttgtggaggttcttcatccccacatgtgctaagcggcgatgccacagccagcccatgcaagtcttagccattaagcatgcatctagaccggcctcttcttttgcaaaatcaactaaataaagtttgccgtctaatacacccttaaaagctagtgaaccatcacttcttctaaagacagacacatctacatttgtaaatagacagttatatcccatattgcataattgactaaccgatagcaaattatatccaagagactctactaaaaacacattagagatagagtgctcattagaaattgcaattntacctaacccttttaccttgccttgattcccatcaccgaatataattgaatcttgggaatccttattcttgacgtaggaggtgaacatcttcttctcccncgtcatatggtttgtgcatccgctatcaataaaatcagcttgaaccccgatgcat

SEQ ID NO: 61153 - DNA, 440 bp, Zea mays
ccctgtagtctggactataagtttggtacggtaggtgtgccttatgcaccttgaccatttccagcatttgcgtaatgaggactctatggagaagcctcttagtgagaccctggccattcacctcggaagtgaatacgggtctagcttacccgggctagaagggaatcgcgactcatgggtaaagatgtgccacctctgcatagtgtaaaactgatatatcatccgtgctcatggttaatagcagcctggactcctcacatgataattgaacttgaagatggaaataaatcgagatccgatgatctgccaatgatttgcctaagtggtttcacttaagtgttattgatatactcttgtacctttgcttaatgggactacttgtgattcacacttattagtaagacacgtgttgttattaaatgttgaccaactataatgct

SEQ ID NO: 61154 - DNA, 482 bp, Zea mays
  unsure (1)..(482): unsure at all n locations
anngctgtgagactctttcttcttctaatggttattgtgtgtgtttgacctctgacatttggtctggtaatgccaaagaggactaccttagtgttgttgcccattacataaaccctgattggcaactagagaaaagggtgcttgctttagtgcttattgatgtgtcacacaatggacaaaacattgctgatcgtgttgctggtgtgcttgctgattatggcttgactaataaggtgtttgcttttaccctagacaatgcatcatctaatgctgctgccatgaggttgcttaaacctataatgtcaccatatcttggtattgataatggggcagattctgaaatgttcttgcatcagcgttgtgcatgtcatataatcaatttgatagttaaagaggccctagattctcttaagaacttgattgaaacatttagaactgcaatatcnattttaaactcatctaatcagagaattgctgcatat

SEQ ID NO: 61155 - DNA, 353 bp, Zea mays
cccgtgcaaggacgttggtgctatccaatcaagagctgtctatagactattcgaaagaaatgttgaaacaaatgcaaaatcgacgcttccattgttaaggcatacattctataggaggtctcaaaacttacaacaacttattattgtgacaaactgccgatcgtgcataatccaccccctcgttacaatgatgacgacaatgaatctaaccttaacatatttcgaggccaactcggaagcgcaagtggctcgaccaccaataccctgacacatgaagagtggcggcatatcatgctatacgtattgaccaaccttgaagaagtgacgccatacatggaataatttcttcatga

SEQ ID NO: 61156 - DNA, 474 bp, Zea mays
  unsure (1)..(474): unsure at all n locations
gctgtccgttagaaacgaacgaagctccagtttgaaacctgcttcggaggaagaaaaatttaaagtttcacaagttcataattgaatggccagagtccgctctaccgccagggttgagcgcgagggggaggaaactgaagcttcggagactcttcccatctccgaagccatgcaacgatcgggtctagtgacttcagaaaagatccctcatgatgatgcanaacaagcagaacaagcaatcactgaagcagaggaagaagatattgaggaaactgattccgaagatgattaccgcattgccatgcctagcaagccgagccacttggacttcangaaatctactgtttcgaaggctgatttgtccaagatggtaaaagcgggcttttttactgaaaatcagaagaagttgttgcgcttcggtggagaagagactaccccgaagccagagaaggatgagaatngttattttaaaag

SEQ ID NO: 61157 - DNA, 484 bp, Zea mays
  unsure (1)..(484): unsure at all n locations
agcttcttcaccatgtgatcacagttatcttgagaatggtgggcaatgcatttcccttttagttgtgtcaagctccttcttagcctctcattttcttctttgagcttttgatatgaatcatcatttgttcctgcaaattctagctcaaaggaagatttgcttgttgacaaacaacaagcattagcacatggtaatatagtatncaatttaatacatgtgcatgagtgaggttgttgggaatttaagttttctatcacgacctcatgagcaatgtttaatatgatatgatcatccgtaaggttttcatgggaatatagaagcatatcatatttttcttgaaaagctagattttcaactnttagctnttctacttggtccttaagcaaggtattcctatntactaattgagcgatacaatgtaaagcgttatcttgctcaattgannatagttcatacctttggaccanatcaacatgagagcact

SEQ ID NO: 61158 - DNA, 475 bp, Zea mays
gacacttaaaactcagctgttctattatatactcaacttatacaactcactttccttatgtatattacataatgaaatagcctactactacaataatctagtcatctgcgtccttggctgctcctgctccactgctatcttcatgagaacgatcatctgcaatgttcatgtaaagtggggctccaaagagatccaactccccataatgtcctccgccatctgctcctaatgcactatctcccatcaccgcaacctctagtggcacgttcggatgtagctggtcatacaacacgtgcacttcctcgtgcagagcattattatacacttgcatattttccatggctacgcttatctctttcacccgggctcgggtagttgccttgcaatcctatgctatatatctatcctgctccacaacctcccgctacatatgttcaacctctgttgacaactcggcgatgcggcgactatcaca

SEQ ID NO: 61159 - DNA, 479 bp, Zea mays
  unsure (1)..(479): unsure at all n locations
agcttctaagggagaacacgtgataggtctaaccaatgttcaattcgaaaaagatagaccttgtgcagcttgtcaagcagggaaacaggtaggaggctctcatcacaccaaaaatgtgatgacaacatcaagacccctggagctgctacatatggacctcttcggacccgtcgcctatctgagcataggaggaagtaagtatggtctagttattgttgatgactnttcccgcttcacttgagtattctttttgcaggataaaactgaaacccaagggaccctcaagcgcttcctaaggagagctcaaaatgagtttgagctcaaggtgaagaagataaggagcgacaacgggtccgagttcaagaaccttcaagtggaggagttccttgaggaggaagggatcaagcacgagttctccgctccctacacaccacagcanaatggtgtggtagagaggaagaacaggacactcattgata

SEQ ID NO: 61160 - DNA, 461 bp, Zea mays
ccttatgacataacccacccctaattaagaagtgtaatgcacagtggcccatttacaccactcttgttatttttgtctatagcataacctttttcaattgaacctctaagtcctatgataagctatattgaccaaatgcaagccactgtaattgttacaaaatttttggaaaaaaattaaaccaatggtgtagttcatacctacactagaatcatagatagaaaataaagaaaggaaaatgaatgatggaaaatggtatcatcctaaaaccctggttaattgttcactaaatgataataaggaaataccaatcctatatgcttatccttaacaaaaacctatacctacagtgataagcctaaaccactaatagccctgcgtgaccaagaaaccctaagtactcattaacctaattttctttgttaacataatggtataaatcctgataatcatgaatacat

SEQ ID NO: 61161 - DNA, 305 bp, Zea mays
  unsure (1)..(305): unsure at all n locations
catcaaggccactggatctacttcatatggatttatntggaccaacaaattatgtgagtgccggtggcaacctctactgtctattgattgttgatgacttctcatgatacacttgggtgttctttctccatgccaaatctgaagttgcatctatattcaagaagtgtgcccagaaagctcaaaatgaatttgattgcgagatcaagaagattagaagtgataatggcaaagaatttgacaacaccaacattcatgagtactgtgatgaaattgggacaagcatgaaatatctgaacatacacacc

SEQ ID NO: 61162 - DNA, 471 bp, Zea mays
  unsure (1)..(471): unsure at all n locations
agctcgngaaagttcttcatccacacttgtgcttatcggcgatgccacaaccagcccatgctagtcttagcaattaagcatgcatctagactggccttctcttttgcaaaatcaactaagtaaaagttgctgtctaatacacccttagaggctaatgaaccatcagcttttctaaagacagacacatctatattagtgaataaacagttatatcccatattgcataatcgactaacagatacacatttatatccaagagactcatctaaatacacattatatatagagtgctcggatgatatagcaattttacctaacccttttaccttgccttgattcccatcaccgaatattattgaatcttgggaatccttggttttgacgtaagaggagaacatcttcttctcccccgcatatggttgtgcattcgctgtaataatccagctagaaccccagatgcataaacctgca

SEQ ID NO: 61163 - DNA, 325 bp, Zea mays
  unsure (1)..(325): unsure at all n locations
cttatattctaatcttcaactccacgaccattaattatgtggaattatgctcatctcatgaacacatatcgattatgttaactgggcaaattattcaataaagggtgataagagcttcgatttatttcccgcttccatgcatgtaaaaattacaatgtctgcacaagtacacagggtgttctttacacgttgcgacatcgccaatgtgtggacgatgtacaaatacataatgtgtatgntcctccatgcttccacagaaaccctgcagaaaagaatagaggggctgtgtcaaaaactctaacagagttgatttgtatcaatttca

SEQ ID NO: 61164 - DNA, 461 bp, Zea mays
  unsure (1)..(461): unsure at all n locations
agcttgtccttttaaatacaacattcttcaatcctctaaccatgtctttctttagaaccttcttgagtgtgctcattccaacatgtggaaaccttctatgccatagccatccaagagatgctttggtaaagaggcaagtccttaggtttgcatcttcagaagagaaatccactaagtataggttgttgtatctaaatcctttgaataccatngattcatcatccattttagacacaacaacctttgtaggagtgaataaacattgaaggccaagatcacaaagttgatccactgatagcaagttgaagcttaatggtgcaaccaagagaacatttgaaattgaaagatcatttgaaattgccaccttgccaagcccttgaacttttccttttgaattatccccaaaagtgaatttatcttgntcatcaacattntcatcaagtgatgtgaacattcatggg

SEQ ID NO: 61165 - DNA, 399 bp, Zea mays
tgtgcgtggaagatgatatatgaggactgtgagtctgggtacgaacagctacctgttcttttaaatgcaatgaatgcggtcaatccatgcatgcattatgagtacatccctaaaccaaatgcatggcttgatgggagacaaatattcttccgtgctttctggtgctttccccattgtgtggatgccttccggcattgtcgtcctgtcttttcaattgacggcacatttcttctcggcaagtaccatgggactcttttaattgccatatctgttgatgcaaacaacaagctatttcccctagcatttgctctggttgagaaagagaacaaagacagttgggggtcgttcctgcgactggtctggatacatgtggtttgcccatgacgggaagttggtgta

SEQ ID NO: 61166 - DNA, 472 bp, Zea mays
agcttctaaagggagaacacattgtgtgactaacagatgttcattttgagaaagacagggtgagtagcgcatgtcaagcaaaaaagcatgttggtgttcatcatccacacatgaacatcatgacgactgacaggccaatcgagctcctacacatggacctattcggcctgatagcttacataagcatcagcgggagtaagtattgtctagctattgtggatgattattctcgcttcactagggtgttctttttgcaagaaaaatctcatacccaagagaccttaaagggattcttgatacgggctcagaacgagttctgcttaaggatccagagaattataagcgacaacgggacggagttcaagaactctcaaatagaaagcttccttgaggaggatggcatcaagcatgagttctcttctccctacacgccacaacaaaatggtatagtggagaggaagaatagactcta

SEQ ID NO: 61167 - DNA, 416 bp, Zea mays
tttctagaatcaagaatattgagctcatgcctaagtctggtaaaagattgttcatcaagtggcttggtaaagatatcggctaattgatctttagtattaatgtaagaaatctcgatatcccccttctgttggtgatccctaagaaaatgataccgaatggctatgtgcttattgcggctatgctcgacgggattgtcggccattttgattgcactctcattatcacatagcaaagggactttggttaatttgtaatcgtagtcccgcatggtttgcctcatccaaagcaattgcgcgcaacagtgacctgcggcaatatactcatctttggcggtggaaagagcgaccgaattttgctttttgaagccctgacacaaggatcttccaagaactggtagtccccatgtgctcttcta

SEQ ID NO: 61168 - DNA, 426 bp, Zea mays
  unsure (1)..(426): unsure at all n locations
agctntggatgtgcatcaactacaccagcctgagtaaggcaagtcctaaggacccttatccgctaccacgaatagatccgatcgtggactccacctccgggtgtgacctgttgtcttttttatatgcttactctaggttccaccagattcagatgtctagggaggataggaagcataccgctattgtaatagtgggtggtctttattgctaccacgaacccttggaagctggggttcctagtttcacgctggggcatcgaggcgaacccagacaagattaggacaatcgatgcaatgaagcctctcgcctgcatcaaggatgtgcagaagctgatgggatcattggccgcccttagccacgtcatctcaaggctagctgagagggcgctcactacaggaaagaccatctntgtcgagtgtcaaata

SEQ ID NO: 61169 - DNA, 403 bp, Zea mays
atgcttcgaatcgtgtcaaccaacttgcaatcacggagtatgagtttgaataaacaaaacacatgccgatctcgtgctgtccagagaaataaaagggtagttggcgtatcaagtgaagaatctgactgcatttgttttagtgggagatggacgacaagtggagtggagtatcctgccgcactactacgcgagtggcttcgtccgtccctgcaaagaacttgcgcgacatctcgtctccctatcttgatccacacatagagtgctgtctacgaaaacacctttctatgcaccgcacgtctgcactggatgggacttgcatgcatttttttatatgctcctccgtgctagtatcatgttgttgcaatatgtgtacctccttgatccaacaaatcgcatgacgcat

SEQ ID NO: 61170 - DNA, 471 bp, Zea mays
  unsure (1)..(471): unsure at all n locations
agcttggtgccaatggagaagcaaatatccctgaagtcctggctgtcaaactggttaccattgttgtcggtgtttcgggtccgaccgcgcacccagggttaccccccaaggtgcttttaggagtaggacggtgttaccgactgtagctcgatggttcgtgctgngcgcgcgagaaatagtagacaatgatgtacaggttcgggccgctttgagatgcgtaacacnctacgtcctggctggaatgctttatgcgatgggttacaagggagctctctagtgctggaaaacgtagagagcggngtggatggctaagtgatgaatgatgtctcccgtctggaaggggtgctccctgagccttatatactcgaccatggggcattacatgtggatatgataacaacgtgtgccanagtaatagcgaactaattgagtctatcttcctatagttcggtcgactcaccctcgctcagt

SEQ ID NO: 61171 - DNA, 357 bp, Zea mays
  unsure (1)..(357): unsure at all n locations
tttctggttaattcgatggattgatggggataaaatggaaataattgacctattatactaccattcaaaaataatgacaatgatttatacactaatagatacgtatgtactaacactattctcgtcatgatataagtgattaaaaataaaatatgttaattagcattgttactacctaattggcacacaaaacacacactagtcaacataataataaccagaatacatggacaatcttgtcaagcacatttttgaaggacgggctcgctcatccaacatctaccgtggacattccccattggtggatatctctatctaaaatatccttgaaccanatatcacttgtctatctctatc

SEQ ID NO: 61172 - DNA, 344 bp, Zea mays
  unsure (1)..(344): unsure at all n locations
taaagacagatacatcaatattcgtaaataagcaattataacctgttgggggtcttcttttccgccgaatgtcctcaaggcaaaaacacctttggcaaagtgacacagaagtcctcttttcctcaatcgaaggctctcaagacaaagaccttgcgtagaagcaatattgtcaaatgtcgaagctaccatcatcttcggttcaagtcaagcagaagaagaatagaccagatagaccctactatcttacgttatctgtagataaatgttganggtcatgaaatgtaatttatctgggctgcgttccgcgcctatatatatatgaacagtaacatcatacttgtcac

SEQ ID NO: 61173 - DNA, 410 bp, Zea mays
  unsure (1)..(410): unsure at all n locations
aacgccctatctataagatacattcactctatttgcactggaccgccctccaaagcttcccaaggcaaatgcacaattacatgttgcctcacattgaagaatcctggcgggaaaaccttttcaaatttacaaataaaaattggaatttctttcttcaaattctgcatcaacctcttcgataccagctttgcgcatacttccctataaaagtaactcatctctgcaaatatgctccaaagctcatccttaaaatagcctcgaaacatcacgggcatcagcctctccataataatatggtagtcatggcttttcaaaccgatcaatttaccggtcttcacattgactgcccgtttcagattcgccgcatatcgatctggaaatttcagattcttcaaccacttanatatttc

SEQ ID NO: 61174 - DNA, 126 bp, Zea mays
tctctggactaactctgctgcgacactctctgccgttgttctgtattaaccacacctgaagaccgtcctaaccaaagtcctggatgccgcggtgattccacattgctctatcgtggactctcatct

SEQ ID NO: 61175 - DNA, 450 bp, Zea mays
cgcagctgcaactttcacgcagagacattagggacttactttgttctttttgttaaacaaaagattcgtcgcgcatgtcaagcacggaagcaagttccgagttcattattcacacaaaaacattatgacgaccgacaggccgtctgatctacttcacatggatctatttgggccgagagctcacataatcctctgcggcagatagtataggctttgttttgcggatgactatacttgcttcacttggcgtgtctttttgcaagacaaatctccaacccaacaaaccttaaatgtgatattgagacgggctctaaatgagttttggcttgaaggtcaccaaagatcagacatcgaccgaagagtacggacgttcaacaacctctcaatatagtatgccttccttgtagatgagggcatcaagcacgattcgcttctgcctacacacccaac

SEQ ID NO: 61176 - DNA, 473 bp, Zea mays
  unsure (1)..(473): unsure at all n locations
agctttctcaacctttcttagtgctgaaagaatatacttcaatgtttataatnggctcacgccatgattttaaatntttcataccctttccctatcttcttgaattntgctcatagggctcacttaaggtttttattaaggttgcaacattattactcttttgaaagacccatttgtgttgatcatgatactctcaagtatatgcttggtggatttttcattctcaagtcaatttaatgctcatgcttaatttggttcacataaaatgatggttcttggtttggcactttgagagaaaccctatgtgacactgtggtgtcacaagaaggatgaactcttggacacccaagatgacttcctaattaacgaaaataagaagcatgttaaggttaaaaatgcttacgctctataagtagaaaaatgtgacaaactatctcatgagctaagcacttgccatgatactattgtcaacc

SEQ ID NO: 61177 - DNA, 156 bp, Zea mays
ttccatctcttgacacacagtgttgtcagaggtcttcaccataacacagtggcaggaagtcttacgactcagagcatctgccaccacattgtccttgcctgtgtgataatggatctccacgcactagtccttaataagcccaagccatgcgctttg

SEQ ID NO: 61178 - DNA, 439 bp, Zea mays
  unsure (1)..(439): unsure at all n locations
agctntatcaaatggacgtgagaagtgccttcttcaatggaccaatcaaagaagaagtctatgttgagcaacctcccggctttgaagacagtgagtaccctaaccatgtctataagctctctaaagcgctttatgggctcaagcaagccccaagagcatggtatgaatgccttagagatttccttattgctaatggcttcaaagtcggaaaggccgatcctacactctttactaaaactcttaaaaaggacttgtttgtatgccaaatttatgttgatgatattatatttgggtctactaacgagtctacatgtgaagagtttagtaggatcatgacacaaaagttcgagatgtctatgatgggggagttgaagtatttcttatgattccaagtgaagcaactccaagagggaaccttcattagccaaacgaagtacac

SEQ ID NO: 61179 - DNA, 296 bp, Zea mays
  unsure (1)..(296): unsure at all n locations
taagctggtgccgacggagaaaacaaaaacctcgagatcttggctgtcgaactgcttgccgntgtcaactgttagctcggacggtactccgaagcggcaaacaatgctctgccaaaacaatttttgggcagtctttgatgtgattgtggaaacagccctcgcttcaatccatttggtgaagcattccacggctacgaaagtgaacttaaagttcccctgagcggcgggcaggggcccgacaatgccatgccccatcgttggagacgccatgtgtgggcaatcagctttgatattgt

SEQ ID NO: 61180 - DNA, 422 bp, Zea mays
  unsure (1)..(422): unsure at all n locations
ggttagccacgtntttgaggaccttcggaagaagaaagccctcaacacatgtactacccaaaaattcagtggtaaacaaggcataaagatagtcaaactaaggtaacctattgggttccatcaaaattaacctatgcagatcattatgaataattagaacatgacagtgtaaaaagaagtgatcaagggcacaacttgcctaagacttgagattctaggtaccaacttgctcttcaggtgactcgtaacctcgtgctagttgtagcaatacaaacaaacatagtataggcaaaattaacatcacaccacacataagaatgaactgcataataataatctacacgtctttacgagatcatgggatcgagaactactaagatcggagtcatggttaaagagatatgaatttatataagatctat

SEQ ID NO: 61181 - DNA, 464 bp, Zea mays
  unsure (1)..(464): unsure at all n locations
agcttcggaaaccctatacttctatccatcttccggcagacagataattctttgttgtctgggaggcagtataaaaagtcatcttcgtccgtgccattgaatactaaggctcccttcggatacttcaattcccgagcatagtgattagcctcaaaaatctcttcttcagataatctttttccagaagcatgtcgtataatataattgagggcctcggaggatgcttcgggggcagcagtgtcagcttcttcaaccaaaattggctctgtcctttntggttcttcggcttccaagggatttatcttcgtaagttctgaaggcccagcttcagtttcaggttgttgcttcgaagtttcaacagcaagggtttcaccaggcacttcaagagtttcaatagttttctttggagtgatgcttgaagaattaattgtctccaaaacatctagcacatttaaccattcttt

SEQ ID NO: 61182 - DNA, 502 bp, Zea mays
  unsure (1)..(502): unsure at all n locations
acctataaaactcagcttctnagggagaacacgtgatagggttgactaacgtgcaattctaataagataggccttgtgcagcttgtcaagcatgtaaacaagtgggaggagcacatcacagcaagaatgtgatgaccacttcaagacctctggagctgctgcatatggacctcttcggacccgtcgcctatctgagcatatgaggaagtaagtatggtctagttattgttgatgacntttcccgcttcacttgggtgttctttctgcaggataagtctgatacccaagggaccctcaagcgcttcctcaggagagctcaaaatgagcttgagctcaacgtgaagaagataatgagcgacaatgggtccgaattcaagaatcttcaagtggaggaattccttgatgaggaggggatcaagcacgagttctcctctccctacacacctctatcaaatggtgtggtagagacgaagaacacgacgctcatagatattgcgaggac

SEQ ID NO: 61183 - DNA, 467 bp, Zea mays
agcttcctccctccttaggagaaaatcattatctgtccggatgtactcatccattttctgaagcaacttctctagagtctgaaggggtttcctatcgaagtactgagccgtatgtcctggccgaagacccttgatcatggcctcaatgacaatttcattgggcactatgggcgcttgtgctctcagacgcaagaaccttcggacatacgcctggaggtattcatcatggtattgcgtgcactggaacaaagcttgagcagttaccggcttcatctgaaccccttggaaacttgcgatcagaatgtccttcatcttctgccatgatgtgattgttcctggctgaagagaggagtatcaagtctgtgcaacattgttgacttgcatgacaaaagattttcctatgactgcggtatgcccccatatgaagaatggtcgctcgtattcatcaaactgttcaatctgaggcc

SEQ ID NO: 61184 - DNA, 471 bp, Zea mays
tctggtcatgaagtcgccttagaagctagcgctcctgatgacttagtcttgacctctgctgatgatactgatctggtccccactgatgcattgcacgttgttctggatgctgatccttcatcgagccatcaagtaacttcccaccacttgtgagatccttcgttcttttccaacctccaaggaacttggtttatactgatctggcttgtaccccaggcgtgatattgtgctgatatacatttgttttaatgtcaggcattggttgatgaaatggtatgtcagctgatgtcacaaggtgcttctgtcccatatagggctctatctctagcgcattgaaacccaatgctgctataacggctggtgtccgatttggagatggcaaaagctgtgtaatggccttatgttcttctttgatacttgattaatttagttttaactgaaaccctccttgacatttctaaccataaggac

SEQ ID NO: 61185 - DNA, 467 bp, Zea mays
  unsure (1)..(467): unsure at all n locations
agcnttgtatgggcaaagtacctcttacttttaattcaaagtcctaatcaagtgcaagctatcttggatatcatgccctagcttgtcatgcacatctaagtggggatttcccaaaaccctaaagcaaaccccccatgggcaataagaaccctaactgaagccatgatcaaaagatcatgtaaaccttatgattatggtgtgggccaaatataaaangtgtaatatacttaataacctacaattaatagtaaggaagtacccccaaaaagttttcagaaaaaccctaaaaagttcacctaaggttcatcacaagggataattcagtttttgcctaagtacaaaaactaacccttgcacaaagactccacatgttcaccttaatcccctnttcaaaaccctttgacccaatagacaaaatggcgcctaattaaccctataacacccttgaaagatagtgacactacact

SEQ ID NO: 61186 - DNA, 467 bp, Zea mays
  unsure (1)..(467): unsure at all n locations
ctcagcttgcgccagaattcacaagcaccgcttgggtttacttcctctcaatacagcggaatgtcgtattccccgcatgaagagacacgagtggttctgatcaaacaattgtcgatcttggccttcttcngcgcatgccctatgggctatatactgcgcatatcttgggcacttaacaatctcatgtgccgactatatttagacgaggctggaagcttgtaatatacacccggagattctactggccacttcctattatctttctgtcatcgtgaactaatagtattatctttctgtcatcgttgaactattagtactatcttgcttatctatccagttagcactgtgcatctatcacagtttatatgctatttaaatggtgggacggagtacttgatatcatcccttatcacaactgggtactgatctatttattattatacattgatgaatcatggagatcattt

SEQ ID NO: 61187 - DNA, 290 bp, Zea mays
  unsure (1)..(290): unsure at all n locations
tgttcattctcagaaacacatgagttatattgcatgtcacgcatgatagctagttggtattcatcattcctacacgaactgtatgatgactcgatngccgcttgaactactccacatggatctatatggtccgattgtttacataagcatcaacgggagtaagtattggctcggtattgaggatgactatctctcgcttcacttggatattcttattttacgacaaaacttatactccatgagactcttaaatagtatcttgagactggctctaaatgagtctggattaa

SEQ ID NO: 61188 - DNA, 479 bp, Zea mays
  unsure (1)..(479): unsure at all n locations
ggaccttaagcaccgcagctgcagcttgggagaccagatcaccaagcttattttttctggatgagaagtggtcacccaagttccgttgatgaagcaccacaagaacaatcaaggaaggaatccatgtgggagttcgcaagagaaaggtttgtgtgttggcatctatgctccttcaataagcaagctgccaagcaaaagctagaagcctcaagatgattcttgagtagccagaaccagcgtttgcaatcagcaaccggatgcgcctcaaaggccagattttgttgaagttccatctcctcgaagagtctgcaaagtgaagatatgtagctgaagtaaagctatacccataacccttctaaaccgaatctcgaggacgagattccttttaagtggggtagatttgtagcatcccaaaaattcaaattctgaaattttctcaaactcgccctanattcaaaatgaatttcaaatttcatttc

SEQ ID NO: 61189 - DNA, 439 bp, Zea mays
  unsure (1)..(439): unsure at all n locations
ccatggttcatgataatganaggatacatttgtatcctgataattatcctgagcacaaaattatgaggattcatgctaganaatctcataatgtttttcaccatgcatttatgtataagaatgaggcttctagctctangcattctgctcatgaataaaatgcctaaaagaaaactcctactacatcaaatgagcctaacctttcatttaaaactcttgatgcatcttatgttttaactaataaatcacgcaaaatagttgccaaatatgttgggggcaaacacaanggttcaaagacttgtgtttgggtacccaaagtgcttcgttctaatgtgaaaggacccaagaccgttngtgtacctaagaacaacgcctaaattgtttgcacgttatgcatctgggtctcaagtgatcattgatgccgatgcacaaccatata

SEQ ID NO: 61190 - DNA, 462 bp, Zea mays
  unsure (1)..(462): unsure at all n locations
gcttatcccaatcatctgttataagttcattctttctatctttagttgcttgcacacaattgataccatttataatgtcttgatctttgcgttgcaatgctgttgaaagggtgtttgtgattgctgatacatttagcatcagatgcaaatagaagacaaaagctaaagactgaaagtatttcaccctgaattcattaaaccattcaggattaaatcctctattttccccaccaattctagtgctaggaaaatcatgagtgcggngttgacaaggcccattctccaagtatttgcttcttaccacatctctgatattgggatggtacttactaatttctttccttttgcctgcgtcaagatcaatcttattctcatccgcccaagtgatgcattgttgatcgttgctggcaccatctggcgttatttttttaaatacctttgaattagtcattagaagctact

SEQ ID NO: 61191 - DNA, 464 bp, Zea mays
agaactcaaccttagacagataatatggcttgagttgatcaacgattatgatttggaaatacaatatcaccctacacaagcaaatgtagtggctgatgctttgagccgtaagggtcaagtgaacaacatcactactcatttgatgtcacagaaattgtgctgggaaatgaaacaactcaaccttggtatgctcaataatgtataagcaacggttatggaagtcgaatctactttggaagaagagattcgtataggacaagagtctgatgagaaaatcaaagaaattaagacacaaattagtttgggagaagccccagatttcacggaagatgatcaaggcacagtatggtgtaagaagacaatctgtgtaccggaaattgaacacctacgctcacttattttgagagaagctcatgaatcagcttactctattcaccctgcgagtacatagatgtaccaggatc

SEQ ID NO: 61192 - DNA, 467 bp, Zea mays
  unsure (1)..(467): unsure at all n locations
agncttagctgggacgtttggatcctccaatctatattatattcatcttaagtntatctgatcttttagcttgaccgtttagatacctatcatctaaatttagccaagtaaaaagtttagtttgatggattcaaacagaccttcgacctaaaacttattatctcctctctcacctctaaatatgtaattctcttccctatgcttatggtgacgctacgtgcagtttttctgatgctgttacgacgtactagatatttagtgctagtttggcaacccttatttttaaaagatttctcttgaaagaataaagttgtcaaactagacattatcatataagtttgtaaaaatatatgtgctcttcaagttgtgcattagtgcatcagagttctattattgctagctttagcctgtatgtattacgacttcttgtcgcgcatgagtaatcgtggatgtgggtgatatatgct

SEQ ID NO: 61193 - DNA, 460 bp, Zea mays
  unsure (1)..(460): unsure at all n locations
atatacgaattgactcaagcttatctaccggtgcataggtttcaccgaaatccaaaccttcgacttgtgaatatctcttggccacaagtcgggctttgttccttgtcaccacaccatgctcatcttgcttgttgcggaagacccatttggttcctacaacattttggttatgacgtggaacaagatgccatacctcattcctcgtgaagttgttgagttcctcttgcattgcgaacacccaacttgaatctcgtagtgcatcctctaccctatatggctcaatagaggaaacaaaagagtaatggtcacaataatgtgcgacacgagattgaggggtacncccttatgaatatcgtcgaagatggagtttacggtgtgatctcattgtatcgcttggtggactcttgggtgtggcggacttggacactcatcatcttacttgtcttgatcattaacatct

SEQ ID NO: 61194 - DNA, 370 bp, Zea mays
caacactttttattttattaactacagaccataccagtaacttggcctttcgcatgctgaggactggatatgattggacctttcaaaaaagctcaaaggggatatacccatgtattggcggcgatagataaactcactaaatggatagagttcaagcccatcgctgctttaacctctgctaaagccgtggaattcatacaatgcataatattcagattcgggataccaaatagtatcatcactgactagggatccaacttcaccagttcagagtactttgacttctgcgagcaaaagagcattcagatcaagtacgcgtctgtagcacatccgagagccaacgggcaagttgagtgagccaacggaatga

SEQ ID NO: 61195 - DNA, 467 bp, Zea mays
agcttatctcggccaatcaatgtgtttttattttggacgtttaattcatgacaactatatgttggtacacaattctatcatggccctcaaaaaaagatggacaacattttcctcaagttagatatctcaaaagctttttgattcaatttctggcctttttacttgaggttcttgttcatttgggtttcggcttggatggtgcaatttgatctcaaatcttctagcatcctcctccactcaggtgctccttaacggttccccaggccatttaatcacacactgtaaggagctgcgtcagggcgactatcggtgttttgggtccgactgcgcacccggagttgcccctcaaagtagcttttggagtaagacggtgttaccgactgtagcttgatggttcgtgctagatgcatgagagacagtggacagttgtgtacaggttcgggccgctttgagatgcgaacacccta

SEQ ID NO: 61196 - DNA, 478 bp, Zea mays
  unsure (1)..(478): unsure at all n locations
ngatgtagcaacctcatgtgatgatttgattcaagaatagcatactagtctacatgctgaattgactgataaagttgaagtcctgactctagacaaccaaaaattgaagaattacttgactgatgcaactactagaggaaaagttgctattgagaacaatgatttcaacaatgagttggcagtggataatcaaaggcttaagaatgaggtcaagatactaacacgtgaatatgaacatcttgcaacaagtgtgcaaaagttcaacaagggtcaatacctccaaaatgagctgcttatgaacactgttatgaaaaataacaagagtggtattggatacaatgcttttgtgcaaaagaaagctatcactcaatacaagccaaagcatactcacaagcctatcaaatgctttgagtgtggaaatgaaagtcattttgcccacaactgcatagctaaaccaccaactcccttgcctaagcac

SEQ ID NO: 61197 - DNA, 477 bp, Zea mays
  unsure (1)..(477): unsure at all n locations
agcttatatttaaatttctgatatttttgatcccaagccctccattgctttttccggtacaagctcacacccatttaatcaaatgacacttctttttatttcctcctccttgccagagaaaacgttttcttctcatatcaaacttattgattatggttttgggcagaaggtacatggacatattgtaaattggagcattagaaagacaatcattaataggggtaattccccaggaatagacaaaacactgcccttccaattttgaagccttttatcaactttttccaccaacttagtccaatcatccacatggagtctacaaggactaaccggaacaccaaggtaattcatagggagttcactgactntgcaatcaaaaaggttagcatactgatcagcaatcatattatttccatttatgannaaaattcacttttcatngaagttaattttaaaccggacatgatntcatacatg

SEQ ID NO: 61198 - DNA, 452 bp, Zea mays
  unsure (1)..(452): unsure at all n locations
actcaagcttttgggtagatatgctattgctttattaggctgtgggtattaagtatttcatcactcattgttatactttttattatctgtttattattattattcatgataagatcattatgttaatgggaacatggagaaccacccgggaaaacagtgctaccacaagggtataatgggacgcccttggctgattaactangaaagctagtggatgactaccttacccganaggggcaagggcagtatgggagtggtcagtgtatggaggtccttgggttgattttgctgcgatggcggtcaggcaagaaccctgcattggagcttcctatacactgtagcggcgtttctgaagctagtggaactttgtataggcctcgtagtgttactctgactctcctcctctgtagatgggtatgggaagtcaccatcccttggcagatgagtaacat

SEQ ID NO: 61199 - DNA, 453 bp, Zea mays
  unsure (1)..(453): unsure at all n locations
agncttaaatgaagatgagaaagatttctccttagagaagaacattccgaagaagagaagagtatcatctccgaagcgaaaagtatccgacgaagaagagactcccgcatcacgctctgccactgacgtggaagagattttgaaggtaatgactgaatccctgcctgtgaagctaagtccattagggcctcaactgacgaagttttttcagaaggaaaaggagcccgaataaacgaatgaaacaactaaaacaaagagacaaagaatcatcgcagtgacagaagtcattgacaaaacaccaccaagagcctcagctcggaagataccagcggctgaagaagtaacaaatattgaagtcgcaccttcagagatcgcggctaccgaagccacttcaaccgaagatttgaacttggaaaccacaatcgaacatatcgacaatatactgcttaacat

SEQ ID NO: 61200 - DNA, 407 bp, Zea mays
  unsure (1)..(407): unsure at all n locations
taagctgccntacttgtcaagcacaacatctaccagctcatttattgcagaccataccggtgacttggccctttgcatgctgggggctatatatgattggacctttcaagaaagctcaaggaggatacactcatgtactggtagcaatcgacaaattcactatatggatagagttcaaacccattgcttctttaacctcagcttaagccgtgaaattcatacaagacataatattcatgtttggaataccgaacagtatcataaccgacttggggtccaacttcacaagtncagagttcttcgatttctgcgagcaataaagcatttatgtcaagtatgcttcagtagcacacccgagagccaacgggcacgttgaacgagctaacgggatgatattggaagcactc

SEQ ID NO: 61201 - DNA, 421 bp, Zea mays
  unsure (1)..(421): unsure at all n locations
cagctttaaaatgtttattatcttaaaacatattcctctntaaagactgtctctgcaacttcgttcagcaatttattgacgacttcgtcgacaatggattcggccatgtttatgatgtccagcgcttccttcatttttggatcaactagggaatcgaacggttccggcggcggagataattcagctgaagtaagaaaaattaataagtccgaagccacaaaaacaaatgtcgaagctaaaaaccaaaaaataatacctatacgcttttcgcgctctgcagcttcttcagctcgttttgcttctgcttgggcgtcattggtgtctttttcacttttctttataatttcatgggccatctctcggccaccattcacccagacatcattgtaaaatctcccttccatacaggttgcttcagctg

SEQ ID NO: 61202 - DNA, 472 bp, Zea mays
  unsure (1)..(472): unsure at all n locations
tgaatagcacaagataagtgagagtgtggaagttgacccgtcttatgcagctgagagcctgagacatagttttaaattgaactgtgtaaagaattaaggaatacctgaaattctatttgacctagaacaaaatatatgaaattagagtagtttgcttagaaacgtggacaatctttatgaaacagtaattgtgtgttaaacattgtttcgtntagttaaaatatgtcccattcagaaaactatatatgactttcatgttacaagaatgagattttaataaggttagaaagaattcaacctgcaaagtatgcccaccacgttgaggtcctcctccctgcgagcacctcctttagcaatatcttgtccgcgcgagcagaggtatataagctagacattgtaaaagagttatgcgacggataattagattgcatacattgggattctagataatgtctattgctgaagttaatct

SEQ ID NO: 61203 - DNA, 474 bp, Zea mays
  unsure (1)..(474): unsure at all n locations
agcttaccgcatntgaagcatgagcgcttcctctaggtcttggtcttgcttggctgccccttgcgaccatntagcgccgtcttgaatctcttgatgatgagagccatctcttcatcgttgagtccggccgcctcaatttgtgccaccttgctgggtagcgcctccttgcttcgtggtgccttgagagcgagaggttgcggctcgttgatcggaccattcaaggcgttcgccacatatctcgcctccttgatcatcattcgcccgctaacaaatttcccaagaacttcttcgggcgacatcttggtgtacctgggattttacgtatattgtcaccaagtgatgataagaacggtaaatgaccttagcattatgcggacgacgtcgtggtccgtccatcgcgtgctcccgtagcttcttatcttggtgataagagtcttgagccgattgtatgtttgcgtaggctcctcgccctta

SEQ ID NO: 61204 - DNA, 442 bp, Zea mays
  unsure (1)..(442): unsure at all n locations
tcttcatttaaaaattagactnntttatatttgagatgagattcgaataatttatgttctnttgagcaaaaaaccaactcggttactaccttgtgaggtcgagggctggtgcttcttgccggtgcccggcggccggccgcgccgcttcttctgcgcggggtcctccataccggagctgccgagcatgtcgggacccgacgatagagaacatatcctcggttgtgtagcgacgagctgctgctgcgatgacgcagcctgttgctgttgctgttgcctcatcgtgccatcgggtccgtatttgcgcggccttcctcttttgcgcttgagaggctccgcatgggccggtgtgacagcgccggtggcgttgatgttgtgcagcaatggtgggggcgggtccatctggtactgcatgccggcgagggaacgcccgctgatggagtta

SEQ ID NO: 61205 - DNA, 474 bp, Zea mays
  unsure (1)..(474): unsure at all n locations
agctagccttanctagtcgcaaagcaattgcttttattttatatggctggagagcaatttgccttgagctgtatttgttacctttgtcagaagcgccagaatcaaaggttgaagacttgaccatgtcaacagaggccattggttcccagttcgatggtgatgttgcggatccgcccgaaggatcgagaggggatagtgaaaatatcaatatcgaggaggataacacaatcatttgtcctacaaagccaagccacgtggactgttaccgactcttgcgtaccgaaaaggtgttctattaccgactcttgcgtaccgaggcaaatggccgaatgaatcaacaaaagtgtagatctatatgaagaatgattngaaagagtagcctggtattaaaggaaacattcaaatgcctattcgcacatgctctatgtacaaaagactgacttgctatattaatntcgaagctcaagctgctat

SEQ ID NO: 61206 - DNA, 412 bp, Zea mays
  unsure (1)..(412): unsure at all n locations
tcgtcatctgaaagaaaattaccctgaaggaaagagatgatctcagttctccattcttcactatagacaggggatatgttgaggactgctctttcaagaagctcaaccgaaggtgcttttattgtttcgaaaaatacttccgaaagtaagggcagcccctgtgctgctgacttggctaataaatcaacatattcattttctccgcgaggaatattnttaacagaaaacccctcaaaggaagcctcaatccttcggaccatgtctaaatatttntcaagcttcagatctcttgctttataactcttgtcaatatgaccagaaataacctgtgaatcagttntaagaaccaagagcaaagcttcgtactcagcaatgttatttatgcaactgaaatcaagtcttgttgcgtaac

SEQ ID NO: 61207 - DNA, 409 bp, Zea mays
  unsure (1)..(409): unsure at all n locations
tggagatcttaacaactgctcctccggttatatttcatctgattctctcagngcatgcatcttacaactaccatgcttggcttagatttttgtttcaactcgaaatctgaaggaggcgttaccgaagaggggtacgtcttggaggtggaggccggcaagacctacctgctacgccttatcaacgccgcgctgatctcatagtactacctgaagatcgccgggcacaggttcacggtggtcgccgccgacgcgaactacgtgaagccgtacgccacggacgtgatcgtgatcgcacctggcgagacagtggacacgctgttggtcgtggacgcggcgcccaggcggagctactacatggtcgcgctggccaaccagccgttggtcgccaacccgccgtcacgctctccat

SEQ ID NO: 61208 - DNA, 270 bp, Zea mays
tgctagtcttagcaaataagcatgcatctagaccggcctcttctcttgcaataatctactaagtaaagcttgccgtctaatatacctttaaaagctaaagaaccatcacttcttctaaagacagacacatctatgtttgagaatagacacgtatatcttatattgcacaattgactaacagatagtaatatatatcccacagactcaactaagaatacatttgaaatacagtgttcatttgagatagcaattttacctaacccctttacc

SEQ ID NO: 61209 - DNA, 256 bp, Zea mays
agcttgctggtgcatatgggcaaatggctatatcgcattctaacatatctctgaggcgcacccgacccttcctatgctgatagcctatctggcatgtcatctaacacgctggaggttgaccgcgccgaattgacgctctcatggcgctgtgatgggattggattctgctcaatcacaactgtcatttctacataggtcttgctatgctgaactaaaaccctggtataaacatcagccacggttgagatatcagcgc

SEQ ID NO: 61210 - DNA, 342 bp, Zea mays
  unsure (1)..(342): unsure at all n locations
gcaagttggtgcccatcataccttctcaacatcatgacaactgagaaggcactggagctactacctatggcctattatgccttgctgggtacttaagcatccgtgggagaagaactgactcatctttgtggattaatattatagcgtaacgttgngtattatattcgccacaaaaatcttcttccccagagaccttgcatggattcgtgagaccgtctcaaaacgaattccgcttgacgatcgagaaaattagaagcgattacgggactcgattcattaacatacacatcgaacgtcttcttgaagtgatggcatctagcacgaattctcttcttcctacac

SEQ ID NO: 61211 - DNA, 482 bp, Zea mays
  unsure (1)..(482): unsure at all n locations
agcttgacattgctntggttcactaggtggatttcaatgccatccttaatgccagagcgtcttccattatagagcatgcttctataaaatttaaaattttcattttctagctcatgctcnggcaatttagtagttaatttagctatgtgatcattttgttgtttaatcatagcaaggtgatcatcattagcttcaagattaatatctctacatctagtgcaaatagtaacatgctcgtcagtagatgtatagggtgtgcaaacattcaattcatcaatcttagcatttaacatggcattctcatctctaagatagatcattgcatatgctaagctccttatacagatattcacatttttctacttttaaagcataaacattcttcaatttaacaaatctttttgttttctttaacaagcaagacctcttggtattccaagagatcatacttctcgttaatagtttcaattaattcattcaat

SEQ ID NO: 61212 - DNA, 379 bp, Zea mays
  unsure (1)..(379): unsure at all n locations
ctcagcttccactcacaccttcggctctgtatcaaacttcatatttattttatcttctgcaatgccgactctattctgagggtacctgttcacacattgtactacataaatactgttaaatccctgttttgaggaccttctgacaccgaangtcctcaacagtagccccttccaatattaattcgtctgaaataataaatttatattgcgatatcgacgaaagctttactcccaatgtccctataatcacctctcctttgctataatagcacattcaatgaccgtggggtctttcaactttcacgtcctagcgtataatattccataccctaattcatttccacacttctggccaccactccccttacttattattact

SEQ ID NO: 61213 - DNA, 456 bp, Zea mays
  unsure (1)..(456): unsure at all n locations
agctntatcaaatggatgtgaagagtgcctttctcaatggaccaatcaaagaagaggtctatgttgagcaacctcccggctntgaagacagtgagtatcctaaccatgtctataagctctctaaggcgctttatgggctcaagcaaaccccaagagcgtggtatgaatgccttagagatttccttatttcaaatggattcaaagtcggaaaggccgatcctacactctttaccaaaacacttgaaaatgatttgttcgtatgccaaatttatgttgatgatattatatttgggtctactaatgaatctacatgtgaagagtttagtatgatcatgacacagaaattcgagatgtctatgatgggggagttgaagtacttcttaagatttaagtgaacaactccaagaaggcccttcattagccaacgaagatactcaaacattctaacaagttggg

SEQ ID NO: 61214 - DNA, 466 bp, Zea mays
  unsure (1)..(466): unsure at all n locations
tctatgttatggattgcttttgagtcagtcctattgtcttcggcccttcttgcagcttcctgacttccatggatagcaatggttccctgatccgaaagtatcttcatgcaaagataggcaggatgaaggattgcttcgaaggcattgagggtaccacgaccgataattgcattgtaagggtattccatgtcaacaatgtcaaatacaacttgctcagttctagtgttgttgatgaacccgaaggtcactgacatggtgattttgcccaatgctacaatctgccttcctccgaagccacagagaggatgtgtagcatcatgaatcttatcttctggttcttgcatttgtctgaaagccttaganaatatgatgtcagctgcactgcctgtgtcaaccaagacattgtggaccagaaatnctttgataacacaagagataaccatggcatcgttgtgtgggtaatctt

SEQ ID NO: 61215 - DNA, 451 bp, Zea mays
  unsure (1)..(451): unsure at all n locations
acagcaatccaacacatatttgagttatatattatgctccggcggcccgaaccactctaaactctcacgtgttcatgtgctcggtgatcgtttaacaagacagacaaaacgcttaagccccttcctcatcttaagattaaaggcgggtgcactccgccacccggccggagaatttcctcttcgtcatttggcacgccaggtaaggggctaggcattatatttttgcttgtttcctcgctcagcatgatggngcaaatcgtggaacaccacgccgatacttcaacggagttcctggtggaagaagaagctgtttcttccacgccacaggtttccaaccgcccagtgccgagcactgctgctgtgcacgccgcacgacagcatacaagtgcgcagacatcccggactccgtcaaaggcagctctcggagagttgtctgcaccaaggagttgct

SEQ ID NO: 61216 - DNA, 474 bp, Zea mays
taattcctatatgttactctcttgatcgcatccattggttgtttgatcatagaataacatcaaatgacacttagtgcctcatattctttccaatctatacctctcttgatatgcactaagttaaaaggagaattcatgattcatttatacaatttgtgatccacttaatatatgttaaccatgacttagaaaaggatcactatttgtaagaactctctcttgtgcaaaatattttcacacattgtcattgagcataggtcttaagcaaacaagactaaggactaacgcacaatgaagagagcgtctacaagtaaaggtacaaagggtaaaactattcaatcttattcattcatgtacctaaatcttcctacattccttgcatatcttgtataaaatgaagagaaagcatgtcctttgcatttatccctgcttcatacctagtttaacctcttaaaatttcactcatgcattatt

SEQ ID NO: 61217 - DNA, 470 bp, Zea mays
  unsure (1)..(470): unsure at all n locations
agcttccactacanaagatgcttcatgtagtgtcatttcacattcggtatcatttacatgtcttctccacatttgaatagactatgtcactntttatcgtatgcccccatgttgccatatatgcatatgcttttaagttcttcatttggtatcactagagtatcctttatcattttaactacgcatagattaagggggagttagtctattcaatcatgtcttgtttcctcttgcattaaattattatgcttttcctaagtggagagtttttcgacagtgggagtatgtttctttctcaaagggggagattgctttttagagggcaagcctcttatttgcttcatgtatgcttttctatgtcttcctctttcggtgtttgattccaaaggaagagaaaanttttggaccatagcacactaaagttgtaaaataccaaacaccaccatgaccaattcataatctttcaagtg

SEQ ID NO: 61218 - DNA, 418 bp, Zea mays
  unsure (1)..(418): unsure at all n locations
cttacaaattaagcaagtcttgtcgcgcatgagcttattattgagtaagcaagagcagatggcaaagaaagcgtaccaaatgacattgcggtgtgctcttatttatacatctgangcattgagaataggaaggccccgcttgacattgactgttgctattctagcaagaggaaggtgtttttttggaccttctgcttatggccttcgtccatatcgcaatctgaatttattatcctaacaaattaatattgcgaggggctactgttgggggccttctgcttccgaaggtcctcacaaacgtgattngacaatgtttctggagtataatacatgagcaggtaccttctgacacgaacccttcagacaagtcanaattgctgtatgaagatacacatagagaacgaaggatggaacatag

SEQ ID NO: 61219 - DNA, 435 bp, Zea mays
  unsure (1)..(435): unsure at all n locations
agcttctaaagggagaacacgtgatatgttttactatcgttcaattcgaaaaagatagaccttgtgcagcttgtcaagcaggtaaacaaatgggaggagcacatcacagcaagaatgtgatgaccacttcaagacctctggagctgctacatatggacctcttcggacctgtcgcctatctgagcataggaggaagtaagtatggtctacttattgctgaagatttttcccgcttcacttgggtgttctttttacaggataagtctgaaacccaagggaccctcaagcgctttctcatgagagctcanaatgagtttgagctcaaggtgaagaagataaagagcgacaacgggtctgagttcaagaaccttcaagtggaggagtttcttgaagaggaaaggatcaagcactagttctcctctccctacacaccac

SEQ ID NO: 61220 - DNA, 362 bp, Zea mays
tcgatctggctctataatctatagcttgtagaccaagtctcaagtcaatgcaagtcggggcaacccatattttattattgaccaaagactattcgcatgtcaatgcaaggaggggggtccgacctgttatgacacggttatttttataatcacccgcgctttcttctactataaatgatcagtggacacagataatcttactatattattaattagcgacctattccaccttgtataacaaataagtaaacgtgtatatcttatgataaactctttttattgtactacttatgaaacatggaaacatgttcacttaataaaccggtgtatcttagcatattttatcattaatactctatgat

SEQ ID NO: 61221 - DNA, 392 bp, Zea mays
agcttatacccctgttatactttttcccgcttctttctaaccatgagaaatgcattatccgatgttatattctatgcatagttaatctacctgttctcttgtatggtgtactggaggtttcctaatttcaatggatggatgtatgtatgtttgcacccacatatagaacaatctgtttgaagaacccgattaacatcccagagagacctcttaacaccattttggtaggcggaggcaaatgtcccttgacctatctctgtcctattcattctttaattcacctcccgcattacacatttatgcctaaagatttactagctctgtcatccatatccttgtttacctatttgggttggataatattgtttaactttatgctattgctcaactat

SEQ ID NO: 61222 - DNA, 166 bp, Zea mays
gcataataaaatttcgtgataaatggaatgggcgacaactacctaagggtttggcgtaacactaccgatgccgccacctattcacacctttcgttactatttgactgagccatgacccgaggagataaacggggtcgctcaacaagccattacggtccctatgtca

SEQ ID NO: 61223 - DNA, 425 bp, Zea mays
atctagagaagatattttcactcttcttcttttatccaaagcagcatttgattcttcatctcctctattaggcactaaaggggggccccttgcacggacagttggtgctatccaatcaagagatgtctaaagactattctgaagaaatgtctaaataaatgcaaaatctaggcttccattgcagaggcatacattctagaagaggtctcaaacttcacaacatcttattatggagacaaactgccgagcgtgcataatccacccccttgttacaatgatggcgacaatgaatcgaaccttatcatattccgaagccaactctgaagcgcaagtggctcgaccaccaagaccctgacacatgaagagtggctgcatatcttgcgatacgtattgaccaaccttgaagaatgactccatacatggac

SEQ ID NO: 61224 - DNA, 215 bp, Zea mays
  unsure (1)..(215): unsure at all n locations
tggtgccgatggagaaacaganatccttgaagtcttgggtgtttaatagcttgtcgttatcgactgtgagtttggacgggactccgaagcggcaaacaatgttttgccagaagaatttctgggctgtcttcgatggtatagtggatactgccctcgcctcaatccatttggtgaaatactcatctgcgactaatgtgaacttgattgttccctga

SEQ ID NO: 61225 - DNA, 445 bp, Zea mays
  unsure (1)..(445): unsure at all n locations
agcttgtaatccctactgtaagcacccncggtgcaagattatataagcatcatccctcctcttatgtttcatcttgcattaaaccatctggacaggggcatgcggcacaaaattcactagtcggtccgattgaaggtccccgggtccgaaacaccgacagtgggtattcattgaatacctaaattttttgtgatctatagtaatttatcaataatgtattacacaaaatagcgttagagtactaatttctttaatcttttgaattttgaatactcaatttcaaatgtctgggcccacttctggctccaagacaacatatgtcgggactcggggttgtgtggaggtagttcatgatcctaaatgcgtcggttagggttagaggtgatttattaccttgaaaatgaagagcttgccaatctcgctagtatgatggttggaggcgtat

SEQ ID NO: 61226 - DNA, 493 bp, Zea mays
  unsure (1)..(493): unsure at all n locations
acctataaatctaagcttcgggcaacagcaaagcttcttccggccgccagctccaatatgcatatgcgccagnggcttcggctgaagatttggagatcaaccaaggagaacattttgcttgttctgtggtgaaaacaagggccataccaccaggatgtgccatgttaccatccagaagcaaaaggagatagccgaagctgcagcacaacacggtcagccgaagcagattatgcacactgcttcgtatcattcgccttacatcccagaatatgtatgcaatcaccctacagtttctgttgcttcagcgagtcaatctcaagcttcctggcaacagcccccgcctccaccaccgctgcaacaaggccaacagccagataggggccaatatgttcaacatgcaatggatttcagagaacagtccgaagctcgcacagtcaatagcactgtgccagagtcgaagcacatttattgacagatatcctacttcgatagt

SEQ ID NO: 61227 - DNA, 481 bp, Zea mays
agctggcatacagctgacaatctcgtagcctctgaaatactttcctcaaatgctcctcatgctcttattcattctgggaatatataagaatgtcatcaatgaacaccaccacgaacttgtcaaggtagtccatgaacacactgttcatcaagtacatgaagtaggctggcgcattcgtcaaaccgaatgacatgaccgtgaactcatatagtccatacttagtgatgaaagctgtctttggtatgtcttaaggtcggattctgagctgatggtagcctgacctcagatctatcttcgagaacacactggctcctctcaactgatcgaataaatcttcaattctgggcagggggtacttgttcttgatagtaacctcattcaaagctcgataattgatgcacatcctcttcgtgccatccttcttctccacaaataacactgtggctgccaaggcgaggtactcggtctgatgtagcctttc

SEQ ID NO: 61228 - DNA, 496 bp, Zea mays
  unsure (1)..(496): unsure at all n locations
tctaaagggagaacacatttngggactaacaaatgttcattttgagaaagatanggtttgtagcgcatgtcacgcanggaagcaagttggtgttcatcatccacataagaacatcatgatgactgacaggccactcgagctcctacacatggacctattcggcctgatagcttacataagcatcggcgggagtaagtactgtctagttattgtggatgattactctcgcttcacttgggtgttctttttgcaggaaaaatcccataaccaagagaccttanagggattcttgagacgggctcaaaacgagttcggcttaaggatcaagaagattagaagcgataacgggacggagttcaagaactctcatattgaatgcttccttgaggaggagggcatcaagcatgagttctctttctcctacacgccacatacaaacggtgtagtggagaggaagaatcgaactctactggacatgggaagaaaccatgttgat

SEQ ID NO: 61229 - DNA, 377 bp, Zea mays
agtcttcagcaaaaatggcaacatgtttggatcttacctacagcaaggctgtcaatacatcgttggcagttgaagccaaaaatgcaggacacagaaaatcaaagggatatgcgggtgagagatcaaatcaaggacctgagaagagaacaaagttggtaatcggacctttcaatcaaaatcgttcttcgccttgcccaccttcatatccgttcaagcagcctgtctttattcgtcccactactacccctgctcttaccaatcagccgagtgcccctggtactcgtttccctgcccttcccagttcttccaatgggtgcttcaactgtggaaagtccggacatttcatcaaagactgcccatatccgaagcaaaataaa

SEQ ID NO: 61230 - DNA, 124 bp, Zea mays
acaagaaaaacatccactgccaagatattttcagcaactttaaaatgccctactactggagataataaaccctgtggggtatgttaccactgcactgacttcttcagtggaaaagctagccata

SEQ ID NO: 61231 - DNA, 476 bp, Zea mays
  unsure (1)..(476): unsure at all n locations
agctngaaaagtgctctacaactttggtattgtcatcacaacctgattaaacacctagcaaggtcgaattgtgcaaacacagcagctctgtccagatttggacagattcagacttgcagcttcaaaaattcacaacaaaagattcagacatacaaacaaagtgaccctagactttctggaaagctaattaaatgttctacaaattatttataaacatccctgactggtttagcatgtatccagggtaaaatatactatgaaggctgtgctgtccaaaactggacagattcagtcttcacacttcaaacacatgtaacttaatcttcagaccaccaaaaatagtgatccaagactttntggaaagctagggaaaagtactacataacttttataatcactaagaagtgattcaatgtttaactaaatcaaacagcacagttttcgaaatctgttctgacggtggacagaacacagca

SEQ ID NO: 61232 - DNA, 449 bp, Zea mays
  unsure (1)..(449): unsure at all n locations
gctccctcactcttcttaccntccattgtctcatggcaaagggatatgctaaggtaaaaatcatcaccgatttaaatgatgtaaaagatgatgatgatatcgatgatgttgatgatgatggctattcatatgatgatcttgttagaatgttaggtgaggccgatgactacatgcacaaagaataagataaatttaagaccttgaaggaattgtataaaaacctccaagtgtcttttgaggagctcaagacctctcacaatgacctataaggaaattgtgagaagcttgcggatgctcaaaaatcatctattgtgcatgaagttaaggtggtcactaacgatattggagtcacttgtgacttacttgatagtcttacaagtgaaccactatctactaaccctatctgtgataagtgcacnaattctctcaatgataacattgctcttgat

SEQ ID NO: 61233 - DNA, 437 bp, Zea mays
agcttgagcaagactcacagcttcactcaggatactctccgagggcttggatcaaacggaggaggacgggagaggggctggccacggtggttgctctcgggcggcactggcgggtcgcggagaggtcgccggagttaatggctggctcgggcaagtccggcgaggtacggaggaggtaacggggaaggcagccaagcactggggcgggctttatagccgtggcgcgggcgtggtcacgggcggtcgcgggtgcgcgggggttcgcgcacgggcgtgctctgagcgcgcccccggacgccagctcgcgtcgaacacgtggaagcttgcttctgccatggttcaacggccgattagagcgccatagcgtgcgtatcttggcaaggtcactgtgtacggtcgcttctctgctccaaatcctatcttttcgctgtgagttc

SEQ ID NO: 61234 - DNA, 470 bp, Zea mays
  unsure (1)..(470): unsure at all n locations
ctatttggtaaacattaaaacaatacttcttgtttgaaatttttgcctagtgaatgcactctangtgtgtcaaacatatgcaatgccaatgcttatgatgccatgctcaagttttagttatagtaacaccaggggtgttacatccttccccccataaaagaatctcgtcccgagaataaaagtcctacggttagtaatggataaggaaacgcggaatacttttatttccttatttcttgtacaaggcangggtgatgtgggggtcacttctgtattacctagttatacaggctttacagtttacaagaggctaaaaagcctgggaaattcttatctaaaaagtcttgagtttcccatgtagcctcatcttcagaatgctggttccactgtatcttatataacttgagagttcttctctgggtaaccctgtccttttgatccaagactcgaatagggtgctcagaatatgt

SEQ ID NO: 61235 - DNA, 442 bp, Zea mays
gcttcaagacaagatagtgcttgtttattattatgagttatcaatcagatgtttttttctgattttattcaatcaacttcttttcccatctgcttcatggggcattacgaacaatgaggtactaataacatcaaacatggaccggatggctgatattgattggtgtcaactagtttatactgatttgtgtgatgctgccagtcgttggcacaagaggaacaaaacaaacattacaacaacaatatatggatgttcactcattgttcttgtaagtaattctctgtttaccaagcatatatatgatatccaaatatttgttttgtactaattatatatgatttattttctttttttgttcagatatactatcttgatcacttacaccaccctgcatcacctgagaacaagtatggtaatccacgcatcaagtattttgataatg

SEQ ID NO: 61236 - DNA, 481 bp, Zea mays
  unsure (1)..(481): unsure at all n locations
actcagcttctctgccatgtcacagcactgtccaccagcgctacttgctctgttggtgagagcttcttggaaccgccatggntgtcgatgcttgactttctttccatttgttttttttcctgagatattgcttcccttttctttactggtaggaattggtgtttcatcattgaagtcagcatctctcatattgtgatcctctccttcataatctagatgatcatcctcatcgaggttctgatccatgtcgccttctctgacgatctcgtcagtgttgaagaagatctcatacatgcagtcactgtaaacaatatatacatcattagggatatcttgaacatcgagaaccaccactcctgtccgcttcatgtaagccataccatatccaccctttgtgataccctaaatggacctatacccataagatagaaattctatctatactgaanggacccataacttgcccacacctgtgcatttt

SEQ ID NO: 61237 - DNA, 477 bp, Zea mays
agcttgtgaaaggttttcatccctacatgagctaaacagtgttgctccagccagcccatgctagtcttagcaattaagcatgcatctagatcggcctcctcttttgcaaaatcaactaaataaagcttgccgtctaatacacccttaaaagctaatgaaccatcacttcttctaaagacagacacatctacatttgttaataaacagttatatcccatattacaaagttgactcacagatagcaagctatatccaagcgactcaactaagaacacattagaaatagagtgctcggaagaaatagcaatttttcctaaccctttgtcacacccgggttttggggcaccaagacccgggcgcgaacaatcaccatgtgtgctgggaccaagtctcacacatatgatgaatcatggcacatgatcgaatgtcacatctctactatataataggagttctatacaaaataagatacattat

SEQ ID NO: 61238 - DNA, 419 bp, Zea mays
  unsure (1)..(419): unsure at all n locations
tctaacaaatgtaactttctaataagatagaccttgtgcagcttgtcnagcaggtaaacaagtgggaagtgctcatcacatcaagaatgtgatgattacatcaagacctctggagctattgcatatggacctcttctgacccgtcgcctacctcagcatctggggaagtaagtatggtcttgttattgttgatgatctttcctgcttcacttgagtattctttttgcacgataaatctgaaacccatgggacccttcagcgcttcctaatgagagctcaatatgaatntgagctctacgtgaaaaagattagaagcgacaactggtccgagttcatgaacctacaagtggatgagtctcttgaggaggaatgatcaagcacgagttcttcgctccctacacaccacagcataatggtgt

SEQ ID NO: 61239 - DNA, 452 bp, Zea mays
  unsure (1)..(452): unsure at all n locations
agcttgatgnttataatgacatcagcctcttccaaatctttcatctcgaaattgctcgatagaagacttttaacttcctcaatcacattgagatttgatccaaagatcaaaatgtcatcaacataaaggcacagcataacagactcacccccaccataccgatagtatacacacgtgtcagattcatttacaacaaagccagctgctgtaagagtattatcaaacttttcatgccattgcttaagtgcttgttttaagccatacagtgattntatcaacctgcacaccttgttctcttgaccatccgcaataaacccttctggctgatccatatagatctcctcatccaactctccatttaagaaagctgtcttaacatccatctgatgaatgataagaccataagaggctgccacggctattaatgtgcgaattgtagtcaatcgagccac

SEQ ID NO: 61240 - DNA, 468 bp, Zea mays
  unsure (1)..(468): unsure at all n locations
catttatcgctactgtcccgatattttttgaccttaaaaggggaacaatgaaaaatataaacaatacaagaaggcaacggcgaggcgcatcttgaaaggagtgggactcggattgctcctcctccgactccgacaacgaaagactcgccgccactgccttcaacaaatcggctctctttcccaacgagcgtctcacatgtcttatggcaagggagaagaaggtgagtactcaagactccacttatgcttcttctagtgatagtgagtctagtgatgatgacatagattattcatgcttgttcaagggcttaaatagatctaagatagataaaatcaatgaattgattgatgcattgaatgaaaaggataggcttctanaaaagcacgatgaattattgtatgatgaacatgataaatttgtagaggcacaacaatcatatgctctataagtaaaaagaaatgaaatgc

SEQ ID NO: 61241 - DNA, 451 bp, Zea mays
  unsure (1)..(451): unsure at all n locations
agcttctaaagggagaacacgtgataagttttatttacgtgcaattcgaaaaagatagaccttgtgcagcttgtcaagcaggtaaacaagtgggaggagcgcatcacagcaagaatgtgatgaccacttcaagacccctggagctgttgcatatggacctcttcggacccgtcgcctatctgagcatangagggagtaagtatggtctagttattgtagatgatttttcccgcttcacttgggtgttctttttgcaggataagtctgaaacccaaaggaccctcaagcgcttcctcaagagggctcaaaatgagtttgagctcaaggtgaagaagataaagagcgacaacgggtccgagttcaagaaccttcaagtggaggaattccttgatgaggaaagaatcaagcacgagttctccgcaccctacacaccacagcanaatggtgtagt

SEQ ID NO: 61242 - DNA, 233 bp, Zea mays
  unsure (1)..(233): unsure at all n locations
caccgaaatccaaaccttctacttgtgaataccctttggccacgagtcgagcttctgtccttgtcaccacaccatgctcatcttgcttgttgcggaagacccatttggttcctactacattntgattatgacgtgagactaaatgccatacctcatttctagtgcagttgctgagctcctctatgcatcgcatcacccaatccgaatcttgaagtgctttctctaccgtgtgt

SEQ ID NO: 61243 - DNA, 456 bp, Zea mays
agcttgaagaaagcctttcagtcatgtcgaatgatgatcttgctgatagccttgcatacaacagtataaaggtacaaaagctgttaactttaaaattgggaatgaaatatttcattgtcatgcttaattcttgctttttctttgcagggcttgattcttagcaatgccttaagggcacaaaaaagcgctgaagacgaaggctgtacaatagctctcagcaaccttcgctcagaggtaattgagctaagaaacaaagtctagagaaagacaagattttgatttcattggtgagtaaaatgaaagaagacgaagctaaatacaatgctcaggccgaagcccaaaaagccgaggtcgaagaacttcagaaaaagctcaccgaggctaatgaaaactatgcagttgcaaaagctagcaaagagatcagtgaatggacacatgctatgctagagaaaaata

SEQ ID NO: 61244 - DNA, 472 bp, Zea mays
  unsure (1)..(472): unsure at all n locations
agcttgaagatgaaaagagagattagcatcgttcttcttaagatatntaatctacgctctcaatctagctatagttctattcaaaaaatcaagagttagaccatgatgcttgagtttgtttcttaccaatgttctttaagaatcaatggtctatgatcccaagccattctcaatatgtgcatgatttctctggccacaactaatagagtcttgacatttcctactttgttcttgtcctcattattggaaaactctaataaatcttttcaaatttatggaaattctctctagaggacaagaagcttgaacaagatgattctaagaagaagcaaccacttcatgaaaatctgaccattgtgtccaaaaactttcaaagcggaatctatgctttcctctaacatctctttgatatcaagaaatcaaggacaagtgattataaaggctaatagcactaccttgcagactataatct

SEQ ID NO: 61245 - DNA, 464 bp, Zea mays
  unsure (1)..(464): unsure at all n locations
gactaacaaatgatcatttttgttattacatgatttgtancgcatggcaagcatggaagcaagttggtgttcatcatccacacaagaacatcatgacgactgacaggccacttgagctccttcacatggacctattctgcccgatagcttatataagcatcggcgggagtaagtactggctagttattgtggatgattattctcgcttcactagggtattctttctacaggataaatctcaaacccaagagactttgaaaggattcttgagatgggctcaaaatgagttccacttaaggatcaagataataagaagcgacaatagaacggagttcaagaattcacaaattgaacgcttcttgatgatgaggacatcaagcatgagttctcttctccctacatgccacaacacaatggtgtagtgagaagaagaatagaactctatcggatatggcaagaaccat

SEQ ID NO: 61246 - DNA, 395 bp, Zea mays
tgtgccttatccaacccatgctcgacatagcaaataagctagcgtccagttcagctctatcaaaatctaccaagagtatctgaccctctaacacttccttaaatgctactgaatcatcacttgttttaaagacacgtgacacacctacgttcacctgaataagacggttgtagcgccattcgacataattgcgaaacggacagcaaatcgcaatctaatgaatctacaagaaaaacattggaaatagaaagtgcaggggatatagcaatcttacctcatcctttgaccaaaccttgattccatcctcgaaagtgaacgctcattggggatcttggcttttctcatacgaagagaacattatcttctccctaggatgaggattggcatccgctgtt

SEQ ID NO: 61247 - DNA, 455 bp, Zea mays
  unsure (1)..(455): unsure at all n locations
agctttctcaacatttcttgttgcccattaattattctttatttntcataattggctcaagtcataattttaaacttttcattccctttttcttattttcttgaattttgctcatggggctcacttagggttcttaattggggttgcacattcttatcttttaaaagactcagttgtttgatcatgatacttttaattacatactcggtgagttctttattacttaagttattttgatgctcatgcttactttggttcacataaaatgatggttcttggtttggcatttgagaaaaaccctgagtgacactggggtgtcacaatttctcctgtcacgcacttattcgcgagcgattgctcgtcggagtattccccggtccgtcgaggactctccctccgccgtacggtcgcctcagcccctttcctgctattcagacctcgccataagattcact

SEQ ID NO: 61248 - DNA, 473 bp, Zea mays
  unsure (1)..(473): unsure at all n locations
tcagatctcttgctctgctgcttttatcaacatggcctatgatgacttatgagtcagatttgaggactgctcttcttattcccatcgccttaaactttcgaagccccaagagaagggctctgtactctgcaatattatttgtgcagttgaactccaatctggctgcatagcaggttttgatcttagatggtgaaattatgatagcagctgcacctgcgccgaaggtcccccacgacccatcacagaacactgtccaagcttcattgtctgttgtgctttcttcgtcctgagcccctggcgtccaatcaacaatgaagtctgctaatgcttgagattgaatcgaagacctatgaacaaaattcatattgaatnctatcagntctaccgcccacttttaactcttcctgtggcctctatagtccttataatgtccttgagacgctgagatcaacgtactataatgtgatatgact

SEQ ID NO: 61249 - DNA, 401 bp, Zea mays
  unsure (1)..(401): unsure at all n locations
cgcagctgcagctagaaaactcatccacaggtttnttttgtgccaaccaccctggagtctacaataagcatgtgtcgagtcactctataaaaacactaaggatagctgccctcaacacaccctaaatgcattgaacatccttcttctaaagaagagacacctgatcagaaaagacattgagcccattgacataatgagaaaagaaagcagttgagcctatgaacaacagaaaacattggaataaatggtacgagaattctatttacccaatccttgaccaaacttgatttcatccccaaagtgaaacttggggggacttggtttttcaatgagagaaatccttctccctgcatgggttggacccgtgtcagtatcacagacctcggagcataacctacaac

SEQ ID NO: 61250 - DNA, 461 bp, Zea mays
  unsure (1)..(461): unsure at all n locations
ctaagcttccgcttagcggcggaaaattacaccgacttagagaggaaattgctatctantcctcgatagattatccttaagtcaatagtaaatataaagggcatggctgtaactttacacacgctgcgtcctgtgcctattaatagatgaacagtaacaccgtactgttcacgttgacctgtattcatttgcacgtcacacttggattctcaccttctatcaagcccaaagtataaaatgtattccgatattgctcatatctattcatgatgatataataaaaatatcctaatgggatcatatgtctattcatgttattccccatgtttcatatgcttctactatcattaatttatactgagatgatggaagtatgttcttcataacctcngtcaaagataattatatcctaacggagatcatgctttggaggacgaatgtttttatacactaacatattt

SEQ ID NO: 61251 - DNA, 415 bp, Zea mays
  unsure (1)..(415): unsure at all n locations
atacacttcatgctngcattnggcccttgaattcttcctcatttggaatcntacataaaacaagaagacactcaataacttatgagggccaaaaaaaacttgtggcctctcaaaagagttttcatccttagagaaaagttctccccctttggttaagtaatataccctaacgtgaaaaggatcttgcccctgaaaaaactcccttctttggaaaataatacccctttggaaaatttctaagttaaatacatgacaggatcacataacgtttttacatgaaccattatatagactacacccactccctctctatgttgcatatttatatgatacaagatactatattgataccacaaaacgaaaaccatatgtgtatttggaaaggtaaataatttcttaacatataatggctata

SEQ ID NO: 61252 - DNA, 393 bp, Zea mays
  unsure (1)..(393): unsure at all n locations
ctgctccanagtggtaattatattatattgtacaagtttctattctcatacacaaacccctccaagtagagtaaaaatatatatacatttagtactgattaacatatcttatgttaaatgtggttatcatgataagcttatgacgtgtttggcttgacttttgtctttggtttttatcctctaaaagccaaaagccaaatcaaagggctcgatccaagaaacagttatttctataagccaactttctcgcaatgcaaaaatgaaagcagccctgaacctgctatgagtgactatccgatagaactgtgataacatatatcgaataacnttcaacgattgttagcggtttcgaccaaacggttattagctttgtaacagctcacagcccacagc

SEQ ID NO: 61253 - DNA, 276 bp, Zea mays
gtcttgcatatcgcttgcccaatctttacgctcatcaaggatatacaactcaccaagtgttggacttgcacgatcaggtttcccttgtcattacagatacgaagaacatcgtgcttggagtagacatcatagtcaccctttttaagctagccaaagttaatgatgttgatagttcaccttaagatgaagagcacccttatgagcgggacggactcacttgtcctgcctttgaacaacacattatcgaatcttggattgcgatccttgaactatcgc

SEQ ID NO: 61254 - DNA, 219 bp, Zea mays
atcaagctttttttttgtgtacggaaagagctccatttgagttgtgaactccggtgttgtgcttcaactctagtcggacttgtgtgcgtggatgtgtgcggaaagagacttgagtgagttctatgccaaccttacttgagctttctagtgatcctagtgaagggcgaaagacccaactgggatattcttgcacacggaaagactctatagaaagacctg

SEQ ID NO: 61255 - DNA, 352 bp, Zea mays
tgtgtcctgagcctataaatagcgaacagtattccattactgttcacgcattctaattattgcaatcgcatcttctggaatccaaccttttgccaaggcaaaggtattattgtattcaatgattccatacattaaatagatacaatgtgatttgtccatgatgtatttatcccttttatacctgtttatgctatcttataatttttactgaaattttattacgaagacttaaacttcgtaagtatgctcttatcagccttcgtccaaagcccattatcctcaaaggaataatgtttcatggacgaaagacattgacatttaacaacttatgttgtcttgttcttaattcata

SEQ ID NO: 61256 - DNA, 487 bp, Zea mays
  unsure (1)..(487): unsure at all n locations
ntatcatatggacgtgaaaagtgccttcctcaatggatccaatctatgaagaggtctatgttgagcaacctcccggctttgaagatagtgagtaccctaaccatgtgtataaactctcaaaagcactttatgggctcaaacaagccccaagagcatggtatgaatgtctacgagattttcttatcactaatggcttctaagttggtaaagctgatcctacactctttactaaaactattgcaaatgatttgtntgtatgccaaatttatgttgatgatatcatatttgggtctactaacaaatctacttgtgaagagtttattatgataatgattcataaattcaagatgtctatgatgggggagtgaaagggaaatgtgtctttgggccatttctataatgcttaggtgattaatgcccaacacgtatccttaagttctaattgtgcccatattgaaatagcgcaatcaaagctgatgtatattct

SEQ ID NO: 61257 - DNA, 317 bp, Zea mays
tattgcgcgatgaacctctttgatgaagccagcgtctagcagctttcggacctcctttcggatgaagttctaccgttcaacagactacatgcgaagctccagactcactggcctggctgtcgggttgatcttcagatggggctcgatcacctacctgcggatctcaagcatctgtgatggctcccatgcgaaaacacttcggtttctgcctggatgaaggcgacgagcgcaagttcctatttcttgttcagatcacctgccatgcgagtggtatgggtggaatccgcatcgagccggatgcctttgccgggacacca

SEQ ID NO: 61258 - DNA, 336 bp, Zea mays
  unsure (1)..(336): unsure at all n locations
ttttttttcccnttttttttcgcncaccccgccgggggcttttttattttttcctctcttctctcttttaaattagtttttttaattttatcncttcttgttttacgcttttttctttaaatttttattgcggttttcatttattttagctgattattttttttggagatttgtttatctttttattttttttttatattttttttgtttatgtcttttctcttattttttttttcttatccttattgttatatttttaattcttatactctcttttctttttttttttcttttctttcctttagttactttttttttgtctctttgttattattt

SEQ ID NO: 61259 - DNA, 487 bp, Zea mays
  unsure (1)..(487): unsure at all n locations
gtcacctgcagctgcagcttatactctgctgcgtantagaggcctttaatatcanctggatagcatacttgaggtgttcgcctccaggtgcagtgaagagaatccctgctcctgctccctgcagcttcagcgaaccatcaaaatacattcgccatacttctgccgtttctggattgtctggaacttgctgttctgtccactctgatacgaaatcgaccagtgcttgagttttgatggcagtgcgaggtcggaactcgatatcatgggatcccaactcgcaagcccacttggctattcggccgatagcttccttgttgcgaagaatgtcccctattggaaaaccagtgactactatgactttgtggtcgtcaaagtagtgacgcagcttgcgggcagttagaagtactgcatataatagcttctgaacctgaagatactttttctttgaggggcctataacctcactaatgaagtaaacaggatgttg

SEQ ID NO: 61260 - DNA, 424 bp, Zea mays
atgctctatgccatgcatgagagctattctattacgtcctgtttggatcattggaaataaattacattctaataatagtaatttagacatatatcaattaagctaatttggttctatgcaaaatatatttgtatactattattagcaagatgtcggagatatttatgtgctagatttttactatataggagtgagacgaagtgtgtcatgccagttacagagtacaaataaattctactaatgcataaaatcattttccatcctacaccccatgaacttgagatatgcttatatctgaactttgaaaagtggtggaatgttaaattccaaattaaataagttactttattgagtgaattccaattcatctaaaatgaatggatccaaacaccccattattgaattcttatacttgtaacatatt

SEQ ID NO: 61261 - DNA, 479 bp, Zea mays
ctgcacttactgctcttttctcaccggctctatattttatacccactctgcgtatctgcaaggtctgataaaatcagcttctatcagctgtcggcgtttcgaccccggggggtccctggaccgacgagtaaattgtcgttgcgtgtcccagcccagatgggtcggcgcgagatggaacacaagggggaaaaagggaaccgcggctcgtgttatcctgcgcccagggtggatgcgcttgcagtagggggttacaagcgttcgcgagagaaggagagagcctgttcgttagcccatcctcccgcgcggtcaccttctcgtacgagggccctggaccttccttttatagatgtaaagagagggcctacgtgtacaatggggggtgtagcaatatgctaacgtgtccggcagagaagagccagagccctatgtacatgccgacgtggctgtcggagaagtgttagtgccctgtgcatgtgatg

SEQ ID NO: 61262 - DNA, 421 bp, Zea mays
  unsure (1)..(421): unsure at all n locations
cttggatcctaaagattcattcagtttattgaatattgatgatgtntgcaatagctgtaaagttgtactctgctgtattttagagcaagaagaagcatactaagtcttcagttataatattatgtacttcatgtacatatgaattttaggtttcagaatgtaacaaccattgatgatggagttatcaccaagtagaaaaactagaatatcagatgaataaagaatatttggccgcttatantttattattagctccgttactactcgttgctagctaagcgatgcaatcaccctaagttactctgggaattagcatgccccaataaataaacgaagaccgaagtcaagtcatataattcacgataataggtcaagatatcggtccaaggaggactacgaccaaactattgactggtaccat

SEQ ID NO: 61263 - DNA, 480 bp, Zea mays
  unsure (1)..(480): unsure at all n locations
ctgcagcttnagnttagtacgtgtgatatacattattactaaacggtctctatttgagttggttaagtagtctaagtagcactcaagtcctgagttcgactccccatggcccgtgggagtgaatttcaagctgggtttaaaaaaaaaccttgtttgttccacgccaaaatacacgtataaagttagctttggtcgtggttgttctcacatggactacagtgagtgtcgctgtgtatgagaggggcaagggttcaagatttcttcaacctaaatgaagtcttcttaacgcaatacccaggtacacccgcacgttgtgtttatacaagaaaagtcttaaccaatttaactatattgactggacaaagaagccacgtgcaaaaactcttatagttgctattgtagcgaacaagaatgcgaatggactaaaagatggataaaccttcataaaagttaattcaatgcataatcatatctaacttc

SEQ ID NO: 61264 - DNA, 432 bp, Zea mays
tatactggatagatattttaaatattatgttacatacaagatagagattatagctatatatatatcaatcattttctttaaaaatatatataatcactattgaccgtgaatgtggtatggttatattgccgggccatggtattgttaaatgggccatgtctcggatcaatctgttagacatgacttatttagccatatataatacaatgccttatttctcactatctctgatttcacgagcatagaagaaaaatgatataaatacctcatctcatctcaccacattcggtttagatcgcgtttaaaaaatatcatatttaaataaagtctatctatatagaaaccatatccgaccactcacttatatataagagacctatatgatatgttataacaacacgtgcactaactaataactactaccccgttaca

SEQ ID NO: 61265 - DNA, 449 bp, Zea mays
  unsure (1)..(449): unsure at all n locations
agcttaatcttccttcaatagttccttacattaagcatttcaaaatattattacaataaaatctattcttctctaaggactttctctgcaactttgttcaaaagtttaccgacgatttcggcgataatggagtccgccatgcttataatatccagtgcttccttcatttctggatcggctaggggttcgtatggctccagaggcggngatagttcatctaaagtaagtaaataggttagttcgaagccacaaagcaagtaccgaagctaaaataatcaaaaaacaatacctatacgcctttcgcgttcaacagcctcttcagctcgctttgcttctacccgggcgtcgngggtgtctttttcattcttttttataatttcgtgggctagctctcggccaccgttcagccgcacatcgttataatacttcccgcccattaaagttgcttc

SEQ ID NO: 61266 - DNA, 455 bp, Zea mays
tcaagccgtggagaatatctataaataccaagccagaacaatataattgtgtgatagaaaagttcggctaaagaacattaagccagggcatttggtacttcggagagtggccaacccagatacagtaggcaagctactgttgaagtgggaaggaccttttctggtagtatctttgtcaagacccagttcttacagattgaaagatatggacggcaatgacattcctagatcttggaatgcggatgtgcttcggcgatattatgtttagcttgatgtaatctttttatctttcctatggcacccttttcctttccaaagggggagaaaggtttttaatggggccatagagtgtaatttctctttttcttattcagctctactagagcaaaatcccccagatatgtgaatgtataaactgagcatgcaccatcgagtgctggaataaaaggaaaaac

SEQ ID NO: 61267 - DNA, 252 bp, Zea mays
cccccaagcggggcaaggagagaaaaagggggggacctctggcctaatacacgaccaagagactaccccgacagaggaaaaagaaaccattcgcctatctcccgcggaaggagagaacccgcctcctacatcttgggaaattcctgcgctcatccgcccgagggatcgctggaagctcaacctggcgggggggcacaaccagcacgcccgacatactcgagctctcgaggcgcctaactccgacgagggcct

SEQ ID NO: 61268 - DNA, 436 bp, Zea mays
  unsure (1)..(436): unsure at all n locations
aactcagcttgaacctggtagtncatggccaataatatacaattgtcttttctttctactggtgcataagtttcaccgaaatccaaaccttcgacttgggagtatcctttggccacaagtcgtgctctgttccttgtcaccacaccatgctcatcttgcttgttgcggaaaacccatttggttcctacaacattttggttaggatgtggaactaaatgccatacctgattcctagtgaagttgttgagctcctcttgcatcgccaccacccaatccgaatcttgtagtgcttcctctaccctgtgtggctcaattgacgaaacataagagtaatgtgcacaaaaatgagcaacactagatctagtatttcccccttttggatgtcccgatgatggtgtccaccgcgtgatctcattgcattgcttgggggactctt

SEQ ID NO: 61269 - DNA, 290 bp, Zea mays
gtcatgtacaacggttgattaatgctatcggtcaatcggagttgcgatggacctgtgctacgttatatatctgctggagaccatggcattgattagatatatgctctggtagacaaatcatatctctttatacatgaaagaaaatattttgttcccatgcccatgacgctatgtgcggatatgtgctaagctacaaagctatacttgacaacaagaatataaactgttggaatatcaatatggatatattggatgacattgctgcttgcacaaatctgatgtatgattat

SEQ ID NO: 61270 - DNA, 476 bp, Zea mays
  unsure (1)..(476): unsure at all n locations
agcttctaaagggagagcacattttgggactttcaaatgtgcattttgagaaagacaggattcgtagcgcatgctaagcaaggaagcaagttggcgctcatcatctacataagaacatcttgacgactgacaggccacttgagctcctccacatggacctattcggcccgatcgcttacataagcatcggcaagagtaagtactggcttgttattgtggatgactattctcgcttcacttaggtgttctttntataggaaaaatctcaaacccaagagactttaaagggattcttgagacgggctcaaaatgagtttgtcttgaggatcaagataataagaagcgataatgggacggagtttaagaattcacaaattgaaagcttccttgaggaggagggcatcaagcatgagttctcttctctctacacgcctcaacataatggtgtagtagagaggaagaatagaactctattg

SEQ ID NO: 61271 - DNA, 482 bp, Zea mays
  unsure (1)..(482): unsure at all n locations
cgaccttgtaacgaggataagctgcctttatctcaaatgtggatggtccttaagcctctntgaaatccttaagggaatatgcttaaaatatttgtaacatgctttcagtagtgcgtaaactgtcatgagcatcacacttatcctatgacacaatgcacttcacattctatatgatttagatatgttctcattaacctaattatgtgcaattggcatttttatgccgaaatatgtgttctttctctccatgcacatatttatggggagcaatctatgttgtatagaactatgatcatgcttaatttaatatatccttttgatcatatctctgtatgtctacgactaatgtgctttcaagcgatctctataattaagtcatacattgaaagggatatggagtcttcggcgaagacaaagcttccactcaactctatcaggaatatctacccttctccatcactccacactagctatcaattatg

SEQ ID NO: 61272 - DNA, 356 bp, Zea mays
agctggagcaaagcacacaggaacttatctcttgagaaacccgccctcaaagccacatggtaccagagggtccaacccaaaaagcaaaggatgaactcaaaataactgcacagaatatcagtacaaaggacccggtccaggaattcttggctttcaaagttttccctagcgtaaaagagtgggaaatgccgaatctggagggggaaaagaaaataggtgaacttgtacgctcgccctactaactcaaatttaagaaatactttaaagctccttgccaagagtggctagatacgattgaagtgatgtgcaacgaaatactcggtaattattccaagacagaagagcaattgatgact

SEQ ID NO: 61273 - DNA, 411 bp, Zea mays
  unsure (1)..(411): unsure at all n locations
atgagcaaacatcaagagaagaaagccttttctcatgacaagtgtctcaaccacgcctctacatgctccacacaaggtaacaaacaagtcactcttccaaataagagaagatgcgctagaaagtgttatcaatgtcatgagaagggacatgagattaagtcatgtccctacacaaaggatagtggcttaactttataaagaaagaggctcactaaccttgttgcaaacaagaagcatggaaagaatgagtcttgccaaattaaaaatcatatatgctacacttgccgaagaaagggacacctatgcaacgattgtcccatgagttagtatcctaagcctaccatgttaattcattcatattcgcttangagacccacaaatgacatttgtgctagaaaggtatttagttca

SEQ ID NO: 61274 - DNA, 439 bp, Zea mays
agctttatataatggacaggaagagtgcctttctctctggtccaatcaaagaagaggtctatgttgagcaaccttccggctttgaagatagtgagtatcctaaccatgtgtataaactctcaaaggcgctttatgggctcaagcaagccccaagagcatggtatgaatgcctgcgagattttcttatcactaatggcttcaaagtcagcaaggccgatcctactctctttactaaaactattgcaaatgatttgtttgtatgccaaatttatgttgatgatattatatatgggtctactaacaaacctacttgtgaagagtttagtacgatcatggttcaaaaattctagatgtctatgatgggagaggtgagatattttttaagattccaaatcaagcaacttcacgatggcacctttatcagccacaccaagtacat

SEQ ID NO: 61275 - DNA, 477 bp, Zea mays
  unsure (1)..(477): unsure at all n locations
ctacactacacatgagccaccacctaagtaagctcatccgctttatttcccacacttgtngagcgatgaccgtatgggagctcatccttgctataatctcaccaggtgaagagcagataccacaagaggaggactactacaacgagtttgatgaaatctaggcgtcctctcctagtcaactatggccgtgtggacatagttatattagttcattttattctacttccagttattttgtaagacattctcgttatgtaataaagattatgacatccgtctctatacattgagtcattgtacgtgtggatcctattatggcacacatatgagatggacctgcattngcccttaaattcgtgtgtgatagaactggtatcatagccatcgttactgtataatgtaacctagatagacaaacccctacctacttatcattattactctatctacactctgcttgatcctgtctcatccttt

SEQ ID NO: 61276 - DNA, 443 bp, Zea mays
  unsure (1)..(443): unsure at all n locations
caagcttaagagcaaggaaaaacagaacaagctctataagatttgggtgagaactctgttacacttgctgatactctactgttatgtttttctcctgtgtggttctagaatgcacatgaccacaacaacctgcagtctcagtttgcatctggaaggtactactgttttcagtttgctacgtaaaaacatgcatcacgttgaaagaggtagcctgatacagggtactagtgaaaatcatttgaataagtatctacatccatctgaagctaacaatgactagtgttaaacttttcacgatgcctaatgttcaatacatacaggtaaaaggatcaatgctaacaaaacagacaatcacacaatgatattaccttcttatatttaagcatatgctaatagatcttagcttttacttaagtntaagcattctcagcctacattataaa

SEQ ID NO: 61277 - DNA, 474 bp, Zea mays
  unsure (1)..(474): unsure at all n locations
accgcattgaagcatgagcgctctcccttggctntggtcttgcttgtgtgtcccttgcgacctttaagtgccgtcttgaatcttttgatgatgagggccatctcttcatcattaagtctggctgcctcaattagtgccaccttactatgtagcgcctccttgcttcttgttgccttaagagcaaggggttgcggttctgtgatcggaccattcaaagcgttctccacgtacctcgcctccttgatcatcatccgcccgctaacgaatttttaaggacttcttctggcgacaatttggtgtacctgtgattctcaccaatattatttaccaaatgaggatcaagaacggtaaatgaccttagcatcagccggacgacgtcgtgtgccctccatcgcgtgcttccgtatctccttatttatgtgataataggcttgagccagctgtatgtcttagatcgctccttctcccttatca

SEQ ID NO: 61278 - DNA, 349 bp, Zea mays
  unsure (1)..(349): unsure at all n locations
tcgacccggatccttaatcacctgangctgcagcttattacacctatgcttctaggttctcccactcttctctaagggtcaccaattccaagagaagtcatcaagactggccgggcatgttctcgggtctgactggtcctgagaaggtctcttctgctgntagtctgacatcttggttttggcttcttgcgggttttcttgcggggcgagcttttcagttcttgtcgtatccaatttagggtgcggtaagcttacaggtatgcctcttcccttcactacgaaggctctctgaaggacgcttttcttctgaaagtccctgcttttgctcagcttccacctggagtaggag

SEQ ID NO: 61279 - DNA, 456 bp, Zea mays
  unsure (1)..(456): unsure at all n locations
tctacatgcttgcaccagcgatcggctaatcttgtctgaatggctctatggtaagtcgctctagcgttcttgaggccaaacagcatggatgtatagcagaaagctccaaatggggtgatgaatgcagtttttttctcgtcttcttttgctaggctgatctgatgatactcggagtagcaatccaagaaggacaacatataacacccggcggtcgagtgtaccaccttgtctatccttggaagtccgaacggatcctttggacagtgtttgttgagatctgcatattcgacgcacatgcgccaatccactttattctntttgagtacacgaacaagacttgctaaccactcaagatgcagtacttctctaatgaatcctgctgcgactaagcgagctagctcagcacggatggattctctcttgtcaggcgtgatacgacgtaacttttgtcgggtc

SEQ ID NO: 61280 - DNA, 426 bp, Zea mays
agcttgagctcgactatgtcacttgccggcttgatcgccaccgttgtgcggtcagcgccgccgtggcgatagctgaacggaggatggaaacaaagagatcgcgtactccgtatgatccataacgggcgggtgtgattagatcatgacataccgattcgctctatgagatctatagcattaatgctgaaatgaagggtttatatcaaggtcggggcgtgttcctcccacatccattgagatcagatctaacgatcggggcgggttacctatgacataacgcggggggttcaatctggggcatcgcatcgagatcgaacggcgctggttgcataccggttcaccttatataactcttaatcctaagcgctcactttagatcggacgactgaggctgccccacgtattccggccagcgtcttttgcaaa

SEQ ID NO: 61281 - DNA, 383 bp, Zea mays
cgtggtcatgggacactgactgtatcttcttcttgtggacctctcgactagagtaagacccgcgccaatcgtgatgagcggatttttgggagaaccaacacgttgtctgtgttgtatttatgggagcgaatcactttgcttcctttgacaccggatgaatttatgaaggatgatcttgagaagaaactacttgagagcgagaaccactcgatagtgatccgcaaaaatactcgggaagagtttgcatagccctttaacacttctcatccttcaatgtccaagacactgggaaaagagggattatgcttgatcactacgaatgggatctctaagactcgagtgaacctaatgccatgttctgtgtgctcctatacaagatcacc

SEQ ID NO: 61282 - DNA, 479 bp, Zea mays
  unsure (1)..(479): unsure at all n locations
ancttanctaaagtaagtggtaagtctatctttttggttccactgaattccttttaagtcttagtgagagttgataagtactcaagttatacttattggggtgagagttatttcttctttccttgagatttattctcttaaatgctttggagtgggtttgaactataagttgcttttataaaattctaaaaattctgctaaaactacagtggcttgatactggtgtatgtttctctgcctcataatttggggatcagaaagtgaatagttttctctggacaaaattattaaattctacggcagaaagggtgctttgaactacaactatttattaacagtgggtaattctctataacttatttttgctggattttaagagctactatatgacttgatacacatttctagccattaataccgtttagttattttactatggttttctaaagttctagccaaatatgtgcttctactacact

SEQ ID NO: 61283 - DNA, 453 bp, Zea mays
  unsure (1)..(453): unsure at all n locations
cgagcagtaactggcttcgtctgaaacccttggagctgttttattatattctttagcttctgccatgaggtgatagtccctggccgaagagaggagtaccaggtttgagcgacactcttgtcggccatgacaaaagactttgccatgactgcagtagtgccaccatacgaagatatgggtgcttcatagctcatcaagaattgcttctggtctgaatgaccgtcgtacatggtgagctggngtggctttaagactggggccatggtgtagcctgcaattcttgtgatagaggagaagcatcatctaaagcaaaatttccatgatggaaatcttcataccagncgtcctcattatagaagccctcctgatgaagctctatgcgcggaggccttcnggtctggtcatcttgagcaagatgacgaatctctctccgagcttcatctatctgtctct

SEQ ID NO: 61284 - DNA, 480 bp, Zea mays
  unsure (1)..(480): unsure at all n locations
agcttgtcgncacgacaactccattatatccttacgttctcttcatcggaggatagtggaatcgtcccccatctccgacgatgagccaaccgtgcctggggaagaacctcctccgcgagaagctcgtcgacggaggaaccaacgccggaatgttcggcaacatcatgaagctggagactgagactcggcacagcctgtatctcgagatgagatctcagaggtgggagaaactcctgatgaatgagtcttcagggaaaggaggaactcccgccgacgtgatcgtctgcaggctcaagagcaagccgagcaggatgcgagacaacgccgagagaaccctctctttggacgaaacctgaaccctgacttcgcccgagccatgaacacaccgagcgaggtcggtggagtgttgtctcatatagctgatggcctcctctggactccagacacggagggctatcggcgactgcttactcaagcagc

SEQ ID NO: 61285 - DNA, 377 bp, Zea mays
cagcttaagctcttgacactagaatacttcatctagtgttagcttatatgttataatgcatgagtgaatatttaagaggttatactatgtatgaagcacggataaatgcaaaggtcatgctttctcttccttttatacaatatatgcaaagagtgtatatacgatgaagaattaagtacaggcttgaatgacaagaagtggtttactcttttgtaccttctcataaagacgttctctccattgtgcttatgtccttggtctcttttgcttaagacctatgcttaatacaagtgtgtgaaaatattctgcacaagacagagatctattactagcgatctttttcaagatattgttagcattaatcagatggatcacaa

SEQ ID NO: 61286 - DNA, 441 bp, Zea mays
  unsure (1)..(441): unsure at all n locations
agcttcggcatntatatcgagagccgggagtttatgctctttatcctctagcccatcagataagcaggtngataggtctaaaacatatagtgcatagctcttcgccgtagagacaaaaatacttagtccaaaccataggtgcacatagacaacttattgatcgcatagattctgacttcgcgaaaattacagaccccacttcaagaaagattttgcctaattcacccgctcttacatgtgaagtgccctacaacatgttaactccacatcccaggttgatgaaaatcaacaaccatgaaaaggatgatgtcggtaacaaagaatgatctaccgctcaacatagaacagtgatagaagataagcaaaatacaagggcgtaaagtacagatataatctagagaatgttgtttcatcgatcaagatgcaatagatcgtctaatc

SEQ ID NO: 61287 - DNA, 457 bp, Zea mays
  unsure (1)..(457): unsure at all n locations
agctnntaaccctgcgagacctttccccgtttctttcttctcatggtaaaagcaatatcgcatgtcatattctatgcatgtttaatctacttgttctcttgtatggtgtactgttggtttcctaatttcaatggatggatgtatgtatgtttgcaatcgcatacagaacgatctggttgaagagcccgaagaactagcaagagaagcccctgagcagcaatcggttggtggaagcaagtgtcccttgacctatctctgtcctattcattctataattcacctcccgcattacacatgtatacctaaggatttactagcttttgttatccgcatccttgcttacctatttgggttggattattatggtttagctatgctatcgcttaactctaatcaatgaacatgatgagattatctatgatacgctgttttcctctttcttattatgatgttatac

SEQ ID NO: 61288 - DNA, 386 bp, Zea mays
  unsure (1)..(386): unsure at all n locations
tgaagattatgtctacctgaaagtatcaccaatgaagggtgtatctcgttttggtgtaaaaggaaagcttgcaccccggtacattggtctatttcccattcttgaacaatgtgggccagtggcataccgactctaactacccgaaacattgtctgcagtgcacaatgtgttccatgtatcctaattgaagaagtgccttcnggttccagatcgaaccattgaagtgatggatgttaccttagaaccagacttaacatattcagaatatcctattcgagtcctgtatcaaaacgacagggttacccaaagaagaaatctcatatnttataagatacaatggaaccaacacacagaagatgaagctacatgtgatacccaagactttt

SEQ ID NO: 61289 - DNA, 486 bp, Zea mays
agcattcaaagcatgatatattgtagaagactcattttctttcctatgaatattaacaacatttctcctaagcatattatgaacaacatcccttctaccaacatttctatcatgcgcatatgaagaactagaaacaaacatagcatgagaaaaatcaccatacaccttataactcctataagcatttctagcttgtctcctatcattatacaaaaaagcatggttctgtttatcacttgtagccataagggccttccctttctccttatcgggaatgggagccttatggcttgttaagttcttggcttccctcttgaagccaagtccatccttaattgaagggtgtctaccgatcgtgtaagcatcccttgcaaatcttaatttatcaaaatcaatcttgctagtcttaagttggcattaagactacccaattcctcagttatattggaaattgagactaaatgatcactacaagcaccaacatcg

SEQ ID NO: 61290 - DNA, 269 bp, Zea mays
tgaatctaaatccaactcctcaaataataccattcgcgaacatcgcgtccaataccatgcttcttgttggtgactgatattcccctataggggggtgaatatggccaaactgaaatttataaatataaacctcacttactagcccggttagcgctagaaataaaaacgagttcgcaagagagggtgccaaacaaatctccacaaataaagagcgtgacacaaggatttgctttaccgaggctcggttctcgcaaacctacatcccgttg

SEQ ID NO: 61291 - DNA, 447 bp, Zea mays
  unsure (1)..(447): unsure at all n locations
agcttgcatttccatcatagtatttgtcgtttgctgcaacttctgcatttgagcggcagccactggatctgtcccaactggtggagggttcggaggattcatttctggttgtggttggttaacaatcctcctgctgtggtgattggcaggtagatcgatttcgcctcccttcctggcattgaccatctgggttataaaatcttggttagatacaattgtagataagacgagtaattagaagacatgatcttttgggggttttattacctcactagattagtgtgttacctaataatactaatacanttccttatggtggtacatgctagaatgccctgctatactaatttactcaatcaaagaagcaaatcaagcatttgtcatcagaacaatcatccaaacattttagctatgaatatatcatatttttgtcttaagtctcctatc

SEQ ID NO: 61292 - DNA, 474 bp, Zea mays
  unsure (1)..(474): unsure at all n locations
tcggccttnaatctcagcttggtgtgacaagctcaagtccctcnactagttattattctaccttgactacctttccttgaacttgtattaccttataatgctttgttatgtacaggatgacgaatccgaatggcaatgatccgaagcttggtggatgatccgaagcttattggatggtgatgaagccgaagacattgctatgaaaataaactctagataaactcttgaactatcctcgttaagaatattgtaatttaagaatcagatagtactcttgtaattcgtccataacttgtaatatatttttatctttccagccatgtatgaactagcttgatgtgacaatacttgtatttctgagcctaatgcgaaaacaccttctcttcttttctacacaacgatacataaatgtgcttcttttctttcgttgaagcttatattaaaccgatcaaccgtctgtattgttgatatata

SEQ ID NO: 61293 - DNA, 324 bp, Zea mays
aatactgagttgcaaggcctggtcaaagccccttgatcatggcctcaatgacaatctcattgggcactggaagcgcttgtgctcttagacgcaagaaccttcggacatacgcctggaggtactcctcgaggtttagcgtgcactgaaacaaagcctgagcagagactggcttcgtctgaaagccttggaaactagtgattagcatatccctgatcttctgccatgatgtgattatccccggccagagagaagagtgccaagtttgcgcgacacttctgattgccatgacgaaagatttcgccatgactgcagtattgctcccat

SEQ ID NO: 61294 - DNA, 408 bp, Zea mays
  unsure (1)..(408): unsure at all n locations
ctcaagaatgctggaggaagcatcagcagaatgaccgccaacgttcttcactcccaaattggcaggaatgtgctgacatatgtcgatgatatcatagtaaagagcacaaagcaagaaaaccatgttgctgatttgcaagaaacatttgccaatttccgacaagctggtctcaatctaaatccagataaatgtgtcttcggagtgaagggcaaatatcttggttgcctggtgtcaacaaaaggcatcgaagctaacccaagcaagatcgaagctatccttcagatggtgccaccaaattcaaaataggaggctcaacggttagcaagaatgctggcatcgttaaatagatttacttcangatcagtagagaggaattacctttctttgcatactgaaatcagccaagtc

SEQ ID NO: 61295 - DNA, 434 bp, Zea mays
agcttgtgaaggttcttcattccattctgggctattcggctatgccacgaccaacccatattattcttagcaattaagaaagtatccagttcagctttattaaaatcaactaagtatagctgaccctctaatactcccttaaatgctaccgaatcatcacttcttctgaagacagttacacctatatccgtaaaaagacagtcgtaacccattttgcataattgagatacagaaagcaaattgtaatctaaagaatctacaagaaaaacattggaaatggaatgtcaggtaatataacaattttaccaagtgctttgaccaaaccttgatttccatcctcgaatatgatagctcgttggggatcttcgtcttcttcgaagaagagaacatccttttcttccatgtcatgtggttggtgcatccgctatcaatga

SEQ ID NO: 61296 - DNA, 490 bp, Zea mays
  unsure (1)..(490): unsure at all n locations
tgttcatgctcagcctcagtacacagtaaactctggttgaagtcttctctgaacaactccagccatttgcttcttgggctgagcttgcttgcttgttccaatttgtgagcagtggcggcgtactcatctgagctgaaacttttgttataagttcctacaatggactacataaggttgaaaacgggcggaaaaagtcccgtctcgacccttacctttntccacatttgacccgcccatttttgtatttgcggaaaaatctataaacgggacgaaaacgagagagagtctattatgtctggttttgtgggatcccgtcttttgtcngattaaacctgtttttattccgtatttaagaaatccgggttgagcccaatacacattattacacaaactaatgcctcatattcttacgtgatatatatagcataagtggtcattgtagccatcggctctcctccatgacaagtggtatataggctccaatgacatc

SEQ ID NO: 61297 - DNA, 396 bp, Zea mays
  unsure (1)..(396): unsure at all n locations
agcttagagcctcatagagcatctagtagtttcatttgcatgaagactaacagcgcttcaaatctcgtgagttaaaagttctttcaaaagcaagtttgaaaattgcaaagtcttggatgcgcggaccgtccgggcctttatggcggaccgtccgcgatccaccaaaggggttcgaagactgaccacttcggggtccaccttgttactttgcactacggaccgtccgggcattaaggccggaccgttcgcagtcctgaccagagaaagctggtttcgagtcactccctgaattatagtgcggaccgtccggtcgtgaagggcggacagttcacaggtgtcacaaatgttnttggtcacggactgtgtgattttgtagatttgtactacggactgtcc

SEQ ID NO: 61298 - DNA, 485 bp, Zea mays
  unsure (1)..(485): unsure at all n locations
tgagagagccagaaatacaaagcgcagtatatgatatactgtcccaagccacaggcagaactgggtgaagacacagccctttcaatcaagcatagcagaaaagaagtcttcagctgctaaaaaacataaataaatctgggtgaatacactatgtattccgcaagcccacctggctcccgtaaagagaaagaggcctattgtgggggacagatatcccccgggtccactagaagaataaaagacctcacgaaaggtccaaatgccccataattcgtaaggtcatccccctcgtgagcctgtgaggaacgaacagtgagacaaatcagcacaaggtcgggtcggtgcaagcccatacggcccaacaacatccgatcagtaatcacagcagtgacccgaccttcccgcacangagccccgtacatcggaactgtgcgaggatgagtcagctgaattatatggagacacactcacgtagttcactatta

SEQ ID NO: 61299 - DNA, 397 bp, Zea mays
acctctgagtcacctgcggcatgcaagcttatggcacttaaaacaagttctttgtattttgtatctgaagtccttagtgtctcatagaaaaattatacagagctggagaaagtattatatgccgttttaatggcatccaggaagcttcggcattattttcaggcatacaatatcattgttccttcttcgcagccgttgaaggatataatgagaaatatagaagctactggacggattgggaaatgggctgcagagctcaacgaattttacattgattatgtgcatagatcttcgatccagtctcaagcattggcagatttcattgccgactggacgccaggggctcatgatgaagaagcaaataaagatgccgaagtgtggacagtgttttgtgatg

SEQ ID NO: 61300 - DNA, 256 bp, Zea mays
  unsure (1)..(256): unsure at all n locations
actgtattccatgctataggggagggcttctatagcaattgagaaaatccatcccctntacgttcatgagacccacatgtcattgcaactctcttcttttatcttcctgttctctctttcctctccctcccatctctttcagtgcttgcccaaagtgacaatgtggcgacccaagtgctcgtctgcctagcgcggtctgggcccgcgtgcccagcgtggcagtggtgtggcggtgtggcaacccacacacttgact

SEQ ID NO: 61301 - DNA, 446 bp, Zea mays
  unsure (1)..(446): unsure at all n locations
gcttgaatgacatatgtgtcttattntatatatttctttcactagttgaatgtgatataagagttccgtagttatcgatgcctatgtcctctgttaaacttgtgtttggggtgctttgtgcgatcaatggaaggactaaagcaaagtcgtatacaattaaataaatgcttgtactcgtgatgccgtgttgtgttggttaattataggtagtaatcgtcgtccttccagtggtgttaatgttgaacgccgatgtcgtgtagataactaaagctaacatgtggttgtctatggtgtcttccaatttaatgtttagttcgccactgtgtctttgaatatcttgtgctatttcattatattcatacatatgcatcttgcatctcatttaagaccgagaggtgacgatcgtgcaagtgatgtggtgccaaccacaagatgcagttggtgga

SEQ ID NO: 61302 - DNA, 304 bp, Zea mays
cttattcgttctgataacatcacagcaacaattacaagctttgctggatactttgagcgcaacagagccacattacatccgctgcataaagcccaataatgttctcaagccagcgatattcgagaacaggaatgttctccagcagcttcgatgtggggtaagacattgttacaagtattttcactggaagtacatgttatgacagatatagaatggtttaatagaaaaataacgataggcttattctggtaaatcaaaatgatattgaaccaatccgccttcttccctattcaaccatatatgg

SEQ ID NO: 61303 - DNA, 477 bp, Zea mays
  unsure (1)..(477): unsure at all n locations
agccttgtcgataacgaatgaaccgcgcgctatatatattatctagtggcancatttttgcgtcgtcgtggtcgtcggcggcgtcagcgtcctcgtatggagcataacatgccatgtatggacagcgaagcggagatactatggatcacacagtgtgaacccgaagtgtgaactgaactcacgttgctgctgcggactttaacatactgctcgcagtcgtacgtacgttcgatcgtcgccgcctgccttcatgagctaactgggcctgcaagcagaaaacaatggacgtccatgcttcggttcatacgacgaacactcaaggaaagagagcaaaactactaacgcgctgccacggtgttccacatgcacgctcatgcttggaatgtaatgggaggaatacgaacaagacagccagccagcgagatccatgcattatttttctgcaccgacgccggcctgtttgaccctttgacacat

SEQ ID NO: 61304 - DNA, 306 bp, Zea mays
cttcatacaactcatgatcaagttcttgagtatcctggagctcctcatcgataccagtggccatactttgacaggcacaatgatgtatatataaactcaataataaaagatatataacggtttcaacggtagcatacgtgattcactttcaaatatgacaggaaactgaattagcacccaatacacatctatgaccttaacaaaagaacagaatacccacacagcacattaactacacacgtgtgctcactaatggaaactaccgatgactataacattggtctacacttgaaaaccagccttcat

SEQ ID NO: 61305 - DNA, 485 bp, Zea mays
  unsure (1)..(485): unsure at all n locations
agcaccgcagctgcagcttggaaagctcttcatccccacatgtgctaatctgcgatgccacancgagcccatgctagtcttagctattaagcatgcatctagaccggcctcttcttttgcaaaatcaactaaataaagtttgccatctaatacacccttaaaagctagtgaaccatcacttcttctaaagactgacacatctacatttgtaaatagacagctatatcccatattgcataattaactaaccgatagcaaattatatccaagagactctactaaaaacacattagagatagagtgctcattagaaattgcaattttacctaacccttttaccttgccttggttcccatcaccaaaaattattgaatcttgggaatccttatttttgacgtaggaggagaacatcttcttctcctccgtcatatggtttgtgcatccgctgtcgataatccagcttgaacccctcgatgcataaacct

SEQ ID NO: 61306 - DNA, 375 bp, Zea mays
  unsure (1)..(375): unsure at all n locations
tggtccanaatgttaagataaagcaatccatgcatatcctatgaatgtataatattggttaattccaagtaacatttgcacttaccttatgcaaactagttcaattctgcacttatatatttgctttggtttgtgttggcatcaatcaccaaaataggggagattgaaagggaaatatgctaaaaccttttcctaattgattctggtggttgaattgcccaacacaaataattggactaactattttgctctagattattaattctacacgtgccaaacgttcaacacaaaccaattaatagtccaataaagggttcatatcaaaagagcaaaatacaatcgaatgtgtgccttgtctggcgcaccggatattgt

SEQ ID NO: 61307 - DNA, 486 bp, Zea mays
agcttatcaatctcgatctcatgggtggttccttctcttattaaatctcgtatcaatctttggctactaatccacatgatgatcaagaaatagttctcagagtgaagaaaattctcatgtgatgctctttttgccagcaatctctgcttcaattctggtcacattcttatttttttgagccatactctcgtaggctccaactatcagtgctatgtgaatttcttattggttgcgtttggtaatgatgtcatgactaacgactgatggtgccgcgacgaaaccgagagcctcatgtgggcgcgcacacatggttgagctactcggcacgcgctggtatcacggttaatagtcgtgctccattacgagactatactgatgtgctaccttttgtgaacattctctcagagagatcgctgcattttgtctcaacatgccgcgatattctactcaaatctatcttcagtatcttgttagataccatctcat

SEQ ID NO: 61308 - DNA, 446 bp, Zea mays
ctcagcttctaagggagaacacgtgataagttggactaacgtgcatttctaataatatagaccttgtgcagcttgtcaagcaaggtaacaagtgggaggagcacatcacagcaagaacgtgatgaccacttcaagacccctggagctgctgcatatggacctcttcagacctgtcgcctatctgagcatacgaggaagtaagtatggtttagttattgttgatgacttttcccgcttcacttgggtgttctctttgcacgaaaaatccgaaacccaagggactctcaaacgctttctcaggagagctcaaaatgagtttgagctcacagtgaataagataagaagcgacaacgggtccgagttcaagaaccttcaagtggatgagttccttgaagatgaagggatcaagcacgagttctccgctccctacacaccacagcaaaatg

SEQ ID NO: 61309 - DNA, 382 bp, Zea mays
agcttgaatctggattaagcgtcatgaccaattataatctcgcagacagtcttgcgtacaacagcctgtaagtatgggaattaaacgctcgaaaaacccccttattttttacgcaactcattccttttttcttatatgaattctttttcgtatagggcctgatcctaagcaacgcactaagagcccaaaagagcaccgaagatgaaagctatgaaattgcgtttaataatttacgctccgaagttatcaaactgagaaacgaagctttggaaaaagataaaattctgcttacactggtagataaagtgaaaaaagacgaagcttgcttcaaagcccaggccgaagctcaaaaatgcgagattaaagatctttagaaacagct

SEQ ID NO: 61310 - DNA, 374 bp, Zea mays
  unsure (1)..(374): unsure at all n locations
tcttcttcattctgatgaaaaccaagccctgtgatcacttcatcataacgaatgttccaactccgagatgcttgcttcaacccataaatggatttctgaagtntgcatatctttccagcattgatcggatcgacaaaaccctcgggctgtatcatatacacgtcctcatctatgtttccattaaagaaagctgttgtgacatccatctgccaaatctcataatcgagatatgcggcaatagctagaatgatccgaatagatttaagcatcgctactggcgagaatgtctcgtcatattcaactccttgaacttgtcgaaaaccctttgcaacaagacgagccttatagatgtgaacatttccatccatgtcttt

SEQ ID NO: 61311 - DNA, 425 bp, Zea mays
  unsure (1)..(425): unsure at all n locations
agcttatcaagtctactntcatatggatcctgaattatagtcgtatctgttctgaagccgccgtaatcattgttttcttaccgagacatttcctgccttttctgcccatggtgctgcgtcaccctattttggcccaatgggtcgtatatcaagttaagtccattagggacgcatcctaaggttgcagcacgaccccaatgcccttgtggtcgtcctcccatgtttataaaccccctagccgccaccaagaacagggggttttagtttagatcaagtttagctctcgctacttgcttgcaagcgcgcgtgctagttcagccgcccgtcttcttgtcttcggaaccccaccatattggagtttgatttttaaacctacatttagatctggtaattcagtacttgttctacttgttcttgctagttct

SEQ ID NO: 61312 - DNA, 486 bp, Zea mays
  unsure (1)..(486): unsure at all n locations
tcagcttgcacttacgaccaaccgacacgcatgctatatcttttatggctcaacaatagtggtaaggtcaaggttaccaagctggttcgaattaattctgctataggttcatatcgcgatgttgctgactgtgatgtcgtgcctatggatgcttgtaatattctgctaangataccatggcaatttgattcatattgtttgctccatggtagatcaaatcaatattctctcatataccatgataagaaaattattttgcttcccatgtcccctgaggctattgtgcgtgatgatgtcgctaaagctaccaaagctcatactgataactacaagactattaaagttgttggtaattacanatatgggataatattgaacggacatcgcttgcttgtatcaatactgatgtaatgaattattgcttcccttctgatgctactcctaggtatcaacgatgctttgatacatttaatatatgcagcattc

SEQ ID NO: 61313 - DNA, 478 bp, Zea mays
  unsure (1)..(478): unsure at all n locations
gctgtgaagattcttcattccaacatgtgctattcggcgatgccagagccagcccatgttagtcttagccattaagcaagtgtcgagctcagctctatcaaaatctactaagtatagctaaccctctaacactcccttaaatgctactgaatcatcacttcttctaaatacagtaacacctatatccgtaaaaagacagttgtggcccattttgcataatcgagaaacagaaagcaaattgtaatctaaagaatctacaagaaaaacaatggaaatagattggtcaggtgatatagcaattttacccaagcctttgaccaacccttgatttccatccccgaatgtgatagctcgttggggatcttgttttttctcgtaagaagagaaacatcctttctcccatgtcatgtggctagtgcatccgctatcgatgatccaacttgagcccncggatgcataaacctacaaaacaaaatta

SEQ ID NO: 61314 - DNA, 481 bp, Zea mays
gtacccataacccttctaagccgaatcttgaggactagatttcttttatagtgggtagatttgtagcatcccaaaaattcaaatcttggaattttctcaaactcgctcagaatttaaaatgaatctcaaatttcatttcaaaatacttgtttgcgagttgatatcaacaaataaaatatagtggtctatattatctctcaaatcctcctcaaaatatccttcaaatattttcccagggatccccctcaaattcttttcagaaatactacccagatattttcccagtgatccccctcaagttctttctagaaatattgtccaaatattccactgatatatctccaagtatattcctcctgagaaataccttcagaatcatatttcaagtccctacaaatattttcttcataactttcctcatgctcatatgtatacgtatgcctccagtgtcatacggggagctctacaagctaatctcact

SEQ ID NO: 61315 - DNA, 415 bp, Zea mays
  unsure (1)..(415): unsure at all n locations
agcttantacccataagcctcatgatctcctgccagaacgtcgaggtgaacacggagtcgcggtcggagacgatggactgcggaacgccgtggaggcgcacaatgtcggtgaagaatgcctgtgccaccgtctctgccatgtacgggtgcgcgagtggaatgaagtggcagtacttgctgaagcggtcaaccacggacaggatcactgtcttcccattcacgcggggtagcgcctccacaaagtccagcgcgatgtcagcccaaaccgccgagggcacgggtagaggcaagagcaaccctgctggatggagatgctcggacttgtaccgctgacaagtggagcacgctcgcacaaattcctgcaccaaacgtcgcatgttggggaaatggaaatcacggcggagccggtgcagtg

SEQ ID NO: 61316 - DNA, 418 bp, Zea mays
tctcctggacaagcgtcgcactcactgcagagagctaatctgccacatacagcagcacaagagcccctggcgctggtggagttagcgtccttagatctatcagatactgcttcagctcttcgaaagctttctgctgagctgatccccattgaaagacttcggccgacttcatgacttcaaagaatggtaaatttctctctgctgatctagatataaatcgattcaaggatgccaatcttcctgtcagccgctgagtccccttctttgtgcttggcggctccatccgaagaatggcttcaactttgtttggattagctttgatcccttttcgtgaaactagacaaccaaagaatttgcccttctttactccgaagacacattattgtggattcaacttcacgccatcttgcctaaagtt

SEQ ID NO: 61317 - DNA, 479 bp, Zea mays
  unsure (1)..(479): unsure at all n locations
agctntaagggaatagacataaaatggtccctataatgaacttgaatcacatttatacccctgagataccaaaaacccccattagaaccctggataaccctaaatccaaaccctaggggtctatgtgcaaaattagtccactcttggactaaagtgcaaaaaccatgacaataaggtatcttaagccctttggttcacaaatatgtgaatttgcaagctaaaccctgagttttggacttacttgcaaaagagccacatttgaactcttttgactaagtctgaatttcagtgtactgtgctcatctatgtgaccttgtaacttctaaacaaaagggatattgccccaagtcaccacatcaagtttgtagctcaatcataagagaacaactttgcttaagagtgtgggctcagttgttaagaacaatctatagataattaagcctaaagttggagtgtcatactacttaaagtctgaaatc

SEQ ID NO: 61318 - DNA, 391 bp, Zea mays
gtcacaacactattcctgagtcgaatcacatctattataggtgccaccgtgattcgattaaagaatatcctaacctagtgtatctttgtttttccaccatcttattttcttacatgaaaatcaattcacgaaggattaatctccaatctgatgtaataatactgtggacacatcatcgagtgtggatcacatccccttaacaatgctttcgaagctacaaagtcgttcctaatggagcgcagagtaagtttcgaagctacaaagtcgttcctaatggagcgcatagtaagttccaaagctacaaagtcgttcctaaaggagcgcacagtaagttccgaagctcacaagtcattcctaatggaatgcagagctcacatgccactgaaataaa

SEQ ID NO: 61319 - DNA, 445 bp, Zea mays
  unsure (1)..(445): unsure at all n locations
agcttggccactgtgtcggtgaatgtcnatatccacgacgcgaccaggccaacgttgcacaagcggaggcggaagaggaagctctgctcctatcacacgcaagcatcgagctacctccagcggcactggccgcaacggcactccaccttgatgagtcaaaagcacgcgctttccttagcgacagctccagcaatgacatgatcgaaggatggtgcctcgacaccggcgccactcatcacatgaccggccgacgggagttcttcaccgagctcgactctagcgtccgaagctccgtcgagtttggggacgcctccggcgtataaatcaaaggcgccgactcagtcgtattcaccgccgcgtctggtgagcacaggctgctcaccggagtctactacatccctgcgttgaggaactctatcatcagcttggacagctggatgataat

SEQ ID NO: 61320 - DNA, 387 bp, Zea mays
  unsure (1)..(387): unsure at all n locations
cganaggaactaatccatacttagcttcaatacctcattttcatagtactagatcagacttcaactcttctacccactcattgtgtttcttttcctttgtctctggctcatgccgatgggacatataaccatataaccactctctgaaatgacacttacaccaatcgtatggctgtcggaaaataaattattaattctatgcacaaattaacacaaatttggacatttgttatgcactcacataatcaatggtgggacacacaaagtactttacagtgtcctctcataacatagcacgatcttcataatcgcatccaggcagagactccagtcgtctttctgtggctacgtacatcttctcatccgttattggtggtggattcggga

SEQ ID NO: 61321 - DNA, 461 bp, Zea mays
  unsure (1)..(461): unsure at all n locations
agcttacttgacctatcttgaaaacatctatatatggagataaaatctttctgtgtatacaggggaacactatactcccttctttaatcacattgtttcttatgatataaatcatgattaagccatgtacttgaaaataatgtttattaaggtagtataaatattatattgttctttctaaaaataaaaataataattaaatcttaaataactgagttgtagtgtataggggattgtataagagtaatggttgggttgtagtaaaatatattaaaaagtagggacaagggaagatgtatatgggacattngtggagataatctcattgtcgcccctagttatcacatcagatactgtgcctatanttgcatagcctctcgaataccccacgacacttcccgcttctatcgtatcaacccgggttcttccttcgacaggtgcatgccttagtcgttgatgtt

SEQ ID NO: 61322 - DNA, 434 bp, Zea mays
atagagcagatataaagagcaatctactgctattgaaaagaaagacttcgagcttcatacaaccgaaagcttactggcggaagttgaagcttaaataacagaattaaatacaaagcttctctctcaattataatacttcgaacaagataaacagaagcttaatgccaaatttgaggccgaagtccaaaaaagttcagatttgaaaaaaatcattgacaagccttcagaataaatgtctggagttcagcaatcgatgcgttcaacggcttgacacatgtcttctattcagttggagccagcagcgaatattattctccttctgctgaagacctgccacgtgccttcgaacatatcgaacgtgaaattgatgaccttgatgaacgtattgctggacatggcgacttttgtgccctgttaactcttccgggcacaac

SEQ ID NO: 61323 - DNA, 461 bp, Zea mays
  unsure (1)..(461): unsure at all n locations
cctgcggcatgcaagctntgcgagagagagagagcgagagcgagatagcttcatgagagacagagagagagagagagagagagagagagggtccagccctgcttgtcttctcccgtccctttgtcgtgcatctactcgtgctcctatcgtgcgtccctctttttcccttgccgcgctcctggacatccccttttatagacatacagagatggcccagctgtacaatgggggtgtagctatgtgctacgtggccagcggggaagtgcctggtcgctatgcacgtgttaacgtgtccgttggagaagtgcatgagccctgtagaagcacagctgttggcgttgcatggatcctgctgacgtctccttgcttccgcaggggcttgagaaccaccgacgtcatggacgcatgcggggaaccatcattgcctgttaccgcggtaagctagatgggacgccggtctt

SEQ ID NO: 61324 - DNA, 439 bp, Zea mays
  unsure (1)..(439): unsure at all n locations
cagcggcaacctaccccggagacttcccggctcntttaattatggtaaangcaatatcgcatgtcatattctatgcacgtttaatctacttgttctcttgtatagagtattgnttgtctcctaatttcaatggatggatgtatgtatgtttgcactcacataaagaacgattcggtcgatgagccccaacaactcgcaagagaaacccctgagcaacaatcggttggtggaggcaagagccccttaacctatctctgtcctacttatactttaattcacctcccgcattacacatttatacctaaggattgactagctcttgttatccatgtccttgtttacctatatggggtggaatattattgctcagtcttatgctattgctcaactctaatcaatgaacctgatgagaatgatcaatgatacactgcnctccctc

SEQ ID NO: 61325 - DNA, 415 bp, Zea mays
  unsure (1)..(415): unsure at all n locations
atacatatatacccgtacgatagcatgtgcgttgttcgtacgtacgtgctcgtcctctacacccgctgcatgcagatttctactccaaatagaccatatacatgcatgatcgatctcgagtcccttcgatcagcaacttggacgatggaattattgacgagcagttgctgtacacgagcaactttgggaacaagcatgagcttctccttgggatgcaccgtgagtccaaacaccttcggcatgacaatgtgcttctcctccatgcccatgggcagctgccagtcgaagcantacacgagggttgctagcatgatctcgaccgtagccatcccacagttgaggccagggcagagtcttcttctgctccaaacggtacaagtggaagtggtcctcttgatgcgacgccagcagcgct

SEQ ID NO: 61326 - DNA, 454 bp, Zea mays
tgcaggctgaagctttagtaaaattataaatgccctttatttttttttcttcacatctatacccctgcgatacccgataccctaattagaaccctggacaaccctaacaccaaaccgtcggggcttatatgcaaaattagcccacttttgtgctaaagtgcaaaaaccaagccacattagtatttgaagtcaattggtcacaaatatgtggacttgaaagccaaaccctaagttttggacttaaatgcaaaacggacctcatttgagttctataccaagtctgaaattcaacgttaaaggctccactttggggctttgaaactttcaaagcataggggttttgccctacgtcaccacatcaacagtgaagaccaaacatatgagaacaactttgtttataggtgtgggcttttgtgtaatgaaaaacatgagaatattcaccctagttggactg

SEQ ID NO: 61327 - DNA, 312 bp, Zea mays
acaatgtgatgaccactctcagacccctggagctgctgcatatggacctcttcggacctgctgcctatcttagcctacgagggagtaagtatggccgcaatattgttgatgactataccccgctcacttgcgcgacttattccaagaaaagttcgaaaccaatcggacctcaagcgcttttcctgatactcaaaatgagttgatctcttgtgaaaagatatgacgacaactggccgagatcggaacctatactgaggagttcttaggagaacggatcaaccaagtcttcctcctaacacacacaaaaggtgg

SEQ ID NO: 61328 - DNA, 453 bp, Zea mays
agcttgacagagtccgcttgaactaatcttctgagattcccgaccccagtgcaatatgacaccagaaggtccaacccaaacggcgttggctgaattcagagttattgcagagcacattggcactagggatttggtgcaggaatttctggctttcaaagtatttccaactatgaaggaatgggctatgtcgaagcttaaaggagagaagaaagagggggagcttgtccgactaccctatcattataaattcaagaaatattttaaggcaccctgccaagaatggctcgaaacaatcgaaataatgagtactggaattcttggaaattactctaaaaaagaggatcaattgatgacagcagccttcagcacccggccgaaacgaaggctaaacagagtgtttgatgctataggctttgaatatcctgattatgggcgattgggcggagatgctgg

SEQ ID NO: 61329 - DNA, 485 bp, Zea mays
  unsure (1)..(485): unsure at all n locations
atctgtagatgaccatggtgatgagctgaaagaactntcttacagaanactaaaagaattctctattgctttagcatactctcctttggaataatccattccgttctcgaattttaaatctatcaaatggtggcgttcatcagatatggcaagagcacgagctattatgctggatatctcatcttccattatgcacaaaatattactacctggacctaccgcgaactgcggagagtatgaatcatcatgttgttcaaacaagggagaaagataatgtggcaaataattgttaatgagttcaaatttgcccaaatatccaatttcaatgtcatccctgtaagccatttgagactcaganaatgaattccaaatccacctctccctgtcatcccaataaggatatttgaattggtggggagtgctacaacgctcctgttccatgggtattggatctgctactgtaagaatggcctggcctgcatatc

SEQ ID NO: 61330 - DNA, 449 bp, Zea mays
  unsure (1)..(449): unsure at all n locations
agctntatcaaatggacgtgagaagtgccttttctcttggtccaatcaaggaagaggtctatgctgagcaacctcccggctttgaagacagcgagtatcctaaccatgtctataagctctctaaggcgctatatgggctcaagcaacccccaagagcatggtatgaatgcctaacagatttccttatcactaatggattcaaagtccgaaaggcccgacctacgctctttaccaaaacacttgaaaataatttgtttgtatgccaaatttatgttgatgatattatatctgggtctactaacgaatttacatgtgaagagtttagtaggatcatgacacaaaaattccacatgtttatgatgcgggagttgaagtatttcttacgatttcaagtaaagcaactccaagagggcaccttcctaagccaaacacagtatactcaagatatt

SEQ ID NO: 61331 - DNA, 488 bp, Zea mays
  unsure (1)..(488): unsure at all n locations
ntaccaaatggacgtgaaaagtgccttcctcaatggaccaatcattgatgaggtctatgttgagcaacctcccggctttgaagatagtgagtatcctaactatgtatataaactctctaaggcgctttatgggctcaagcaagccccaagagcatggtatgaatgcctaagagatattcttatcactaatggcttcaaagtcggaaaggccgatcctactttatttactaaaactcttgaaaatattttgttgtatgccacacttatgttgatgatattatatttgggtctactaacgaatctacatgtgaggaatttagtatgatcatgacacaaaaatataagatgtctatgatgtgggagctgaagtacttcttgtgatctcaagtgaacaactccaagagggcaccttcattagccaaacgaagtatattcaagacattctatacacgtttggatgaaagatgccagcccatcaaacacccatg

SEQ ID NO: 61332 - DNA, 441 bp, Zea mays
  unsure (1)..(441): unsure at all n locations
agcttgtgaaggaccagatcatctaagcatattagtttctggatgagaagcaccagaagaccaatcaaggaaagaatccatgtgggagttcataagagaaaggtttgcgtgatggcatcgatgcttcttcaataagctagctgccaagcgaaagatagaagcctggggatgatctttgagtagccagaatcagcgtttgcaattggcaaccggatgctcctcaaaggccagattctgttgaagttccatctcctcgaagagtatgcataatgaagatgtgtagctgaagtaaagatatacccataacccatctaagacaaatcccgaggacgagattcattntaagtggggtagatctgtagcgccctgaaaattcaaatcttgaaaatttctcaaactcgctctaaattcaaaatgaagtttaaatttcatttcaaaatg

SEQ ID NO: 61333 - DNA, 391 bp, Zea mays
tgacgaagattatagagaagactatgaagtattaacatctactcgatcaaggaaactttgaaaatatataccgcaatggatgtaatgatgctcatttgatatcacaaacgttattgttttttctataagctatagtcaacgtggttctaactgcttctaccatttatcatgctattgccctcgagcttcctaaatgggtaatcaaggtcactgataaatggcgcaaaccctttggaaagttcaagagagtgccactagatggagttggggggtggggtggggggctatgtatatataatatggagaccatgggctgtgctctgcacattctatggctgtgggcagagaaaacacatactgctaagccatggtccaagatgaaatttatttg

SEQ ID NO: 61334 - DNA, 439 bp, Zea mays
  unsure (1)..(439): unsure at all n locations
agctngttgcatgcacatgccttcttctttttcttcttagcatcaaccttactggaacactaccccacttaaaatgaatgagggtcgaactcttgaatctcggggatttgaactccttgaagtacctcataacacgggtgttatagggccttcttatgtccttgatgcttgagcatgctgtggagagatgactgacatagagntgattttgggataaccttcttctcatcttctcttagattttcacttttcactacccctttctttctctttattcttcccactggaggattctatccaagagtattaccatcacacactggaggaaaccaaagactatgaagcatgtacaacagtcttcaacccaagaatcaccaaacattgtgatcttaggggcgacggagtggaaatggagttgcttgtgatttggcagagggga

SEQ ID NO: 61335 - DNA, 458 bp, Zea mays
  unsure (1)..(458): unsure at all n locations
tactcaagcccttcggtagtctagacgctagtgaagaatggatcaacagttgttggtccaagtccgcgttccagtcaagaatggagaccgctatgtgcttactacttgaggacaaccttntgtgcttgaccaccggagcattggcatatttcagtacagggttgtatccatgatgtacatgttttcatttcatgggacacctgtgtctacaagcaaaaggtgcccgagtatcctgaatttattagcggactgagcgaatcacttttgatgtgtgattaggatatcgggaaactatntaccaggttaattatgtcacaaattatggtatatgcattcgtattatcttcaagatgtttgtcacagcaaaaggggcattatgataatgatgcctttgcatgtcgttctgtccgcagatctatgataccacttatttggggttctttcattgattacacaca

SEQ ID NO: 61336 - DNA, 450 bp, Zea mays
  unsure (1)..(450): unsure at all n locations
atgcattcacacaagaacacaagtagagaggtttttttactatgtggctatgacgaaaaatcatcttgacgaaatactcctgtcaatattgtttgccataggctaggatttcagtgcaatgcacggtaatgttctaaatgcctacatgcatcaaatatctgaccactgatcacatattctgaantgatggcattgcactgtttattgttccgaagcattattgctacatgagcacaaataatataaatgcatatatatttgtatatcaaaataatatgaggaaatatatgaacacccatatgcttaatagaaccatatgggttcctgccaagcataacctgttacataaaaaaatacttgaaaattatagattccttttttagaggaaaatattactctatggacctgctactctgaactggtcttcaaacagaacatcagtgttgatat

SEQ ID NO: 61337 - DNA, 451 bp, Zea mays
  unsure (1)..(451): unsure at all n locations
agcttggaggcgtcgattggttgtctacttgttgtatactcctccttctcttcttccgtcgccttgaatgcgacgggttgagcttcggatgtagatggatcatcaagctcgntgatcttcctcgagccttcgatcatgcactcaaaacttacaaaatgcccgattacttcttcgggggtcattttagtatatctaggattaccacgaattaattgaacttgagtggggctaaggaaaatgagagatcttacaataaccttaaccattgtgtggtcgttccacttgacgctcccgaggttgcgcacttggttcaccaaagtcttgagccggttgtacatgtgttgtggctcctcccctttgcgaagccggaaccgaccgagctccctctcgatcgtttcccgcttggggatactggtgagctcatctccttcgtgcgcgggtttgagcacat

SEQ ID NO: 61338 - DNA, 424 bp, Zea mays
tgtgcagagtccgcttgaactaatcttcggagaatcttcttctcattgcaacatgacaccagaaggtccaactcataaagcgttggctgagtttaaaattatttcagagcatatcagcacaagagacctggttcacgagattttggctctcaaggtttttcctaccttaaaagaatgggaaatgccgaagctagagggggagaagaaagaatgggaacttgcgccggtaccttactattacaagtttaagaaatattttaaaacaccttgccaagagtggctggacacaattgaaataatgtgcgatgaaatactcggtaattactccaaacaagaggatcaattgatgactgcggccttcggtacccgtccgaagcgaagactgaatcgagtgctggacgccctgcgttttgaataccctgac

SEQ ID NO: 61339 - DNA, 291 bp, Zea mays
  unsure (1)..(291): unsure at all n locations
tatgccataatagaaggggagctatataagcgtggcgtctgttccccattgctcatatgcttaatccagatnccgaaggtatagaattaatgagcgacatacatgcacgtctggtgggatctcacatttggatctaagcctttgcttggaaagggtttttcgccangattctattggccaaaggcagcttncggacgcaccggatttagtccaaaagtgcgaaggttgtcagaaatgtgcaagagatcataaacaaccttcgtctttaactcagttaatacaacccacttg

SEQ ID NO: 61340 - DNA, 400 bp, Zea mays
  unsure (1)..(400): unsure at all n locations
taacacttcagagacaaaatatattgagtcttgctttttattatgaccttcaagcttctcttgtacaagtgccgcactcactgcagagtgcgaagctaccacatacaattgcagaggagcccctggcgcgggtggagttaacagtgntagatctaatacgtattgcttcagctcttcgaaggctttctgctgagctgatccccattgaaagacttcggctgacttcagcacttcaaagaatgagaaacttctctctgctgatctagatatgaatcgattcaaagatgccagtctttctgtcagctcgtgagcccccttctttgtgcttggcggctccatccgaaggataagcttcattatatttggattagcttcgatcccctttgtgaaactagacaac

SEQ ID NO: 61341 - DNA, 214 bp, Zea mays
  unsure (1)..(214): unsure at all n locations
cctccggagcaccaggtgggatgaccatgaaanggtcaacgttattcttatatcactctcttttcttaatnctaccccagtgcaattaatacgtggggatcctagatataagctaatgtctcctgaggaggttataggaaagtttgtgagctttgaattgatgatctgtcacacccgggctttaaggaacaatgtcggatgcctttcatacatg

SEQ ID NO: 61342 - DNA, 413 bp, Zea mays
  unsure (1)..(413): unsure at all n locations
tcggcgacgggtataaatattggcagcataacagtgtatatatcattaaatgctgtggtaacttcacacctactcgtctgtttatatagagccgcacgtaagaatgcgaagcgccacaagttttacaccaggcggacattcactcgcactcgctgtacggtggaccgcagagatcgaacatgaactctgcaatgtggggccgctacgcgcacggagattgaatcgtttctcgacaacgagctcatggaaggtgtttatgagaccttctgcgctcctaagccgaagaaactttnttcacggatcaagctcgttacgaaaaacgatctatcaccgcgaaaggtgctactgttgtgtctatgcttcgccgccgaacgacttgtttaaagaagtggcctcggatgaagctggttgta

SEQ ID NO: 61343 - DNA, 462 bp, Zea mays
  unsure (1)..(462): unsure at all n locations
agcttcgaaccaaccaacaagaggcagaagaatgaagcccanagaagagtgcaaaatgtatgggttcagggaacctacaacaagtagaagtggtctcatatcccgatcgccttctcccaaaaagatcttcagctcaaggattatccacatagtgatgccatggttatatcttgtattatcaagggatttcttgtccacaatgtcctagtagatatacgcaaatgcagcgaatattatcttcggaagggcttttagacaactacaagaaccaggagacatattgcaagaagttgtccatcctttgtgtggattcaaaggaaagtaaatagcaacattagggaagataccaatgccggtaaactttagctatgttcacaacacaaaaactaaagaggtcacatttgatatagtggaaccttgaatgatnttgaagctattntgcacccaacatatctttgcatg

SEQ ID NO: 61344 - DNA, 455 bp, Zea mays
  unsure (1)..(455): unsure at all n locations
ntcatggcatggtcattcgtgtgtcacaggtgataaccaatggttcagtgatgtagtgattgcgaggatccgttcgctcagagccttgaatcatcaacgtcaagatctccatccaatcaagttatcatacctcatggaagattgggccttgccctctatcaagtggtatcaagattcaggttgcccgtgaggtataatcctacctttagattcattntgttcgtcctataatccacaaaaaagccaaagagaaaagagtcctaacattaggtcatatctttaaaaaccattagtgtagataccgttagaaagctaaggagataagctntacaaaccaactattcccacatcaaaatatgctaggagctgttgggaatcatcataacaagatgatgttcagaatctgccagaaatatgtgacacctcgttttatggtgaaaggccttgtacatctt

SEQ ID NO: 61345 - DNA, 451 bp, Zea mays
  unsure (1)..(451): unsure at all n locations
agcttctaaagggagaacacattntaggactatcatatgttcattntgagaaagacaggatctgtagcgcatgccaagcaggaaagtaagttggtgcccatcatccgcataagaacataatgacgaccgacaggccactggaactcctacacatggatcttttcggcccgatcgcttacataagcatcggcgggagtaagtactgtctagttattgtggatgattattctcgcttcacttgggtattctttttgcaggaaaaatctcaaacccaagagaccttaaagggattcttgagacgggctcaaaatgagttcggcctaaggatcaagaaaattagaagcgacaacgggacggagttcaagaactctcaaatagaaagcttccttgaggaggagggcatcaagcatgagttctcttctccctacacgccacaacaaaatggtgtagt

SEQ ID NO: 61346 - DNA, 436 bp, Zea mays
  unsure (1)..(436): unsure at all n locations
tggaaatganactaggtgttcactacaagcattaatgtcattatctttatccctacgacaaaattcaacatgttctacacaagaattggatntatttgctacttctaatttagcatttaaatcattgttgacacctttcaaagtagaaatggtttcatgacaagtagatagttcanaagaaagcatttcatttctcttaacttctaaagcataggaattttgtgcctcaacaaatntatcatgctcttcatacaacaaatcctcttgcttttctaaaagtatattcttttcattcaaggcatcaattaattcattaattntgtctatcttagatctatctaagcccttgaacaaacatgaataatctacttcatcctcatcactagattcgtcctcacttgaagaagcataggtagagttgcgagtacataccttc

SEQ ID NO: 61347 - DNA, 454 bp, Zea mays
  unsure (1)..(454): unsure at all n locations
agcttcgccgcggcaggcgctagcgacggcgtgaacactaatgtgaggcgaggagaagagagagattgagagaaacgaggacgcgaacagcggtgggttttaagggaggcggagctggcaactggggcacggcgcgagccgctcgctgtaggtggggccgcgcggggttggatggcgtcgcggggcgcgagccgtgcgatctataacgggcggcctccatggactcccgtgacgtgcaggggggacggaaaggttgtgttcgcgtcngacacacggatcggcctcacgtgcctagccaagacactgcttggcggggaatatcccggattttaattctcgcgatgaaaatttttcgatggagcgaacgcttataaggtatattttttctccatcctcgttacctatttaaattataactaaattatatttatttattattaatatacaccattat

SEQ ID NO: 61348 - DNA, 482 bp, Zea mays
  unsure (1)..(482): unsure at all n locations
tgtgaagattcttcatcctaacatgggctagtcggcgatgcctgagccaacccatattagtcttagcaatgaagcaagtgtcgagttcagctctatcaaaatctaccaagtatagctgaccctctaacactcccttanatgctattgaatcatcacttcttctaaagacagtgacacctacatcagtgaatagatatgtgtagcccatttgacataattgagatacggaaagcaaattgtaatctaaagaatcaacacgaaaaacattggaaatggaatggtcaggagatatatcaattttacccaaacctttgaccaaaccttgatttccatccccgaatgtgatcgctctctggggatcttggtttttctcatatgaggagaacatctctttctccccaatcatgtgtgttgtgcacccgctgtcgagtattcaacttgagcccccgatgcataaacctacaaaacaagtntatgtcttg

SEQ ID NO: 61349 - DNA, 453 bp, Zea mays
  unsure (1)..(453): unsure at all n locations
aagcttgaatagcattctccataagacactcattttttataggtatgcactagctagctcaacgatgatcatgtcatgtgaagtcttaattgtaccatangtcccacatgacaacatgacacccttccatgttgcattatgagtaaggcaagtacatatttctgtgctagatacatgctagaccaaatttctaggtagacgcctttattgatgatgcttgtttcagaaacatagcgttaatctatataatattgccatttttgtatgacaatgaaaccaacaccaccgtgtaaaaatgtagaaatcagcatccagagactgggttatgtaattaatttgcatttttaggagattcttgtcgattgaacttatttgtttcttaatacacattcattatcttcctttacggattgcgaatggacattctgggcagcgtgtgaccaaactgattct

SEQ ID NO: 61350 - DNA, 437 bp, Zea mays
  unsure (1)..(437): unsure at all n locations
cctttatggggctctttattgtctctcttgtcacaagttggcttcttgtggcgagaattattgattatgggaaatacggggagtttttgaaatctttgatcaatctcttttggaatgactctctttatgcttcaacatgtgtgtntgacttatagatagagatatgagtctgatttgcaaaaacaaaccaagtggtggcacaggatgatccatatatgccaaaattgaatcataacccatttgagttcttatttgaagtgattttgcgcttgttctagttgctctatgttgtgctggcataaatcaccaacaaggcggagaatgaaagggaaagtgcccttgggtctttctaagtatatggtgatgtatgcaacacaagtcttacatgtgaaaatgcccatggtgaacaaagtgcaatcacacgtaagggatgtttc

SEQ ID NO: 61351 - DNA, 125 bp, Zea mays
aaccttccccccccccggggaatgacgctcaacaaaaaacacgcagaaaaagacgactttttgacccgaaccccccaggaaaacggcggagccaccacccaaccgaagggcaacccagaaaaacc

SEQ ID NO: 61352 - DNA, 448 bp, Zea mays
agcttgtgccacgcacccgggcatcgtgtcttttcatatatcagcagcaacacaccctcaagcctcgcattgaacctgctcgacgaaaagcgcagcaagctgagtgtcgttcgtccctgcagcaacaccattcttcacttcgcgtcatacatcgcatagccttcatcgctgcgcattgtacgcatcgacgcagcagccctcccgttcattctccactcccctcgtcgcgtgtcatcaatctcgtgcttgctgcgcagcccatcctcctcgtcgtgaaaacccttggtgagcccctcgctagtacccccactgttttttttgatctcgggtgcttgataaaatggttgaaccactgggtgtcttaattgcagctagatgttgccgctgcgcctcgtgcgacgcatgattcggtgaaacacctataaccgcggaggcatgcgcgacacga

SEQ ID NO: 61353 - DNA, 435 bp, Zea mays
ctttattgtcttcaacacatctagtacactagccattctatttctcttcgtgggcaaatgctagacacgttctgcgtcttcggcacctccactcctgccgaaaggcttagaacttctaatgtttgcgtcccttcagctcatcggccttcaattctggcagcctttggcattgcagccggctcttttattctctacataagagcaagtcctttggcttcaatagccgaagaggtctcaccgccaaattcaagcactatggccggttcaatgtaacgcggtcgatgggtaatgaccttcagcattttcctcttcgacgcaggctcacttggagcagccgaagcagcaacgctactataagttgtattctttctcttctgccctcgaggcgggtagcggtcagtaaggtacataaatccgatagcatcacagactcta

SEQ ID NO: 61354 - DNA, 444 bp, Zea mays
  unsure (1)..(444): unsure at all n locations
tagcttcnaaatattatgacttcatatttcttttgagttgggcaagtcttctctccttcgtcggcccttacaacagacaaatcccggaaatatcttcccctcatgttgacaagatgattttctttaatacttgatttgccgaaaaccgcatggcttggccgccaaggtcgatttttggagtcttcaccaccactatccgcatcataactgtcgctatcaccagtatcttcagataaaccttccaaaatttctttagtgatcttttctgtattagtcttcgacatagatcgaagaaaacccagatgcatctcttcagaaagactcaacttcatttcgggagcaaccttcttcttctcagacattccttcggaatatttgcctctcgcttccgaagcttaaaactagggaggcaaccaaatatttataggcagaaaactatttgag

SEQ ID NO: 61355 - DNA, 435 bp, Zea mays
  unsure (1)..(435): unsure at all n locations
tgatatgctagtacatctaatcatacatctcgtggatcagattaaaatattagggccactatatttacatcatatgtttcagttggagcgatacctgngagtattaaaaggttatgtgcaaaatcgcgctcacccggagggttcaatcatggagggatacactacagaagaagtgattgagagctgtatagattacatcaatgacggaacaatgataggtgtgcctgtacctaaacatgagggtaaactatgtgggagagggagaatgggcaagaaaacttttcatgttgaggattacaagctagtacattgtgctcatggtagtgtactacaacatctcacgatagccgagccttacatagaggaacacctggatgagcttcgtatagaatatcagaaccgcacagaggactggatcatgaaggagcacaaaca

SEQ ID NO: 61356 - DNA, 347 bp, Zea mays
  unsure (1)..(347): unsure at all n locations
agcttgcttacttggtaagatgaccaattgtttttcattgttttaccggagaggacattacatttattgcaactcatacatactgatgtgtgcggaccaatgattaccacagctaggggaggattccaatacttcataaccttcactgatgattttactatatatgggtatgtctacttaatgaaacacaagtctgaatccttataatagctcacagagtttcataatgaagtagaaaattaccgtggcaagaaaattaaagcacctgcatcatatcgtcgcggtgaatattttagtcatgactttaacaatcatctaaagagtngtggaattgttccaaggcttat

SEQ ID NO: 61357 - DNA, 465 bp, Zea mays
ggtgaaggttcttcatcctcacatgtgctaagcggtgatgctatagcctatccatgctagtcttaactattaagcatgcatctagaccggcctcttcatttgcataatcaactaaataaagtctgccgtctaatacacccttaaaagctagtgaaccatcacttcttctaaagacagacacatctacatttgtaaatagacagctataccccatgttgcataattgactaacagatagccaattataaccaagagactctactataaacacattatagatagagtgctcattagaaattgcaattttacctaacccttttaccttgccttgattcccatcaccgaatatgattgaatcttgggaatccctattcttgacgtaagaggtgaacatcttcttcttccccgcatatggttagtcatccgcttgcgatatacaactcgacccccggatcataaactgca

SEQ ID NO: 61358 - DNA, 451 bp, Zea mays
  unsure (1)..(451): unsure at all n locations
agcnttgngccagggagtcgctntagaggctatcgttcccgccgaccaggttttgggctctgttgatggcactgagttggttcctgctggttcattgcgagctgcttcgggtggcgaccctatgccaagtcatcaattgatctctcacgatttgggagtcccttcgttcttctccaacctccaggtactgtgatatattctagcctgacttttacaccgtacgaactgctgtcattacactcatctattctccatatcaggcattagtggacgggatggctagtcagctgaggttgcaaggtgcttctgttccagaaggagcttcgtctctggcacattggaatccggtgttgcttcaacatcgtgtctctgacttggaggcgacaaatgctggntagggctcttttgcttctcttcgtctaccttatcgaactgctttacactntgaccc

SEQ ID NO: 61359 - DNA, 494 bp, Zea mays
  unsure (1)..(494): unsure at all n locations
gacacttagatactcagcttctaagggagagcacattntggactaaccaatgttcattttgagaaagacaggatttgtagcgcatgccaggcacgaaagcaagttggagcccatcatccacacaagaacatcatgacgaccgacaggccgcttgagctactccacatggatctattcggcccgattgcttacataagcatcggcgggagtaagtattgtcttgtaatagtggatgattattctcgcttcacttgggtgttctttttgcaggaaaaatctcatacccaagagaccttatagggattcttgagacgagctcaaaatgagttcggcttaaggagtaagaaaataagaagcgataacgggacggagttcaagaactctcatattgaaagcttccttgaggaggagggcatcaagcatgagttntcttctccctacacgccacaacaaaatggtgtagtggagaggaggaatcgaactctactggacat

SEQ ID NO: 61360 - DNA, 399 bp, Zea mays
agcttactcccgcctgggaatggcctcttatcttcgtcaagagtttgaagcctgtgacatacaggctggtctacgatcacagcgaggactacaacaactcttgtgacatccaacagctacgactgttctacccttaagatgaattcaagtcgctcatatgcctcgttttcttttcatacacaaatagagtctaacccgcaaggaagggttagccttgcctcggcgaagaccatccctccctcaggggctagaatgggggaaccccctctgcatcaaaataatcctcgggataaagtctttctgccagaatgtcgttcgcgctctttcgactgttcgattgagggatcctgaaaacgacgatagtacgcttcatcggcgatgccgacccagcccagggac

SEQ ID NO: 61361 - DNA, 447 bp, Zea mays
tctgagagatatttagacacggtccgaacgattgattcttcctttgaagggattaccgtcaaagatattcctcgaggagaaaatgaacatgctgatttgctagccaagtcagcagcacaggggctgcccttaccttcagaagtattttttgaaacaataaaagcaccttcggttgagcttcttgaaagagcattcctcaatatatctactgtgtatagtgaagactggagaactgagatcatctctttccttcatggtaactttctttcacatgacgaagcttataacacgcgaatagaggcaagagctcgaccatatgttataatagaaggggagctgtacacacatggggtctgtgctccattactcaaatatttatctagagccgaaggtatagaattgatgaaggaaatacatgcacgcctgtgtggatctcacattggatct

SEQ ID NO: 61362 - DNA, 422 bp, Zea mays
agcttcagatccagtaaagagcaattttggtttaatagcttcttccacccttgacttcttccgtctggcagtcactatgagaggaagaaaaaagggcgcacggcgcacggtagggggctcatgcaggcaccaagggaagggaacctgtgcagcacgacacgactcgacctcttggtatataccctgcaaaggtgtaccctccaacagttcaatgcaattctagttacttgataatttcagtaatccacacagattctgcagcaaatgcattcactcaaggttgcgttgacacaagcatcatgaacaacctattaggtgcccagggttgcagctaaagtgacaaaatcaaaccacagagacatgattcatccaaacccatatatccaaagtcttcctccatgcttactgtgatggcaatatgc

SEQ ID NO: 61363 - DNA, 474 bp, Zea mays
  unsure (1)..(474): unsure at all n locations
tnctttatcananaagatacgaatgcacctctatatatagaatacaataccatacctataaaaatattnttgccaaggtatgtatgatagacaccatactacgctataacgagtccactgtcttggtagctagccaaactttggtcatgaggcccttgccatatatgagattttctaagaacaggtcaaggccatagctgaggacctagtagctttgactgagtagagagagagagatattttggtagtccatgagcttggccgccgaccgagcagaagagaaaatggtgtgtttgatgatggatttagcttataaataatgagtgtaacatatggttaagctccaattctagattcagatccctacggttagcatagaatgttatttaggtcaaaacgaccccgtacctttgtgaacacaagggtgatatgtctcttatggctcgagttgatgttaagtgattgtcaatgagt

SEQ ID NO: 61364 - DNA, 443 bp, Zea mays
  unsure (1)..(443): unsure at all n locations
tcttaacttgggtntaagtttacccctttaaccactatttaggggtaagcccattaaccaggggttcatttgcaaaaacacttaaaacaatacaacttgtttgaaatttttgcctagtgaatgcactctaggggtatcaaacatatgcaatgccaatgctatgatgtcatgctcaagttttaattatagtaacaccaggggtgttacatcctttcccccataaaagaatctcgtcccgagattaaaaatcctacggtagggaatggtaaaggaaacacatcacatttttatttcctaaattttggtacaaggcaggggtaatgtgggggttacttctttattacaacagctatataggttttacaatttacatgaggctagaaagcctgggaaattcttattcaagaagtcttgggtttcccatgtagcctcatcttcagaat

SEQ ID NO: 61365 - DNA, 338 bp, Zea mays
  unsure (1)..(338): unsure at all n locations
tgaaggactgcttcggcaggagagcttccgaacgtgaagacttgttctgtccacggagttactttatccgagcgtgagttacttatcgcagaaggtgatgagtgaggtatccgtatcccggaggcgtaggagtccctcggctcggttagccttggctgcttacgtgtactccgtcgtttccaggatccgctttccgaagtagtcaagaggcacgaaagaaatcctgctaaaaagagatcctttttcgaggaaaaattcgacgcagagggggtctccccccttttagcccccgagggagggtcgggctntgtcgaggctatgccgacccttccttgacg

SEQ ID NO: 61366 - DNA, 463 bp, Zea mays
agcccatgctagtcttagcaattaagcatgcatctataccggcctcctcttttgcaaaatcaactaaataaagtttaccgtctagtacacccttaaaagctaatgaaccatcacttcttctaaagacagacacatctacatttgtgaataaacagttatatcccatattacaaagttgactcacagacaacaagttatatccaagcgactcaactaagaacacattaaaaatagagtgctcggatgaaatagcaatttttcctaaccctttcaccttgccttggttcccatcaccgaatatgattgaatcttggggatccttgttcttgacgtaggaagagaacatcctcttttcccccatcatgtggtttgtgcatccgctgtcgataatccagcttgagcccccggatgcataaacctggaaggcaaatttatgcttaggtcttaggtacccaactcatgg

SEQ ID NO: 61367 - DNA, 482 bp, Zea mays
  unsure (1)..(482): unsure at all n locations
ggcaattagaccagatccagtgatggccacaaccgacactgcttgttgtatatacagntcacaatctactggcaggatgtaatcccgccattctaaattgtaagtcattttgggtttttagtgacagctagcttttgttatgcacctaaatatagctgtctcgatagctagattgattatgtatttaaaactccaaaacgacttactcgacactggctttgctatgtaaatacttcatgcaattcttcgaatttgcacaataataccagacaaaatcatggtgtaccaggagcacatcttttatactatggagggcacttttagaattgctagcctaataaacgatggggagaaatcgagtcatttgttccataaaatgatctgagacaaactttgctagatgttccataaaatcgagtcattccttttcaaactactaacgcttctcttatgaatnctactcaatattctncactgacata

SEQ ID NO: 61368 - DNA, 457 bp, Zea mays
  unsure (1)..(457): unsure at all n locations
agcttgccagtacctgtcaaaacaacagcacctgtttttatagtttctacaaaccataccagtaacttggctcttttgcatgctggggattggatatgattggacctttcaccatagctcaaggaggatacacccatgtcttggtggcaattgacaagttcactaaatggatagagttccagcccattgcctctttaacctctgctaaagccgcggaattcatacaaagcataatattcagatttgggatacccaacactatcatcactgacttgggatccaactttaccagctcagaattctttgacttctgcgagcacacaagcattcacatcaagtatgcatctgtagcccatcctagagccaatgggcaggttgagcgagcccacggaatgatattggatgcactcagacacacggtctttgataaanatgaataattctcacgacaatggat

SEQ ID NO: 61369 - DNA, 336 bp, Zea mays
aaccaactgctctcctgccaatttgtacgaactaattttgtccgactaaaggatccttccagaaagagaatattcgtttctcctcctgaaatcatagtcttttttgacctatcttgatcgaaatggtctaccacaaaccactagattttctcacctccagaccatttacacgaagggcttccttcatttcttgaattatcaaacatcacgaccactcctatctcttggagaacacaccacaatcccaccggctcagtgggatctattttactatggacaaagtgacttaacaattcttctctaacaatatccatcttccctaaccctcatttggga

SEQ ID NO: 61370 - DNA, 386 bp, Zea mays
  unsure (1)..(386): unsure at all n locations
agctngtgaaggttctatatatacacacgtgctatgttgttatgccacagncagcccatgctagtcttaattattaagcatgcatctacaccggcctctctttatgtaaaatcaactaaataaagtttgtcggctaatacacccttaatagctagtgaaccatcacttcttctatagacagacacatctacatttgtaaatagacagctatattccatatgacatagttgactaacagatagcttattatatccaacactctgctactaaaaatacattatagatataatgcgcgttagacattgcaattttacctaaccctgttaactggactgtgttcccatcaccgagtatcatcgaattctgcgaattcttattgttgacgt

SEQ ID NO: 61371 - DNA, 462 bp, Zea mays
  unsure (1)..(462): unsure at all n locations
tgatgcntataatgacatcagcctctctcagatctttcatctttaaatttgctcgaagaagaaatttaacttcctcaatcacattgagatttgatccaaagatcaagatgtcatcaacataaaggcacagcataacagactcacccccaccataccgattatatacacacgtgtcagattcatttatagcaaaaccagcagctgtaagagtattatcaaacttctcatgccatttcttatgtgcttggtttatgccatacaataaatattatcaacctgcacaccttgttctcttgaccatccacaatgaacccttctggctgagccatgtagatctcctcatccaactctccatttaggaaagatgtcttaacatccatctgatgaatgattagaccataagaggctgccatggctattaatgtgcgaattgtagtcaacgagccactggtgagtaagatc

SEQ ID NO: 61372 - DNA, 456 bp, Zea mays
  unsure (1)..(456): unsure at all n locations
agcttgtcgtctaatacacctttataagctagtgatccatcacttcttctaaagacagacacatctacatttgtaaatagacaattatatcccatattgcacaattgactaacagatagtaaattatatcccagagactcaactaaaaacacattagagatagagtgttcatttgagattgcaattntacctaacccttttaccttgccttggttcccatcaccgaatattattgaatcttgngaatccttgttcttgacgtaggaggtgaacatcttcttctcccccgtcatataggttgtgcatccgctgtcgataatccatcttgaacccccggatgcataaacctgcaaggcaaatttatgcttgtgacttatgtacccaactcttgttgggtcctacaaggttagtcacaattgtcttagggacccaaatgctaagtttatctcccttgca

SEQ ID NO: 61373 - DNA, 442 bp, Zea mays
  unsure (1)..(442): unsure at all n locations
actaagcttaccgatgactccagcgcactcggagagaaactgcaaatggccccgctggtggcccctttgccaagagaaggctggcggacactcggcanagaagtaatctctttgcccagtgtcacctaatacacttggcaaaggcgccatctncgttatcagtcgtcgtgacggcggcttttctttgtcgagtaccgagtgacactccgcaaagtctttgtcgagtgcccgataaaaagtactcggcaaagaaaaccgtgttgatgtactggtcgctgagctctctttgccgagcggttttcatgcactccgcaaaacgcccgattccggtagtgagggaacatgcacaacatattcttttatctttattatccacacaagtactattgtattatataaatggcaacctacgtcaggtatatacatataacgaatcacatac

SEQ ID NO: 61374 - DNA, 450 bp, Zea mays
agcttggaggcgtcgattgggtgactacttgttgtttactcctccttcttttcttccgtcgccttgaatgcgacgggttgagcttccgatgtagatggatcatcaagctcgttgatcttcctcgagccttcgatcatgcactcaaaacttacaaaattcccgataacttcctcggcggtcattttagtatatttaggattaccacgaattaattgaacttgagtggggttaaggaaaatgagagatcttataataaccttaaccatttcgtggtcgtcccacttgatgctcccgaggttgcgcacttggttcaccaaagtcttgagccgggtgtacatgtgttgtggctcctcccctttgcgaagccggaaccgaccgagcttctcctcgatcgcttcccgcttggtgatcttggtgagctcatctccttcgtgcgcgcgtttgagcaca

SEQ ID NO: 61375 - DNA, 438 bp, Zea mays
  unsure (1)..(438): unsure at all n locations
agtcacactatagagcgcgcgtgtagctaatttaaatatttcattctcaatgtcatgctcattgattatagcagttagttgagctatgtgatcattttgttgtgtaattaaagcaaggtgatcatggatagcatcaacatcaatatctctacatctagtgcaaataataacatgatcaacagtagatgtagagggtttgcaaacattaagttcatcaatcttagcatgtaaaatggcattctcatttctaagactgcaaatagcatcattgcaaacatttaagtctttagccttagacattaatctagcattntcatctctaaggctagaaattgattcattcaatttatcaatctttgcaattaaactagtattttcattcttaagattgacagttgaatcatatcaacatttaattctaaccttaacagttaacta

SEQ ID NO: 61376 - DNA, 485 bp, Zea mays
  unsure (1)..(485): unsure at all n locations
cggatccttaagncacctgcggcatgccagctnggcgtgccatgacactcactgttcttatttggcctgcgcggagcaggagacatcctacttccactatggcagcttgctgggatcggncacctgattatatcagggtctagcccagcaccaaccagatcagtatgagtttacaaaacagaatagaaaaaatataatttgcagtggtagcggcgagcatgcatcatcattgcatatttgtacatacatgaaaccacatgttcatgggagagggaatctgaaatatgtgcaacatcgacgatgcacatacctgctttggataaatacctgcagagttaccaattgcacgagatgtgttgttgacagcaatacctgcactgttacgaagaaggtcgaccaataaggtaaatactaattgagatgtgagattatgaagctatattgcatagacacacccgtagatgccaatctctggatggagaaat

SEQ ID NO: 61377 - DNA, 457 bp, Zea mays
  unsure (1)..(457): unsure at all n locations
tattctagtcanagaatgcgatagacaggccacagtctgcattatgaaccttcctcatgctgctgatataccagcttcctacggttgtctcatagatttctacgtgttaactgacctactttatgtctattttntgaaggtactcttatatccagtgtgctgtgcagatgggaaaaaatatgtgatgttatgattaagggtacaagtccttttcccttgccatttgcttcctttctcccttgctttcttcctttctcccttaatgcaagcctagttagctctgcgatggatgttcttttctgaatgtggtgtttaagtgggacgcagcctcactgttgttgggcgactagtattgtatacatatgctgcttatattcagtctaatgtgaccttcgatctatagcgtcagccacctcattgtgcaatatanatttatttaggctctggcatatccgtt

SEQ ID NO: 61378 - DNA, 449 bp, Zea mays
  unsure (1)..(449): unsure at all n locations
agctntacagcaacaatagataactatctgtttttatgatctaaaaatatgcctgtgacaaaccctatacagcacactctggttgttggttttagtaatatcttcatttctgcattatattttcacgagtagcacatttattaaattctattcggaatgcggagctaacccatgtatactgcacatgtatgtggactcctttagatcaataataaagtcaatgaaaaaaccatacaattttacagacctaaacaaaaggcttgaaatataatagatttcattaaaaagagcagaacttgaaattttaagtatcacctgatgacagaaaggcgtgccacaacccatgcacctatcagaatgtgtgtttatcattggcccacaaaccaattcatttataacttcattcccatccttaatacgctcatattcatgtctgtaagagataccct

SEQ ID NO: 61379 - DNA, 493 bp, Zea mays
  unsure (1)..(493): unsure at all n locations
tgcctactccacgttgtggcgtcccaacggacgatagttgttctaactcctctcaagtgatccaatgatcaacttgaataccatagtgttatgcttttcttttcttatcccgttcgcgaggaatctccacaacttggagcctctcgcccttacacttttgatgttcacaaagaatcacggagtaaggaagggaagcaacacacacaaatccacagcaaaatgcgcacacacacgaccaagaatcgagctcatagactatctcanagttctcacaagaacggagctcgaatcacttagaatgacaaacgattgcgcaaagactgagtgtggatgatcaagaatgctctaaggttgcttggtgtatccctccatgcgcctaggggtcccttttatagccccaaggcagctatgagcccgtgagaacaaatctggaaggccatctttgtcttctgtcgtctggcgcaccggacagtcctgtgcacacacgacactt

SEQ ID NO: 61380 - DNA, 455 bp, Zea mays
agcttgcatttgtgtacctaagaaaattgttattatccttgtaggacccaacaagagttgggtacctaagtcccaagcctaaattcgccttgcaggtttatgcatccggcggttcaagctggattatcgacagcggatgcacaaaccatatgacgggggagaagaagacgttcacctcctacgtcaaaaacaaggattcccaagattcaataatattcggtgatggcaatcaaggcaaggtaaaaggattacgttaaattgctatttcacatgagcactctatctctaatgtgtttttagctgagtctcttggatataactcgctatctgttagtcaattatgcaatatgcggatataattgtctatttacaaatatagatgtgtctgtctttagaagaagtgatggctcactaccctttaacggtgtattagacgcgcaactttatttacttga

SEQ ID NO: 61381 - DNA, 445 bp, Zea mays
  unsure (1)..(445): unsure at all n locations
tanacatntatgagggatcgtcctacttataacatcgtactctttgacatatatgcaatataaacaagtagaacaataagaatggcattcacacaacagttgcgattcggtatggcttgctgtcacatggtgatccccatctccaataatctgtccatcacgatgatctccatctccatgatataggtatgccatcctccggtgatgagttcttcaagacctatctaacgtatgctggtaaacaaattacatatacgctttggatcatcacatgtggacacgcaggtcattacattaaatttggacaatacatgtggcttcagccgtatagccctggtcacgacacgcangtcatgaatatattattaacatgcatcatatacacaataaccataccgatcacaagatgttctgctaaaacaggttagacatacacgtttctata

SEQ ID NO: 61382 - DNA, 448 bp, Zea mays
agcttcgaccctcgcgagaccttttcccgtctctttctaaccatggtaaattcattatcgaatgtgatattctatgcatatttactttatttgatatattgtatggcgtattgtttgcttcctaattcgaatggatggatgtatgtatgcttgcaatcgcatagagaacgattccgtcgaggagcccgaagaactcgcaggagaagcccctgagcatcagtcggttggtggaggcaagagtcccttgacctatctctgtcctattcattctttaattcacctcccgcattacacatttatgcctaaggattgactagctttgttatccatgtccttgtttacctatttgggttggattattattgtttagctttatgctattgctcaaactctaatcaatgaacatgatgagattatctatgatacgttcgtttcccttctcttatta

SEQ ID NO: 61383 - DNA, 397 bp, Zea mays
  unsure (1)..(397): unsure at all n locations
cggtgatcttccttgagcccttaatcataaatttaatgctcacanaattcccgattacttcctcgggggtcattagtgtatatcttgggttaccacaaattaattgtacttgagtagggttaaggaatataagtgatcttaatataaccttaaccacctcgtggtcatcccactttatgcttccgaggttgcgcacttgaatcaccaaggtcttgagccggtcgtacatatcatgtggctccttcccttgacgaagacggaagcgaccgagctccccctcgatcatttctcgcttggtgatcttggtgagttcatcaccctcatgcgccgatttgagcacatcccanacttccttggcgctttttagtccttgcaccttgttgtactantccctact

SEQ ID NO: 61384 - DNA, 440 bp, Zea mays
  unsure (1)..(440): unsure at all n locations
agcttctaaagggagaacacattttgggactatcatatgttcattntgagaaagacaggatttgtagcgcatgtcaggcagggaagcaagtttgtgttcatcatccgcacaagaacattatgacaactgacaggccactcgagctcctacacatggacctattcggcccgatagcttacataagcatcggcgggagtaagtattgtctagttattgtggatgattattctcgcttcacttgggtgttctttttgcaggaaaaatctcatacccaagagaccttaaagggattcttgagacgggctcaaaacgagttcggcttatggatcaagaaaattagaagcgacaacgggacggagtttaagaactcgcaaatcgaaggctttcttgaggagggcatcaaacatgagttctcttctcctacaccccacaacaaaatg

SEQ ID NO: 61385 - DNA, 407 bp, Zea mays
  unsure (1)..(407): unsure at all n locations
tctanagggagagcacattntacgattattatatgttcattttgagacagacaggatttgtagcgcatgccaaacatggaagcaagttggagcccaccatccacataagaacattatgacgactgacaggccactggagctcctacacatggacctattcggcccgatagcttacataagcatcggcgggagtaagtactgtctaagtattgtggatgattattctagcttcacttgggtattctttttgcaagagaattctcatacccaagagaccttaaagggattcttgatacgagctcataacgagttctgcttaaggatcaagaagattagaagcgacaacgggacggagttcaagaactctcaaattgaaggctatcttgaggaggagggcatcaagcatg

SEQ ID NO: 61386 - DNA, 460 bp, Zea mays
gcttcggcctctctttttcttctctggccctcagcatccttgttcagctgcgcatagtcaggatattcgaagcccagtgcatcgagcactcggttcagccttcgcttctgacgggtaccgaaggctgctgtcatcagttgatcttcttttttcgaataatttccaagaatttcattacacatcacctcaactgtgtccagccactcttggcagggcttcttaaaatatttcttgaatttgaagtggtaaggaagccggacaagatccccttccttcttctccccctttaactttggcatttcccattttttcagagtagggaagactttgaatgctaagaattcttgaaccagatccctggtaccaatatgctctgcaatgattctgaattcatccattgcccgttgaatttgaccctctggtgtcatgttgcagtggggtcgggtttctccgaaagtta

SEQ ID NO: 61387 - DNA, 450 bp, Zea mays
  unsure (1)..(450): unsure at all n locations
tagaacttcanagacaaagtatactagggcttgctttntgagttgtccttccaatttctcctgcacaagcgccacactcactgcagagtacgaagctgccacatacaatagcaatggagcccctagtgtgggtggagttaatgttgttatatcaatcaagtattgcttcagctcttcgaaggctttctattgagctgggtcccattgaaagacttcggctgactntagtatttcaaagaatggcaagtttctttctgctgatctagatataaatctattcaatgaagacagtcttcctgccaaccgttgggcccccttctttgtgctcggcggttccattcgaaggatggcttcgatcttgcttgggttagcttcaatcccctntattgaaaccagacagccaaggaacttacccttcttcactccaaagacacactnttcagcatttaa

SEQ ID NO: 61388 - DNA, 462 bp, Zea mays
agcttaaagggtaataagtcaaagtctatgtataccactataagccccgcacaactaagaaaaccttaagttacttctcgacttagtttcttttgcataatgttattaaatcatgcataatcatgacatacatgttcattgcatttcgatagactgtaatcttgctgacggagagtacatcctcgtgccggagcaaggagctgctcaggaggtagccccagatccagcaccagagccagcaccagaggacctgcctgccactgctttggaaggcaagccccggttttatgcataacctgttatttatgctattttacttcacttaatgattgtaggattgattgtgcacttacgtgtaggaattgtttgaaaccctagttgcatgatctcaggaatccttttgaaatgaatactagtatgacaggtcgagtagttgctttaattaaataggatctcggtaga

SEQ ID NO: 61389 - DNA, 476 bp, Zea mays
  unsure (1)..(476): unsure at all n locations
tctaacgggctanggtattacaatgggacccacactaggacatatgattcgtggccatccggggtggagttgcgatcattgtgtgtgaagattatgctttgttcctaacgtatttttttgcgtgtgagattatccatttgtgaagatcattgtgtgttaagataagcttctaacgtattttttttgtgtgcgagacaagccacaaagtagtagctagctctttgttttatttcacttcctctttctatgtaatgcccacaattggtataagataaagataataggataaataaataaatatacttctatgctagaattttgaggatttcttgatcttcttttctttgtgcatactcaactaaaggaattaaagtagtcaaatgacaaataaataaatacgtgaatgtgcattccatgctggagttcttgtatgattgcattgtactcaaacgtttgagacaagttaactttgaaag

SEQ ID NO: 61390 - DNA, 446 bp, Zea mays
agctcgaagccatggtaagtagcataggccaacaatatgcgaatggactcaagcctagctacaggtgcataggtttcaccaaaatccaaaccttcgacttgtgaataccccttggccacgagtcgagctttgttccttgtcaccacaccatgctcgtcttgcttgttgcggaagacccacttggttcctacaacattttgattaggatgtggaactaaatgccatacctcattcctggtgaagttgttgagctcctcttgcatcgccatcacccaatccgaatcttgaagtgcttcctctaccctgtgtggctcaatagaggaaacaaaagagtaatgctcacaaaaatgtgcaacacgagatcgagtggttacccccttatgaatgtcgccgaggatggtgtcgacggcgtgatctcgttgtattgcttggtggactcttgggtg

SEQ ID NO: 61391 - DNA, 314 bp, Zea mays
  unsure (1)..(314): unsure at all n locations
actcagctanaggggtgtttgaatgtacgagatctaatagttagttgcttatatttttgaaaacatccaaacagtctagctaatagttcaatattagctactcttggcaaattagctaatagttagctagctaattccattagtaaatttttagccaactaactattaattctagtggattcaaacgcctcctaagcttaaccaaaacctatattaaatagtaatgttttttgttataaatagaacgttattataaaaacaatatttggtaattagtgcctgtttggcacagctctgactacttctaaaatgac

SEQ ID NO: 61392 - DNA, 458 bp, Zea mays
  unsure (1)..(458): unsure at all n locations
agcttntanagggagagcacattntacgattatccattgttcattntgagaaagacagggtttgtagcgcatgccaagcaggaaagcaagttggtgtccatcatccacacaagaacatcatgacgactgacaggccactggagctcctacacatggatctattcggcctgattgcttacataagcatcggcgggagtaagtactgtctagtaattgtggatgattattctcgcttcacttgggtgttctttttgcaggaaaaatctcatacccaagagaccttaaaaggattcttgagatgggctcaaaatgagttcgccttaaggatcaagacaattataagcgacaacgggacggagttcaagaactctcaaattgaaggcttccttgaggaggagggcatcaagcatgagttctcttctccctacaccccacaacaaaatggtgtagtggagagg

SEQ ID NO: 61393 - DNA, 498 bp, Zea mays
  unsure (1)..(498): unsure at all n locations
ngagacaatctntccacctgccttctttgatgtcatggngcacttgagtgtccatcttcccgatgaggcaatgcttataggacctgttcagtatggatggatgtacccaatagaaaggcgactaggcactttgaaaanatttgtaaggaacaaggctaggccggaaggatcaattgctgaggcatatatggcaagtgataccttaacattatgttctacgtacatgaaggatgttgacactagatttaaccaggatgatgatagtggtacagagatgccattgcctaatgacatgtcntgttttaagcatggtgctactcttgttggagctactaagactgagtacattgatgatgctatcatgaataagttagtttggtatgtgctacataatgctgatgaagtacaggaatatttgacgcacgttagtttgggatgtgctacatacattatgttatgtntattancattgaaaatatgcttatgaataaagtatgt

SEQ ID NO: 61394 - DNA, 412 bp, Zea mays
tctgtttaacacgaacccaggtcattatctgttccaactatttttagacccctactactaaagacgaggttcgtcgcggtggcgccctatccgcggagacaaaacaacaaacttccctctctgccccacctgctggaatccgcggacatagtctttgtgacacattatataactatgatggggaaaccatggtggtgtacctggaaacaacagtcttggatggtcaaaatactaattttctggatgagaacactgaccggtctttctcactagcctacgggttcgggtgtaaatcttaccagttttcatcatacgtgcatgttttcatattctttgcggactatgggatctaagataacatcgctgcggttattcttatattgtgcatattggttcatgtcgggctcttgca

SEQ ID NO: 61395 - DNA, 331 bp, Zea mays
  unsure (1)..(331): unsure at all n locations
tgatgagcttgttaggcttctattcgtaggcatgtatgcacccgtgctctctcttaaatacttgggagcttgacgcaaaaacagcttaatagtggttctgactttggcatttccaagaccacttactatatatttgcaatcccatctgatgggaactatatgtgtgaaacgctgaagtgtatacgtgaattgtctcattctcctaacatttaagcgtttactagatatgtgcctgtgcattgcgacngaacacatatttacgagcctcaattgtttcatggtttatcgacagacggcgagaacgctctattgacgggagccctcattgata

SEQ ID NO: 61396 - DNA, 458 bp, Zea mays
  unsure (1)..(458): unsure at all n locations
agcttctaaagggagagcacattntatgattatcatatgtttattttgagaaagacaggatttgtagcgcatgccacgcggggaagcaagttggagcccattatccacacaagaacatcatgacgaccgacaggccgcttgagctactccacatggatctattcggcccgattgcttacataagcatcggcgggggtaagtattgtcttgtaatagtggatgattattctcgcttcacttgggtattctttttacaggaaaaatctcaaacccaagagaccttaaaaggattcttgagacgagctcaaaatgagtttggcttatggatcaagaaaataagaagcgacaacgggacggagttcaagaactctcaaatcgaaggcttccttgaggaggagggcatcaagcatgagttctcctcttcctacacgccacaacaaaatggtgtagtggagagg

SEQ ID NO: 61397 - DNA, 463 bp, Zea mays
  unsure (1)..(463): unsure at all n locations
ggtgaaggttcttcatccncacatgtgctaagcgactatgttatatccagcccatgctagtcttagcaattaagcatgcatctagaccggcctcttcttttgcaaaatcaactaagtaaagcttgccgtctaatacacccttaaaggctagtgaaccatcacttcttctaaagacagacacatctacatttgtaaaaaagacaattatatcccatattgcatagttgactaacagatagcaaattgtaaccaagagactcaactaaaaacacattggagatagagtgctcattagaaattgcaattttacctaacccttttaccttgccttgattcccatcaccgaatataattgaatcttgggaatccttattcttgacgtaggaggtgaacatcttcttctcccccgtcatatggttggtgcatccgctgtcgataatccagcttgaacccncggatgcat

SEQ ID NO: 61398 - DNA, 454 bp, Zea mays
  unsure (1)..(454): unsure at all n locations
gcttccatangtactacatcgcaatccgcataatcagaaaacataccaatgaagaaatgcacttgtacgatgtgtgttaccttaaccttgcctgaatcattgatccactgaatgtggtatggatgtggtcgtggatgtgtggtcaggccaagcttcttgaccaaatctaaactcaccaaattattgcagcttccaccatcaataataacacgtgcacgccgattctcgatagagaagaaagtacggaacaaattatggtgttgctgcttctctgatggttcaggctgagaactaagaacacactgcaccatgatgcttcgaaggttcaccgtagcatcagcaccaattatgtcatcatcattagcagcaacatcactggagtcatcatcgtcaccctcaccgtcggaagcactaatgtagccatcatccgtagcaatgtatgttcgctgactcg

SEQ ID NO: 61399 - DNA, 453 bp, Zea mays
  unsure (1)..(453): unsure at all n locations
agcttngaagtacattttacccagtcataactgtttatgaggcagaggagatggcttgagctgattaaggactatgaattggaaattcactatcacccaggaaaggctaacgtggtggcagatgcactaagtcttaaggcttcctgccattatcttacagtgaaaacttctgacatcacattgtgcctagaaatggagaagttaaacctgggaatgattcaacatggaaccttaaatcacttgaagcgtgagtcgattcttctataaaggataattgatgcacaaagaagtgatgagggtatgaaacacattcatgagaaaataaaggccggtaaagcaaactgtttcagaaaagatgatcaaagtgttgtatggtttaataaccgcatagttgtgcccaagaacgatgaagtctgccagcaaaatttagatgaagcacatcttagtcgctat

SEQ ID NO: 61400 - DNA, 486 bp, Zea mays
  unsure (1)..(486): unsure at all n locations
ntccaccacttgttntagtgaccttgttatgcnttatttcgttgtaaacgaatcttnaaatggaagtaagctacgacaagcttatgttgggttaccacacactctccaggtataaccttgcaatctaagcaggcatgcttgtcctcttttctcaagaggacaaaatcaatctggctagtgtgttggccactactgaaggtcaccacgtgggatttcctctaaagaaagtgtttgctataaacatgtcataggctagggaaaagatcaggatttcctctccttcttgaatcctagtccaaagtcgaagcctccatgcacacccttgaaactagtgctagatgtacccacatggccattgagatctcctcctatgaagagcttctcgccaactggcacactactaaccatgtgctccaggccttcccagaactccctctcttgagtctcattaaggcccacttgaggagcatacacactgataacatt

SEQ ID NO: 61401 - DNA, 413 bp, Zea mays
  unsure (1)..(413): unsure at all n locations
agcttgaggcgtgatatgataagactatatatgcgacattgatcnttcctaactatgcatttacctataatcagtttcgattttaatttatttatagatggattcaggctcgaggcatgatttagtaagtttatggacgcgcgagttgtcggatcacataaaaatataataaactttaataggttttgtgctcatgtagcaattatccatgcaagcaactaaacaacatccgtaataggccagactacaccagataactaaacataagcctcactgtatgcgagccaatcatagaagcaatcaaccaggccattaagcgtcgntaatatcatggaaggatttcaggccggccaaaagtacagaccaccaaacaatacggcttttgttttgttttggcttctccgcgacctcct

SEQ ID NO: 61402 - DNA, 465 bp, Zea mays
  unsure (1)..(465): unsure at all n locations
gtgatggtcgncaacaccacaatcataatagganatttttaggctatntcccttctagtgctgatgacttctctttctatggaataatgaaccaaatgtaagaatggccgagtataaatatgcagacgctcagttagtatgcgttgtattggactcaaaggctagatacttctaaaatatctgaaaaggctacatagttttgatatttctgaaaaggctatattattctggaaaggctaggtgttttttaaaatgctagatgcttctgacaaggctatatgattctgataatgctatgtacttctgacaaggctagatgcttatggaaaggctagatgcttctaaaaaggcacaccacttctgacaagacacaccacttcttaaaggctacatacatctcgagtttcctatcaattcataaatctttttataaaacggtagaagtttccctgttatttatgctct

SEQ ID NO: 61403 - DNA, 113 bp, Zea mays
atgataggcgatatatcgcttactccgttattaacactattaggcgtaaaaccggcgttaagggcccagtagtgctgtaaaaattacgacgagactgccctcatccatacagt

SEQ ID NO: 61404 - DNA, 435 bp, Zea mays
  unsure (1)..(435): unsure at all n locations
agctttactaagaattaagccctaataacatatatatatgtgtgagaacataaaaacagtaagaaaaccaacaaacataacttattttacaagcaaaagtatatatacctttaagctattacaagcaaggctatgtgcaagttcatccttcgacatcgcagataagccgagctctagctttggaaatcccatattctttgccatttctcgacaaacagatatctccttgttgtccggtaggcaatatagaaagtcatcttcgtcagtgctgctatataccaaggatcctgngggatacttcagatccttggcatattgcctagcttcggcaatttgctcctccgatagttnttccctgaagcgtgacgcactataaattctaattcctcagtagatgcttcaggagcagaggattcagattctttagtagctttc

SEQ ID NO: 61405 - DNA, 467 bp, Zea mays
  unsure (1)..(467): unsure at all n locations
tgctcaccaggtcgcgacaggtggtgccggcgatgtacgctctgatgacatccaagtcagtgacgttgggcagctcggtacgctgcttcgagaatcgccggatgtagtcccggagagactctctcggctgctggcggtagcttcggagatcccaggagttcccagggcgcacgtacgtgccctggaagttaccatcgaaggcttggaccaggtcgtcccagttggagatctgccccggaggcaggtgctccagccaggctcgagcggtatcggagaggaacagggggaggttgcggatgatgaggttgtcatcgtccgttccacccaggtgacaggccagccggtaatccgtgagccacagttccggccttgtctcccccgagtactttgtgatagtagtcggggttcggaaccgggtcgggaacggcacccgtcgtatgggccggctganagcctgtggaccgggt

SEQ ID NO: 61406 - DNA, 445 bp, Zea mays
  unsure (1)..(445): unsure at all n locations
agcttgacaaagtccacttgaattaatcttctgagaaacccgacctcgctgcaacatgacacccgaaggtccaacacaacaagcaatgagtgaattcagaattattgcagagcatatcagcacaagggacctggttcaagagtttttagctttcaaagtttttcccagtttaaaagaatgggaaatgccgaagctacaaggggaaaagaaagaaggtgaacttgtacgtttaccttactacttcaagtttaagaaatactttaaggcaccttgccaagagtggttggaaacgattgaagtgatgtgtaatgaaatacttggcaattattctaaaaaagaagatcagttgatgaccgcagccttctgcacccgcccgaagcgaaggctaaatcgagtgttggacgccttgngcttcgattatcctgattatgaaaatctgaacaaa

SEQ ID NO: 61407 - DNA, 435 bp, Zea mays
  unsure (1)..(435): unsure at all n locations
tccccctgcacgccgagactatgcagatctcgggtgtcagggcgcaagaagattgccccagcggaagatattagtagttacatccgttatgttcctgtgcccgcatgtcggggctcagtactcttgtacatgtccccctttagctataaaaggggaggcatgcaacattacaaggcagacccaactcaagctcaagcttgatcgagaggcttagactctcaggtttccacagcaatccaacacacagtggagtagggtgttacgctccggtggcccgaaccactctaaaccctcgcgtgtccacaacaatcctcatcttaagatttatggcgggtgcactccgccacccggccgaagaattccctctccgacatttggcatgccaggtaggggactaagcattanngttttgctggatttctcgctcaacatgat

SEQ ID NO: 61408 - DNA, 460 bp, Zea mays
  unsure (1)..(460): unsure at all n locations
agctntgactgcacaagaaaagatgagacagatggttaactctgaagatgctgctggctcgagtggagaagctttgtatgtccgtggccgcactgatcagaaaaagttcaactcatgtggcaaaggaaaggggaagaaccagaggggtcgcttcaagtcaagggggccatccgatgaattattttgcaaatactgcaaaaagacgaaccatgtaattgagaactgttacaaactgcataacaatgagaagaggaacaaggagaagggtaagactggaggtactgtctctgttgcatccgaaaataattctgataatggtgatgttcttattgcctttgctggttgtgttgctgatgatgcccaatggatcctcgattctgcttgctcgtatcatgtttgcactaaaaaatctctgtttagtacctatgaagctgtgcagaacggaggtactcttcggatg

SEQ ID NO: 61409 - DNA, 461 bp, Zea mays
  unsure (1)..(461): unsure at all n locations
tggtgccaatggagaaacaaaaatccttgaagtcttggttgttatactgcttgccgttgncaactgttagttcggacggtactccgaagcggcaaacaatgttctgctagaaaaattattgggcagtctttgatgttattgtagaaacagcctgtgcctcgatccatttggtgaagtactcgacagcgacgaaggcgaacttaaggttcccctgagcggtgggcaggggcccgacaatgtccaggccccagcgctggagaggccatgtatgggcgatcagctttgtatactgcgaggggctgcctgaccgaggagaaaacttatggcaggcttcacaggaccgtgtgacccgatttgcggcgcagatcatagcgggccagtaaaagccctagcggatcaccttagcagctagggcccttggccctgcgtgtgagcctgacgtgccactgtggacttcacgt

SEQ ID NO: 61410 - DNA, 292 bp, Zea mays
ttttttgtattgtctcccacatagtaaagaaatatccgtctgccgggagatgggtagaagctttggatttccgacactggaagatggcctttcaatactctcaaaggatgaactggctgacagcttaccatataatagcataaaggtatagaggttaattttgtatttgaaaacgaattgcctcatttgtttatacttaatcttgtcctcctcttgcagggcataattcttaccaatgtccttagagcacagaaaaatattgaagatggaagggtatacaatggctctgaac

SEQ ID NO: 61411 - DNA, 481 bp, Zea mays
  unsure (1)..(481): unsure at all n locations
actagctgagcatctcctgcaagatattgcgcataagatttatttttttatgaaacacattcatgaganaatagaggccggtaaagccaactgcttcagaagagatgatcaaggtgttgtatggtttaacaaccgcatagttgtgcctaacaatgatgagatccgccagcaaattctagatgaagcacatcttagtcgctattctattcattccggaagcactaagatgtatcatgatctaaaacaacattattggtggacaaagatgaagattgaaattgcacgctatgtggcaagatgtgacacttgtatacgtgtcaaagccatacatatgaagactgctggtccattacagtccttacctataccaacatggaaacgggaggatataagcatggactttattgtgggatttcccaggacagcaaaagggtatgactccatctgggtcattgttgatcgacttacaaagatcgcctac

SEQ ID NO: 61412 - DNA, 313 bp, Zea mays
ctgacagctctaacttacaacagttcacaggcgccacaacaggaattcatatattcttcgttgaatgcaaaactttccgctggatcaaaactattgacacagacatattcctgtctgctcggcctgatactcagcaatgccttcacagctcacaaggaggctgaagacgaaggatgctctatatccctgagcaaccttcgttccaaagaaattgtactgaggaacgaccgtctcgataaagacaaaatattatactcattgatagtataaaatagcggaggacgaatctgttttaaaagtcaagctgaagctc

SEQ ID NO: 61413 - DNA, 346 bp, Zea mays
  unsure (1)..(346): unsure at all n locations
atgtaacgagaagctaacttgtttttgatcccatatcncnggacaccctcggttggtgatatctttagatacacatgatctccctcctcaaactgtagaggcttccgcctcttatcatgatagcatatttgtctggcccgagcagcattctaagctctttttgatgacatttgaccattgcctctgtttctagtactaaagcttggaccaaaatttcccctctcttctacttgagaccaattcagtgagggtctgcgtctttcttccatacaaggcttctataggtgccatctttatactggactggtacttgttattataagaatactctgctccggagagacac

SEQ ID NO: 61414 - DNA, 424 bp, Zea mays
agcttcttcttcattctgatgagaaccaagctctttgttcactttatcaaaacgaatgttgcaactccgagatgctcgcttcaacccatacacggatttctgaagtttgcatatctttccagcattgatcggatcgacaaaaccctcgggctggatcatatacacgtcctcatctagggttccattaaggaaagctgtgttgacatccatctgccaaatctcataatcaaaacatgcggcaatggctacaatgatccgaatagatataagcatcgctactggcgagaatgactcgccatagtcaactccttgaacttgtcgaaaaccttttgcaacaagtcgagccttatagatgtgaacattctccatccatgtctttcttcttcttatagatccattcgcattttatatgtctaacaccatt

SEQ ID NO: 61415 - DNA, 357 bp, Zea mays
gacggatctaatcagaccttggtgtgggctgtcccttccagtgcagcgtcaggttagacagatctttgatttgtcggttgttaccattttatggaatggggctactactctcttctggtcggatagatggattcatgggaataatatccaagacattgcccctgaggtggtgggtatggttggccgcaaggcgtattctttcataacggtggcacaggctctggataattggcattgggtcagtgatattcatggtgctcttttcttgagtgggttgcagcaatatctgttgttatgggatactatggcggaagataagccttctcatgatgctgacagacatgtgtggatgcactc

SEQ ID NO: 61416 - DNA, 428 bp, Zea mays
agcttgcattgcatatataaatatcttgtattgcatctatggctcgtctaacctagttgagataaccgccaacaaagcgagtgaaaaagcttaactcggatcaaacttgacaagtcttagttttaagcttttagcacttaaattcttactttttatgcaattggtggttcttgaaatatgcatgaagtactgcacttatggggagtattcaaaactcaaatcactcatgaaaacccctagtgcaaggccaaaatgcaaatttcaccatttgcctattttctctaaaaattatctagcctatggcaaaatattttgaaaattatgagaaaatatatgagggtgccaatacctgtcccaacaagtgttatattgtgtgattataagttgggaattggtttggttgaaaactacatagaataattcaaaaa

SEQ ID NO: 61417 - DNA, 448 bp, Zea mays
  unsure (1)..(448): unsure at all n locations
acctatgaaactcagcttggctgcctgtaagcaacccggcgagcgaggtggtgagatatctatcgagagggagatggcagccacggtgtccttcccggtggtgaacatggagaagctggagaccgaggagagggacacggccatggcggtcatccgcgacgcctgcgagaactggggcttcttcgaggtgtgtgcatatatctcatagagactcacatcaagcacgcacggaacaactaaggccctcgttggaattgtagtatttatgcagctttgaaacaatactatggtatttaatgatactatagtattagagctcacaacgtgtttggttcgtacagtcaaaacacagctttaaataccatggnttacccacaactgtggtatttttggagtgtttgaaactccactcangacctcagttntcttctcttctctctacatatac

SEQ ID NO: 61418 - DNA, 454 bp, Zea mays
  unsure (1)..(454): unsure at all n locations
agcttgancggtgaccgacttcgtttgatttctttggataactggaatcagcatgtccttcagcttctgccatgacgtgattgttcctggccaaagagattattatcatgtttgtgcatcattcttgacagccatgacgaaagacttcaccatgactgcagtattgccaccatacgaagatatggttgtttcgtagctcatcaaaaactgcttcgggtctgagtgtccatcgtacatgggaagctaaggtggcttgtaagacggcggccacggtgtaacctgcagttctgctgacagaggagaagcatcatcagaagcaaaatttctatgatggaaatcctcatactactcatcctcgttgaagaagccctcttgatgaagctctctgtgctgaggccttcgcgtctgcttatcttgagctagatgacgaacttcttcagaagcttcatctatc

SEQ ID NO: 61419 - DNA, 481 bp, Zea mays
ctaagaaactcagcttgccttgtacccgcacccgggacaccccctttctttctttcactctcgtcgccgggccgcacttactggttctctgtcgcagcaccgccgctgtcgacccgtgccctcgccgtgccccaggcgccattcgagagtacccaagcctcccctcaaggtagtcgtcctaaccccacccctaattttccctgtcatgcacatagccgcgcatgattgctcgccggagtgttttacgattcgccgaggactccccctccacagtctggccgcctcagtcctgttcacgcaaacccaaccccgctataacgcttgtcaggtcatccccaacctcttcagctatctataccgacccctagcgccctatgagcgccgatctggctcgccttcggcgatggcgttgacgtgtccgtggggagcgccgcccctggctaaccgacatatgtgaagttcctggcgcccatcctaaccg

SEQ ID NO: 61420 - DNA, 444 bp, Zea mays
  unsure (1)..(444): unsure at all n locations
agctttctaacataagtggcangaagcgtgatttctatactagcttcagcagttgaagctgacactgatgtggatagtgacagcagcagcgatgaagaatataaatagattaatgaggatacaaaacccatcctacatgtatgttttgttttaccgaaatcacaactctagacatagccgcaaaaaatcaagttttttttttcactatcagcaaggcatgttgatgcaatgatattttttctgttgctatatctgaatgtaccagctaaaaaaggtggctcatgcggggtgtgtaaatcggatacgctcaatgactcaaaaaccacatataagtgctacgtggggagatactggtcatgttcacgtgattcagttcttacctcattatttacttgctgtgatcattggctgtgtaaacctgtacatcatttccctcttctagtt

SEQ ID NO: 61421 - DNA, 435 bp, Zea mays
atgcacttgatgatggactgctcagtacatggtcaacttctataaatgattgacttttaatctccttggcttgtgtgttaattattcttatcatcgaacttttccataaatttagcttgtaactactggtttatctgatctacagagcataaatattctgaaagctcacggtaaaagcatcaacgatagttacatgctaaatggctatgcactaaagactaaacatatgccgtgcatgtcaaggaatgcctacgagagtaactcctactagaattacttctcttgattttaacattcataagacaaaaatgcacacagatccaacggaacttgataagattcgtcacacgtatttgtattctatgttccaatactctagaatatgttcgcctatatatggtagaatcagcactataaatacataatatctatatc

SEQ ID NO: 61422 - DNA, 455 bp, Zea mays
  unsure (1)..(455): unsure at all n locations
agcttgccttcgcctcagtctatcacccgcagntcatctgagntgnggaacgcgccaacagaaaaatcttcacagctgtcaaaaagatgctcctcgacgaataaagggcaagtgggccaatttgttacccgaggcgggctgggcactaaacacgactgagtgcagagcgaccgggttcactccttttcgccttctatacggatcggaggcaatgaccccacaagaaataaaacacgggtccccgcgaacagttccttcagccatccccgacgtggatgagcccacgtcaaaggatctcatcgatggagaccgagtcttcaccctgcaagctctaaacaaataccaagcccagacaatagcatggcgcgaccatgcagtcatcccaagggaattcagcgaaggggacctcgtactcttccgaacagctctgacagagtccacgggcaagttggagc

SEQ ID NO: 61423 - DNA, 490 bp, Zea mays
tctaaagggagaagcacatttgggactaaccaatgttcattttgagaaagacaagaattgtagcgcatgtcaagcagggaagcaagttggtgttcatcatccacacaagaacatcatgacgactgacaggccactctagctactccacatggacctattctgcacgattgcttacataagcatcagcgggagtaagtactgtctagttattgtggatgattattctcgcttcacttgggtgttctttttgcaagataaatctcaaacccaagagaccttatagggattcttgagacaagctcaaaatgagttcggcttaaggatcaaaaagattagaagcgacaacgggacggagttcaagaactcacaaatagaaggctttcttgatgatgagggcatcaagcatgagttctcttctccctacacgccacaacaaaatggtgtagtggagaggaagaatagaactctacttgacatggcaaggaccatg

SEQ ID NO: 61424 - DNA, 443 bp, Zea mays
  unsure (1)..(443): unsure at all n locations
gcttcactctcgcgagaccttttctcgnctctntctaaccatggcaagaacattatcgaatgtgatattccatgcatatntactttatttgttatatagtatggtgtatcgcttgcctcctaatttgaatggatggatgtatgtatgctcgcaatcgcatagagaacgattcggtcgaggagccccaagaactcgcaagagaagcccctgagcagcagtcggttggtggaggcaagtgtcccttgacctatctctgtcctattcattctttaattcacctcccgcattacacatttatgcctacagattgactagctttgttatccatgtccttgtttacctatttgggttggattattattgtttagctttatgctattgctcaaactctaatcaatgaacatgatgagattatctatgatacgctgttttcccccctctta

SEQ ID NO: 61425 - DNA, 432 bp, Zea mays
gacacataaaactaagcttgtgacttcctgagccctaatatatattatagcttatataatcccgactacttcctcgtgggtcattaatgtatatcttgggttaccacacattaattgtacttgagtacggctaaggaatataagtgatcttaaaataaccttaaccacctcgtgggcatcccactttttgctcccgatgttgcgcacttgattcaccaaagtcttgagccggttgtacatatctagtggctcctctccttgacgaagacagaagcgaccgagctccccctcgatcatttctcgcttggtgatcttggtgagttcatcaccctcatgcgcccgtttgagcacgtccccaacttccatggcgctctatagttcttgcaccttgttgtactctctcctacttacagaggcaacgagtatggttgt

SEQ ID NO: 61426 - DNA, 381 bp, Zea mays
  unsure (1)..(381): unsure at all n locations
agcttgcatggcatgtttaaatttcttgtattgcatctanggcttgtctaacctagttgagataaccgccaacaaagcgagtgaaaaagcttaactcggatcaaacttgacaagtcttagttttaagcttttagcacttgaattcttactttttatgcaattgttggttcttgaaatatgcatgaggtactgcacttagggggagtattcaaaactcaaatcactcatgaaaacccctagtgcaaggccaaaatgcaaatttcaccatttgcctattttctctaaaaattatctagcctatggcaaaatattttgaaaattatgagaaaatatatgagggtgccaatacctgtcccaacaagtgttattttgtgtgattat

SEQ ID NO: 61427 - DNA, 443 bp, Zea mays
tgaccatccagaatggctcatttatttggatgcaatgaggaatacacatattgttcatttagtttcattggcctggatacaaatacattgtatgagatggtttgtccctactgtgattctgggttcgtggctgaattggatgatgcaaatgctctcatgagccacttcgatgggatggaccctgatttccatcgcgacccaaggttcgggatcatggaggcaatctctgtcgtgatgcagcatgatatggcagggatgaacaaggaggttaatgtcacaggaaggccaaactccttttcagacctggagatagagtttgtgatcaaaagtagggacaatccacccatgtcattggaggctttgctggagactatcagctgtctgccagttcatagtattttgtcatggtttgggatccccgttgaattggtgccatgtatctg

SEQ ID NO: 61428 - DNA, 455 bp, Zea mays
  unsure (1)..(455): unsure at all n locations
agctnttcagattgataaagagagtattcatattatattttaagctccagctatgttggtttaactgtgtctgtttctgtttccctggcaaaaatgagcgggtctgttcactggtgggtttcatctagtaagtggccgaattggcttttccaaatatggagacttttgtagagggataaaagtctttacttccagcagaatttcataatttttggttgtgtagtttgggagatatagaattttgaagttaactatgctgctatctgaaacagattcagtcagttatcttgtcagatgttttagaaattatagatggcgaaatttaattatctattgaataccgaagatgtagagtattttgtgtagaaactcctacaatatttgtttgaaatcaccactgctataattctaaagatacaaaattaataaacaacgctgctgctgtttggcatgtg

SEQ ID NO: 61429 - DNA, 398 bp, Zea mays
  unsure (1)..(398): unsure at all n locations
ntgntccagtgcactcacgatcatgaagaataccttcacgcgtatgtcctaaggttcttacgactgagggcgcaggcgccaacgatgcctaatgaaattgttattgaggccatgattaaggggcttcgaccaggacctacagcccaatacttcgccaggaaaccccttcagaccctggagaaactgcttcagaagatggatgaatatatccgagcagataatgactttcggcaaagaagggaggaagcttataggttcttcgagatgaccaggggcttcggagggagaatccaccctaggcacgtcagatctatccattctactcagactgacgataggggaagtcagcaacaaaggccgcagtattcctcctaggcttcggtgcagcaacagaacta

SEQ ID NO: 61430 - DNA, 457 bp, Zea mays
  unsure (1)..(457): unsure at all n locations
agcttggaggcatcaattgggagcctcattgttggtgttagctcttccttcttttcttctgttactttgaatgcaatgtgttgcacctcanatgtggaggtggcaccttgctccaagttgacaatgtgtttaaagtctttgaccataagttcaaagctcacaaacttgccaatcacctcctctggagacatttgcttatacctaggattctcacgaattaattgtacttgagtgggattacgaaaaacaagagatcttagaataaccttgaccatttcatggtcatcctacttggtgctcccgaggttgcggacttggttcaccattgttttgagtcggctatacatggcttgtggctcttctcctttgttgaggatgaaccgatcgagttctccctcgatggtttcccgcttggtgatccttgtcaattacctccttcatgcgttgtcttgaggat

SEQ ID NO: 61431 - DNA, 473 bp, Zea mays
  unsure (1)..(473): unsure at all n locations
tctgctccctgttatacgtagctagagagagagaccagctgttcctgtctctngcttgttagatcacgcctcagctcgcatcaataatggcgccgcggcagcgttgccttttatagcgtggatacgggtgcggcggcgtccctgcggtgtggaggtttgggtcagtggaactgcaactgatactagtgatgaacgcattacccttcgcacgtgatgacacgttgtgcagtgcagccatttgtttgactaatctcgtccactgcgtacagcttgtgctgaagattaagcttattgaccctatgtaatagcatctacaaaatactagctaaatgatttgtcaatccaaattttaactacttaacagcaaaataactctccaacagactagcaattaattggccaagatatccgactctctaaattagctctctcactagctcaaaaattgactagccaatctgactaactaaact

SEQ ID NO: 61432 - DNA, 306 bp, Zea mays
  unsure (1)..(306): unsure at all n locations
tggagaagcanacatcctcgaagacttggctgtttatttcttgttattgcaactgagagatccgacggtactcctaaccgcaaacaatgtttgccggaagaatttctatgcagtcttcgacggtattgtggatacagccctcgcctctaaccatttggtataaattcgacagtgacgaaggtgaactcgaggtttccctgcgccgtgggtaggggcccgacgatgtctacgcctcagcgcttaacaaggcatgtgtgggcgaataccttcctgaactgcgaaaggcttccccatcgtggagaaaaa

SEQ ID NO: 61433 - DNA, 472 bp, Zea mays
  unsure (1)..(472): unsure at all n locations
ctaagcctatatgcttatgccagatatatganactaattggctacatatattgttttagtattcacacacccactcgtagcccaaccatgtgctttccgccctcttctcctctccctggcgcttcaaccccctagagccacacgtcgtttcctgcttcaaacacgaaggctacaatccttccctatctcccataaatttgtgcccgctggctcagtcatcggccactggtggaacgacgaagacgattcctccatcgatggttcctaaggctatatctcggcacaagcttcatataaggacgtgtcggtttcatcaagccctaccgtcccgtccagtgctctattcctcaagatgatggcggaactaagttacggctgatatctcgtgcttgtcgcgtcgcctcgcctttatagcccttgcggcgtatcctattaaccataaccgaagcgctcttttgctcttcatgtccat

SEQ ID NO: 61434 - DNA, 453 bp, Zea mays
  unsure (1)..(453): unsure at all n locations
agctntaggtntcactccatgtcacggatgagtctactnttctcgagcatcacgagttgctttctcttttctctagcttctctattggcttagtgattacattatacccatttaatacacatttagtagtcattctatctttcatactacattcatcatcatcataaattgaacttgcattaaacaatcttaccttatcacccttttccatgaggcatgtgggagtgaaggtgtcgtcgtccgagtggttgaagaactgcgacgtccaggtggattggatgaccattttgccacccctttctgttcgttcaagctagaactctcctcatcggagttccattcctcaccaatataagcttgaccatacttcttatttaagtatcccttgctcttctttcccttcttgaacttgtccttcttgaagatcttatttccttcttattccttcttatt

SEQ ID NO: 61435 - DNA, 468 bp, Zea mays
tgagtcagttcttctatagagaattatagatgctttatatttgtcagggtatgaagcacattcatgagacaatagatgccgataaagcacattgctctatgaaagatgatcaaggagtactatggtttaataatctcatagatgtgcccaaagatgctgaggtctgccaacaaattctggacgaagctcatcttattcaatatttcattcaccctgtaagtactaagatgtatcaagacttaaagcaacactattggaggacaaaaatgaagattgaaatcgcacgctatgtggcaaggtgtgatacctgtagacgtgtcaaggcagtgcatatgaagaccattgaccattacaatccttacacatcccaacttagaaatgggaggatattagtatggatttcattgtgggattgcccaaaagagccaaagctttcgactctgtatgggtcataattgatcggcttac

SEQ ID NO: 61436 - DNA, 484 bp, Zea mays
  unsure (1)..(484): unsure at all n locations
gatccttaagncacctgcggcatgcaagcttggacgatattctgcgatggatcttgttgaaccttcgatgcatgaacagctgctgttctagtggcaccctctcatgtcagaacatgttatgcaatatataatagactttagttgtacaaataacattgccgagtacgaagctcttcttttatggctttggaaactaaatgcaatgggaataagaagggcaatcctcacaactgatttccaagttatttctggccatgtggattagagtagcaaggcaagagacccgaagctcgaaaaatatttggacgcacgccaaagattggaagcttcttttgaggaattttctgtaaaaaaatattccaacgggagaaaatgagcatgaagatttactagctaagtcagcggcacatgggctccctttgccttcggaagtatttctgaaacaatacaagcaccctcactcgagctcatggagagagcagcg

SEQ ID NO: 61437 - DNA, 454 bp, Zea mays
  unsure (1)..(454): unsure at all n locations
ggatagtggcagccccagatacgtacagtgtgaattcttctttatcacactgcagcangntacagcaatcttgcgccaaaggagcatcacagtaaatggngatggcacaactcttttgcatatttgtcatcaacccactcgcttcccccaaaacattctaggatcattttggcacatctcaaatcctccaaatgtggcttgataaagaaaaccacatcatcaccataaagggaaagtcttgacctgatatttgccacccccagcccttgcaacagcccctcattttcagcaagcttgaacaaattactaaacacatccatgattaagatgaagagcatatgcatanttggctagcgagaaattctaaatagagggtgtctatatttgcatatccaattgaagaggttgttggatgaatattttttgttacaatctctattctttaaattagtaa

SEQ ID NO: 61438 - DNA, 314 bp, Zea mays
  unsure (1)..(314): unsure at all n locations
gaccgcagcagcaagcagngaagaaggacagcccaacttgtgttanctggccaagccacagccaacaccacgcagtctcaacaatcacgccagggtccagacacccctaaaaaaccactaacctagctgacccccgaacactcccccacacgcgaccgaaacatcaccactcctaaggacagggacacctatctccgcgcaaagacagtcggaacccactctgcatgaccgagaaacaccaacgcaagtcatagcccaaagaacacacacgaaaacataggaaacagaacggccacgacatacagccacgccac

SEQ ID NO: 61439 - DNA, 280 bp, Zea mays
gcggatatgttaaaccagcccacgctagaaggagcaagtaagcatgcaactacaccgaccacctctcatgcgaatcaactaaaaaacgatgcgcgcaatacacccttaaaagctaatgaacagccacttcgacaaaagacagacacacccacaccgtgagaatagacaactatatcccatattgcgagagtgactaacacataacacattatatccaagagacgcaactaaaaacacgttagatatagagcgcgcggatgaaatagcaaatataccaaac

SEQ ID NO: 61440 - DNA, 288 bp, Zea mays
  unsure (1)..(288): unsure at all n locations
ancttatcactagggagaggtcatgactcttatcttatattatacacggcgctcttaactcggcggaaagggnttacccactgagatgccctatttaagcgtattatttctcatccaccggctgtcagtcgccacaacacttaacacaatgacaactctgtttgaaattctcgcctagtgaatgcactctatgtgtgtgcgacataagcaactgccaatgctataatgccatgctcaagctctagttacagcatcatcgaggcgcgtaacaaatgcccccgctcgaaa

SEQ ID NO: 61441 - DNA, 434 bp, Zea mays
  unsure (1)..(434): unsure at all n locations
ncggcataccccattccctcagcgttggaaatactctgttgttcaagtattcttgaactaagtccctaggtccgatgtgttcagatacaactctaaactcatacacagcatctgggcatggtgcccctggcgtcatgttgcactgaggcctagttagcccgaacgttaactccagcgggttctgcactagcttctcctttttctcatcaaatttaacataaaaccattcatatattcaatcagtcggccatttattgcgatagctgaccaccggtgtcttcatgtctttgcgataaacaaagttgtagcagccgaagttctcatgtagtccgtcctccctagccttcgtctgatagtgaagatcatgtactcggcagaaggcttcngcgagtggctccaccccttgactccggagaagccagatgtaaacactg

SEQ ID NO: 61442 - DNA, 444 bp, Zea mays
  unsure (1)..(444): unsure at all n locations
agcttgcgggggcgcttttacctctgatcgactccatgctgagtccctccccgtgatggtgcggtcggcggcgatcctggcatgacggcgagcaatttatgccgcaccgcgcaccttccacgcctggtacgcccacgagaacctcccaaggagcaaccccaagcttccagacccagcgcagagaccccaacaagggagggttcgttcaatcctccggcaacgcacggcttcctctctctctccctctcttttcgncacggtattggcgttcacgaacccagccgctcggatggcttgaaaagaaaacaccaggcgaggtcgtgttatactggccgaagcctaacactcgccatcggtttctattaatctgtcgcgatcccgcaacggactcctgttgcggcatttagctaacgccagccgcgcaagactcggcgatttcggtta

SEQ ID NO: 61443 - DNA, 449 bp, Zea mays
  unsure (1)..(449): unsure at all n locations
ttccatcanggctcaatgacgngtgctgtaacattatggacttaggtactaaatcaaataagagaatatgcacaatatcattgttcgaaggagtaaaaagtgggctattgttggaaggagtaaaaagtgagctcaatattatatattacatgggcggtggctctatgcccatagcactttcacagaaatgaaataatttaacatccccgcagtcgaaactctagccatgacagatattgaaactgaacagaaatttcgagagcaacaagaaggaaagatctaataaggcaaactacgaactcatctggatgtgatgaacgtggacgtcttcgacagcaacatgctcatggatgaagtgaagatgaatctcaacatgctctgtatgctggtcgtgggcgaggttgacgaataggtagactgtgctgacgttgtcgcaatatacaagcatg

SEQ ID NO: 61444 - DNA, 448 bp, Zea mays
  unsure (1)..(448): unsure at all n locations
agctatatcttgttgatatcacaacaagtaaagtgacgcctgagacttgtttagtggcaaagtctgacaagggttggctatggcatcgtcggctatcccatgtcggtatgaggaatttggccaaacttcaaaaggataatcacatcattggactaacaaatgttgtatttgagaaagatagggtttgtgacgcatgccaagcaggaaagcaacatggagtcccacatcaatcaaagaatgtggtcacaacaaagaggccattggagcttcttcacatggacctcttcggacctgtggcctacattagcattggtggtagtaagtatggtttagtcattgttgatgattnttctcgattcacctgcgttntctttttgagtgataaaggcgaaactcaagaaatattgaagaaattcatgacgagagctcacaatcaagaaagtgagaa

SEQ ID NO: 61445 - DNA, 456 bp, Zea mays
  unsure (1)..(456): unsure at all n locations
tgtgaagattcttcatcccaacatgtgctattcggcgatgccagagccagcccatgttagtcttagcaattaagcaagtgtcgagttcagctctatcaaaatctaccaagtatagctgaccctctaacactcccttaaatgctattgaatcatcacttcttctaaagacaatgacacttatatcagtaaaaagacagttgtagcctatttgacataattgtgagactgaaagcaaattgtaatctatagaatctacaagaaaaacattggaaatagaatggtcaggagatatatcgattttaccaagacctttgaccaaaccttgatttccatccccgaatgtgatagctcgttggggatccttgtttttctcataggaggagaacatccttttctcccctgtcatatggnttgtgcacccgctgtcgagtatccaacttgagcccncggatgcat

SEQ ID NO: 61446 - DNA, 479 bp, Zea mays
  unsure (1)..(479): unsure at all n locations
aagtcacctgaggcatgcaagcnttgngtcatgtaaatggcaagtacttgtgcactatttacatattgtgnaacttctacatctgaagaacctcagaagcagaatataaatgctaagcgacaaacctgtaaattttagaaatcgaggcttcagatttgccagcatagaggcaagatctttacggaaaccatgcccctgaaaaataaagtggtgaataaatgtcactgacaaatcgagaaatggaaggtccttggaagttgacacctgtgttgactatggatcagatattcttcctttgttctggtgttaattaggattaatttttcaatcatacaagagctgtgtatagaaacttataatttaacangtgctgaagtggtaatgcatcaccagttcaccacacaatgcaattttgattatgatggctgcacgttgcagcttgtatttagaaacatcatgatgcacactattataactac

SEQ ID NO: 61447 - DNA, 476 bp, Zea mays
  unsure (1)..(476): unsure at all n locations
ttaaagggagaacacgtgatatggttaactaacgtgcatttttatatatatagaccttgtgcagcttgtcaagcaggtaaacaagtgggaggagcgcatcacagcaagaatgtgatgaccacatcaagacccctggagctgctacatattgacctcttcggacccgtcgcctatctaagcatatgaggaagtaagtatgggttagttattgttgatgactnttcccgcttcacttgggtattctttntgcaggataaaactgaaacccaagggaccctcaaacgtttcctaaggagagctcaaaacgagtttgagctcaaggtgaagaagataaggagcgacaatgggtccgaattcaagaaccttcaagtggaggagtatcttgaggaggaagggatcaagcacgagttctccgctccctacacaccacaacanaatggtgttggtgagaggaagaacagaacgctaatcgatat

SEQ ID NO: 61448 - DNA, 445 bp, Zea mays
  unsure (1)..(445): unsure at all n locations
anncttgggcacacatctgaacttcagctctatttattacncgctgacagacggccagactgacagaactaaccagatcttagaagagatggtgacagcctgtgattttcataacaagataggatgggacaaaccgctaccctatgcacaattcctttaccacaatagttatcacgccaccttgaaaatgtcacccgctgcacgcactctatgggccggagtgcaggactccgctgcattgggaccagcctgcagagagacagagcgtcgcgcccgacatcttgcttgaagccgaacagaatctcaaaatggttctagagaacctgaacacagcccagtcaatacagcaaatctatgctgacagaaggagacgggaactgagtttctaagtgggagattacgtttatccgaatgtgtcacctatcatgggagccatcaaggtcag

SEQ ID NO: 61449 - DNA, 457 bp, Zea mays
  unsure (1)..(457): unsure at all n locations
agcttaatanatcttgtattgtagtaccagattatagtcttttcatttgggcgtggatccgataaaattaaatcctttgcaaaattgaatagaaagatatttaatttcctcaattcgtttcgttccccgtttaactgaacaaggtcttagatggacaccacatgtcgtagattttgattgggtattgcctcatatcttgagtaatgtatgcaggtaacagtttcgactagcaatcatctttgctttctcttgtattagcacggatcccaaattagtgaaacacaaatggagtgtttgatttgagggatagtcagtccatcatcttctcactatttttgtttggtttgtggaatgtaatgggttgatccatcaccacctcatttctagtagttagtactaatatgaggaatgaaatcatcccaccgaatttgaggaatgaacccataatacaccacct

SEQ ID NO: 61450 - DNA, 474 bp, Zea mays
  unsure (1)..(474): unsure at all n locations
tctnagggagaaacacatttgngactaacaaatgttcattttgagaattacaggattngtagcgcatgtcaggcagggaagcaagttgtgactcatcatccacacaagaatatcatgacgactgacaggccacttgagctcctacacatggatctattcggcccgatagcttacataagcatcgacgggagtaagtactgtctagttattgtggatgattattctcgcttcacttgggtattctttttgcaggagaaatctcatacccaagagaccttatagggattcttgagacgagctcaaaatgagttcggcttgaggatcaagaaaataagaagcgacaacgggacggagttcaagaactcacaaatcgaaggcttccttgaggaggagggcatcaagcatgagttctcttctccctacacgccacaacaaaacggtgtagtggagaggaagaataaactctattgacat

SEQ ID NO: 61451 - DNA, 490 bp, Zea mays
ttcttcggtgccatagcgagggtctatagcttccgaaggtgttcaaaatactcgaagtggaagtgagttcaccggaggtgggcgccaatgttggggacttgttcttaaatgctaagaattaagaacaaggcaacataaaaagtgttaagtgttaaagtccttcgtccttcgaagcattatgtcccttcgggaaataatgagtttcggacgaagatcataagaaacataccttcgtaaacataacaagtaatgacgaaggattcatattaagcatgaaatataatataagcatcatcataggatcatttctattttattaacatggaaaaatagaaatgatttcaaattacaaatgtaccttcggtcctgagagaagaataaaagtacaagcgtgacgcataagcatatgccaagtcagcgtgaacagtacgggagtactggtcatctatttatagacgcgggacgcagcccacgtaaaattacatttatg

SEQ ID NO: 61452 - DNA, 413 bp, Zea mays
  unsure (1)..(413): unsure at all n locations
agcttatgaagatgtgtcagttccacctgtttctcttctgcggngccacaaccaacccacggtatcctcagccaccaagcaagtgtctacttcatctctatatattattaccaagtgtagctgagcttctaccactcccttaaatgctattgaatcatcacttcttctttggacagtgacacctacattcgtacatagacagttgtagcccatttgacatcattgggataccgcaagcaccttgtattctattgaatcaacacgaaatacattggaaacagtgtgggcaggtgatataacatttgtacccatcctttgaccaaaccttgatttccatccaccaatgtgatacctcgatggggatctctggttttctcatatgacgagagaatccttttcttccctgtcatgtg

SEQ ID NO: 61453 - DNA, 437 bp, Zea mays
agctggggaaggagcttcatcaccacatgtgtctttcgactatgccacacccagcccatgctagacttagcaattaagcatgcatctagaccggcctcctcattatgaaaatcaactaaatagagtgtgccgtctaatacacccttaaaagctaatgaaccatctcttcttctaaagacagacacatctacattagtgaagagacaattatatgccatcttacataattgacttacggataacaaattatatccgagcgactcaactaagaatacattagaaatagagtgctcatttgagatagcaatcttgcctaagcctctaaccttgccttgattcccgtcaccgaatatgattgaatcttggggatccttgttcttgacgtaggaagagaacaacctctcttccctacgcatgtggattgagcatccgctggc

SEQ ID NO: 61454 - DNA, 383 bp, Zea mays
aactaagctttcttggcggatgacgaaagtcgatgcttgccttatgttttttctatggttcaccggaggcgggcgccactgttgtggacttgttctcatatgctatgagtcaagaactaggctacacagagaatgttaaacattaaagtccttcgtccttcgaagcattatttcccttgagagataatgattatcgaacgaaagttgtgatagacgtaccttcctcaagcaacatataaacgatgagagaaacatatggaatataaaagataatacaaatacgtatttattaccatccactcatttctatttcattattaaggaaaaatagaaatgatgacacgttacaaaagtaccttctgcttgaaagaaggtacaagtac

SEQ ID NO: 61455 - DNA, 447 bp, Zea mays
  unsure (1)..(447): unsure at all n locations
agcttgtggaggactagatcatacgatcttattttttctatatgagaagtggtcacccaagctttgttgttgacgcaccacaagactaattaaggaagatattcatgtgagagttcgcaccaggaaggtttgtgtgttggcatcaatgcttcctcaataagctatctgccaagcgaaagccataagcctgaagatgatctttgagtagccagaatcatcgtttgcaatcggcaaccggatgctcctcaaaggccagattttgttgaagatccatctcctctaagagtctgcacagcgaagatatgtacctgaagtaaagctatacccataacccttctaagccgaatctcgaggaggagatncattttaagtggcgtagatttgtagcatctcaaacattcaaatcttgaaattttctcaaacttgctctaaattcaaaatgaattc

SEQ ID NO: 61456 - DNA, 474 bp, Zea mays
  unsure (1)..(474): unsure at all n locations
ntgaagtatctgtaagggcaagccaaactgaaccttctctattctatatgggttgagtatatcgaaacatttctatacattgtgaaatataagaaaggtaacgacaatgtggtcgctgatgccttgtctcgaaggaatgtgatgttgaatcaactataggtaaaagttttgggtcttgaaaatttgaaagaaatgtataatgatgatcctgaattttcataaccatataatcattgtatagatggaaaaggttgggaaaaatatcatatacatgatggattttcgtttatagctaacaaactttgtgtaccacattctttggttagattgcttttattgcaggagtcacatggatgcggtctaacaggtcattttggacaaaagaagacttatgaaatgctcagtgatcatttctattggcccaagatgaggagagacgtcatcagatttgtggagcgctgtgtcacctgtcac

SEQ ID NO: 61457 - DNA, 289 bp, Zea mays
tgttgagcaaccatccgcgtctgaagacagcgaatatactaaccatgtctactcgctctctaaggcgctgtatgggctcaagccagccccacgagcatggcatgaacggcttacagactttctttctgcacatggattcaaagtcggaaaggccgatcctaccctctgtaccaaaacacttgaaaatgatctgtctgtatgccacaattatgccgatgacattatattcggggctactaaccaatctacccgtgaagagcttactaggatcatgacacacaaattcgag

SEQ ID NO: 61458 - DNA, 450 bp, Zea mays
tgatgtcatcctctgtccgacgcctgatgaatactggcttttctcgccacttcacggccactgaggtccctggctcgatgctggataggtccatctcaagtgaaacaagggcaagcacatccttgcttgctgacatgcttaggacaaactttactacgagaagacgcagcagtgatgcatatatgaacctctcaccactcatgacaaagtatgcaaaggcacgcttgctgggatctccacgaggatatctttcatggttggactcatcataaaccacctcagggttaggattcttcacagcagccacagctgctgggaggtcagctaggcacgcatcttggttccttgtgacaactgtgtcagtataagagaaacctgcttaacacagtaagaaacaactgccacatgacttatgttcggataaaaaccatatcagtgataactgagcat

SEQ ID NO: 61459 - DNA, 406 bp, Zea mays
cgaacttatttccagaaacccagaaccctagggccctttctgcatagccgccatgggctctggcgcacgcgcgctttcctctctggactgggctgcctaagctgaaaccatcccattactgttgaagcctgttaataattgtagaaaaatcctaaaattgtgaaaccaatattcctaggcttgtgattttctctagaatttaatataaataattctatgatttttagaggaaataaggaactttaaggcatttatagtaactcaaagaaataattctggatttctataagatagatgataactccaaaactgcccaaactttgtatatgaacttaaaacaatactcagaagccttgtgtagagtctgacttgatttggaccatgtttgataactagaacccaaaat

SEQ ID NO: 61460 - DNA, 426 bp, Zea mays
  unsure (1)..(426): unsure at all n locations
ggttcttgtacacagatgcatgtggacttttagtgcatgtgtttatcnacgcgaaacatggtcaacaatgtccatgaaactagnttttggtactaagttcacggaggaactgaggtaggaaactatgtctggagacaaagtttaacgaggaactgaggtccttattcaaggatgttgtgcgggatgtttctgtcgaagcatacgtgcatatctcgactgtgtgcgttgaagtgggctcggcccatgatatatctagcatggacggcacagctacatgggaggcccaagagaggcgtaattccagggagcatgacgtacgtgtattaagagggcagcnggccatatgaagcccatgcaatagttgaatggtctaaccaagctagaataagaccctgatgtccatataaatacgccagtgaaagcgag

SEQ ID NO: 61461 - DNA, 409 bp, Zea mays
tccttcgaaggtttctctgtcaaacatatttctcgtggagaaaatgaatacgctgatctattggctaagtcagcagcccaggggctgtctatacctttggaagtattttttgaaacaataaaagcacctttggtcgagcttcttgaaagagcaatcctcaacatatcccctgtttatagtgaagaatggagaactgaaatcatctctttccttcagggtaatcttctttcagacgacgaagcttataacagaagaatagaagcaagagctcgaccatatgtcataataaaaagggagttatacaagcgcggcgtctgttccccattgctaagtgcttattcagatccgaaggtatagaattaatgaaggacatacatgcaggtctgtgtggatctcacattggatctac

SEQ ID NO: 61462 - DNA, 372 bp, Zea mays
  unsure (1)..(372): unsure at all n locations
attgtcattcacatgacgattaccttgtagganagatataatttctgtccttcactcttctctatgcacaggggatattgcatgcgctgctctctactgagttcacctaggtgctttattgattcacagaaatactattctaggtacagggagaccctgtgccgctgatgacggctaacatatctgcatgctcagtttatgcatatggaatattctcgactcaagaaccttcgaatgatacctgtctccttcgaactgtatccagatagttcttaagcttcaggactcttgccttgctacttttgtctatatggccagaaatgacttgagaatcagtgacttaggatggcccttcttattaccattgtgctt

SEQ ID NO: 61463 - DNA, 444 bp, Zea mays
  unsure (1)..(444): unsure at all n locations
agctngagggtgtntctgtaaaccgccagtgactacatatgaatattaaaggaacttatttccagtaacccagaaccctagggccctttctgcaaagccgccagggcgcgggcgcacgcgcgctttcctctctggactgggctgcctaggctgaaaccagcccattactgttgaagcctgttaaaaattgtagaaaaatcctaaaattgtgaaaccaattttcctaggcttgttattttctctagaatttaataaaaataattctatgatttttagaggaaataaggaattttaaggcatttaaagtagctcaaagaaatagttctggatttttaaaagatagatgataacgccacaaatgcccaaactttttatatgaacttaaaacaatacttagaagccttgngtagagtttgacttgatttggaccatgtttgataacta

SEQ ID NO: 61464 - DNA, 420 bp, Zea mays
  unsure (1)..(420): unsure at all n locations
ggcatgcttcttaatactntagtaaaaataccaaagccatttattatagtttgaatctctatcacatntaggagttcttatttatactatgtttgcttggntgtgtactttaccttcctagccaagttatatactagtggataggtttggagcctacgttgcataactcctgatgagaaattagagattntctagattaaattctgaatatgaatcatgaataatattaaagaaactaacatacagttccctagcagactagtatgtgtactcataacatatccataagaacagaaaactcaagtactagactagaagagagcgcatactgtttgaacaaactaaatgaaggtgctaaagcggcaaggatgacatcatcgactcacgtcgagaagaatacatgcagtcacgtgaagacac

SEQ ID NO: 61465 - DNA, 421 bp, Zea mays
  unsure (1)..(421): unsure at all n locations
gcaagctcgtctaaaccgcatcatgaaaattgctgatcttcgttgggtgaaacaaacggatactccggtgtatggagcagcactctactttaaccctgggaaattctatattatgaaacacagtgatgatgaaggctatgttggagagctaacggggtgcttccatgatgtacttgttaaaatggggctagatgaggaccttatagacaaaattgatgctcaggcagtcctttatgagaaccaaagagaagcatttgccaacccaatggctattaaaaatgctcaaacaaagaacccacgcgagtaccactttaattgttactttcagcatgcataacttcatttccagcatttaaatactaccactttgtcattcanttgattggtggcttgcatatggtgggcgaaccattgaggtata

SEQ ID NO: 61466 - DNA, 476 bp, Zea mays
  unsure (1)..(476): unsure at all n locations
tgagtcggttcttctgcanagaataattgatgcacaaagaaatgatgttggtatgaaacacattcatgaganaataaaggccagtaaggcaaagtattttatagaagatgatcaaggcattgtatggttcaacaaccgcatagttgtgcccaagaatgatgaggtccgccagcaaattttagatgaagcacaacttagtcgctattctattcatctcggaagcactaagatgtatcatgatctaaagaaacattattggtggacgaagatgaagatttaaattgcacgctatgtggcaaaatgcgacacttgcagacatgtcaaggccatacatatganaactgctggcccattgcaatctttacctatcccaacatggaaatgggaggatattagtatggacttcattgtgggattacccaggacagcaaaagggtatgattccatctangttattgttgatcgacttacaaaga

SEQ ID NO: 61467 - DNA, 477 bp, Zea mays
  unsure (1)..(477): unsure at all n locations
acctgcggcatgcaagcttctaaagggagaacacattttaggattaacaaatgttcattctgagaaagacagggcttgtagcgcatgccangcgggaaagcaagttggaacccaacatccacacaagaacatcatgacgaccgacaggccgcttgagctactccacatggatctattcggcccgattgcttacataagcatcggcgggagtaagtattgtcttgttattgtggatgattattctcgcttcacttgggtgttctttttacagganaaatctcaaacccaagagaccttaaagggattcttgagacgggctcaaaatgagttcgacttaaggatcaagaaaataagaagcgacaacgggacggagttcaaaaactctcanatcgaaggttttcttgaggaagagggcatcaagcatgagttctcttctccctacacacctcaacaaaatggtgtagtggagaggaagaa

SEQ ID NO: 61468 - DNA, 480 bp, Zea mays
  unsure (1)..(480): unsure at all n locations
gtgttcgacgcgagctgacatccgggggcgcgctcatagcacgcccgtgctcgaacccccgcgcgcccgcggncgcccgtgaccacgcccgcgccacggctataaagcccgccccagtgcttggctgccttccccgttgcctcctccgtacctcgcctgacttgcccgagccagccattagctccggcgacctccccgcgacccgccagtgccgcccgagagcaaccaccgtggccagcccctcttccgtcctcctccgttcgatccaagccctcagatagcttcctggtgaggccgtgggacttgctcaagcttgacccggngaccctcgtcaccggaatagcccaatcgtgcacaccacgagttcaagaacccgccggcgcacgtggaccgggtaaacctctgcaccgttttatattcgtgcgcgcatggccttgtgtaccccgtgagctctcgtgcccctaatgaactataccgcgg

SEQ ID NO: 61469 - DNA, 462 bp, Zea mays
  unsure (1)..(462): unsure at all n locations
agcttctaaagggagagcacattgtgggactaacaaatgtgcattttgagaaagacaggatctatagcgcatgtcaagcagggaagcaagttggcgttcatcatccacataagaacatcttgacgacttataggccacttgagctcctccacatggacctattcggcccgatcgcttacataagcatcgacgggagtaagtactgtctagttattgtggatgactattctcgcttcacttgggtattctttntacaggaaaaatctcaaacccaagagaccttanagggattcttgagacgggctcaaaatgagtttggcttgaggatcaagaaaattagaagcgataatgggacggagttcaagaattcacaaattgaaggcttccttgaggaggagggcatcaagcatgagttctcttcttcctacacgccacaacaaaatggtgtaatggagaggaaga

SEQ ID NO: 61470 - DNA, 422 bp, Zea mays
  unsure (1)..(422): unsure at all n locations
actaggtgttcactacaagcatcaatgtcaatatctttacacctagnnacaaattcaacatgttctacacaagaattggatttatttgctacttctaatttagcatttaaatcattgttgacacctttcaaagtagaaatggtttcatgacaagtagatagttcataagaaagcatttcatttcttttaacttttaaagcataggatttttgtgcctcaacaaatttatcatgctcttcatacaacaaatcctcttgcttttctacgagtatattcttttcattccaggcatcaattaattcattaattttgtctatcttagatctatctaagcccttgaacaaacatgaataatctacttcatcctcatcactagattcgtcctcacttgaagaagcataggtagagatgcgagtacatac

SEQ ID NO: 61471 - DNA, 434 bp, Zea mays
  unsure (1)..(434): unsure at all n locations
agcttgttagagaagctgatggntgtgtaactttgttacaatcccattatgtggaaaaggtattgagtcgctttggttttagtgactgtgatcctgcttcaacaccttatgaccctagtgtgctattgagaaagaatcacagaataacaagggatcaattgacatacttccagatcattggctcgctcatgtacctttgaagtgcaacaaggccagacatctcttatgctgtgagtaagctgagtcggcttgtgtcgaaactaggagatgatcactggcgtgctcttgagagagtgttgcggtattcgaaaggtactatgacatacggtatttattatactggaaactcacaagtgctggaggctattgcatgctaactggatttctgatgctgatgagttttatgccacaagcggatatgttgttctgtttga

SEQ ID NO: 61472 - DNA, 465 bp, Zea mays
  unsure (1)..(465): unsure at all n locations
ntagctntgagagcgattgattcattcttcactttctntgtcaaacttatagcatcggcttgagatttcttaaatatatcttgagtaagaatttcccccaatacttcggttggagaagttgtagattagatagatcacttattactaacatagtcacaatggtctcatacttctctggaagagatctaaggaacttatgagtgaaatccacatccggtacattaaaaccaagtcccttgagttcattcactatctcatttaaccgattgaacatatcggatacactctcatcttctatcataatgagatgctcaaatattcctttgcacacatatagcttggcactcttcacaattgtagttccttcatgaatttccattaacttaatccaaatctcatgagcagttgtgagaatctcgatactggtgaactcatttatgtcaagagcatcatagaatacattca

SEQ ID NO: 61473 - DNA, 429 bp, Zea mays
  unsure (1)..(429): unsure at all n locations
tagcttcaaaaaaccaacactcttcgatatagttcctattatcttngcaccggcatggtctcgaatacatcctaacgccccttcattgattccaccaaacaatatagtccctggctggtagccacatgatataccatattcttgtaggtccttctttttagccttggataattcttgactgaccaatttccgaaggtcaaagtccttttcttctgaagcgacatctggtaatatctacctatgtcaggcactgtggccatgaccttctctacagccgcagccgtctcttccgcagccatatccgagagctgtttatcaatcccagatagagtactcttaaggttggtaactcgagctttacgagaggcatcagcttcggcaactgcctcggcgctcgcaatgggtgttattcttgatgccgaggccgat

SEQ ID NO: 61474 - DNA, 471 bp, Zea mays
  unsure (1)..(471): unsure at all n locations
acactatanaaaacgtaagcttgaggcttctaatgcntaaaaggacaaccgaattgtgtcacttgatgtcaattgatgagagtgagagagaagcactatgctgtaacaaccaagctgatgcaagcatctaccgaagtaactgttaaacttatcagtgcttatgtaaaaactgatgacctgatagatgaagtgaatcatatgagaggactcaatgaaactaccaaatcatgttagccaactgtcacaccctcggcgatagatgccataatgagttgttgaaaactttctcctctatcatggctctgtctaaagagaagaaaatgtttcatatggtaacttggagggcctaatgaggtgggttcttagtgagacccatgctttcaaaagtgttctctcaatacgagaggactattgtgcttggatagacgcccgaagtactgctatcggtntactaatagccgagtgcaatca

SEQ ID NO: 61475 - DNA, 453 bp, Zea mays
agcttccgcccaacaggagagttgttttcagtcgtcagcgccaacgaacagatgcgtccagggcttcggaggaaggtctggagaccaccccagaaaaatatattgcctattctgtggtgaagacaagggccatactaccaggatgtgccatgttaccatccagaagcagaaggaaatagcggaagcagcagcgcaacagagtcagccgaagcacgtcatgcatactgcttcgtatcactcaccttatattccaaaatatgtaggcaaccaccctgcagcttctgttgcttcggcgagccaaccccaagcatcttggtagcaacctccaccgccaccgccgatccatcgaggacaacagccagaagggagtcaccacaatcatcttcagagggatttcagagaagagtccgaagctcgcacatgtaacagcactatgtcagagttgaagcacat

SEQ ID NO: 61476 - DNA, 491 bp, Zea mays
  unsure (1)..(491): unsure at all n locations
acacaaaaactaagctaataggtggaannattttcactaacatatgggagaatggttttctatggatggcccatgaaataatgaagaagagcgagaaanacattcatgatgcccgagaagcaacaaaatcagctgaaaaagctgcggaactcgaaagacggatatgtattatttaatggattttaactttgttgtttatttttgtgacttcgaactaatttatgtcttctaccgcagctgaactatctcctccccagagccattcaatccactagcgcacccagaaacagagaagacaatagagattattaatatggctgaagctattgtggatgaagatgttaccaagctgctaaccgaaactgctgaaaaagttatgaaggaagaagagtagctattgtataaacacttttttaagatattaatgtaatatatgctgaactaagtctgtaacatttcgatgttgtatctttgaatgtaatatgtaaatc

SEQ ID NO: 61477 - DNA, 432 bp, Zea mays
  unsure (1)..(432): unsure at all n locations
agctatgngaaaccaatactctntgatatagtaccgataaccttcgctccggntcgatcgcggatgcaccccaacttttcatcgtcaacaccaccgaatagtaatgcccctggctgatatccgcacgatatggcatattcttttaattcttctttctcagccttcgttaactcttgtccaactaagttttgaaagttgaaaatttcctcttctgaagcgtcttcagctattttcttccccttctcaggtactgtagccacggcttcttcagtggctgtggcagcttcttctgtggccatgtctagaagtatcttatcaatgtttgaaattgtgctttctaaatgtacatctttggtcgtggcagcttcggcagctgcagcttcgacaggtgtagttttggctcgtgttgtgctctcacaactggtaccttca

SEQ ID NO: 61478 - DNA, 456 bp, Zea mays
  unsure (1)..(456): unsure at all n locations
gattcttcattccaacatgggcaagtcggttatgttctacttacccatattagtcttagaaattaagcacgtgtctagttcatcatggctatcatttgtcggcatttcgaccccggggggtccctggaccgacgagtaaattgtcgctgtgtgtcccagcccagatgggtcgacgcgagatggaacacaacgggggaaaaagggaaccgcgactcgtgttatcctgcgcccaccgcggatgcgcttgcattanggggttacaagcgttcgcgagggagagagagagagagagagcatgttcgtcagcccatcctcctgcgcggccaccttctcgtacgagggccctggaccttccttatatatatgtaaggagagggcccacgtgtacaatgtgggtgtagcattatgctaacgtgttcagcagagaggatccagagccctatgtacatgccaaca

SEQ ID NO: 61479 - DNA, 432 bp, Zea mays
  unsure (1)..(432): unsure at all n locations
agctncatagtctgaaccgggacccggccattggtattcctactcctcttccgtcagctcaggtgactgcgctcgcaagtcgcaagaacagttcaagctttgaaacgccgctgccgcgacctcaccgacgcgcgccgcgggagttggaccaacgacgtacgcgacgcgaagtttccgacgctttccgggtcgaaacctgagcggtagtgtttcgcatgtatgttggttggttggttggtggcaccgccgagtaccgaccggcgactgctgaccgtgccgagcaggtgagggcgagtggcctttcttgcccggccccgtcggctgcttccaaattcacccangagcggcagcgtgcgtgggtggcatggtatggcaactcacctgccctcccagtcggcttagcagtggtcggcggtctgtcgccggttctga

SEQ ID NO: 61480 - DNA, 255 bp, Zea mays
tgtggcaatgcgggaagacattccaagagaggaagtcaacgtttgtttgtcacccacacctctcacatcgtatgcgtgctgctgctctggtttgatgaacctatgaacggtcaactgtggtccacaagaaggtcgctatgtgcttattgacagactagagggatggttggctcgctggctaacttgtcacactttgtctaacttttctatctaaggttagttattcattcagacgactaattctagataaagtgt

SEQ ID NO: 61481 - DNA, 415 bp, Zea mays
agcttgtagcaaggttacaagcggtggatagatggctgagagcctcccaagtctcttattgtactggaggtggagctgacttcaacgtttcactatatttatcttgccctatatccgactattgtgccacctcaacaacctctgtccacctatatatggccaataagcacgaggcccgcgagctcggcacaaataatcgggctaggctcggataggaaactaggcacggtgggctagaccgacacgaccccgtttacctctaagcccgttaagcccgcttttttacactaaaagtgtataccggcccgcatagcccgcttttttcatgttaaacggcccgggccggcccgtttaagcccgctgcgggccgggctctgacagaaaattgagcccgcgtgcttagacggctcggtcc

SEQ ID NO: 61482 - DNA, 407 bp, Zea mays
  unsure (1)..(407): unsure at all n locations
nttacttgctacatgcttataatgcctttcttttcggtggttgatgccaaaggggagaagtttaggggccaaagcaatgaaaactatatcaaacaccacacaccaccaatttaaaattttatatctacaagtggctattcaagtggttttggttatttggtccaaaaataggaagtaagtgaattatggagttagggggaggcttaagtccataatgtcacattgtggggacaatcatgcattctagcaagtacattgcattttttcactcaaatacttgtattatttgcttgctttggttgtgaatgtatcaatcaccacaaacggggagatagttaagaaaatggaccccagcccattaggctgattgagttttggtgtttgatgaacaacacaatccgcgaact

SEQ ID NO: 61483 - DNA, 439 bp, Zea mays
  unsure (1)..(439): unsure at all n locations
agcttaatggttctagatgattatgatggacttatgcaanggttgattcatatagtagttgtaactcatcagtgatttgttggcgtatagaaatgtcaatctaccttttctcagtgctcttttccgctaactttttttttgtttgaggcgcattcttgcctcgacatccattctgttggcagtgaacaatactaaaaggagtgcgcttacgttgaatgagacatttttgggtcttctgtacccaactgagaactacagagtataagtttcttccaggttttagtcatttgcttaagtttcctgatggcatctacctccattagttactgaagtactccctcgctgctttggtattcgtccatccggcctgtgccaagtggctggtggagggacgtggctgcggcctgcgacttggcgctagctatctagccgggtgcga

SEQ ID NO: 61484 - DNA, 451 bp, Zea mays
  unsure (1)..(451): unsure at all n locations
tgaagctgacatcagtcgctaccgacgacagcatatcttctttagcttattctattctaatttcaagggagagtnttccctcagctcttcattgttttacgaagaaggtgattgctgatgaaggttattctgcacagagtatgctactaagtaaagccttgaggatgcaacatgacctctaagataagaaaaatgaagttataattgaaggcttggagagtaaaatcaaagatcatgaagatgctcttgaaaagaaagattntgttcttcaaacattggagggttcactggcagaagcccaagctgaaattgccagattaaacagtgaactcctcctgaggtcagagagcttcgagcaagagaagaagatatttgatgcgaagcttgaatccgaagtcgaaaagagttcgaatatgcaaaaattcttgaaagagcttcggtacaaatgctt

SEQ ID NO: 61485 - DNA, 399 bp, Zea mays
  unsure (1)..(399): unsure at all n locations
agctngcatagtctacttcatgatcactagactcttcatcacttgaagaagcatacgtaatagtacgttcgagtacttaccttcttctcctttgccatgaggcaggtgtgatggtcgttggggaagagagacgatttgttgaaagctgtggcggcgagtccttcgtcgtcgaaatcggacgacgaacaattcgagttccattattttccaaggtgtgcctcgcccttagtcttcttgtaaaccttcttgttctctctcttcccattctttccttggtcctggtcactatcattgtcgggacagttagcaataaagtgaccaatcttaccacacttgaagcaggagcgctttcccttcgtcttgctcttgttgggatgctccttgcgacctttgagcgtc

SEQ ID NO: 61486 - DNA, 302 bp, Zea mays
  unsure (1)..(302): unsure at all n locations
cactcagacaaacctattctcatattctagtttgattacttgcatatgctttgctctaaggatctattaatggcccactttatcgaaagctttacaagtcctaattcacccccactcttangcgtcacccattttctacagggatcaaattcgcaggagcacagaaacccactgtgctctggtccggcgcaccggactgtctggtgcactatgaccgtacaagaatgaactcgtcactctcgagcttccttcacgcacactccgctaacaataactgcactagtatggtgtgctaccggact

SEQ ID NO: 61487 - DNA, 466 bp, Zea mays
  unsure (1)..(466): unsure at all n locations
tcccccgtcctccctcccgtttccgttaatcccctnccccagagngnnnnttgtgctcatgacaccggatcttaagcgactgcagctcaacttgggaactaaaactatctttgttctgaaccgcggaggcaccgaagatgttggcgtcactcgtgacttacttgatagtcctacaagtgaaccactacctactaactctatttgtgataaatgcaaattttctcttatgaatgataatattgttcatgatgaatcacaaatcattgttgagaatgaagtattagcagataaagtgaatgctctaacccatgatctatacaacgcatatggtggaaacgctaaattggatttcatattgggaagccaacggtgctcacttaatcgtgaaggtctggatatgttccaagaaggaaagaatgcttttgtaactaaagacattgcttgtgaagaatggacacagtgtgtc

SEQ ID NO: 61488 - DNA, 326 bp, Zea mays
gcttctaagggagaacatgtgataagtcttaccaatgttcatttccaacaacatagaggtcgtgcagcttgtcaagcaaggacacatgtgggacgatcgcatcacaccaagaatgtgatgaccacttcaagacccctggagctgctgcatatggatctcgtttgacccgttccctatctaagcatatggggaagtaagtatggtctaatcattggtgaagactcttcccgcttcacttgggtgttctctttgcaggataagtctgaaacccaagggaccctcaagcgcttcctcaagagggctcataatgagtttgagctcaaagc

SEQ ID NO: 61489 - DNA, 447 bp, Zea mays
  unsure (1)..(447): unsure at all n locations
tgcagcatgcagcttaatcacttatataccaatttattgtaaacctctctgtctactccatatgaactatatttactccctattctatgatatgcctacagataaggacaatggaaaatgtaatttaattaatgaaccatagagtacctctatttttgttaagctacttattcaatatacaccactgcaaaaatatatcataccctgctttagtataaaataagtatgatcccttttgttttaatagaacaagtgaaacttagaaaaattctacataaatgaccccaatgtaaacacacccctacccttgggataactaatatnttattaagaataacttaagaaacatatgacatctgctgtttgacatttttcaaataataatcgcactatacagagcctttctggcattaaacgtaagaaaatctatctaaataccacccctag

SEQ ID NO: 61490 - DNA, 443 bp, Zea mays
  unsure (1)..(443): unsure at all n locations
agcttagaatcagaatacgaatagtctataattcaagctctagagctggatcaatggaaccatgttctttggaagtacgaagccatgaatactcaagtaataatacccagcacttgccttgcaaaaaacaattaaagcagtgaatgcggaaaaggcaggatttcgttttcggaacaagatcaaattgcattccataagaaacggttatgccatacaatcgagggaggggggagaggctagctagccgctgcacgataacaatgcatcacatgacacactagccccatgccattcaaccagccattatcactgttactgaataaatccatcaaagcttaacagtctgtttcatatcaagattaccattgagcatccnctgagaacagatgaaggctactatcgctntgtcacttgtcaggtcagtaattgtgaatcggcttatc

SEQ ID NO: 61491 - DNA, 326 bp, Zea mays
  unsure (1)..(326): unsure at all n locations
agctagctagctaagttaaagtaagcgactgtttgatgatccctanctagctagtagctactgcctcctaagacgactggaccttcacgtactaatactaccatggattggtagcctattgcctatgtggagtttgataatctagacagcatatcataagagagtatgggcaaatgaggccccttttgttcttggttatagtgtgcactgtgttggattattcacacacacagaaaggctacctggaacgggaactccgagtcgagattctagaacgatggcgaattggaagatgctagagatgagatgaaaaacgtcgagtaagt

SEQ ID NO: 61492 - DNA, 260 bp, Zea mays
tgagctcactctcagctacgaatgtgatgaccacatcaagacccctggagctgctacatatggacctcttccgacccgtcgtctatctaatcataagaagaagttagcatggtctatttattgatgacgacttttcccgctccacttgggtgttctgtttgcaagataagttcgagacccaagggaccctctatcgctttctaaagagagctcaaagtgagtctgagctcaacgtgaagaagataaggagtgacaacgtg

SEQ ID NO: 61493 - DNA, 316 bp, Zea mays
  unsure (1)..(316): unsure at all n locations
atacaagaagtcttcttcttcgctcccgttaaatattaatgccctcttaggatattttaatttctaggcataatattgagcttctcgcttttcctcctcagataacctntntcccgaagcatgtcgtanaatataatcaggtactttggaagaagcttcgggagttgaagtgacagttctttcaagcagaatntgttttgtagcctctttnttcgtttcttcttccccgcgttccaaggatttctccttggcaggctttgaaggcccagaatcagtctcgtcctggctctttgcagcttcgagcttcagtcagttt

SEQ ID NO: 61494 - DNA, 438 bp, Zea mays
  unsure (1)..(438): unsure at all n locations
agcttctatagggagagcacattntatgactatcttatgttcattttgagaaagactgcgtttgtagcgcatgtcaagcagggaagcaagtttgtgcccaccatccacacaagaacatcatgacgactgacaggccgcttgagctactccacatggacctattcggcccgatagcttacataagcatcggtgggagtaagtattatcttgtaattgtggatgattattctcgcttcactagcgtgttctttttgcaggaaaaatcacaaacccaagagaccttatagggattcttgagatgggctcaaaatgagtttggcttaaggatcaaaaagattataagcgacaacgggacggagttcaagaactctcaaatagatcgctttcttgaggacgaaggcatcaagcatgagttctcttctctctacacaccacagc

SEQ ID NO: 61495 - DNA, 426 bp, Zea mays
  unsure (1)..(426): unsure at all n locations
agcttncacttcataaacggtataaatatactttgttccatatttccttggattttcattagccttgttttacattcgcttggcaaggcaatgacagtacgtcactantttctccattttggtgcttaaagccaaagggggacaaaattaaagccaaagcaactagatcaaccaccacttagagattttaatagagattcagctcttaacttgtctttttgatcaaaactctcttgatagcaaagaggttccctctgattgcacaaactgctctcttgtgtgggaatggctatcttatgagacaaaggggagttctgggagttcgatcaaaacatgtgtttacagtgatttttttggaatcaaaattttaacttacagttagacaatgagtttattagcaaataaaacacttgtggctaaagatca

SEQ ID NO: 61496 - DNA, 391 bp, Zea mays
agttagttgctaatgactaggtcagatgggatcaccttttagcgagaatgttcaagtgtgatgaaacgcagctgttagctctgcgttttcgcgtatgagaaacttggccttttatttaagttctaccatgaagtcgtgtccagtcttcggtggcaaaactcaatgttcaaatctctctgaatataatcttgagagctctacctcaagagctgtgaatatctgttcaggcaacccctatctttctcgcccccggaaaagttcttcgggtggcctctgtgctccatcgttcctccaagtagcaaatatgtcacgataggtcattctgtactagagaacatgaggcgctcctctgggcgcctacgataatcaatagtcatatacataagtcata

SEQ ID NO: 61497 - DNA, 371 bp, Zea mays
  unsure (1)..(371): unsure at all n locations
cctcaccggacttcggtcttccgccgccgcgcgtggaccgagctatccagtgagtctccgtccaattccttgcgctcatatcttctctggcatcccgtgaacctccctgacccatccaatagaactatctcgtcgtgaccaggccagtctcctcgccgccgacgagcatcctcgcctgcgcgcgtggacctaccgactccggccatctccgacggcgtcctgacaccgtagtgatcctgaacttcccttcgtctcaccacttaccgagaatctcgcgctgaagccctcgccttcttcgcgggtactgttaagagagaagactcggtangattgagaccaagggttctgacgcaggatatggatagactaag

SEQ ID NO: 61498 - DNA, 260 bp, Zea mays
ggttatgccgcagccacgccatgctagccgtagcaattagacatgcctctacaccgggctcttcttttgctcaatctacttagtgaagctggcgcgcccatacaccctgttaggctagtgaaccatcacttcttcgtaagacagacacatgtacatttgggaaaagaccattatatcccatattgcatagttgactaacagatatcctattgtacccacgagactaggcttcaacacattggagatagagtgctcattag

SEQ ID NO: 61499 - DNA, 182 bp, Zea mays
  unsure (1)..(182): unsure at all n locations
agcttattacacacgagcgctcgctatggtactcccgaactctttctctanagagtccccaaactccttgagaaggtcatcaaggctggccagggacatgtcctctgggtcggactggntcctgggagggttctcttcctgctgctcagtctgacatccttggcttttggtcttcttgcgga

SEQ ID NO: 61500 - DNA, 419 bp, Zea mays
  unsure (1)..(419): unsure at all n locations
agctagagaaatacttagatacagttcgaatacttgaagcttccttcgaagggttttctgtcaagaatattccacgaggagaaaatgaacgcgctgatctactagccaaatcagcggcacaggggctgccattaccttctgaagtattctttgaaacaataaaagcgccttcggttgaccttcttgaaagagcagtgctcaatatatctcctgtttatagcaaagattggagaactgagatcatgtcttttcttcagggcaattttctttcagatgacgaagcttatcataagagaatagcggcaagagcccgtccatatgtaataatagaaggggagttatacaagcatgaagtctgttctccattactcanatgtttatccagagctgaaggtatagagtngatganagaaatacat

SEQ ID NO: 61501 - DNA, 302 bp, Zea mays
gctttcatgttgagcttgaacattcctatctttctcccatcagaccgcggtgaccgacacaagttgtgtgtcttctgcactcccaatccagcatgttcaaatccttttccctttcggtcttctccctgatttctaagcacaacaagagtgcacgggtctccatggtctaaatatgatggacatgaactctcgagtgtaatcacctgatggttgagttgacgagcaccaccgcgataatgggaccacaaatggtacttgtattgcatacatgcttcagtatgtggatgcctcatcatatactt

SEQ ID NO: 61502 - DNA, 295 bp, Zea mays
  unsure (1)..(295): unsure at all n locations
aagcaggtaaacaagtgggaggagcacatcacagcaagaacgtgatgaccacttcaagacccctggagctgctgcatatggacctcttcggacctgtcgcctatctgagcataggaggaagtaagtatggtttagttatcgttgatgacttttcccgcttcacttgngtgttctttttgcagganaaatccgaaacccaagggactctcanacgcttcctcatgagagctcanaatgagtttgagctcatagtgaaaaagataagaagcgacaacgggtccgagttcaagaacct

SEQ ID NO: 61503 - DNA, 378 bp, Zea mays
cctgaggctgcagctcctgatgcatagaacagatatattttcttttctatttgatagttgtctttgaatactaagaacttcagatacaaaatacactgcgacctgcttcttgactaggccatcaagcttcttctggacaagtgctgcacttaccgctgagtgcgaagctgccacatataataacaaaagagcccctggcgttggtggagttaatgttgttaaatctatcacatattgcttcagtttctcgaaagcttttagttggcttggtccccattgaaagacttcggctgatttcagcacttcgaagaaaggaaatatctttctgctgatctggatatgaatctattgagagatgccagcctctctgtcaatctt

SEQ ID NO: 61504 - DNA, 399 bp, Zea mays
gctatgaagattctgcatgccaacatgttctagtcgtttatgccagagccagcccatgtcaatcttagcaattaagcaagtgtcgagttcagctctatcaaaatttactaagtatagctgaccctctaacactcccttaaatgctactgaatcatcacttcttctaaagacagcgacacctacatcagtaaatagacagttgtagcccattttgcataattgagaaacggacagcaaatggtaatctaatgaatctacaagataaacattagaaatataatggtcaggtgatatagcaatcttacccaatcctttgaccaaaccttgatctccatccgcgaatgtgatagctcagtgaggatcttaggtcttctcgtacgacgagaacatcttcttctc

SEQ ID NO: 61505 - DNA, 443 bp, Zea mays
  unsure (1)..(443): unsure at all n locations
cttaaacgactgcagcatgcagctcanaggaggaagtgcggtatttatcttgtaattgtactgcctcttatgaggcgaggacaaaggtcacacaataaagatgtgccacgttacaatccataagcctaaagaaattgtctgaacctaagcgcggcatagacagctaaagcaagtcctccatactgcttcgtgctactcttcatacatcccaaaatatttatagcaccaacaacctacggcgtttgcagcttcaacaagtcactctcaagcctcttgggctcaattaccatcaccgccaccaatggcccatgccccaaaccatgatcagcagccagataggcactctcggcctgaacaacaatgtgaccttcgggagcactctgaagctcgcacagtatatatcattgcgcgcgaatccatgcacatctactgaagatgacaca

SEQ ID NO: 61506 - DNA, 316 bp, Zea mays
gcttgaggcatcgataggaatcctacttggtgtatattccttcttttcttcctccgtcgctttgaatgcgacgcgttgcacctcgggtgtggaggtgccgccttgctccaagttgatgatttgtttggagcctttgatcatcaattcaaagctcacaaactttcctatcactttctcgggagacattaatttgtatctaggatccccacgaattaattgcacttgagtaggattgcgaaaaacaagggatcttagaataaccttgaccatttcatggtcatcccacttggtgctcccaagggtgcacacttggttc

SEQ ID NO: 61507 - DNA, 253 bp, Zea mays
  unsure (1)..(253): unsure at all n locations
gcctagctacaggtgcataagtttcaccgaagtccaaaccttctacttgagagtattctttggccacaagtcgagctttgttccttagtaccacaccatgctcgtcttgcttgttgcggaagacccatttggttcctacaacattntggttaagacgtggaaccaaatgccatacctcatttctggtgaagttagtgagctcctcttgcatcgccaccacccaatccgaatcttggagaagcttctctaccct

SEQ ID NO: 61508 - DNA, 277 bp, Zea mays
  unsure (1)..(277): unsure at all n locations
taagtgctaagctcactacttaatttttgatttttcttacctcctgagcatatgccttnttagtcctaacacgctttnagttttccttgatagagaagtcctcttggttatacaagagttcactcttctcatgaatagcactaatcaattcattcacactcttctctttgttgcatgtgaacaataggcacaaagagtacgctaagtattctcatcatcactagaatgagtctcatcactacaagttgcatatctagcggaggatcttgatttcacc

SEQ ID NO: 61509 - DNA, 386 bp, Zea mays
  unsure (1)..(386): unsure at all n locations
catgagctattcggcgatgccagagccaacccatattagtcttagcaattaagcaagtatcgagttcagctctattaaaatcaactaagtatagctgaccctctaatactcccttaaatgctactgaatcatcacttcttctaaagacagtaacacctatatccataaaaagacagttgtaacccattttgcataattgagaaactgaaagcaagttataatctaaagaatctacaagaaaaacattggaaatagaatgatcaggagatatagcaattttaccaagtcctttaaccaaaccttggatttcatccctgaatgtgatagctctttggggaatcatcattttctcgtaagaggagaacatctttntctcccctgtcatg

SEQ ID NO: 61510 - DNA, 458 bp, Zea mays
gctaggcactgattaaactatgtgatgcactcttattcttaaagaacaatagcgggataatttaaaactgtaaagataccagtcatgacgggtgctccctctggaatatcagccatggtggtgaaagtcaacctgccttgcctcacttgcaccttctgcctcttcccttggttctgattaacattctgcccctgcctctgctggttccggaggcaattcttggcataatgtccggtgttgccacacgtgaaacacctgttgtcatttgcctggcggtactgctgctgctgttgattgttcctctaagctggaaactgagcgcggctgggtgcctgctgctgctgttgtggtcgtctcacccatctcccctgctgctgctgatgtcccctgttctgagtgtcggatacaatccggaagcgctgtggctgagctgaaggtcctgccacaggtgtcttcct

SEQ ID NO: 61511 - DNA, 374 bp, Zea mays
ttaagtcacctgccgcatgcagcttctataaagcaataagagattctttatgattaacatgatatattcattaatggtcaaaaagcccttgctctacaaactaagaagaaagaactattgacttctgaattatgtgcttgtaatgaatctatctctagcctaaggaatatctatgatgatttaaatgctaagttataagaagccaatgtttctagttcatccatagagcatgttggtatttgccatagatgcagagatttaacaatgatgcttgtaatgaacatgcttctacaattattaagttaaacaatgatgttgcaagtcttaatgctccacttaagacttgcacagactattatgagaaactcaaattt

SEQ ID NO: 61512 - DNA, 453 bp, Zea mays
gcttgaacctagcaccgccctatttccaatatagcttatatagcgtctggaccagaattggtggatataaagaagtagatcaacgagctattagagaaaggttacatcagaccaagtactttgccttgggccactctagttctattcgcggagaagaaagatggggacaagaggatgtgcattgactacagagccttgaatgaagtcactatcaagaacaagtaccctctgccaagaatcaaagatttgtttgatcagttgagaggagctggagtgttatcaaagatagatctgaagtcaggatatcattatctcacgatccaaccttcggatataccgaagacaacatttatcaccaagcatgggctatatgagtatacagttatgttctttggatagacaatgcacccactttcttaagtacctgatgaatggtgtattcatggactatct

SEQ ID NO: 61513 - DNA, 274 bp, Zea mays
gtgtttcaaggaagacgatcaaggtgtgatatgggttaaaaaccgcatagttgtgccaaagaacgaagagctccgccagcacactcttgatgaagcacatcttagtccgtattctattcatcccggaagcactaagatgtaccaagagttaaagcaacattactggtggacaaaaatgaagattgaaattgcacgctatgtggcgaagtgtgcacttgagacgtgcaaggcataccatggaactgctggccattacaatcttgccatcccacat

SEQ ID NO: 61514 - DNA, 398 bp, Zea mays
  unsure (1)..(398): unsure at all n locations
atccttgagtcacctgcggctgcagcttctcagcttcttgagcccttttgatcctaagataacaatatgtaccactgggggtgatgaagctgctntttggctcatcttccttcttcatctagatntgatgatagcctgaataacaatctagtatactcatgagctctgacgaagttgctgcatctactagagaatctatccttggtaatgggaactcatccttcggacaagccttgttgagatcagtaaaatcaatgcacattctccatttaccattggccttcttcaccataacagtgttagctagccattctgggtattntacttctctgatgactccagcgctaagaagtctttcacttcattctgagcaccttcggctttgtcatcagacattt

SEQ ID NO: 61515 - DNA, 269 bp, Zea mays
  unsure (1)..(269): unsure at all n locations
agcttncaaagggagagcacactttatgatttaccattgttcatcttgagaaagacaagatatgtagcgcatgtcaagcacgaaagcaagtctgtgctcaccatccacaccagaacatcatgacgaccgacatgccactggagctcctacacatggatttattcggcccgatagcttacataagcatcggcgggagtaagtacgtctagttattgtggatgattattctcgcttcacttgggtgttctttttgcacgaaaatctcacac

SEQ ID NO: 61516 - DNA, 424 bp, Zea mays
  unsure (1)..(424): unsure at all n locations
agcttctccttgtcgtcatcaaccttgacgtataaccattccgatttctagcctgccggccacttgcttcgatagctgatcacaggaaattttgtggttttccgatatgcaaagttgtaacaaccaaaattttcatgtagcccatcctttctggccttagtttggtagtgtagctcgtgtactcggcagaaaccttcggcaaatggttccactgcttggcttcggagagcccaaatataaacactaagcctaacaatagcgttaggagttagctggtgaaaatagatcccaaatttcttcagcacatcggcaatcatcctattcagaggaaatctcagaccagctgtgaggaaactcttannaatcactatntcatctntntgtggcttcggagtaatctcttctccaccanagcgaatcatct

SEQ ID NO: 61517 - DNA, 361 bp, Zea mays
  unsure (1)..(361): unsure at all n locations
agctttatcaaatggacgtgaaaagtgcctttctcaatggaccaatcaaagaagaggtctatgttgagcaacctcccggctttgaatatagtgagtatcctaaccacgtgtataaactctctaaggcgctntatgggctcaagcaagccccaagagcatggtatgaatgcctaagagattttcttgtcactaatggcttcaaagtcagaaaggccgatcctactttatttactaaaactcttgacaatgatttgtttgtatgccaaatttatgttgatgaatattatattgggtctactaacgaatctacatgggaggaatttagtaagatcatgacacanaaattcgagatgtcgatgat

SEQ ID NO: 61518 - DNA, 448 bp, Zea mays
  unsure (1)..(448): unsure at all n locations
agctntatcaccagatattgttctttactttcacaatactgggatgtgcagattttntgtgaacaaaattgtgccaaaccaggtgtttgtttttggtggacttatgatgtgttatcttaagtgccaatgctaagtgtttgttagtcttcttttatattttgctaccacaaactaccactntagaatatattggttatcttcgctggctctcgttggcagatattatcgtgattcagatcatgcgaaagaactataaggaattgacatgggaaaatatgtcgcgagcagtatagttgtttttaaccttgacacccggcaagttaaatgggctgcagatcttgatttgagcacggatgctgtaaatttccgtgctcatgtgttntcctctccaactgtgagtgatttggatggtgatggatatttggacatccttattgggactgcttat

SEQ ID NO: 61519 - DNA, 305 bp, Zea mays
caaattatttctactacgtgggtttaaagaaaaccgccaagagtgtcctcgttctgtgttcgtttccccctgagtataccatcttcactaccggaatcgtgcgctttgccgagtgccttaagcactcggcaaagtgtttgccgagtgtgacactcgacaaagagagttcggcgaacagtacatcagcaacgggttctttgccgagtattttttatcggacactcggcaagacactcgatactcagcaaagaatagccgtcatcacaacgactggtaacggagacggcgcctttgccgagtcgtct

SEQ ID NO: 61520 - DNA, 389 bp, Zea mays
  unsure (1)..(389): unsure at all n locations
ccttctctggcgcgagaggaggtgtatctattttggagaaagtatggtgcgaacatgttaaaactttggcccaagccgaagctgctttctccattgatgatacgaaggacccctctgtcggagcatgattaataggcggaaaatttttcaatgacatatgggaaaatggcagccgacggatggctcacgaaataataaagaaaagcgaataagatactcatcacactacagaagcaacaaaagcagttgaaaaagttgtggagcttgagagacgaataggtattacttaatgatgnttaactctggtttttacttttagtgacttcgaactgacttacgttttctaccgcagctgaactgtctccttccccagagtccttcgagtcact

SEQ ID NO: 61521 - DNA, 402 bp, Zea mays
ctgcagctgccattcttgtacagcaacaacatttaccggcacagtagctgcagaccatccatataatatggccatctgcatgctaggggttggacatgaatggacccttcaagaaagctcaggggggctatactcatgtgttagttgccattgacaaattcacaaaatggatagagtataagcctattgcctctttaacctcagccaaggcagtggagttcatacaagacataatattcaggtttgggtaccaaatagcattataactgatctgggatccaacttcaccagctctgaattcttcgatttctacgaacaacgaagcatccagattaagtacgcattagtagcgcattcaagagctaatggccaagtggaaagggccaacagaatgatacttga

SEQ ID NO: 61522 - DNA, 464 bp, Zea mays
  unsure (1)..(464): unsure at all n locations
agctnttgaaaggaagaagaagcgaccttcttctcttttagtaggaacacaatgcactcaaagatagcacgcctcgcgaagagactgccaccgcagcggcttgaaaggtggaaagacagacttctctctacccgataaaaagctccccgaggggagacactaccccggcgctcgggggctactataagatctctggcccctagggctcatcaatccgcgagcacactatgcctccagtaactatggcccgctagtcaattggaggtgataagtaatatctaccctggaagaacccgccctcggacgaaccctcgtggcaccgagcccgatgtcggcatctagtggatcctgtgcctggtccaagaacgacatgtcatatatgatctgtcgcatgaactgcggctggcatcgagccacaacggatgcactggtctagccttcactcatgacctactaacccatcg

SEQ ID NO: 61523 - DNA, 318 bp, Zea mays
agcttgtatgtgaacttcaaaagggtactgtataatatattccaagccaaatagactagtgcgaacgaatttatttttttccaaaaataaaaattccaaataccccccccccctccctaaatactttctattgatgctggtatgttagggatggagggttcatacgcacctgcagctggtttgggttgggatccatgggaatacaatgcagaggtgaggggaggactaggcctgtatgccatgacaaacaattgacaccaatcgtcgacgatccagctatcatgtaaacgcagccgataacgccagagacgacaatca

SEQ ID NO: 61524 - DNA, 346 bp, Zea mays
  unsure (1)..(346): unsure at all n locations
agcttatgaagattcttcatcctctcatgagttagtcggcggggccagagccaacccatgttagtcttatcaattaagcaagtgtcgagttcaactctatcaaaatctactaggtatagctgaccctctaacactcccttaaaggctattgaatcatcacttcttctaaagacagcgacaccaatatcggtaaaaagacagttgtagcccatttgacataattgagatacagaaagcaagttgtaatccaaagaatcaacaagaaaaacattggaaatggaatggttaggtgaaatagcaattntacccaaacctttgaccaaaccttgatttccattcccgaatg

SEQ ID NO: 61525 - DNA, 452 bp, Zea mays
agcttcaaccctcgcgagacctttccctgtctctttctaaccatggtaaattcattatcgtatgtgatattctatgcatgtttaatctacttgttctcttgtatggagtattgctggtttcctaatttcaatggatggatgtatgtatgtttgcactcgcatagaggacgattcggtcgaagagtccgaggaactcacaagagaagcccctgagcagcagtcggttggtggaggcaagtgtcccttgacctatctctgtcctattcattctttaattcacctcccgctttatacatgtatacctaaagattgactagctcttgttatccatgtccttgtttacctattcgggttggattattattagttagctctatgctattgctcaaactctaatcaatgaacatgatgagaatatctatgatacgctcgtttcccttctcttattatga

SEQ ID NO: 61526 - DNA, 458 bp, Zea mays
  unsure (1)..(458): unsure at all n locations
gcttcgagaagaagttgtgagtgcaagatgtcttggcataaagatgtgcagccagtgtggaggaaacttcaatgtggcctccattgatattgaaggagaaaatggtggagctccaatgcacctgcctccactattgcctccgccacagtgtgaatcgaagctaataaccagagcagatgatactgaagaagtggtaaagaaccggctacgtgtgtaccatgatctggtatgttccggttgcctgagaatgccttttgatagttttcgcttgctcagtagtctntaaaatatctattcatgcaacctgaatacgcaatntgtggtatttgtagtgaatgagtctgctgttgatatagatcagctagactatttcttgcattanaaaggccctatatatctattatttgtacatgtgaaatattgtaaatggcattgcattttaatactgcttttttaat

SEQ ID NO: 61527 - DNA, 339 bp, Zea mays
aagatcacgcatttggatccataccattactatctcacttacatgtgggtccacatgagtcaatgacatatgaggtccatggtatatatctaaagtttggatctcttaatggtatagatccaattgttccattatggattgctcttgagtctgtccaatttccttcagcccttctggcagcttcctgacttccatgaatagcaatgggcccttggtccgaaagtatcttcatacaaagataagctggatgaagaattgcttctaaggcattgagagtaccacgaccaatgattgcattgtagaggtattcatgtcaacaatatcaaacacaactttgtc

SEQ ID NO: 61528 - DNA, 281 bp, Zea mays
  unsure (1)..(281): unsure at all n locations
acgcccatcttggtaaaagttttctactcgggcagatacataccagtccttgtccatactgccccttatatagggcatggataaattaaagatggaaaccatctctaggaaagaactatctacacgcacatgagtacaagtatgcctgctnttcatcaagaaagcatcggcagaagtctggccttggtctccctactgctatctttattagatcagtaaagacgacagttatcaacacaacatacagaacacctggaggatgtatatgagttattcagcga

SEQ ID NO: 61529 - DNA, 447 bp, Zea mays
gcttccccagtgcttacaagctcacaacttttatctttgaagacctggagcactcctggaacatcgacaacctccgtacaatttttgtttgacttctcaaggctagattcgcccttgtaattcgcaaaaacaatcttgtatcggcccgcactctttttctcccggagggtgagggttttaacgaggcggagccatgtaatatatgtgtgaacaatctccagcataaacatgcgtcgaaaaaagaccgcgacgacggtcttctacattcgaccaccacgaggtcaccgcgaggctatgcgctagcaaccctcgtgtgcgacaaatccgcgcagaagtcgcctaaaggtgcagccggactatcacaacaagtgcgataaaaccaaagtctatcgcgaagactatccgcgcagaagtcgcctaaaggtgcagccggactatcacaacaag

SEQ ID NO: 61530 - DNA, 66 bp, Zea mays
atttaaaagaccggctgagccaactaaaatgttttcgcgggagaagggaattttttggagtttgtg

SEQ ID NO: 61531 - DNA, 246 bp, Zea mays
aacagcttcagccgaaaactgcgttcttcctacaagaccttcggcgacgaagcatagtcccaacactcggggaggagaaaggagctcccacgctccgcttttatagaagagacggagaatatgataggtcgcgcccaccatggcttcaatgctgccattgatggctgtcatcacatggggagaggtaattgggggaaggaagcacacgcactgaatcaccattacacgcgatggatgaaaccgacg

SEQ ID NO: 61532 - DNA, 418 bp, Zea mays
  unsure (1)..(418): unsure at all n locations
gctctctcttggaagttcaccgaatttagtatttatcgatcgcgagaaacaaccaatgttggagcatgttaaaacttttaattctcggaactaatgcagactcgaagatcattctcgaattataaatctcatctgaagctctttaaatcaaactctcgatgactgttatctgatctgagccgaatctaattcctcgaaacttcgatctatgttcgactcatttattcgagtccgtactctcaaacggaatactcaatatgtcgtcctctaatcaattntatccgactcggctaaatatctcatgttcgaaccgaattcaaaaccccgtatcgacagcaattttaaaatatcacgagtcgccttctccgactaaaaatccacagccgatcaaatctcaagacagtttattttcgaatca

SEQ ID NO: 61533 - DNA, 346 bp, Zea mays
  unsure (1)..(346): unsure at all n locations
agctttactcaacagcatactctgcatacatactaccttcgntagagaacatcttcattgttaaaaacaatataagttaaagaaaagttgtttaccttgaaattagaatagaataaaccaccgacgatgtgctgtcgtcggtagcggctaatgtccgtctcgagcttcgggaaaccaatactctttgatagagtaccaacaacctttgctccggtatgatcccagacacaacccaacttttcgtcatcgacgccaccaaagagaagtgccctcggctgatatccacaagatatgtcatattcttttagctcttatttntcagccttcgtcaactcctgtatagcta

SEQ ID NO: 61534 - DNA, 402 bp, Zea mays
  unsure (1)..(402): unsure at all n locations
gcttttgctanatcagcataatgtcttatctcanaatcatacttttctcgcaagtcactaattagcttctggtttgcttccaaagaagcattcattcgttctatntgatcagccattgccttcataaagaatgtttgaagaaaacgagtcatttcaatggtgaaaaaaatgaatccccttcaagttgactaacattgaaacagcatgccatgtcaaactctacctttcgctcattntcctcctgctgatatctgtctttaagaatgtacactccaactttctctcgagcagcgtatacctctggaaagtaatcaagtnttgtgaggggggaggggacggcggactacaactattgtgtcccattctgatgagatgaaccattatgtggttcactactaacct

SEQ ID NO: 61535 - DNA, 463 bp, Zea mays
gctttcacgagcgtgctggcgtcgtccgcttgctcaagaatggcgtgtcgcggagagtcagcgctcgtcttcgtctcaagcgcgaaatctatacccggcgcgccccccgttggggtgccagcgctgtcgactcgctcgacagtcgacaaggcgctgcctcctgcttggccttggttgccctgccttcccctccgtcggcggagaagaaggcgggatgagctcgaaagttgttcttccaccgcgcggagaagatgtcgtcgattccgccgccggcgggcgggctgtcagccgccattgtcgttgtcgcgcggcggtggaaagagtatcatgtcgtatctgccgtcgagggacatgaactcaagactcccgaaacggagcatcgtcccgggttggagaggtgctggagactgtcatctggagcttgacgggaaagctgtcgtcaacacgcagcaggcccctacct

SEQ ID NO: 61536 - DNA, 275 bp, Zea mays
ttatatcggcagcggagctgctcgatccaaatactgtcacacctaactgcaaaaactagtaatctgttttgagaccttcgaagccaaagccccaacacccggatagggttgagaacaacaaaagggctgcattgccgccagagccgtctacttcatacgaagtctgtcgaaccaagaccgctaccacaagttataactgcttctcggagatcctgagcgcggaactgcacactacttcgagctcatcggaactgtgggcatcttcccctggggaa

SEQ ID NO: 61537 - DNA, 469 bp, Zea mays
gatcttaagcactgagctgcactttaaggaaacaggaattcttctcttgttcattccgaaaagatagaccttgtgcagcttgtcaagcaaggaaacaagtaggaggctctcattacaccaaagatgtgatgacatcatcaagacccctggagctgctacatatggacctcttcggacccgtcgtctatcttgagcataagacgtgttggggacttgttctcaaatgctatgagttaagaacacggcatcacagacaatgttaatttataatgtccctcgtccgtcggaacattatttcccttatgatataatcgacttttgaacgaacgttatgaaagacataccttcataaacatagcacacgatgatgaagaatggattatcaggaatataaatgattacatagacaattatatattattattgtgacgaaacagacataactattgaatacaaatgtaccttccgc

SEQ ID NO: 61538 - DNA, 465 bp, Zea mays
  unsure (1)..(465): unsure at all n locations
gcttagagcatgcattgatattcgcaatttgtttatagcaactcctaaagacgaatatcccatgcccatagccgacacattgatcaataatgtgtcaggaaatagaattattagcttccttgatggtaatgccggatataatcagattttcatggccgaggaagatacgtctaaaacgacctttatatgtctaggctctattggtttattcaagtgggttgttatgacatttggtctaaagaatgttggtgctacttattaaagggctataaatttgatctttcacgagctgttaggaaacactgtggaagtctaaattgatgaaattgtagtcaaattggctgagtctagctctcatatagctgattcacgcacagcctttgataaaatgcgtcagtatggcctgaanatgaacccgcgtaaatgtgtntttggagtgtcggctggctaagttttatgattcat

SEQ ID NO: 61539 - DNA, 442 bp, Zea mays
  unsure (1)..(442): unsure at all n locations
agcttcancatagaatggcagcaaattgttctagatcgccaaactttgcaacatagtaatagaagtgaatcaacacagtcagcatacagtagcacagaattgatgctagtttaatcttggttactttcaaatgaaccatgtatactttgcacgatagagcattggtcttttagactgaagaatattgtttcaaataaattcaactagttcacaatttgacacagacaactcaactcataaatctcaacaaccctaatcctgttgagagggagaagggagcgcgagaagaagatcatgattagcaaaataagaattatgtgcaggaaagctctgccttatattttggaggaaccaanattcttaatagcagatggcgagtcaatctcttaattacacaatgaatgtctcgtgagaacagtaatagaacattgctagacagagt

SEQ ID NO: 61540 - DNA, 412 bp, Zea mays
agcttcacgggctacaggcggagctagcctatgcactggctgggcttgaaggtggctggagtgggctggccactgcggccgaagctctggcggcaatggcgggcggaattgagctcgccggagctaatggaaagtggctggccggtgagggtgagtgccgtgcgaaaagaggtgcgcccggcgaggctttataagcgcgggcgagcactgccgaaggcgtgggcgcgcggcggacttgaccggacgccggggtgagcgcgcgcgcgggctgggcgagctctggcgtgccgaccagagtcgaacacgtgtgcccgtgcgttctgcccaagttctggcgcgtgtggtcgctcatccgagcctgctctcgccttggtcagagcacgaaacctcttctcctctctacaagctacca

SEQ ID NO: 61541 - DNA, 474 bp, Zea mays
  unsure (1)..(474): unsure at all n locations
aagtcacctgaagatgaagcttataaatggacgtgaaagtgccttcctaatagaccaatcaaagaagaggtctatgttgagcaacctcccggctttgaagatagtgagtaccctaatcatgtctataaactctctaaggcgctttatgggctcaagcaagccccaagagcatggtatgaatgccttaaggatttccttatcactaatggattcaaagtcggaaaggccgatcctactctattcactaaaactcttgaaaataacttgtgtgtatgccacaattatgttgatgatattatatntgggtctactaacgagtctacatgtgaagaattagtacgatcatgacacacaagtttgagatgtctatgatgggggagttgaagtatctcttatgatttcaagtgaagcaactccaagaaggcaccttcctaagccaaacgaaatacactcaagacattctaagcaagtttg

SEQ ID NO: 61542 - DNA, 395 bp, Zea mays
agcttaaaagagatgtggacctatctttccttgatagagtcatcgaggatggcccttgcgcagaacatggagacccatatatcatgtgcaggaagtatgcgatttgcctatgaacaacagcttcagaagagtttgtgttgtgtcaagaaaacatacgggaagttcaagacacttggtggtggaacgaacatgtcctaaatgctatccaggagaagaaagatttgctcaaacgcttacatcatgacaagtgtgccgaaaacatatagaagtacatgatagcgaagaagtctgcatagcgagcggttagtacaccccattgtcaagcctatgacgacctttatcaactgttggacacaaagcagggagaaaaggctatctataggatggccaacatt

SEQ ID NO: 61543 - DNA, 380 bp, Zea mays
  unsure (1)..(380): unsure at all n locations
agcttgggaaaggtcttcatgtcgcacatgtgcttaattggtctatgccacatgcccagcccatagcagagtcttatctcattanagcatagctatctaagactaggccttcttcatattgcaataatcgactaacgtaaagcgtagtcgtctactacacccttaaaagctagtgaaccatcacatcttctaaagacagacacatctacatttgtaaacaaacagttatatcccatattgcataagtgactaacagatagcaaattatatccaagactctccactaaaaacacattagagatagaatgctcattggagattgcaattntacctagctcctttacctagccgggattaccatcaccgaatattattgaatc

SEQ ID NO: 61544 - DNA, 316 bp, Zea mays
cccccccactagccgtatatcccccctccccccccccagatggtgatgtctctgacgcacctaagcacgcgcgcactaccaccgaagaaggatttttgtgtgaggtaccaactcgctaggtgtatcaatgctcctgatattacatggtgcataatggacaggcttccgtgcataacaatcgcattatgtgtcatctgaaaaacacgctgggatatgatcatgggtaatgggcttacatgcttaattgtatctattaaatacatctatgggaaagggaggtgaaactgtcataccctattgacgggtaacttatatg

SEQ ID NO: 61545 - DNA, 459 bp, Zea mays
  unsure (1)..(459): unsure at all n locations
agctttatcaaatggacgtgaaaagagcctttctcaatggtccaatcaaggaagaggtctatgtcgagcaacctcccggctttgaagacagtgagtaccctaaccatgtctataagctctctaaagcgctttatgggctcaagcacgccccatgagcatggtatgaatgccttagagatttccttattgcaaatggtcttatagtcggaaaggccgatcctacactctttactaaaacactagaaaatgatttgtttgcatgccaaatctatgttgatgatattatatttgggtctactaacgaatctacatgtgaagagtttagtacgatcatgacacagaagttcgagatgtctatgatgggggagttgaagtacttcttgagatntcaagtgaagcaactccaagagggcaccttcattagccaaatgaagtatactcaagacattctaaacaagt

SEQ ID NO: 61546 - DNA, 452 bp, Zea mays
gtcacctgccgcatgcaagcttgtcaatggtgaagaacccacaacgtttttggcacatataaaaatacagttggtaaatgaattataggattggttcacattcacataggatatgtcaatctctacttatctcgatgaagaaggcagtctagaagatcacgaaggaaaggtataaacaccaaacaaactttactcgcaaattctgttggaacatgtttaaataactcttatttaaacaaggcatatgtatgttcataacaacgtataggtacctaacttactactatgaagaaggtaaggggtaggctgaccctctctggttctgcctttcatatctccgacaaatggactcgacactgttggcaaaaccatccacgcctggcctcctctggctcttctccgtctcttgctccaatcgcgcggcgctctgcatgccacgagctccagccaca

SEQ ID NO: 61547 - DNA, 343 bp, Zea mays
  unsure (1)..(343): unsure at all n locations
agcttgagagagacttgctgatatcttttattccgnncgctgntgattgcctacgtactccgggatatacagagagtagcaccaaccactatgcaggacctgcctcggctgactctgatgtgcctcggcttcatcaatttccttttgctattggatcgtgacttagcacatcctcgttgagtgtcccttgtcctcaccatataacatgcagaacaactttctaggctaattatcggatctctcttcactaaagcttctccatcctctgctcttgtgactggtaggtctgtatgaagtctgtctcatgccggaagactgtgacttgtgctgactgctctgagca

SEQ ID NO: 61548 - DNA, 329 bp, Zea mays
  unsure (1)..(329): unsure at all n locations
tatatggcgagctaatgctatacagaattgatgggaataatgaaagtcgattaacagccttaagggaaatagagaaggaaaagctgagagtatcgaaagcttataattaaagggcgaaagagaaatcgtttcataatggagaattggtatggaaaacgattntacccgtgggatttaaaaataataaattcgacaaatggttgccgaattgagaaggaccattcacagttgtatgtattatgcacgggaatgcatatttcgttgaggatttgcaaggaaagaaattacccacagccctcaacggtacagtatttgaaaagtactatcct

SEQ ID NO: 61549 - DNA, 423 bp, Zea mays
agcttcctccagcattatagagcctctcaagtattcttaagaaacaaagagcccactaggagtgatgaagcttgtcttttgctcatcctccttcttcatccaaacttaattataacccgagtagcagtccagctaactcataagttttgaagaagctgttgcatctacaaaggaatctattcttggtagagggaattcatccttctgacatgccttgctgagatctgtgaaatcaatgcacattctccattgttcattagcttatttcaccatgacagtcgtggccagccactctgggtatgttactctcttgataacaccggcacttagaagtctctctacttaatttcgtgcaccttcagctttatcatcagacattctctgaagcctctgctctcttggtctgaaggatgggccacattg

SEQ ID NO: 61550 - DNA, 346 bp, Zea mays
  unsure (1)..(346): unsure at all n locations
acaacccaccagatgtccgatggctcagatctatgggtcgtcaaccatgggaagggccttgcagcgtgaccgtgaaaaacggatggggcctatcgaatatggcaagggaggaaatggtggagggctatccactggtgggggagaaaaagagaataaacacctacctggatatcatttggaanaactgaaacctaacactaactaaggttggtgataaattaataatagaattatggtgggcaacgcccaatacaacatgggtctatacataactcttaacagaactcacacaatacaatttaacatgttcaattttctttagacatgttaaagatacctacagtga

SEQ ID NO: 61551 - DNA, 458 bp, Zea mays
agcttacaggctactggcggagctagcctaatcactggttgggctggaggagggctggagtgggctggccacagcggccgtagctctatcggcaaaggcgggcgataatgagcttgccggagctaaagaacggtggctggccggtgagggtgagtgcggtgcgaatagaggtgcgctcggtgaggctttataagcgcgggcgggcactgtcgaaggcgtgggcgcgcggcggacttgatcggacgccggggcgagcgcgcgcgggttgggcgagctctggcgtgccgaccatggtcgaacacgtgtgcccgtgcgttctgcccaagctctggcgcgtgtggtcgctcatccgagcctgctctcaccttggtcagtgcacaaaacctcttctcctccctacaagctaccattcttgtgtggaggtcataagaatttgcctactggttgcgagatatgga

SEQ ID NO: 61552 - DNA, 404 bp, Zea mays
agcatacataaagaggcgtagatatatcttatcctgaaaatctctaagagcaccttggctagagctataaagaaaataatgcacatgattcacggggatgaagcaaaccaactcaaccaactgtgggactatggacatgagtttagcacaagtaatacagggagctccctttatgtaaatctggctggagaccttcttagctcttgctatatgcccctatatgcatgcaagaggggttttctaagtggatgcaaacctatcatttgttagataggtgtttattaagacaagatttggatgccactgttgagtgcagggcgatgacccaaatgactgattaccccttagtgtactattagtgagttgaacacttggcacctgaataggtttgcaacactgaagat

SEQ ID NO: 61553 - DNA, 404 bp, Zea mays
  unsure (1)..(404): unsure at all n locations
agcttaatagggggaanaattctcactgacatattgtatattggcggncgaggaatggcccgtgaaataataaagaaaaacaacaaagatattcatgacactcgagagtcaataaaagcagctgaaaaggctgcggagcttgagagaccaataggtattatttaatggtttttaactttgttgcttatttttgtgacttcgaactgatttacgttttctaccgcagctgaactatctcctcccccagagcccttctagtcagtggccgacccagaagcaaaggaatcaacagaaattattaacatggccggaactattgtagacgaagtcgttacccaactgctgatcgaagctgcagatcaagttttgaaagaagaatagctattgtaaaaacattgctagaa

SEQ ID NO: 61554 - DNA, 395 bp, Zea mays
agcttgataatgtattctgtatgaacctcttatatagtgttcaattcattgaactatcttcgagcctagtcatagaactatcttcgagtactattgggaagtggatctctttgatgaatttgtcttccctagagatatcgatggtgccgagtagcaccatatttggacttgtgtccatatctatagatgctagtagctgagcactagcgcttacaatcttgactacctcatgcctattctatgtttgggacttatggagaatggctccagatgaatgcctgaatctggccgggaagcacggagcagatataatgcactttccaatgcacttaaacacaaaaggcatggctgtcatgttattatgctgaacgaccccacgaatatattatgggcta

SEQ ID NO: 61555 - DNA, 419 bp, Zea mays
tgcgtgcatgcaagcttgtggtgcccttccgcgtatggtcacaatcttattttccatgtctaccatctggaagattcgggattccgacacttcctgcatggtagcgttacaaagactgctgattccgtcgccacagttattatgtcacgttccgatcttcttttagctgtccaatgagacttctctggtggtctggtatgctttggacgtagaacccctatgtcctcggggaaccgaattctaagtttgtgggtaagatggcctcggccccataatactacaaagaacggcgagaaacccgtggctcagattggcgagcgtctcagaatttagacctaagagggtatctcttttatctcacgcttgccacacttgttgaggtcattgtatattcttaatctaagtctcctgcgaatcat

SEQ ID NO: 61556 - DNA, 380 bp, Zea mays
  unsure (1)..(380): unsure at all n locations
agcttatcagttaagttcaagttaacatagttattctcccatgcatgtatacaangatgatggcttgctgtacagtctgattgcttgggggttccttcttcagcgctcagagtctaatgaacgatatgaactgcttagtctgttctgttttgcttttgaaaactcaattatcttgcccttttatctgggattgtgcggtgaactggcgattgcgcattaaaatattgaggatgggattttacaatttgctacagctcagttgattctataatggatggttatttactgagagtttgtatgaaaagctaatatcgctccattattttacctaatgccctgtaaccgattgacatcacagattggcataagcgcattgtttg

SEQ ID NO: 61557 - DNA, 347 bp, Zea mays
tagcttctgctgctatccacggcgaatgtgtctatttttccgaccagggccgcgcgggtacacactcatagagcgcaggagcggagctcgtggctgggtcatcggtccggctcatgagcagcatgatgaccaccagaaacgccacgaacgccgtggtgttgaagtataataaccctatgaagcggcccggtagcattgggtccccggcgatggcgaggtggtcgccgtcgttctggctgttggacaggaacactgccggtgtgctcaggtctggcttgatacgtcaccgtctgcgacgagggttgcgatgatgagcaggtacttgcgctagcgctcctcaggcccat

SEQ ID NO: 61558 - DNA, 398 bp, Zea mays
  unsure (1)..(398): unsure at all n locations
agctntactccacagcatactctatgcacaaactacgttcgttagaaaacatctttgtggctaaagataattaaaactgaagaaaagcgttttaccttgaaattataatagaataagctaccgacaatatgttgtcgtctgtagcagcttatgtaggtctcaagctttgggaaaccaatactctttgatagagtaccgataaccttcgctccggtttgatctcggacgcaacctaactcttcatcgtcaacgcctccgaagagtagtgcccccggttgatatccgcaagatatggcatattcttttaattcttctgtcttagccttcgtcaactcttgtccaactaagntttgaaagtagaaaatttcctcttccgagcatctttcgaagctattttc

SEQ ID NO: 61559 - DNA, 287 bp, Zea mays
agcctcagtattacagcataagccgatatgaatgtttttactgacttaaagatagaatgaccttttagtccatacaggcctgaatcattgcatgaaaccttcatgaagggcatgatttgtaaatcttacaagcctggttctgtgcctataacaaatgaacacgattcctttactgtacacgcaatcctgttattgctaacgccatactcgggaaatattgattggcaaggcacaagcataaatgtacctacacgtagtatacaatatcttatactcatataataaga

SEQ ID NO: 61560 - DNA, 333 bp, Zea mays
  unsure (1)..(333): unsure at all n locations
agcttgcttttgaaataaaaagaaagtttatgtttttctctcccgcattctttcatctccgatggtctgtaatgtctacaagatgggtgacacgctcctggtaaggtacggatagataccgaacttggtcaagtagctcacgggcacctacacggttggctgatgcccgttggacaacgacaactgttggtgggccttattatctgggaaggtctgtcacagctggatcggaacgtantcctctttgcagatcttatgaagcctctccaaagaaatttcaaagtcttaccaaaaattctttcttcccttacctagaattctgagaagctatct

SEQ ID NO: 61561 - DNA, 399 bp, Zea mays
agcttatagccacaaaaactctgtttttgttatcacaataaatgccaagtggctagaaaggagtctcaacaaaacacaattccacaagagatcaatcacagagatgacacagtggtttatcccgtggttcggccaagaccaacgcttgcctactccacgttgtggcgtcccaacagacgagggttgcaatcaacccctctcaagcggtccaaagactcacttgaataccacggggtttttgcttgctttttctcaatcccgttcgcgaggaatctccacaacttggagcctctcgcccttacaattgaagttcacaaagaacacagagcaaagggggaatgagcaacgcacacaagacttcttaagatcagagcaacaacacgcacacaagtcgcaaca

SEQ ID NO: 61562 - DNA, 405 bp, Zea mays
agctatgaagattcttcatcccaacgagggctatttctactatgccaaagcccacccatgttagtcttagcaattaagcaagtgtcgagttcagctctattaaaatcaactaagtatagcttgaccctctaacactcccttaaatgctactgaatcatcacttattctaaggacagtaacacctatatccgaaaaagacagttgtaacccattttgcataattgagaaacagaaagcaaattgtaatctaaagaatctacaagaaaaacattggaaatagaatggctaggtgatatagcaattttatcaagtcctttgacccaaccttgatttccatccccgaatgtgatagctctttggggatcatggtttttctcgtaagaggagaacatcattttctcccct

SEQ ID NO: 61563 - DNA, 407 bp, Zea mays
  unsure (1)..(407): unsure at all n locations
agctngctataggccttcttctttttctccatagcatgaaccttactggaacactacccacttaaaaagaatgagggtagaactcttgaatcttggggatttgaactccttgaagtacctcataacaagggtgttacagggccttcttctgttgttgctgcttgaccaggctgcagagagatgactatcacagggttgattctgggagaaccttcttcttatcttctcttcactatcttcttttcactgaccctttctttctctttgctcttcccactggaggattctatcaaagagtattaccatcatacagaggaggaaaccgaagatgttgaaccatgtacaacagtcttcaacccaagaatcaccaagcattgtgatcttatgggcgagggagtgggaaatgg

SEQ ID NO: 61564 - DNA, 402 bp, Zea mays
agcttggtgcccaatgcactatagagactctctttaaatttggatacaaatttggagtctcgatcagaaacaatagacttatgtaccccgtgaagcctgactacttccttcatatacaaaggaaccaaatctgaagctgaatttgtggtcttcatgggaataaaatgcgcagacttaatcaagcgatccactaccacccaaatagcattcctgccacgaggggaacgaggtagacccaccacaaaatccatggtgatatgctctcatttccactctggaatttctaatggcttcagcaaacctgcaggccgcttatgctcggccttcacgcgctgacatacttcacaagcggccacatacttagaaacgtcaaccttcatccgcttccaccagaagttttgc

SEQ ID NO: 61565 - DNA, 388 bp, Zea mays
agcttgaacccggctattccaaacatgaaaagtattttgtgcactgggagtggagagtaggcgagagtggtccgttccctcctggcaaaggaccgcctataacgggtggtgtgctctcgggtggcgcggacctgttcatgtggtggaggatccatgaaaatggtagacatgtgcacaagagttaatagaaacatatgtcgggtggttggagatccacagctgggtattaatcgattccgatcgccgaacttctcggatatgaagactggatcttcgaccctcatcgtagataacaagcgaaacaaaagttggattttaaaagaaagctagagtaggacaagagaatgctctatattacgcaaatctatatttaggaaaagtacttatt

SEQ ID NO: 61566 - DNA, 336 bp, Zea mays
agcttctcatgtggggacttaatgggatttctgaatttcagaattctgaaattcagaccttgagccaaagatcagggatgttcaccttgatccctaactcgaatcctaatggccccattgacaaaattgtgtctaactaacccctctgtcatgtgccacaaaatggcattgggacgcgagccctatacacgacaaaaccttggattttgcctcggtttgggcagggagacagaccggaattcctggctccatatctcttgcaccagtaagccaaattctatgacccccacaccaaaatggtagcttgtatggaggagaagaagtttcgtgcactga

SEQ ID NO: 61567 - DNA, 400 bp, Zea mays
  unsure (1)..(400): unsure at all n locations
nagctagtgaaggttcttcatccccacatttgtctttcggcgatgccacagccagcccatgctaatcttagctattaagcatgcatttaaaccggcctcttcttttgaaaatcaactaaataaagtgtgccatctaatacacccttaaaagctagtgaaccatcacttcttctaaagacagacacatctacatttgtaaatagacaggtataccccatatgacataattgactaacagatagcaaattatatccaagactctctactaaaaatacattagagatagaatgctcattanaaatcgcaattttacctaacccttttaccttgccttgattcccatcaccgaatataattgaatcttgggaatccttattcttgacgtaggaggtgaacatct

SEQ ID NO: 61568 - DNA, 401 bp, Zea mays
agcttgtgattactgttagataccaacttatattatttttatgacagaacccacccctagttaagagttgtattgcaaagtgaccccctttgcccaacttttgttatttttgtccaaggcatactctttttattctggacctcaaattcatagaacagactatagtgaccaatagtaacccactgtaattcttacaatttttttggaaaaagttaaaccactgttgtagttcaaacccacactagaattcataaatagaaaataaagaacgggaaaattaatggtggaaattagtgtcaccctatcccaaccagcaaaacctctttaaattgcccactgaaatatataagggaaatacaaatccactatgcttattttaacacaacccaaacctagagtga

SEQ ID NO: 61569 - DNA, 396 bp, Zea mays
  unsure (1)..(396): unsure at all n locations
agcttaaacanaaatcccctctgatctatttgctattacagcggcgcggtggcgcttcgtggccagccttgtggggacggatgaccccacctgtccgtctggctctagccatgatgaatctacaaatcacgacgaggcgtgttttgagtacggtatctctactaactattaagagcagaatgtagactgcccccgccacgattcctctcccgcccgcggatcacgcgcacgaccgaaccccccgccgcgatccccctctcgcccgcggcgaataccccgccaaccggcctccctcctcgtgcgcatcgccgccagcagccgcatgcgcgcgaatttattgccaccaccacccgctacgcccgctctcaacaaccttcgtcttcatcgcccaagaac

SEQ ID NO: 61570 - DNA, 400 bp, Zea mays
  unsure (1)..(400): unsure at all n locations
agcttancaaaagaaatttgtagaatcactaatattgatctcatgcctaagnctggcgaaagattgttcatcaagtggcttggtaaagatatcggctcattgatctttactattaatggaagaaaactcgatatcccccttttgttggcgatccctaagaaaatgataccgaatggctatgtgcttagtgcggctatgctcgacgggattgtcggccatcttaattgcactctcattatcacatagcaaagggactttggttaatctgtaaccgtaatcccgcagggtttgcctcatccaaagcaattgcgcgcaacaatgtcctgcggcaatgtactccgcttccgcggtggaaagagcgaccgaattttgcttctttgaagcccaagacaccaaagat

SEQ ID NO: 61571 - DNA, 327 bp, Zea mays
agcttgttaagatctgtaaaatcgatgctctttctctcacttgccttggccctttttaccataacaaggttagccaaccattctgggtacctcacttttatgaaaactcctgcgctgaagaagtctttgactttcatgcgagcacccttcgccctatcatctgacattttcgaagccttgctttcttgggcttgaagatggatcgacattgagtgagtgctcgataacatctctattaacctcgcaaaatcattggctgaccatgccaaaacattcttgttatcgaacaaaaaccttatcagggcttctcctgcccttcggaaactg

SEQ ID NO: 61572 - DNA, 385 bp, Zea mays
agcttcgtcatctgaaaggaatttactctgtttgtaagagatgatctcagttctccaatcttcactaaaaacaggagatatgttaaggactgctctttcaagaagttccaccgaaggcgcttttattgtttcgaagaacacatccgaaggtagaggcagcccctgtgctgctgacttacctaacaaatcagcatgctcattttgtcctcgagggatatttttgacagaaaacccttcgaaggaagcttcgactcttcgaaccatatccagatattcttcaagcttcggatccttagccttgcaactcttgtcaatatgacccgaaacaacctgggaatcagttttaagtatggcccttctgattaccattgcttataacttccga

SEQ ID NO: 61573 - DNA, 406 bp, Zea mays
  unsure (1)..(406): unsure at all n locations
agcttgcagttatgccagagccggacgcatgtctccgtcttcttgctgcaaagagtanggcaggcccatgtgtgttacccagtgaggcggttgtgctcccttctttatcagctcaggcgtcaaaatttctagaaagaaccgtangagccttgccaagttgacagcatgtgtggctaccacatatttttcctccaccttcattcatcgattcttcaccaccccattccactgggggaaacaatgacacgaatctccctggataactgttgtaaacctcgagtacaacagatgtaaccctcaattacaacctagcattcgcccaaaagggacgctgggacagaccaacggctcaagcgtgcgcggctagcagtacacacgtagtaaacggcacgacaggtcggagggg

SEQ ID NO: 61574 - DNA, 405 bp, Zea mays
  unsure (1)..(405): unsure at all n locations
agctntacctgtagtccggactataagatggttactgtatgtgtactttatgcagtttgaccatttccagcatttgcgtaatgaggactctagggagaagcctcgtagtgagaccctggtcattcaccttggaagtgaatacgggtctagctaacccgggctagaagggaatcgcgactcatgggtaaagatgtgccacctctgcagagtgtaaaactgatatatcagccgtgctcacggttaagagcagcctggactcctcacatgataattgaacttgaagatggaaataaatcgagatccaatgatctgctaatggttttgcttaagtggctacacttaagtgtttttgatatactcttgtacctttgtttcatgggaatacttgggattctggtgggtcta

SEQ ID NO: 61575 - DNA, 410 bp, Zea mays
  unsure (1)..(410): unsure at all n locations
gatcttaagncaccgcggctgcagctaacgtattgatnatcaagtagacgcctcttagcttactgatatgacattaactatctcgcaattgtaatccatattaagcattcgcttcccctgacgaagacatttatcaaagtctttattcctcacaactcaaacacatcctttaagatatgtgttacattgctcatccggaataatgagggcggatgaggctagggagctacacctttcattctatcatacaccacaatgtatacataattatgcaaagcaaataacttgtccttccataggacttaagagatattatagatgcaatagtacatattctatatgactcatcgctccaggcgttcattcattacaacatctatgatggcgtaacatacgtccatcaaagatcg

SEQ ID NO: 61576 - DNA, 403 bp, Zea mays
agcttatgatgagcgtcagcggaagctgttgttttctttttctatcccacacactaaggtggtcatatgaaggggctgtgccgtatagggcgaagtgaggggtatggtgggtcaccgccttcgatggaagactggtgaagatgtgggtggctgcgtacaaggcctcttccctgttgctggctgggagagacgcctggaattgaagacagctaaccatattggtggtggtgcggaatatgcgttcggccctgacgttcttgacatatgcgtacgggcacgaaatacgcacctggacgccatgagtgacgaagaaagacccgtaggtgttgttgtctaactcgcgaccattgtcacactgcagaccacggactgtccgacgaaactgtgtggatacccattcgat

SEQ ID NO: 61577 - DNA, 397 bp, Zea mays
  unsure (1)..(397): unsure at all n locations
agctntatcaaatggacgtgaagagtgccttcctcaatggtccaatcaaagaagaagtctatgttgagcaacctcctggctttgaagatagtgagtaccctaaccatgtctataaactctctaaggcgctttatgggctcaagcaagccccaagaggatggtatgaatgccttagagattttcttatcactaatggattcaaagtcgaaaaagccgatcctacactctttactaaaactcttgaaaatgacttgtttgtatgccaaatttatgttgatgatattatattttggtctactaacgagtctacatgtgaagaatttagtaggatcatgacacaaaaaattcgagatgtctatgatggcgggagtgaagtacttcttataatttcaagtga

SEQ ID NO: 61578 - DNA, 403 bp, Zea mays
agcttgagtcattgttggcatgagaataatgtttcactatggcacaaccacgcagaagagtttggaaaaatccatgaaagaacactacaatatatactttcataagcacaaagcaaaacatgtaatgggaggaattcatacgtaccaagtgttctattgtactactgagcagcaacatcgctgacacactatgaaacaatatcaaggaagtaccaaacacaatcgtgcacatcaaagatggaatgcacgataattaagctttaactaacttcagttagattccactcgatacaaatgaggtaacaattctagaaaattcagataggttgcatccggattatctcagttccacactcgtattaacccgtggtgaggaggacaaatacgtgttctgaggacacac

SEQ ID NO: 61579 - DNA, 399 bp, Zea mays
agcttgagacgggaacaaccgcggcatgcattttttttttgaagaaaatgtcaaggattctaggattgccatgaggacaaaacatacgatgaatttcaacacctcctacaaaagcctcaaccacgccttcacaaaaggtaacatccaaggtaatgatcaagccacacttcatattaagaggtgtagtgaatgctctgtaaatgggcacttgattaggtcatgtccctacattaaaaatggcttgattattaacaaggatgatagactttgctttatatgctccaagaaaggacacttacttagatcttgtccccatttaaaacaaaaaggcatacaggtagaaaagaaagttcttactaaccatgtagccagagacaaacaaggaaagaaggaagcttc

SEQ ID NO: 61580 - DNA, 396 bp, Zea mays
agcttgtggcgccctcgggcgtcttgtttgattctaagtaccaggtctctcacctagaagcctcggggcagaacccttctggcgtggtagcgtcgtagagactgctgataccgcgccgagtgtaataaggccacgtcccgaacctcttccagctagtccaatgaatcttcttggctggtctggttgcttcggtcgtcgtacgcctttgtcctcggggaaccgtattctaagtccggtggtaagatagcctcagccccatagactagaaagaacggcgagaaacccgtggaccggctcggcgtcgtcctcagactccagaccaccgagggtagctcttttatccatcacttgccaaacttgttgaggtcattgtagatcctcggttttagtccctgc

SEQ ID NO: 61581 - DNA, 398 bp, Zea mays
tagctcgcacacatagctctttagaatacctttgatcatatcccttttatatgctatgactaatgtgttttcaagtttgtttcacaccaagtcatacgtatattgaaagggaattggagtcttccgcgaaaacaaaggcttccactccgtaactcatacttcgccaccactccgagcaactctctcttctttgggggagaaatgagcatcaaagaaaaggacttcatccttgggggagagagaaaaagctcaaacgcaaaaggacttcgtctttggtataatcttaactcacttatttatgaccaaaggggaagattgcacttcgacggctctaatgattcccgttttggcgattcatgccaaaaagggggagaaatgagcccaaagcaaaaggaccg

SEQ ID NO: 61582 - DNA, 380 bp, Zea mays
  unsure (1)..(380): unsure at all n locations
agctntttcttccatcataaacaggccgtcgttcgtccaagtgttgcttgtacaagttaacgagctcctttatgatccatctatttcttgcccttgaggtcgattccggtttgattgtcacctgcgaaacaaaaacatatgatatttgtggttcctttcttgaaacatgtaggggtttgttggattactatttgcaaggcgccgaagcctagaatagcacacaaagacacagataggggccatgcgtacgtacatcgtagtggtagatatccttgtccccgagcttgacttctacatgggtggggcgcacttggcaccttcgcccgacagttccgtaccccggccgaggggggaacaccatcgccttgcctcaaactgga

SEQ ID NO: 61583 - DNA, 394 bp, Zea mays
  unsure (1)..(394): unsure at all n locations
agctntgcaacttgcttcaaaccaactaattatcaaagatttctctagatgatatccatacttgtgaatcagaaaacaaacagaaccactcctgtgggagaaaagaagtgtaaagagaagctaatagcgtgtgcataaaatggaaaagttgtgaactctcactacttctgcaccaaaaatgttattgatagtaagttctactagataaaaatcaatgtaacagtaaggttatcaattgtggggtcatcaaatcaaaataatagaacaaatggagcaagagacagcagtttgatgcaagggtgtttatgggatgatgaaagatgccccaaatactgaatatcaggctcccaacatgtattaaagtataatagcgcccaagatttaactcaggggg

SEQ ID NO: 61584 - DNA, 387 bp, Zea mays
agctttatatgggcgacggtgtcgaactccgttttattgggctgaacccggagaaaggcacttctttaagcctgatatattgaacgaggccgacgaaaacgttcaaaaattattcttaatatgaacaaagcacacgctcgtcaaaaaggttatgcagacaaaccgcgaatgcccttgtattttcatgaaggggactatgtctacctgaagggttcaccaatgaagggggtatcgtgtttctgggataaagggaagcttgcacccacgtacattggtccattcccggttcttgagcaatgtggaccagtggcgtatctactgcagcttcccgaaatattgtctgctatacataaagtgttccatgtggcgcaattgaagaagtgtctt

SEQ ID NO: 61585 - DNA, 405 bp, Zea mays
  unsure (1)..(405): unsure at all n locations
agcttctaagggagagcacattntaggactaacaaatgttcattttgagaaagacaggatttgtagcgcatgccaagcaagaaagcaagttgggtcccaacatccacataagaacatcatgacgaccgacaggccacttgagctactccacatggatctattcggcccgattgcttacataagcatcggcgggagtaagtattgtcttgtaatagtggatgattattctcgcttcacttgggtgttctttttgcaggaaaaatcccatacccaagagaccttaaagggattcttgagacgggctcaaaatgagttcggcttaaggatcaagaaaattagaagcgacaacgggacggagttcaagaactcacaaaaagaaggcttccttgaggaggagggcatcaa

SEQ ID NO: 61586 - DNA, 406 bp, Zea mays
  unsure (1)..(406): unsure at all n locations
agcttcgtcatctgaaaagaaatcgccctggtattatatatatgatctcagttctccaatcttcgctataaacaggagatatattgagcactgctctttcaagaaagtcaactgaaggtgcttttattgtttcaaagagaacttccgaaggtaatggcagcccctgtgccgctgacttggctagtaaatcagcgtgttcattttctcctcgtggaatattcttggcagaaaacccttcgaaggaggcttcaagtcttcgaactgtatccaaatatttttcaagcttcggatctcttgctttgcaacttttgtcaacatggccagaaataacttgggaattagntntgaggaccgcccttcttatccccattgctttcaacttccgaagacccaaaagcaaagcttc

SEQ ID NO: 61587 - DNA, 399 bp, Zea mays
  unsure (1)..(399): unsure at all n locations
agcttatgcttctttgctgatccactcaattgtgtcttctgtgtcgcctactacaaaggtatcttcacttgaatatgcgccaacattggcgaagctagtttttatcttttccacacattctatagattttgcaaaacatttttcttttgatgcgcaaagatctgcaactgttttttcccagcaatttttccagtgttcactggcatctcggtaagcttcggccacaacgcattttaattatgcttcagccagctgtttccgaaggtcttcaatttcacatttctaggcttcagcttgggctttggaagtagcttcatcttttcttattttgcccaccaatgaatttaatatcttatcttntttaagaccttcgtttcttagttcaattacttcggaacg

SEQ ID NO: 61588 - DNA, 399 bp, Zea mays
agcttcttcaccatgtgatcaccgttatcttgttattgttgtgcaatgcattccccttttagttgggttcagctcttctttagcctctcattttcttctttgagctcttgatatgaaacattcattgctcctcgcaattctacctcaaacgaagatatgcttgctcgaccacaacaagccatatcacatggtaatatagcattaatttgaatacatgcgcaccagtgaggctgtcgggattttaagttctttatcacaacctcatgagcaatgtttaatatgatatgattattcatacgattttcatgagaacataaaagcatatcatatttatcttgagaagctcgatttcaacttttagctcttctacttggtccttgaccaggtattcctattact

SEQ ID NO: 61589 - DNA, 406 bp, Zea mays
agcttatcaaagaaaaatacacagaattggtgaattggtgaaactgttgtatgctgtattaatggcttccaggaagcttcggcattattttcaagcttaccatataattgttccctcgtcacatcctctgaaggacattatgaggaacagagaagctactggaagggttggaaagtgggctgcggagctcaatgaattcaccattgactacgttcataggtcttcaattcaatcccaggcgctagcagacttcatcgttgactggacgccaggggctcacgaagaagggacaagcaaagataccacagcctggacggtgttctgtgatgagtcttggggaaccctcggtgcaagagcagtcgcggtcttattggcaccttcaaaagtcaaacatgttttgcagtca

SEQ ID NO: 61590 - DNA, 397 bp, Zea mays
  unsure (1)..(397): unsure at all n locations
agcttgtggtaaactcagatactccttttgttttgtatccgggaaggaaatcatatttacctatgatgtangcttcgaggtgatatttctcacatctgcttctctttntatgccctaacatctttccttaatactccctcttgcgtttctgaaaaaaaacatctttcctcttaatataacgtcacacagccctcctgcgtttctgaaaaaagaaacatctttctttaatactcgctctgattcttagtgtagaccatttaggatattgacatggtcttaaatgtgacactttacctgcaattgttctaaaagtattttttgttttctatatatattatggaagtattttccatgttgaatctatcacataaactgcgttgtcaagttactaaacata

SEQ ID NO: 61591 - DNA, 398 bp, Zea mays
agcttctatgcatatatatcggattatttatcttattcaaccctagcgatctatggttctagatttatcttgagctagcagaccggattgccataacgctggtgctcactctgacgtgagcgttactggtgctgattcctgacgggagcggcggaaccaccatccatatgacgacgtttcgcgcgctcagcccgcaataaggcgatcttaacacgagccctactcagctcgtctaatgcatggtccaactccgtgtttagcacagctgctaggttgactgtgctgctcaacctatgattgccctcaccgacatgtgatacaaatacgccttctgtgctgtcacatggactgcgggggtaatactacaggtcaagaccatcagctgtccaccgaaaacc

SEQ ID NO: 61592 - DNA, 391 bp, Zea mays
agctcgtatggttcattacatgagatgatattttctttgtgaatatctgattaagtagtggataagggaacataattacttggtgagctatgaacctttggaataggttaagcgtgttctaattccttggtgggcatagcttataggtgtaacctttagagttcctcatgtttgaaaatcctctgctgtttgattagatttgtgtgcacctttagaagtatgtaatcttgtaatgctttaaagtattttttttgcaaactgcataagcataagcatccatgatcatgtcgtttcatgtagaattccctgaaggagtgaagtaccaacaagaatggatctttggaaaaggagcctactccaacactgttgatccagtggaagggctccatct

SEQ ID NO: 61593 - DNA, 387 bp, Zea mays
  unsure (1)..(387): unsure at all n locations
agcttcaaagggtgccatcttgaagctntcttgatatttattattatatgagaattccgctaacggcaaacattcatcccatttctgtgagaaatccaacacacatgcccgcaacatattttcaagtatttgattaaccctctcagtctgcccactggtttgaggatgataggctgaactgtggaacaatttggtacccaaggacttatgaagttcttcccacaatttggataccaaatgaggcccacgatcccgcactatagtcttcggaacaccgtgcacactgagaatgcgagcaatgtttattccgcatggtgatgacgggatttttactttgaccggaggagtgggcgatttggtaagcggtcatgataacccaatagagtc

SEQ ID NO: 61594 - DNA, 386 bp, Zea mays
agcttgagcgtgcacgtcgtgtttatgtaacttgtgggagaaccctgatgcatttcgcaaaggcaaatggccccgttgtactcagtagtattggtgttttatttgaagctatgtaataatgaacttattattcggtaatatgtattgtcgaacaatgatatttcgtaatgaattaccttcagacgccatgaaaaattacataaatacataattgatgaaaagtacatttaagcaattcttgaatgcgacttgaagcaattgatatagataaccaacacgctaaaagcaattgatacataagagttttctagtagtgctcccacattccaaattgaggtgacccttccccatagtatcctcccattgttggtgtctgctgcgggtgc

SEQ ID NO: 61595 - DNA, 383 bp, Zea mays
  unsure (1)..(383): unsure at all n locations
agcnttgagagaatctttgtcttgtatatgttgctttaaataagacgtaccagatattacctgttttaatttgtatggaccctcctatcttggcgaccattttccaaacattcggtctttgttgcttaaaagcaggatggtcttccacactatgtcccctaattgaaatgactctgctttgaccttctcgttgaangccatggctaccactgatcttgtccttctttattgcttccaaagctatcaccctcttgtcggtcacctcatcaatattatccatcatcgaattataataatcaatgatgggtagatcattttgcttcgcgaacctgttaacatttatacttatcttcacaagctacactgcttcctgcccatataca

SEQ ID NO: 61596 - DNA, 397 bp, Zea mays
  unsure (1)..(397): unsure at all n locations
cagcttctaagggagaacacgtgatagagttttcttttgttcaatatcaanaagatagaccctgtgcagcttgtcaagcaggttaacacgtgggaggagcatatcacaacaagaatgtgatgaccacatcaaggcctctggagctgctacatatggacctcttcggacccgccgtctatctgagcataggagggagtaagtatggtctagttattgtagatgatttttcccgcttcacttgggcgttctttttgcaggataagtctgaaacccaagggaccctcaagcgcttcctcaggagagctcaaaatgagtttgagctcaacgtgaagaagataatgagcgaacacgggtccgagttcaagaaccttcaagtggaggaagtccttgaagacga

SEQ ID NO: 61597 - DNA, 391 bp, Zea mays
  unsure (1)..(391): unsure at all n locations
ctcgccagcttggaatanaacagacaaggccaagaatttattttatctggaaaaaatcaccatataactagcttctgatgaagcaaatgatgataattgcttggcaagaatgaaacaatactggtttccgcctaggtttcatttttaacaacagatattaccgctctcataccaagaaatcatctagactagagaggatacaacaggtctctataagaacttcatatttctatcacaaattatcatcactattagtctagctagtggtcaagacatatgactcttctggcttcgaggaccaaggacatgttaatgtctaattcggcttcaagttctgttgcgatgtgggattccatatttattagtctactcttctcactgctagtagatc

SEQ ID NO: 61598 - DNA, 361 bp, Zea mays
caagctttaaagggagaacagggactaacaaatgttcactttgttaaagacaggatttgtagcgcatgtcacgcagggaagcaagttggtgttcatcatccgcacaagaacattatgacgactgacaggccacttcagctcctacacatggatctattcggcccgatagcttacataagcatcggcgggagtaagtactgtctagttattgtggatgattattctcgcttcacttgcgtgttctttttgtcagaaaaatttctacccaaaaaccttaaggaatcttgagaccggctcaaatgagtcggcttgggatcaaaagattgaacgatacgggacggagtcaagactctcaattgaa

SEQ ID NO: 61599 - DNA, 398 bp, Zea mays
agcttatctttattttggaaaaggggtattttttttatcacaaagggggattcataagataaacatattatatagaatgttgatgagtgcatagtatgtcataagcattacgtttattgtatgacacactgcaccccatgaatagtatgatataaattgtctccatactgtgacccaaatatgtgtttttggcattcgcgtccaaatttggtattttctgaaatgcacatatttaggggaggaaactatatcataggattcaaaatcttatttatcaaatcttatgtaagctttaaatgtgttgtcatcaatcaccaaaaagggggagattgaaagcgcattcatcctttttgtgagtattggtgattcggataacaacacatttaaaggtctaacag

SEQ ID NO: 61600 - DNA, 398 bp, Zea mays
agctatgatacacggattgaacatcgtcatatttctgggcgtcaagagattgatggtatacggagattctctggtagtcatcagctatataaacaaggaatgggattgttcaagcgattcaatgggaaaatactgcgctgccgtccgaaagctggaagataaatttgagggtctggaatttcatcatatagaaagagatcggaacacaacagccgatgtactgtccaagctctgatccagtcgaactcaagtcccacccggagtcttcgaacaagaaattcttcagccgagtatctcaatggatcaaacagaagagtgcaacatcatatatcaacccgagtcagactctgaagactggagaaggctgattattaagtatataaagaatgaagaacaac

SEQ ID NO: 61601 - DNA, 372 bp, Zea mays
ctgcaacttgaattgaagtgggagcgtttgttttcactccaatcccttgctgatactaagctgcacaagggcatacccgctgtttataagcatataaataacactatactgcctctcatgagtatttaggaattacccaactcccatagactgtgaccagctgtccgactcatataggtgtattcctcagaagatggtctgtaagacaacatctcacctttataagactcttggaatacattaaggtaaataccattctatcttacagataagaaagaagtgcatcacaaatgagttaaggaagggatctttttcttacaaactactcctaacttgtttctccactctacttcacggtatctccgatcacat

SEQ ID NO: 61602 - DNA, 394 bp, Zea mays
  unsure (1)..(394): unsure at all n locations
agcttggaccacagacaggctatggcagtacgtgttctccatccacggcagcatcacgtacgcatatggcttcaataacgacactacagctgcatatgcacgcacacgatatatagtccatgtacacaaaatgcatgcacctttcgtcgaatctaaacggtgtgcccagagagcatatataattcctttagaataaaagtatgggtatatatatgagcacatgcatgtaacatatgtgttgggcttatatattacttgggcattgtctaagacgcatggtcccaagacctggagtggaggccggncgggtcttcgcaccgtctcttcacgtgagcatgccccatccacatgtgtttcgcgcgtccatgccatatgtattaattatgatatgatg

SEQ ID NO: 61603 - DNA, 393 bp, Zea mays
  unsure (1)..(393): unsure at all n locations
agcttgtatttgacttagggctngtttgctttatctctttcaaaccagcttttcttagaatctatctgtgtatagaacctaaatatcttggaaattatatgaagaaggagataaacgggtttatagaatttacgatctacaaaatgatggattactattatcactacgactcgaccgattgtatgtttacgctgattttgaacggtttttatcaaagcgattctaacaaaagcaggctgaaaatatgagcatttggtagtctgcagcagcttctggtggtcagaagctgaaaaacagttgaaacaaacggcgcctcaatgctgcatggtaaactaatctctacaaaccttaagaaccggttgaaccatgaatgcatagctgctggcatgtacc

SEQ ID NO: 61604 - DNA, 391 bp, Zea mays
  unsure (1)..(391): unsure at all n locations
agctttaagtgatttgaagttccatgctgaatcattcccaggttcaacttctccatttcatggcagatcgtaatgtcagaaggcttcatggtaaggcaatgacagaaagccttacggcttaacgcatctgccactacattaactttgcctgggtgatagtgaatctctaattcataatcctttattagctcaagccatctcctttgtctcatattaagctctaactaggtaaagatgtactttaagctcttatgatctgtataaatgtgacagacatttcctagcagataatgacgccatattnttagggcatgaaccaccgcagctaactccaggtcatgagttggataatgttcctcatgccgacgcaactgccttgaagcataagcta

SEQ ID NO: 61605 - DNA, 406 bp, Zea mays
  unsure (1)..(406): unsure at all n locations
agcttcttcttcattctgatgaaaaccaagccctttgatcacttcatcaaaacgaatgttccaactccgagatgcttgcttcaacccataaatggatttctgaagtttgcatatctttccagcattgatcggatcgacaaaaccctcgggctgtatcatatacacgtcctcatctaggtttccattaaggaaagctgttntgacatccatctgccaaatctcataatcgaaatatgcggcaatagctataatgatccgaatagatttaagcatcgctactggcgagaatgtctcgtcatagtcaactccttgaacttgtcgaanaccctttgcaacaagtcgagccttatagatgtgaacatttccatccatgtctttcttcttcttatagatccatttgcattct

SEQ ID NO: 61606 - DNA, 396 bp, Zea mays
agcttgcaacctatggtcggacatcaagcttcttagttgtaataccccatccactcccagaccgatcgtacttagtcctggtagccctttatgattatagaccatccccacagaccaacctgagtctttagtgcgtactttgtcctcactcatgcgcatctgagaagatttctcggtcagacacccatcccaaaattgctctaggtgaagcatgcttaacctagaggtcctttcgaggtaggcttccaaaaaagaagatgcatcttgttggtatgagtattctatcaatcctactaaaccttgagctaggatatcatagaatccattagtctaggatatcacattccacccccttagaagatcgacatcctcgtcggtcaaccccaagccaggaac

SEQ ID NO: 61607 - DNA, 382 bp, Zea mays
tagctcgcggaacgcctctatggtgcttacgggcttgttcttcttgtagacgtacttcctgcggagcgggatcaccactagtcacacgaacacgactcccatccactaagaaagggttgcgattggtgaaatcttctattgccacctccatggactctaggctcacttttccgttctcctccgccgcgatggaatggagcggacatgacactaaagcgtcgtctactgtgacataggcgtcctgccaaagcgcggtctttcgggccatgattgcggccttggaagtgctaatggggatgcgatgaaccggaatatccgaggcgctggcaatcttggccgcattgagcactataagttggctcttgcgaggatttccttggat

SEQ ID NO: 61608 - DNA, 387 bp, Zea mays
  unsure (1)..(387): unsure at all n locations
agctttacacggccattaaggtctactcaatatgtttgctcctttgatgtctctgcaaatttacgaagagagttagctcatgaaaagataaaatagcnaacccctagtttgcataatataatagaccgcgaaagggaatttaaaaaaattatgttacctgtgtactgcattctttgcatgcaaaaaagctaggcccaaaagtttttgttaagttaactgcgaatggcctgttcaccaaactgaccatactcttggagaagcttatgtttagatccaccagaaacatactccaggtatatgtaaagcttatcatcaacctgctttcatataatatggagatgtatttcgaataatcacacgatgcttgaggaaaaataactatgtact

SEQ ID NO: 61609 - DNA, 382 bp, Zea mays
agcttataccgagactatatgctaatgtattttttttactgaattctattcccacgcaggttttactccggtttgcatggattgttttgtaacatattatcagccgaatactatttattagatcaataacctctttacttgtcttcattttttcaaacgcgggctgcactttagtttaatacataccttgatcaccattctgcaaaaaatcaatatttaatatcaacagtatgctttactagtctacccaacgacgcttggttcttctactctagttcaggattatactataagcgtttgatggagtgcctcatgctcggatagttatgactctttatacaccatctattagagagacgattaaccgtgcttcaactacata

SEQ ID NO: 61610 - DNA, 398 bp, Zea mays
  unsure (1)..(398): unsure at all n locations
agcttgagccctcttgatcttgatggatgagatacatattctccacaagacaattcacagacacggagccttttgctagcctttacaattgaggaacaccaacacaagagcaagaccacaattctaagaccacaacacaataccacaaagcagatcacacttgctattcacattatcgattgcacccatatttgcaatttgatgcagaaaatgataagaagtagaagcgtgaaaagaggagaagttgatttccgcgtaggcaataatgcaagagttgtcgccttgactatcgggatgatacaactccacctcccatcaggattgattttttgggttaaataatcgtttcctagttnctagtatgagtcaaaatatcttatctccttcgtgtttgatga

SEQ ID NO: 61611 - DNA, 379 bp, Zea mays
gcagcatgcaagctagatgcgtggaaaatcacgacgtttatattttgtctgacttgcgcactacaacaaacgatccgattatgagtagctaccagctaaaatgtttgaccaaatttaagcacaaatgtttttttcaaaaaaaatgcatatgaacatcatatcatacaatcggcgaggaacatcagcaggaacagcatgtctccaagactaaatcaacacaaatcacaaactggagggttggaatgaaaacatccgcctttcaacttgctgcgctgtcatccatccaccttacaggaagactccgccactgtggacgccatcgccaacgctgtctcctctgtcgcaggcttgtaacaaggcttccaccccggcaatgcat

SEQ ID NO: 61612 - DNA, 377 bp, Zea mays
agcttgtgattttaccaattgaaagagacaatttcttcttatgaatttccatgaaatatcctaaacgagattgtgtttgtaacacaagctataagtttcctatttagcaacctctagtgtatgaatgacaagaagggtactaaattaaggaaaccccacgatatgaactaaattacccttacaagcatcatgcataacatcaatttgtaaaaagatgaaagcagcatgattatttaattaaatttacatggcaagcttaattcatagcatgggcagtgattaatgtagaagactcacaacccatctatatgagaatgaccacatcaccatacattggttagatcttctttgaacgttgaatgtccactccatttggg

SEQ ID NO: 61613 - DNA, 356 bp, Zea mays
agcttcggctccatctatattatggatagctttggagtcagtccaaataccttcggcccttcttgcggcttcctgacttccatggatagcaatgggtccctgttccgaaggtatcttcatgcaaagataagcaggatgaaggattgcttctaaagcattaagagtaccacgaccaacaattgcattataaggatattccatgtcaacaatgtcaaacacaacttgctcagttctaatggtgttgatgaatcccaaggtcactgacatggtgatcttgcccaatgctacaatctgtctttctccgaaaccacagagagggtgtgtagcatcatgaatcttatcttctggctcttgca

SEQ ID NO: 61614 - DNA, 391 bp, Zea mays
  unsure (1)..(391): unsure at all n locations
agcttntaaagggagaacacatgtatcgcctttcctatgtacaactcgaaaaagatagaccttgtgcatcttgtccagcatgtaaacacgtgggaggaacacatcacagcaagaatgtgatgaccacttcaaaacctctggagctgttgcatatggacctcttcggacccgtcgcctatcttgagcataggaagaagtaagtatggactagttattggtgatgacttttcccgcttcacttgggtgtactttttgcaggataagtctgaaacccaagggaccctcaagcgcttcctcatgagagctcaaaatgagtttgagctctatgtgaagaagaaaggagcgacaacgggtcctaattcaagaatcttctagtggaggagttccttga

SEQ ID NO: 61615 - DNA, 381 bp, Zea mays
agcttattgatagataggatttcctttatgttttggtgacaatagatgcttttgatgcttatattaacacatctcataattcttatcactacaatgtctctatgcaaacaacaaagatatggacaagtactcttaaagaataacatgcttaaatagtcgaaaagtcgaaatctgtaccttctattgctttaacctctgactaggtgagagcccgtgcgttgcaacggaagtaacaatataactgaaaacggatggaaagcgcacacatcactataatatacaaaatcccgacaagtacatagctttcgttcatagcaagagccatataaagctgatgacaagattatctcaaaaaaatatatcccacctgaacaagaatgc

SEQ ID NO: 61616 - DNA, 406 bp, Zea mays
  unsure (1)..(406): unsure at all n locations
ncagcttcagctncatctatgatatggattgactttgagtctgtcccgtttccttcggcccttctagcagctttctgacttccatgactagaaatgggtcctcggtccgaaggtatctttatgcaaagatatgctggatgaagaattgcttcgaaggcattgagagtaccacgacaaataattgctttgtaagggtattccatgtcaacaatatcgaacacaacttgttcagtccttgtgttgttgataaatccgaaggttactggcattgtaattattccgagtgctacaatctgccttcctccgaagccacaaaggggatgtgtggcatcatggatcttgtcttcgggctcttgcatctgtctgaaagccttagcaaatatgatatcaactgcactgcctgtat

SEQ ID NO: 61617 - DNA, 402 bp, Zea mays
agcttgagcttctttttaaacacccacttacaatcccttgtttacatccatagggtcgatcagcgacttcccacgtaccatttgaaagaatggagtccatctcattatgaactgcttctttccaatcatctgcatctggaaatgcaaatgcttctacaatggtagtaggagtatcgtccacaaggtacacaatgaaaccatcaccagagaatttttcaaccctttgtctcttgctccttttaggagcatcattgtcatcctccttaaggacaatttcatctagttgttcagaactctcaacaggtgtactatgtttaggagttatctcagaagagtatctagagatgctatgaatgtctttcattggaaatatgtgttcaaagaaagtagcatcacgtgatt

SEQ ID NO: 61618 - DNA, 402 bp, Zea mays
agcttaaagccatggtgagtagcataggcaagttatattctaattgactcaagcctagctacgggtgcataagtttcaccaaagtccaaacctttgacttgtgaatatcccttggccacaagacgggctttgttccttgtcaccacaccatgctcatcttgcttgttgcggaaaacccacttgggtcatacaacattttggttaggacgtggaactaaatgccatacctcattcctcgtgaagttgttgagttcctcttgcatttccaacacccaatccgaatctcttagtgcatcctccaccctgtatggctcaatagaggacacataagagttatgttcacataaatgagcaactcgagatcgagttgttaccctcttatggatatcacccagaatggag

SEQ ID NO: 61619 - DNA, 385 bp, Zea mays
agcttgcttatgccatggttcaacggccagatttatcttcatatcgcgcgtatcttggcaaagtcactgtgtacggtcccttctctgctccaaatcctatctttttgctgtgagttccaagtccaaatttggtcggggtatggagatagataggggagaactttgctgtgtcagctatacccgaaccgagaccaaaagggtgtccagccgtgtctaacgccctaagggtagtggcatctcttccagagcggtttaaggttaatatggcgcccccttgtctattgggtcgaaaggtttgaataggcaccagaggaacatgtggcgctttcggccaggttagttttgtcttaagcaaaacctgattccccttgggctcaacttgggg

SEQ ID NO: 61620 - DNA, 372 bp, Zea mays
agcttaaagcaggtgcatgaggcgattatgtttttattactagccaagagcaagtctcagcacttatcccatgttattaacacaaacagtactccctctaagaagaaatactacaatccataactttaatcaccatcatcaagcatcatcataaagggatctagagaacctctaatcaaaggagtttcccaggctgttcataaccgtgagcacaactgatatactagtttctgaccctatgtagaggttgcacactttaaccatgagtcgtgatccctctccagtctgggtttgcaagacccgatcttcactaccgaggtgaatggccagcgattcactacatagttgaacacctcaaaaccatcaactaaa

SEQ ID NO: 61621 - DNA, 357 bp, Zea mays
agcttaaagccatggtaagtagcatatgcaagtcatatgcgaattgactcaagcctagctacgggtgcataagtatcatctgaaatctaaaccttcgacttgagaataacctttggccacaaatcgagctttgttccttgtcaccacaccatgctcatcttgcttgatgcggaatacccacttggtacctacaacattttggttaggacgtggaactaaatgccatacctcattcctagtgaagttgttgagctcctcatgcattgccaacacccaaatcgagtctcttatagcatcctccactctgtatggctcaatagaggacacaacagaagtatgtttccagaaatgagtgac

SEQ ID NO: 61622 - DNA, 375 bp, Zea mays
agcttgcagcataagaaaagagtatagatttcttcatctgcactgaacagatgagcatcttcactgattttcaacacagaccacacagcttctcagattaagaggaaggcataataaaggttttcccaactatataactaactttattgacatagtacgtaaaccaaaatgctggggatacccacactctggggacaatcattactaagatccaaaccaaacatagttcatcatgacaaacataaatgcacaggatatatcaaactaccctgtctaactaaaactaactaaaaccgagactaacgctaagactgaagcttcatgtatatattatttcgaataatcacacgacccactctaacgacctatggttct

SEQ ID NO: 61623 - DNA, 363 bp, Zea mays
agcttcctctgcacgccaaggatacacttaccttgagcgccatggcacaagaagattggctcggcaacagacattataggatccaagcactatattctttatgtccctgggcccacatgtcggggcccaatactttttgtgcatgccccccttcagctataaaaggggaggcatacgacgttacaagtggaagctctcagacctagctgtatgcagacactcataagttaatacaagctcctaagcaatacatcacacagtggagtatggtattacacttcggcggcccgaaccactctaaacccttgcgtgctctcgtgtgttgatccacacaccctgtaacaagcaaaacgcttagcccct

SEQ ID NO: 61624 - DNA, 370 bp, Zea mays
  unsure (1)..(370): unsure at all n locations
agcttagctctccgctactctttgcgatatatgatcctagncctagccttttttatttaatacttggaatagcctcttatattcctttattaaagatattgtaggctaataaggttattcctggtctattataccttgtcacatgatccaaagctaacatgtcatatgcaacacatgatatcgtacacaacttttgacatgttatatgcaacacatggtatcgtagatgttgggaatagtcccacattgcgtgatgaggatatgcacgcatggtttatattattaaaaatgcaaccctctaaaaggctagctttttgtggagtgttaccccaagagacctatagtccactgtttttttagcgggcgcgtg

SEQ ID NO: 61625 - DNA, 279 bp, Zea mays
  unsure (1)..(279): unsure at all n locations
agctatatatggacgacgatgttcttctcctctatactggnctgacccaggtgaatgatacttcttcacgcctgatatggtgaaagagactgaagaaaccgttccgagaatcttttttaatatgaatacagcctccgcttgccaaaagagttatgctgacaaacgggcaattgcctctattttccttgagggagactatgtctacccaaacgtttacccatgaatggtgtatccgttcctgcgttaatagaaatttgaccctggcaattggtccattcc

SEQ ID NO: 61626 - DNA, 362 bp, Zea mays
agcttggattttcttgtgagattacactagatattgtatcttctgatatgaataaacgctcaccaaatggtttgatagaaaaaagttcgtgatcctgtctctgctggttcttaaccaagcttgtggatgaaatactaaccaccatagaaccattatcacattgataatgctactcttgtctttgtctgaaaaattttgacgttaacgaacgctttgattgggaaagtgaaaatgaagatgccgaaaattggtcctgtgggtcgagccataccatcttcggaaaatcatccatcaagcatagtcatattgatgctatgaaaggaaaatattttcgagatatgtccattgtgagaactggaggg

SEQ ID NO: 61627 - DNA, 402 bp, Zea mays
agcttgagttaggttattacagaccagtctatatgtgagtgcataggagtaatattatacaaaccagggaggctaaaactcctcccgagaagacaaaagcaaaagaacctatgtggaggaccgagtcctcccgcacttcaatcttgattttcttcttttggaaccaccttggcacagaagcagcaaaagtctgctacttcctcacctaaaaacaacgaagggataaaccctgagtatggaatactcagcaagtcttacccgactaaagaaaagactctcaagggtatgctggctatatgggagtcaaggtaacgcttttcaatattcaaagactctgtttttgcagaaatgcttactaaagtggatccttaaaaatccagttttatttgtcaagttaagtga
